United States Patent Application Publication US 2020/0163878 A1 - sequence listing, part 42

SEQ ID NO: 158656 - RNA, 1575 nt, Artificial Sequence
  derived and/or modified CDS sequence (opt3) from glycoprotein__RABV__AB563852.1
augaacccccaggcccugauguucgugccucuccuugucuuuagccugugcuucggcaaguuuccaaucuacaccauuccggacaaauuggggcccugguccccuauagauauccaccauuuaucuuguccaaauaaccugguuguggaggacgaaggaugcacaaaucuaucagguuucaguuauauggagcucaagguaggcuacauuagcgcuaucaaagugaacggguuuacuuguacgggagucgugaccgaagcagagacauauacuaauuucguuggcuacgugaccacaaccuuuaagagaaaacacuucaggcccacuccugaugccugccgggcggcuuauaacuggaagauggccggugacccacgcuacgaagagucccugcauaaucccuauccugauuaccacuggcuucgaacagucaagaccacgaaagagucucuggugauuaucucgccaucaguagcagacuuggauccguacgacaagagccuccauagucguguuuuucccuccgggaaauguucuggaauaacugugagcuccaccuauugcucaacaaaccacgauuacacuaucuggaugccugaaaauccaagacugggcaccaguugugacacauucaccaacagcaggggcaagcgggccucuaaaggguccaagacgugcggauuugucgaugagcgcggucuguauaagucacucaaaggcgcuuguaaguuaaaacugugcggggugcuuggauugagacugauggacggcacuugggcagccauucaaacaagcgaugaaaccaaguggugucccccugaccagcuagugaaucuccacgacuucaggagugaugagaucgagcaucuggucguugaggaacuugugaaaaagcgggaagagugccuggacgcuuuggaaucuauuaugacuacaaaauccgugagcuuucgccgacucucgcaccugagaaaguuaguaccagguuucgggaaggccuacaccaucuucaacaaaacgcugauggaggcggaugcacauuauaagucugucaggaccuggaaugagauaauucccuccaaaggaugccuccgggugggcggccguugucacccgcacguuaacgggguguuuuucaauggaaucauucuugguccugacggccauguccugauccccgaaaugcagucaaguuugcuacagcaacacauggagcugcucgaaagcuccgugaucccacugaugcauccucuugccgaucccucuacaguauuuaaggacgaugacgaggcugaagauuucguugaggugcaccuuccagacguccauaaacaggugagcggggucgauuugggacuccccucauggggcaaguacgugcugaugagugccgguguuuuaacugcacugaugcuaaugauuuuucucaugaccugcugucgcagagcuaacagggccgaguccgcgcagcacagccugggggaacggggccgaaaggugucuguaacaucacagaguggacgcgucauaagcuccugggagucuuauaaaucgggcggggaaacuaagcuguga

SEQ ID NO: 158657 - RNA, 1575 nt, Artificial Sequence
  derived and/or modified CDS sequence (opt3) from glycoprotein__RABV__AB563854.1
augaucccccaggcccugauguucgugccucuccuugucuuuagccugugcuucggcaaguuuccaauuuacaccauaccggacaaauuggggcccugguccccuaucgauauucaccauuuaucuuguccaaacaaucugguuguggaggacgaaggaugcacaaaccuaucagguuucaguuauauggagcucaagguaggcuacaucagcgcuauuaaagugaauggguuuacuuguacgggagucgugaccgaagcagagacauauacuaacuucguuggcuacgugaccacaaccuuuaagagaaaacacuucaggcccacuccugaugccugccgggcggcuuauaauuggaagauggccggugacccacgcuacgaagagucccugcauaaccccuauccugauuaccacuggcuucgaacagucaagaccacgaaagagucucuggugaucauaucgccaucaguagcagacuuggauccguacgacaagagccuccauagucguguuuuucccuccgggaaauguucuggaaucacugugagcuccaccuauugcucaacaaaucacgauuacacuauuuggaugccugaaaacccaagacugggcaccaguugugacaucuucacaaauagcaggggcaagcgggccucuaaaggguccaagaccugcggauuugucgaugagcgcggucuguauaagucacucaaaggcgcuuguaaguuaaaacugugcggggugcuuggauugagacugauggacggcacgugggcagccauucaaacuagcgaugaaacaaaguggugucccccugaccagcuagugaaccuccacgacuucaggagugaugagaucgagcaucuggucguugaggaacuugugaaaaagcgggaagagugccuggacgcuuuggaaucuauaaugaccacuaaauccgugagcuuucgccgacucucgcaccugagaaaguuaguaccagguuucgggaaggccuacacaauuuucaauaaaacccugauggaggcggaugcacauuauaagucugucaggacguggaacgagaucauucccuccaaaggaugccuccgggugggcggccguugucacccgcacguuaaugggguguuuuucaacggaaucauccuugguccugacggccauguccugauucccgaaaugcagucaaguuugcuacagcaacacauggagcugcucgaaagcuccgugauaccacugaugcauccucuugccgaucccucuaccguauuuaaggacgaugacgaggcugaagauuucguugaggugcaccuuccagacguccauaaacaggugagcggggucgauuugggacuccccucauggggcaaguacgugcugaugagugccgguguuuuaacagcacugaugcuaaugaucuuucucaugacuugcugucgcagagcuaauagggccgaguccgcgcagcacagccugggggaacggggccgaaaggugucuguaaccucacagaguggacgcgucauuagcuccugggagucuuauaaaucgggcggggaaacaaagcuguga

SEQ ID NO: 158658 - RNA, 1575 nt, Artificial Sequence; identical to SEQ ID NO: 158649
  derived and/or modified CDS sequence (opt3) from glycoprotein__RABV__AB563855.1

SEQ ID NO: 158659 - RNA, 1575 nt, Artificial Sequence; identical to SEQ ID NO: 158649
  derived and/or modified CDS sequence (opt3) from glycoprotein__RABV__AB563856.1

SEQ ID NO: 158660 - RNA, 1575 nt, Artificial Sequence
  derived and/or modified CDS sequence (opt3) from glycoprotein__RABV__AB563857.1
augaacccccaggcccugauguucgugccucuccuugucuuuagccugugcuucggcaaguuuccaaucuacaccauuccggacaaauuggggcccugguccccuauagauauccaccauuuaucuuguccaaauaaccugguuguggaggacgaaggaugcacaaaucuaucagguuucaguuauauggagcucaagguaggcuacauuagcgcuaucaaagugaacggguuuacuuguacgggagucgugaccgaagcagagacauauacuaauuucguuggcuacgugaccacaaccuuuaagagaaaacacuucaggcccacuccugaugccugccgggcggcuuauaacuggaagauggccggugacccacgcuacgaagagucccugcauaaucccuauccugauuaccacuggcuucgaacagucaagaccacgaaagagucucuggugauuaucucgccaucaguagcagacuuggauccguacgacaagagccuccauagucguguuuuucccuccgggaaauguucuggaauaacugugagcuccaccuauugcucaacaaaccacgauuacacuaucuggaugccugaaaauccaagacugggcaccaguugugacauucugacaaacagcaggggcaagcgggccucuaaaggguccaagaccugcggauucgucgaugagcgcggucucuauaagucauuaaaaggcgcuuguaagcugaaacuuugcgggguguugggacugagacuaauggacggcacgugggcagccauccaaacuagcgaugaaacaaaguggugucccccugaccagcucgugaaucugcacgacuuuaggagugaugagauugagcaucuugucguugaggaacuggugaaaaagcgggaagagugcuuggacgcucucgaaucuaucaugaccacuaaauccgugagcuuccgccgacugucgcacuuaagaaagcugguaccagguuuugggaaggccuacacaauauucaacaaaacccucauggaggcggaugcacauuauaagucugucaggacguggaaugagauuauccccuccaaaggaugccuucgggugggcggccguugucacccgcacguuaacgggguguucuuuaauggaauuauccuggguccugacggccaugucuugauccccgaaaugcagucaagucuacugcagcaacacauggagcuccuggaaagcuccgugauuccacuuaugcauccucuggccgaucccucuaccguauucaaggacgaugacgaggcugaagauuuuguugaggugcacuugccagacguccauaaacaggugagcggggucgaucucggacugcccucauggggcaaguacguguuaaugagugccgguguucugacagcacuaaugcucaugauauuccugaugacuugcugucgcagagcuaacagggccgaguccgcgcagcacagccuuggggaacggggccgaaaggugucuguaaccucacagaguggacgcgucaucagcuccugggagucuuauaaaucgggcggggaaacaaaguuguga

SEQ ID NO: 158661 - RNA, 1575 nt, Artificial Sequence; identical to SEQ ID NO: 158620
  derived and/or modified CDS sequence (opt3) from glycoprotein__RABV__AB563860.2

SEQ ID NO: 158662 - RNA, 1575 nt, Artificial Sequence; identical to SEQ ID NO: 158620
  derived and/or modified CDS sequence (opt3) from glycoprotein__RABV__AB563861.1

SEQ ID NO: 158663 - RNA, 1575 nt, Artificial Sequence
  derived and/or modified CDS sequence (opt3) from glycoprotein__RABV__AB563862.1
augaucccccaggcccuccuguucgugccucuucuggucuuuagcuugugcuucggcaaguuuccaauuuacaccauaccggacaaauuagggcccugguccccuaucgauauucaccaucugucuuguccaaacaaucuaguuguggaggacgaaggaugcacaaaccucucagguuucaguuauauggagcugaagguaggcuacaucagcgcuauuaaagugaauggguuuacuuguacgggagucgugaccgaagcagagacauauacuaacuucguuggcuacgugaccacaaccuuuaagagaaaacacuucaggcccacuccugaugccugccgggcggcuuauaauuggaagauguccggugacccacgcuacgaagagucucuucauaaccccuauccugauuaccacuggcugcgaacagucaagaccacgaaagagucguuggugaucauaucaccaagcguagccgaccucgauccguacgacaagagucugcauucccguguuuuucccucugggaaauguagcggaaucacuguguccucaaccuauugcaguacaaaucacgauuacacuauuuggaugccugaaaacccaagacugggcaccagcugugacaucuucacaaauucuaggggcaagcgggcauccaaagggucaaagaccugcggauuugucgaugagcgcggucucuauaagagcuuaaaaggcgccuguaagcugaaacuuugcgggguguugggacugagacuaauggacggcacgugggcugcaauucaaacaagugaugaaacuaaguggugucccccugaccagcucgugaaccugcacgacuucaggucugaugagaucgagcaucuugucguugaggaacuggugaaaaagcgggaagagugcuuggacgcccucgaauccauaaugaccacuaaaagcguaucguuucgccgacugucucacuuaagaaagcuggugccagguuucgggaaggcuuacacaauuuucaauaaaacccucauggaggccgaugcgcauuauaaguccgucaggacguggaacgagaucauucccucaaaaggaugccuucgggugggcggccguugucacccgcacguuaaugggguguuuuucaacggaaucauccuggguccugacggccaugucuugauucccgaaaugcagaguagccuacugcagcaacacauggagcuccuggaauccucugugauaccacuuaugcauccucuggcagaucccagcaccguauuuaaggacgaugacgaggccgaagauuucguugaggugcacuugccagacguccauaaacaggugucaggggucgaucucggacugcccaguuggggcaaguacguguuaauguccgcugguguucugacagcccuaaugcucaugaucuuucugaugacuugcugucgcagagcaaauaggaccgagagcgcucagcacucucuuggggaacggggccgaaaggugucaguaacaagucagagcggacgcgucauuuccucuugggagucguauaaaagcggcggggaaacuaaguuguga

SEQ ID NO: 158664 - RNA, 1575 nt, Artificial Sequence
  derived and/or modified CDS sequence (opt3) from glycoprotein__RABV__AB563863.1
augaucccccaggcccuccuguucgugccucuucuggucuuuagcuugugcuucggcaaguuuccaauuuacaccauaccggacaaauuagggcccugguccccuaucgauauucaccaucugucuuguccaaacaaucuaguuguggaggacgaaggaugcacaaaccucucagguuucaguuauauggagcugaagguaggcuacaucagcgcuauuaaagugaauggguuuacuuguacgggagucgugaccgaagcagagacauauacuaacuucguuggcuacgugaccacaaccuuuaagagaaaacacuucaggcccacuccugaugccugccgggcggcuuauaauuggaagauggccggugacccacgcuacgaagagucccuucauaaccccuauccugauuaccacuggcugcgaacagucaagaccacgaaagagucuuuggugaucauaucgccaucaguagcagaccucgauccguacgacaagagccugcauagucguguuuuucccuccgggaaauguucuggaaucacugugagcuccaccuauugcucaacaaaucacgauuacacuauuuggaugccugaaaacccaagacugggcaccaguugugacaucuucacaaauagcaggggcaagcgggccucuaaaggguccaagaccugcggauuugucgaugagcgcggucucuauaagucauuaaaaggcgcuuguaagcugaaacuuugcgggguguugggacugagacuaauggacggcacgugggcagccauucaaacuagcgaugaaacaaaguggugucccccugaccagcucgugaaccugcacgacuucaggagugaugagaucgagcaucuugucguugaggaacuggugaaaaagcgggaagagugcuuggacgcucucgaaucuauaaugaccacuaaauccgugagcuuucgccgacugucgcacuuaagaaagcugguaccagguuucgggaaggccuacacaauuuucaauaaaacccucauggaggcggaugcacauuauaagucugucaggacguggaacgagaucauucccuccaaaggaugccuucgggugggcggccguugucacccgcacguuaaugggguguuuuucaacggaaucauccuggguccugacggccaugucuugauucccgaaaugcagucaagucuacugcagcaacacauggagcuccuggaaagcuccgugauaccacuuaugcauccucuggccgaucccucuaccguauuuaaggacgaugacgaggcugaagauuucguugaggugcacuugccagacguccauaaacaggugagcggggucgaucucggacugcccucauggggcaaguacguguuaaugagugccgguguucugacagcacuaaugcucaugaucuuucugaugacuugcugucgcagagcuaauagggccgaguccgcgcagcacagccuuggggaaaagggccggaaagugucuguaaccucacagaguggacgagucauuagcuccugggagucuuauaagucgggcggggaaacaaaauuguga

SEQ ID NO: 158665 - RNA, 1575 nt, Artificial Sequence
  derived and/or modified CDS sequence (opt3) from glycoprotein__RABV__AB563864.1
augaucccccaggcccuccuguucgugccucuucuggucuuuagcuugugcuucggcaaguuuccaauuuacaccauaccggacaaauuagggcccugguccccuaucgauauucaccaucugucuuguccaaacaaucuaguuguggaggacgaaggaugcacaaaccucucagguuucaguuauauggagcugaagguaggcuacaucagcgcuauuaaagugaauggguuuacuuguacgggagucgugaccgaagcagagacauauacuaacuucguuggcuacgugaccacaaccuuuaagagaaaacacuucaggcccacuccugaugccugccgggcggcuuauaauuggaagauggccggugacccacgcuacgaagagucccuucauaaccccuauccugauuaccacuggcugcgaacagucaagaccacgaaagagucuuuggugaucauaucgccaucaguagcagaccucgauccguacgacaagagccugcauagucguguuuuucccuccgggaaauguucuggaaucacugugagcuccaccuauugcucaacaaaucacgauuacacuauuuggaugccugaaaacccaagacugggcaccaguugugacaucuucacaaauagcaggggcaagcgggccucuaaaggguccaagaccugcggauuugucgaugagcgcggucucuauaagucauuaaaaggcgcuuguaagcugaaacuuugcgggguguugggacugagacuaauugacggcacgugggcagccauccaaacuagcgaugaaacaaaguggugucccccugaccagcucgugaaccugcacgacuucaggagugaugagauagagcaucuugucguugaggaacuggugaaaaagcgggaagagugcuuggacgcucucgaaucuauuaugaccacuaaauccgugagcuuucgccgacugucgcacuuaagaaagcugguaccagguuucgggaaggccuacacaaucuucaauaaaacccucauggaggcggaugcacauuauaagucugucaggacguggaacgagauuauccccuccaaaggaugccuucgggugggcggccguugucacccgcacguuaaugggguguuuuucaacggaaucauucuggguccugacggccaugucuugauacccgaaaugcagucaagucuacugcagcaacacauggagcuccuggaaagcuccgugaucccacuuaugcauccucuggccgaucccucuaccguauuuaaggacgaugacgaggcugaagauuucguugaggugcacuugccagacguccauaaacaggugagcggggucgaucucggacugcccucauggggcaaguacguguuaaugagugccgguguucugacagcacuaaugcucaugauuuuucugacuaccugcugucgcagagcuaauagggccgaguccgcgcagcacagccuuggggaacggggccgaaaggugucugccacaucacagaguggacgcguaaucagcuccugggagucuuauaaaucgggcggggaaacuaaguuguga

SEQ ID NO: 158666 - RNA, 1575 nt, Artificial Sequence
  derived and/or modified CDS sequence (opt3) from glycoprotein__RABV__AB563865.1
augaucccccaggcccuccuguucgugccucuucuggucuuuagcuugugcuucggcaaguuuccaauuuacaccauaccggacaaauuagggcccugguccccuaucgauauucaccaucugucuuguccaaacaaucuaguuguggaggacgaaggaugcacaaaccucucagguuucaguuauauggagcugaagguaggcuacaucagcgcuauuaaaguguccggguuuacuuguacgggagucgugaccgaagcagagacauauacuaauuucguuggcuacgugaccacaaccuuuaagagaaaacacuucaggcccacuccugaugccugccgggcggcuuauaacuggaagauggccggugacccacgcuacgaagagucucuucauaaucccuauccugauuaccacuggcugcgaacagucaagaccacgaaagagucguuggugaucauaucaccaagcguagcagaccucgauccguacgacaagagucugcauucccguguuuuucccucugggaaauguagcggaaucacuguguccucaaccuauugcaguacaaaccacgauuacacuauuuggaugccugaaaauccaagacugggcaccagcugugacaucuucacaaacucuaggggcaagcgggccuccaaagggucaaagaccugcggauuugucgaugagcgcggucucuauaagagcuuaaaaggcgcuuguaagcugaaacuuugcgggguguugggacugagacuaauggacggcacgugggcagccauucaaacaagugaugaaacuaaguggugucccccugaccagcucgugaaucugcacgacuucaggucugaugagaucgagcaucuugucguugaggaacuggugaaaaagcgggaagagugcuuggacgcucucgaauccauaaugaccacuaaaagcguaucguuucgccgacugucucacuuaagaaagcuggugccagguuucgggaaggccuacacaauuuucaacaaaacccucauggaggcggaugcacauuauaaguccgucaggacguggaaugagaucauucccucaaaaggaugccuucgggugggcggccguugucacccgcacguuaacgggguguuuuucaauggaaucauccuggguccugacggccaugucuugauucccgaaaugcagaguagccuacugcagcaacacauggagcuccuggaauccucugugauaccacuuaugcauccucuggccgaucccagcaccguauuuaaggacgaugacgaggcugaagauuucguugaggugcacuugccagacguccauaaacaggugucaggggucgaucucggacugcccaguuggggcaaguacguguuaauguccgccggugcacugacagcucuaaugcucaugaucuuucugaugacuugcugucgcagagccaacagggcggagagcgcccagcacucucuuggggaaggcggacggaagguuucagugaccagucagagcggccgaguaauuuccucuugggagucguauaaaagcgggggagaaacaaaguuguga

SEQ ID NO: 158667 - RNA, 1575 nt, Artificial Sequence
  derived and/or modified CDS sequence (opt3) from glycoprotein__RABV__AB563867.1
augaucccccaggcccuccuguucgugccucuucuggucuuuagcuugugcuucggcaaguuuccaauuuacaccauaccggacaaauuagggcccugguccccuaucgauauucaccaucugucuuguccaaacaaucuaguuguggaggacgaaggaugcacaaaccucucagguuucaguuauauggagcugaagguaggcuacaucagcgcuauuaaaguguccggguuuacuuguacgggagucgugaccgaagcagagacauauacuaauuucguuggcuacgugaccacaaccuuuaagagaaaacacuucaggcccacuccugaugccugccgggcggcuuauaacuggaagauggccggugacccacgcuacgaagagucucuucauaaucccuauccugauuaccacuggcugcgaacagucaagaccacgaaagagucguuggugaucauaucaccaagcguagcagaccucgauccguacgacaagagucugcauucccguguuuuucccucugggaaauguagcggaaucacuguguccucaaccuauugcaguacaaaccacgauuacacuauuuggaugccugaaaauccaagacugggcaccagcugugacaucuucacaaacucuaggggcaagcgggccuccaaagggucaaagaccugcggauuugucgaugagcgcggucucuauaagagcuuaaaaggcgcuuguaagcugaaacuuugcgggguguugggacugagacuaauggacggcacgugggcagccauucaaacaagugaugaaacuaaguggugucccccugaccagcucgugaaucugcacgacuucaggucugaugagaucgagcaucuugucguugaggaacuggugaaaaagcgggaagagugcuuggacgcucucgaauccauaaugaccacuaaaagcguaucguuucgccgacugucucacuuaagaaagcuggugccagguuucgggaaggccuacacaauuuucaacaaaacccucauggaggcggaugcacauuauaaguccgucaggacguggaaugagaucauucccucaaaaggaugccuucgggugggcggccguugucacccgcacguuaacgggguguuuuucaauggaaucauccuggguccugacggccaugucuugauucccgaaaugcagaguagccuacugcagcaacacauggagcuccuggaauccucugugauaccacuuaugcauccucuggccgaucccagcaccguauuuaaggacgaugacgaggcugaagauuucguugaggugcacuugccagacguccauaaacaggugucaggggucgaucucggacugcccaguuggggcaaguacguguuaauguccgccggugcacugacagcucuaaugcucaugaucuuucugaugacuugcugucgcaaggccaacagagcggagagcgcccagcacucucuuggggaaggcggaaggaaaguuucagugaccagucagagcggccggguaauuuccucuugggagucguauaagagcgggggagaaacaaaauuguga

SEQ ID NO: 158668 - RNA, 1575 nt, Artificial Sequence
  derived and/or modified CDS sequence (opt3) from glycoprotein__RABV__AB563870.1
augaucccccaggcccuccuguucgugccucuucuggucuuuagcuugugcuucggcaaguuuccaauuuacaccauaccggacaaauuagggcccugguccccuaucgauauucaccaucugucuuguccaaacaaucuaguuguggaggacgaaggaugcacaaaccucucagguuucaguuauauggagcugaagguaggcuacaucagcgcuauuaaagugaauggguuuacuuguacgggagucgugaccgaagcagagacauauacuaacuucguuggcuacgugaccacaaccuuuaagagaaaacacuucaggcccacuccugaugccugccgggcggcuuauaauuggaagauggccggugacccacgcuacgaagagucccuucauaaccccuauccugauuaccacuggcugcgaacagucaagaccacgaaagagucuuuggugaucauaucgccaucaguagcagaccucgauccguacgacaagagccugcauagucguguuuuucccuccgggaaauguucuggaaucacugugagcuccaccuauugcucaacaaaucacgauuacacuauuuggaugccugaaaacccaagacugggcaccaguugugacaucuucacaaauagcaggggcaagcgggccucuaaaggguccaagaccugcggauuugucgaugagcgcggucucuauaagucauuaaaaggcgcuuguaagcugaaacuuugcgggguguugggacugagacuaauggacggcacgugggcagccauucaaacuagcgaugaaacaaaguggugucccccugaccagcucgugaaccugcacgacuucaggagugaugagaucgagcaucuugucguugaggaacuggugaaaaagcgggaagagugcuuggacgcucucgaaucuauaaugaccacuaaauccgugagcuuucgccgacugucgcacuuaagaaagcugguaccagguuucgggaaggccuacacaauuuucaauaaaacccucauggaggcggaugcacauuauaagucugucaggacguggaacgagaucauucccuccaaaggaugccuucgggugggcggccguugucacccgcacguuaaugggguguuuuucaacggaaucauccuggguccugacggccaugucuugauucccgaaaugcagucaagucuacugcagcaacacauggagcuccuggaaagcuccgugauaccacuuaugcauccucuggccgaucccucuaccguauuuaaggacgaugacgaggcugaagauuucguugaggugcacuugccagacguccauaaacaggugagcggggucgaucucggacugcccucauggggcaaguacguguuaaugagugccgguguucugacagcacuaaugcucacuaucuuucugauuaccugcugucgcagagcuaauagggccgaguccgcgcagcacagccuuggggaacggggccgaaaggugucuguaacaucacagaguggacgcgucaucagcuccugggagucuuauaaaucgggcggggaaacuaaguuguga

SEQ ID NO: 158669 - RNA, 1575 nt, Artificial Sequence; identical to SEQ ID NO: 158649
  derived and/or modified CDS sequence (opt3) from glycoprotein__RABV__AB563871.1

SEQ ID NO: 158670 - RNA, 1575 nt, Artificial Sequence; identical to SEQ ID NO: 158649
  derived and/or modified CDS sequence (opt3) from glycoprotein__RABV__AB563873.1

SEQ ID NO: 158671 - RNA, 1575 nt, Artificial Sequence
  derived and/or modified CDS sequence (opt3) from glycoprotein__RABV__AB563874.1
augaacccccaggcccugauguucgugccucuccuugucuuuagccugugcuucggcaaguuuccaaucuacaccauuccggacaaauuggggcccugguccccuauagauauccaccauuuaucuuguccaaauaaccugguuguggaggacgaaggaugcacaaaucuaucagguuucaguuauauggagcucaagguaggcuacauuagcgcuaucaaagugaacggguuuacuuguacgggagucgugaccgaagcagagacauauacuaauuucguuggcuacgugaccacaaccuuuaagagaaaacacuucaggcccacuccugaugccugccgggcggcuuauaacuggaagauggccggugacccacgcuacgaagagucccugcauaaucccuauccugauuaccacuggcuucgaacagucaagaccacgaaagagucucuggugauuaucucgccaucaguagcagacuuggauccguacgacaagagccuccauagucguguuuuucccuccgggaaauguucuggaauaacugugagcuccaccuauugcucaacaaaccacgauuacacuaucuggaugccugaaaauccaagacugggcaccaguugugacauuuucacaaacagcaggggcaagcgggccucuaaaggguccaagaccugcggauuugucgaugagcgcggucuguauaagucacucaaaggcgcuuguaaguuaaaacugugcggggugcuuggauugagacugauggacggcacgugggcagccauccaaacuagcgaugaaacaaaguggugucccccugaccagcuagugaaucuccacgacuucaggagugaugagauugagcaucuggucguugaggaacuugugaaaaagcgggaagagugccuggacgcuuuggaaucuaucaugaccacuaaauccgugagcuuucgccgacucucgcaccugagaaaguuaguaccagguuucgggaaggccuacacaauauucaacaaaacccugauggaggcggaugcacauuauaagucugucaggacguggaaugagauuauccccuccaaaggaugccuccgggugggcggccguugucacccgcacguuaacgggguguuuuucaauggaauuauccuugguccugacggccauguccugauccccgaaaugcagucaaguuugcuacagcaacacauggagcugcucgaaagcuccgugauuccacugaugcauccucuugccgaucccucuaccguauuuaaggacgaugacgaggcugaagauuucguugaggugcaccuuccagacguccauaaacaggugagcggggucgauuugggacucucaaguuggggcaaguacgugcugauguccgccgguguuuuaacagcacugaugcuaaugauauuucucaugacuugcugucgcagagcuaacagggccgagagcgcgcagcacucucugggggaacggggccgaaaggugucaguaaccagucagagcggacgcgucaucuccucuugggagucguauaaaagcggcggggaaacaaagcuguga

SEQ ID NO: 158672 - RNA, 1575 nt, Artificial Sequence
  derived and/or modified CDS sequence (opt3) from glycoprotein__RABV__AB563875.1
augaacccccaggcccugauguucgugccucuccuugucuuuagccugugcuucggcaaguuuccaaucuacaccauuccggacaaauuggggcccugguccccuauagauauccaccauuuaucuuguccaaauaaccugguuguggaggacgaaggaugcacaaaucuaucagguuucaguuauauggagcucaagguaggcuacauuagcgcuaucaaagugaacggguuuacuuguacgggagucgugaccgaagcagagacauauacuaauuucguuggcuacgugaccacaaccuuuaagagaaaacacuucaggcccacuccugaugccugccgggcggcuuauaacuggaagauggccggugacccacgcuacgaagagucccugcauaaucccuauccugauuaccacuggcuucgaacagucaagaccacgaaagagucucuggugauuaucucgccaucaguagcagacuuggauccguacgacaagagccuccauagucguguuuuucccuccgggaaauguucuggaauaacugugagcuccaccuauugcucaacaaaccacgauuacacuaucuggaugccugaaaauccaagacugggcaccaguugugacauuuucacaaacagcaggggcaagcgggccucuaaaggguccaagaccugcggauuugucgaugagcgcggucuguauaagucacucaaaggcgcuuguaaguuaaaacugugcggggugcuuggauugagacugauggacggcacgugggcagccauccaaacuagcgaugaaacaaaguggugucccccugaccagcuagugaaucuccacgacuucaggagugaugagauugagcaucuggucguugaggaacuugugaaaaagcgggaagagugccuggacgcuuuggaaucuaucaugaccacuaaauccgugagcuuucgccgacucucgcaccugagaaaguuaguaccagguuucgggaaggccuacacaauauucaacaaaacccugauggaggcggaugcacauuauaagucugucaggacguggaaugagauuauccccuccaaaggaugccuccgggugggcggccguugucacccgcacguuaacgggguguuuuucaauggaauuauccuugguccugacggccauguccugauccccgaaaugcagucaaguuugcuacagcaacacauggagcugcucgaaagcuccgugauuccacugaugcauccucuugccgaucccucuaccguauuuaaggacgaugacgaggcugaagauuucguugaggugcaccuuccagacguccauaaacaggugagcggggucgauuugggacuccccucauggggcaaguacgugcugaugagugccgguguuuuaacagcacugaugcuaaugauauuucucaugacuugcugucgcagagcuaacagggccgaguccgcgcagcacagccugggggaacggcgacgcaaggugucuguaaccucacagaguggcagagucaucagcuccugggagucuuauaaaucgggaggcgaaacaaagcuguga

SEQ ID NO: 158673 - RNA, 1575 nt, Artificial Sequence
  derived and/or modified CDS sequence (opt3) from glycoprotein__RABV__AB563878.1
augaucccccaggcccuccuguucgugccucuucuggucuuuagcuugugcuucggcaaguuuccaauuuacaccauaccggacaaauuagggcccugguccccuaucgauauucaccaucugucuuguccaaacaaucuaguuguggaggacgaaggaugcacaaaccucucagguuucaguuauauggagcugaagguaggcuacaucagcgcuauuaaagugaauggguuuacuuguacgggagucgugaccgaagcagagacauauacuaacuucguuggcuacgugaccacaaccuuuaagagaaaacacuucaggcccacuccugaugccugccgggcggcuuauaauuggaagauggccggugacccacgcuacgaagagucccuucauaaccccuauccugauuaccacuggcugcgaacagucaagaccacgaaagagucuuuggugaucauaucgccaucaguagcagaccucgauccguacgacaagagccugcauagucguguuuuucccuccgggaaauguucuggaaucacugugagcuccaccuauugcucaacaaaucacgauuacacuauuuggaugccugaaaacccaagacugggcaccaguugugacaucuucacaaauagcaggggcaagcgggccucuaaaggguccaagaccugcggauuugucgaugagcgcggucucuauaagucauuaaaaggcgcuuguaagcugaaacuuugcgggguguugggacugagacuaauggacggcacgugggcagccauucaaacuagcgaugaaacaaaguggugucccccugaccagcucgugaaccugcacgacuucaggagugaugagaucgagcaucuugucguugaggaacuggugaaaaagcgggaagagugcuuggacgcucucgaaucuauaaugaccacuaaauccgugagcuuucgccgacugucgcacuuaagaaagcugguaccagguuucgggaaggccuacacaauuuucaauaaaacccucauggaggcggaugcacauuauaagucugucaggacguggaacgagaucauucccuccaaaggaugccuucgggugggcggccguugucacccgcacguuaaugggguguuuuucaacggaaucauccuggguccugacggccaugucuugauucccgaaaugcagucaagucuacugcagcaacacauggagcuccuggaaagcuccgugauaccacuuaugcauccucuggccgaucccucuaccguauuuaaggacgaugacgaggcugaagauuucguugaggugcacuugccagacguccauaaacaggugagcggggucgaucucggacugcccucauggggcaaguacguguuaaugagugccgguguucugacagcacuaaugcucaugaucuuucugacuaccugcugucgcagagcuaauagggccgaguccgcgcagcacagccuuggggaaaagggccggaaagugucuguaacaucacagaguggacgagucauuagcuccugggagucuuauaagucgggcggggaaacuaaauuguga

SEQ ID NO: 158674 - RNA, 1575 nt, Artificial Sequence; identical to SEQ ID NO: 158620
  derived and/or modified CDS sequence (opt3) from glycoprotein__RABV__AB563879.1

SEQ ID NO: 158675 - RNA, 1575 nt, Artificial Sequence
  derived and/or modified CDS sequence (opt3) from glycoprotein__RABV__AB563881.1
augaucccccaggcccuucucuucgugccucuucuggucuuuagcuugugcuucggcaaguuuccaauuuacaccauaccggacaaauuagggcccugguccccuaucgauauucaccaucugucuuguccaaacaaucuaguuguggaggacgaaggaugcacaaaccucucagguuucaguuaucuggagcuuaagguaggcuacaucagcgcuauuaaagugaauggguuuacuuguacgggagucgugaccgaagcagagacauauacuaacuucguuggcuacgugaccacaaccuuuaagagaaaacacuucaggcccacuccugaugccugccgggcggcuuauaauuggaagauggccggugacccacgcuacgaagagucccugcauaaccccuauccugauuaccacugguugcgaacagucaagaccacgaaagagucucucgugaucauaucgccaucaguagcagaccuggauccguacgacaagagccugcauagucguguuuuucccuccgggaaauguucuggaaucacugugagcuccaccuauugcucaacaaaucacgauuacacuauuuggaugccugaaaacccaagacucggcaccaguugugacaucuucacaaauagcaggggcaagcgggccucuaaaggguccaagaccugcggauuugucgaugagcgcgguuuauauaagucacugaaaggcgcuuguaagcugaaauugugcggggugcugggacuaagacucauggacggcacgugggcagccauucaaacuagcgaugaaacaaaguggugucccccugaccagcuggugaaccuucacgacuucaggagugaugagaucgagcaucuggucguugaagaguuggugaaaaagcgggaagagugccucgacgcucuggaaucuauaaugaccacuaaauccgugagcuuucgccgauuaucgcaccugagaaagcucguaccagguuucgggaaggccuacacaauuuucaauaaaacccuuauggaggcggaugcacauuauaagucugucaggacguggaacgagaucauucccuccaaaggaugccugcgggugggcggccguugucacccgcacguuaaugggguguuuuucaacggaaucaucuuggguccugacggccauguccuaauucccgaaaugcagucaagucugcuccagcaacacauggagcugcuugaaagcuccgugauaccacugaugcauccuuuggccgaucccucuaccguauuuaaggacgaugacgaggcugaagauuucguugaggugcaccucccagacguccauaaacaggugagcggggucgaucugggauuacccucauggggcaaguacgugcugaugagugccgguguucuaacagcacucaugcugaugaucuuucuuaugacuugcugucgcagagcuaauagggccgacuccgcgcagcacagcuugggggagggcgaacggaaggugucuguaaccucacagaguggacgagucauuagcuccugggagucuuauaaaucgggcggggaaacaaagcuguga

SEQ ID NO: 158676 - RNA, 1575 nt, Artificial Sequence
  derived and/or modified CDS sequence (opt3) from glycoprotein__RABV__AB563883.1
augaucccccaggcccuucucuucgugccuuuucuugucuucagccugugcuuuggcaaguucccaauuuacaccauaccggacaaauuggggcccugguccccuaucgauauucaccauuuaucuuguccaaacaaucugguuguggaggacgaaggaugcacaaaccuaucagguuuuaguuauauggagcucaagguaggcuacaucagcgcuauuaaagugaauggguucacuuguacgggagucgugaccgaagcagagacauauacuaacuuuguuggcuacgugaccacaaccuucaagagaaaacacuuuaggcccacuccugaugccugccgggcggcuuauaauuggaagauggccggugacccacgcuacgaagagucccugcauaaccccuauccugauuaccacuggcuucgaacagucaagaccacgaaagagucucuggugaucauaucgccaucaguagcagacuuggauccguacgacaagagccuccauagucguguuuuccccuccgggaaauguucuggaaucacugugagcuccaccuauugcucaacaaaucacgauuacacuauuuggaugccugaaaacccaagacugggcaccaguugugacaucuuuacaaauagcaggggcaagcgggccucuaaaggguccaagaccugcggauucgucgaugagcgcggucuguauaagucacucaaaggcgcuuguaaguuaaaacugugcggggugcuuggauugagacugauggacggcacgugggcagccauucaaacuagcgaugaaacaaaguggugucccccugaccagcuagugaaccuccacgacuuuaggagugaugagaucgagcaucuggucguugaggaacuugugaaaaagcgggaagagugccuggacgcuuuggaaucuauaaugaccacuaaauccgugagcuuccgccgacucucgcaccugagaaaguuaguaccagguuucgggaaggccuacacaauuuuuaauaaaacccugauggaggcggaugcacauuauaagucugucaggacguggaacgagaucauucccuccaaaggaugccuccgggugggcggccguugucacccgcacguuaaugggguguucuuuaacggaaucauccuugguccugacggccauguccugauucccgaaaugcagucaaguuugcuacagcaacacauggagcugcucgaaagcuccgugauaccacugaugcauccucuugccgaucccucuaccguauucaaggacgaugacgaggcugaagauuuuguugaggugcaucugccagacguccacaaacaggugagcggggucgauuugggacuccccucauggggcaaguacgugcugaugagugccgguguuuuaacagcacugaugcuaacuaucuuccucaugaccugcugucgcagagcuaauagggccgaguccgcgcagcacagccugggggaacggggccgaaaggugucuguaacaucacagaguggacgcgucauuagcuccugggagucuuauaaaucgggcggggaaacuaagcuguga

SEQ ID NO: 158677 - RNA, 1575 nt, Artificial Sequence
  derived and/or modified CDS sequence (opt3) from glycoprotein__RABV__AB563884.1
augaucccccaggcccuccuguucgugccucuucuggucuuuagcuugugcuucggcaaguuuccaauuuacaccauaccggacaaauuagggcccugguccccuaucgauauucaccaucugucuuguccaaacaaucuaguuguggaggacgaaggaugcacaaaccucucagguuucaguuauauggagcugaagguaggcuacaucagcgcuauuaaagugaauggguuuacuuguacgggagucgugaccgaagcagagacauauacuaacuucguuggcuacgugaccacaaccuuuaagagaaaacacuucaggcccacuccugaugccugccgggcggcuuauaauuggaagauggccggugacccacgcuacgaagagucccuucauaaccccuauccugauuaccacuggcugcgaacagucaagaccacgaaagagucuuuggugaucauaucgccaucaguagcagaccucgauccguacgacaagagccugcauagucguguuuuucccuccgggaaauguucuggaaucacugugagcuccaccuauugcucaacaaaucacgauuacacuauuuggaugccugaaaacccaagacugggcaccaguugugacaucuucacaaauagcaggggcaagcgggccucuaaaggguccaagaccugcggauuugucgaugagcgcggucucuauaagucauuaaaaggcgcuuguaagcugagacuuugcgggguguugggacugaggcuaauggacggcacgugggcagccauucaaacuagcgaugaaacaaaauggugucccccugaccagcucgugaaccugcacgacuuccggagugaugagaucgagcaucuugucguugaggaacuggugaagaaacgcgaagagugcuuggacgcucucgaaucuauaaugaccacuaaguccgugagcuuucgaagacugucgcacuuaaggaaacuggugccagguuucgggaaggccuacacaauuuucaauaagacccucauggaggcggaugcacauuauaaaucuguccggacguggaacgagaucauucccuccaagggaugccuucgugugggcggccgcugucacccgcacguuaaugggguguuuuucaacggaaucauccuggguccugacggccaugucuugauucccgaaaugcagucaagucuacugcagcaacacauggagcuccuggaaagcuccgugauaccacuuaugcauccucuggccgaucccucuaccguauuuaaagacgaugacgaggcugaagauuucguugaggugcacuugccagacguccauaagcagguaagcggggucgaucucggacugcccucauggggcaaauacguguuaaugagugccgguguucugacagcacuaaugcucaugaucuuucugaugacuugcuguagaagggcuaaucgggccgaguccgcgcagcacagccuuggggaacgaggccgcaaggugucuguaaccucacagaguggaagagucauuagcuccugggagucuuauaagucgggcggggaaacaaaauuguga

SEQ ID NO: 158678 - RNA, 1575 nt, Artificial Sequence
  derived and/or modified CDS sequence (opt3) from glycoprotein__RABV__AB563886.1
augaucccccaggcccuccuguucgugccucuucuggucuuuagcuugugcuucggcaaguuuccaauuuacaccauaccggacaaauuagggcccugguccccuaucgauauucaccaucugucuuguccaaacaaucuaguuguggaggacgaaggaugcacaaaccucucagguuucaguuauauggagcugaagguaggcuacaucagcgcuauuaaagugaauggguuuacuuguacgggagucgugaccgaagcagagacauauacuaacuucguuggcuacgugaccacaaccuuuaagagaaaacacuucaggcccacuccugaugccugccgggcggcuuauaauuggaagauggccggugacccacgcuacgaagagucccuucauaaccccuauccugauuaccacuggcugcgaacagucaagaccacgaaagagucuuuggugaucauaucgccaucaguagcagaccucgauccguacgacaagagccugcauagucguguuuuucccuccgggaaauguucuggaaucacugugagcuccaccuauugcucaacaaaucacgauuacacuauuuggaugccugaaaacccaagacugggcaccaguugugacaucuucacaaauagcaggggcaagcgggccucuaaaggguccaagaccugcggauuugucgaugagcgcggucucuauaagucauuaaaaggcgcuuguaagcugaaacuuugcgggguguugggacugagacuaauggacggcacgugggcagccauucaaacuagcgaugaaacaaaguggugucccccugaccagcucgugaaccugcacgacuucaggagugaugagaucgagcaucuugucguugaggaacuggugaaaaagcgggaagagugcuuggacgcucucgaaucuauaauuaccacuaaauccgugagcuuucgccgacugucgcacuuaagaaagcugguaccagguuucgggaaggccuacacaaucuucaauaaaacccucauggaggcggaugcacauuauaagucugucaggacguggaacgagauuauccccuccaaaggaugccuucgggugggcggccguugucacccgcacguuaaugggguguuuuucaacggaaucauucuggguccugacggccaugucuugauacccgaaaugcagucaagucuacugcagcaacacauggagcuccuggaaagcuccgugaucccacuuaugcauccucuggccgaucccucuaccguauuuaaggacgaugacgaggcugaagauuucguugaggugcacuugccagacguccauaaacaggugagcggggucgaucucggacugcccucauggggcaaguacguguuaaugagugccgguguucugacagcacuaaugcucaugauuuuucugaugacuugcugucgcagagcuaauaggguggaguccgcccagcacagccuuggggaacggggccgaaagguaucugucaccucacagaguggacgcgugaucagcuccugggagucuuauaaaucgggcggggaaacaaaguuguga

SEQ ID NO: 158679 - RNA, 1575 nt, Artificial Sequence; identical to SEQ ID NO: 158620
  derived and/or modified CDS sequence (opt3) from glycoprotein__RABV__AB563887.1

SEQ ID NO: 158680 - RNA, 1575 nt, Artificial Sequence; identical to SEQ ID NO: 158620
  derived and/or modified CDS sequence (opt3) from glycoprotein__RABV__AB563888.1

SEQ ID NO: 158681 - RNA, 1575 nt, Artificial Sequence
  derived and/or modified CDS sequence (opt3) from glycoprotein__RABV__AB563889.1
augaucccccaggcccuucucuucgugccuauucuugucuuuagccugugcuucggcaaguuuccaauauacaccaucccggacaaauuggggcccugguccccuauugauauccaccauuuaucuuguccaaacaaucugguuguggaggacgaaggaugcacaaaccuaucagguuucaguuauauggagcucaagguaggcuacauuagcgcuaucaaagugaauggguuuacuuguacgggagucgugaccgaagcagagacauauacuaacuucguuggcuacgugaccacaaccuuuaagagaaaacacuucaggcccacuccugaugccugccgggcggcuuauaauuggaagauggccggugacccacgcuacgaagagucccugcauaaccccuauccugauuaccacuggcuucgaacagucaagaccacgaaagagucucuggugauaaucucgccaucaguagcagacuuggauccguacgacaagagccuccauagucguguuuuucccuccgggaaauguucuggaauuacugugagcuccaccuauugcucaacaaaucacgauuacacuaucuggaugccugaaaacccaagacugggcaccaguugugacauuuucacaaauagcaggggcaagcgggccucuaaaggguccaagaccugcggauuugucgaugagcgcggucuguauaagucacucaaaggcgcuuguaaguuaaaacugugcggggugcuuggauugagacugauggacggcacgugggcagccauccaaacuagcgaugaaacaaaguggugucccccugaccagcuagugaaccuccacgacuucaggagugaugagauagagcaucuggucguugaggaacuugugaaaaagcgggaagagugccuggacgcuuuggaaucuauuaugaccacuaaauccgugagcuuucgccgacucucgcaccugagaaaguuaguaccagguuucgggaaggccuacacaaucuucaauaaaacccugauggaggcggaugcacauuauaagucugucaggacguggaacgagauuauccccuccaaaggaugccuccgggugggcggccguugucacccgcacguuaaugggguguuuuucaacggaaucauucuugguccugacggccauguccugauacccgaaaugcagucaaguuugcuacagcaacacauggagcugcucgaaagcuccgugaucccacugaugcauccucuugccgaucccucuaccguauuuaaggacgaugacgaggcugaagauuucguugaggugcaucugccagacguccacaaacaggugagcggggucgauuugggacuccccucauggggcaaguacgugcugaugagugccgguguuuuaacagcacugaugcuaaugauuuuucucaugacuugcugucgcagagcuaauaggguggaguccgcccagcacagccugggggaacggggccgaaagguaucugucaccucacagaguggacgcgugaucagcuccugggagucuuauaaaucgggcggggaaacaaagcuguga

SEQ ID NO: 158682 - RNA, 1575 nt, Artificial Sequence
  derived and/or modified CDS sequence (opt3) from glycoprotein__RABV__AB563890.1
augaucccccaggcccuucucuucgugccucuucuggucuuuagcuugugcuucggcaaguuuccaauuuacaccauaccggacaaauuagggcccugguccccuaucgauauucaccaucugucuuguccaaacaaucuaguuguggaggacgaaggaugcacaaaccucucagguuucaguuauauggagcugaagguaggcuacaucagcgcuauuaaagugaauggguuuacuuguacgggagucgugaccgaagcagagacauauacuaacuucguuggcuacgugaccacaaccuuuaagagaaaacacuucaggcccaugccugaugccugccgggcggcuuauaauuggaagauggccggugacccacgcuacgaagagucccuucauaaccccuauccugauuaccacuggcugcgaacugucaagacaaccaaagagucuuuggugaucauaucgccaucaguagcagaccucgauccguacgacaagagccugcauagucguguuuuucccuccgggaaauguucuggaaucacggugagcuccacuuauugcucaaccaaucacgauuacacaauuuggaugccugaaaacccaagacugggcacuagcugugacaucuucaccaauagcaggggcaagcgggccucuaaaggguccaagacaugcggauuugucgaugagcgcggucucuauaagucauuaaaaggcgcuuguaagcugaaacuuugcgggguguugggacugagacuaauggacggcaccugggcagccauucaaacgagcgaugaaacuaaguggugucccccugaccagcucgugaaccugcacgacuucaggagugaugagaucgagcaucuugucguugaggaacuggugaaaaagcgggaagagugcuuggacgcucucgaaucuauaaugacaaccaaauccguaaguuuucgccgacugucgcacuuaagaaagcuggugccagguuucgggaaggccuacacuauuuucaauaaaacacucauggaggcggaugcacauuauaagucugucaggaccuggaacgagaucauucccuccaaaggaugccuucgggugggcggccguugucacccgcacguuaaugggguguuuuucaacggaaucauccuggguccugacggccaugucuugauucccgaaaugcagucaagucuacugcagcaacacauggagcuccuggaaagcuccgugauaccacuuaugcauccucuggccgaucccucuacgguauuuaaggacgaugacgaggcugaagauuucguugaggugcacuugccagacguccauaaacaggugagcggggucgaucucggacugcccucauggggcaaguacguguuaaugagugccgguguucugaccgugcuaaugcucaugaucuuuuucaugacaugcugucgcagagcaaauaggguagaguccgcucagcacagccugggggaacggggccgaaaggucucugugacuucacagaguggacgcguuauuagcuccugggagucuuauaaaucgggcggggaaaccaagcuguga

SEQ ID NO: 158683 - RNA, 1575 nt, Artificial Sequence
  derived and/or modified CDS sequence (opt3) from glycoprotein__RABV__AB563891.1
augaucccccaggcccuucucuucgugccucuucuggucuuuagcuugugcuucggcaaguuuccaauuuacaccauaccggacaaauuagggcccugguccccuaucgauauucaccaucugucuuguccaaacaaucuaguuguggaggacgaaggaugcacaaaccucucagguuucaguuauauggagcugaagguaggcuacaucagcgcuauuaaagugaauggguuuacuuguacgggagucgugaccgaagcagagacauauacuaacuucguuggcuacgugaccacaaccuuuaagagaaaacacuucaggcccaugccugaugccugccgggcggcuuauaauuggaagauggccggugacccacgcuacgaagagucccuucauaaccccuauccugauuaccacuggcugcgaacugucaagacaaccaaagagucuuuggugaucauaucgccaucaguagcagaccucgauccguacgacaagagccugcauagucguguuuuucccuccgggaaauguucuggaaucacggugagcuccacuuauugcucaaccaaucacgauuacacaauuuggaugccugaaaacccaagacugggcacuagcugugacaucuucaccaauagcaggggcaagcgggccucuaaaggguccaagacaugcggauuugucgaugagcgcggucucuauaagucauuaaaaggcgcuuguaagcugaaacuuugcgggguguugggacugagacuaauggacggcaccugggcagccauucaaacgagcgaugaaacuaaguggugucccccugaccagcucgugaaccugcacgacuucaggagugaugagaucgagcaucuugucguugaggaacuggugaaaaagcgggaagagugcuuggacgcucucgaaucuauaaugacaaccaaauccguaaguuuucgccgacugucgcacuuaagaaagcuggugccagguuucgggaaggccuacacuauuuucaauaaaacacucauggaggcggaugcacauuauaagucugucaggaccuggaacgagaucauucccuccaaaggaugccuucgggugggcggccguugucacccgcacguuaaugggguguuuuucaacggaaucauccuggguccugacggccgcgucuugauucccgaaaugcagucaagucuacugcagcaacauauggagcuccuggaaagcuccgugauaccacuuaugcacccucuggccgaucccucuacgguauuuaaggacgaugacgaggcugaagauuucguugaggugcauuugccagacguccacaaacaggugagcggggucgaucucggacugcccucauggggcaaguacguguuaaugagugccgguguucugaccgugcuaaugcucaugaucuuuuucaugacaugcuguagaagggcaaaucggguagaguccgcucagcauagccugggggaacgaggccgcaaggucucugugacuucacagaguggaagaguuauuagcuccugggagucuuauaaaucgggcggggaaaccaagcuguga

SEQ ID NO: 158684 - RNA, 1575 nt, Artificial Sequence
  derived and/or modified CDS sequence (opt3) from glycoprotein__RABV__AB563892.1
augaucccccaggcccuucucuucgugccucuucuggucuuuagcuugugcuucggcaaguuuccaauuuacaccauaccggacaaauuagggcccugguccccuaucgauauucaccaucugucuuguccaaacaaucuaguuguggaggacgaaggaugcacaaaccucucagguuucaguuauauggagcugaagguaggcuacaucagcgcuauuaaagugaauggguuuacuuguacgggagucgugaccgaagcagagacauauacuaacuucguuggcuacgugaccacaaccuuuaagagaaaacacuucaggcccacuccugaugccugccgggcggcuuauaauuggaagauggccggugacccacgcuacgaagagucccuucauaaccccuauccugauuaccacuggcugcgaacagucaagaccacgaaagagucuuuggugaucauaucgccaucaguagcagaccucgauccguacgacaagagccugcauagucguguuuuucccuccgggaaauguucuggaaucacugugagcuccaccuauugcucaacaaaucacgauuacacuauuuggaugccugaaaacccaagacugggcaccaguugugacaucuucacaaauagcaggggcaagcgggccucuaaaggguccaagaccugcggauuugucgaugagcgcggucucuauaagucauuaaaaggcgcuuguaagcugaaacuuugcgggguguugggacugagacuaauggacggcacgugggcagccauucaaacuagcgaugaaacaaaguggugucccccugaccagcucgugaaccugcacgacuucaggagugaugagaucgagcaucuugucguugaggaacuggugaaaaagcgggaagagugcuuggacgcucucgaaucuauaaugaccacuaaauccgugagcuuucgccgacugucgcacuuaagaaagcugguaccagguuucgggaaggccuacacaauuuucaauaaaacccucauggaggcggaugcacauuauaagucugucaggacguggaacgagaucauucccuccaaaggaugccuucgggugggcggccguugucacccgcacguuaaugggguguuuuucaacggaaucauccuggguccugacggccaugucuugauucccgaaaugcagucaagucuacugcagcaacacauggagcuccuggaaagcuccgugauaccacuuaugcauccucuggccgaucccucuaccguauuuaaggacgaugacgaggcugaagauuucguugaggugcacuugccagacguccauaaacaggugagcggggucgaucucggacugcccucauggggcaaguacguguuaaugagugccgguguucugacagugcuaaugcucaugaucuuuuucaugacuugcugucgcagagcaaauaggguagaguccgcucagcacagccugggggaacggggccgaaaggucucugugaccucacagaguggacgcguuauuagcuccugggagucuuauaaaucgggcggggaaacaaagcuguga

SEQ ID NO: 158685 - RNA, 1575 nt, Artificial Sequence; identical to SEQ ID NO: 158682
  derived and/or modified CDS sequence (opt3) from glycoprotein__RABV__AB563893.1

SEQ ID NO: 158686 - RNA, 1575 nt, Artificial Sequence; identical to SEQ ID NO: 158682
  derived and/or modified CDS sequence (opt3) from glycoprotein__RABV__AB563894.1

SEQ ID NO: 158687 - RNA, 1575 nt, Artificial Sequence
  derived and/or modified CDS sequence (opt3) from glycoprotein__RABV__AB563900.1
augaucccccaggcccugauguucgugccucuccuugucuuuagccugugcuucggcaaguuuccaauuuacaccauaccggacaaauuggggcccugguccccuaucgauauucaccauuuaucuuguccaaacaaucugguuguggaggacgaaggaugcacaaaccuaucagguuucaguuauauggagcucaagguaggcuacaucagcgcuauuaaagugaauggguuuacuuguacgggagucgugaccgaagcagagacauauacuaacuucguuggcuacgugaccacaaccuuuaagagaaaacacuucaggcccaugccugaugccugccgggcggcuuauaauuggaagauggccggugacccacgcuacgaagagucccugcauaaccccuauccugauuaccacuggcuucgaacugucaagacaaccaaagagucucuggugaucauaucgccaucaguagcagacuuggauccguacgacaagagccuccauagucguguuuuucccuccgggaaauguucuggaaugacggugagcuccacuuauugcucaaccaaucacgauuacacaaucuggaugccugaaaacccaagacugggcacuucgugugacauuuucaccaauagcaggggcaagcgggccucuaaaggguccaagacaugcggauuugucgaugagcgcggucuguauaagucacucaaaggcgcuuguaaguuaaaacugugcggggugcuuggauugagacugauggacggcaccugggcagccauccaaacgagcgaugaaacuaaguggugucccccugaccagcuagugaaccuccacgacuucaggagugaugagauugagcaucuggucguugaggaacuugugaaaaagcgggaagagugccuggacgcuuuggaaucuaucaugacaaccaaauccgugagcuuucgccgacucucgcaccugagaaaguuaguaccagguuucgggaaggccuacacuauauucaauaaaacacugauggaggcggaugcacauuauaagucugucaggaccuggaacgagauuauccccuccaaaggaugccuccgggugggcggccguugucacccgcacguuaaugggguguuuuucaacggaauuauccuugguccugacggccauguccugauccccgaaaugcagucaaguuugcuacagcaacacauggagcugcucgaaagcuccgugauuccacugaugcauccucuugccgaucccucuacgguauuuaagggggacgaugaggcugaagacuucguugaggugcaucugccagauguccacaaacaggugagcggagucgacuugggccuccccucaugggguaaguacgugcugaugagugccgggguuuuaaccgcacugaugcuaaugauauuucucaugacaugcuguaagcgcgcuaauagagccgaguccgcgcaccacagccugggcgaaaggggacggaaagugucuguaacuucacagaguggccgagucaucagcuccugggagucuuauaagagugggggagaaaccaaacuuuga

SEQ ID NO: 158688 - RNA, 1575 nt, Artificial Sequence
  derived and/or modified CDS sequence (opt3) from glycoprotein__RABV__AB563901.1
augaucccccaggcccuccuguucgugccucuucuggucuuuagcuugugcuucggcaaguuuccaauuuacaccauaccggacaaauuagggcccugguccccuaucgauauucaccaucugucuuguccaaacaaucuaguuguggaggacgaaggaugcacaaaccucucagguuucaguuauauggagcugaagguaggcuacaucagcgcuauuaaagugaauggguuuacuuguacgggagucgugaccgaagcagagacauauacuaacuucguuggcuacgugaccacaaccuuuaagagaaaacacuucaggcccacuccugaugccugccgggcggcuuauaauuggaagauggccggugacccacgcuacgaagagucccuucauaaccccuauccugauuaccacuggcugcgaacagucaagaccacgaaagagucuuuggugaucauaucgccaucaguagcagaccucgauccguacgacaagagccugcauagucguguuuuucccuccgggaaauguucuggaaucacugugagcuccaccuauugcucaacaaaucacgauuacacuauuuggaugccugaaaacccaagacugggcaccaguugugacaucuucacaaauagcaggggcaagcgggccucuaaaggguccaagaccugcggauuugucgaugagcgcggucucuauaagucauuaaaaggcgcuuguaagcugaaacuuugcgggguguugggacugagacuaauggacggcacgugggcagccauucaaacuagcgaugaaacaaaguggugucccccugaccagcucgugaaccugcacgacuucaggagugaugagaucgagcaucuugucguugaggaacuggugaaaaagcgggaagagugcuuggacgcucucgaaucuauaaugaccacuaaauccgugagcuuucgccgacugucgcacuuaagaaagcugguaccagguuucgggaaggccuacacaauuuucaauaaaacccucauggaggcggaugcacauuauaagucugucaggacguggaacgagaucauucccuccaaaggaugccuucgggugggcggccguugucacccgcacguuaaugggguguuuuucaacggaaucauccuggguccugacggccaugucuugauucccgaaaugcagucaagucuacugcagcaacacauggagcuccuggaaagcuccgugauaccacuuaugcauccucuggccgaucccucuaccguauuuaaggacgaugacgaggcugaagauuucguugaggugcacuugccagacguccauaaacaggugagcggggucgaucucggacugcccucauggggcaaguacguguuaaugagugccgguguucugacagcacuaaugcucacuaucuuucugaugaccugcugucgcagagcuaauagggccgaguccgcgcagcacagccuuggggaacggggccgaaaggugucuguaacaccucagucaggacgcgucauuaguagcugggaguccuauaaaucuggcggggaaacuaaguuguga

SEQ ID NO: 158689 - RNA, 1575 nt, Artificial Sequence; identical to SEQ ID NO: 158620
  derived and/or modified CDS sequence (opt3) from glycoprotein__RABV__AB563904.1

SEQ ID NO: 158690 - RNA, 1575 nt, Artificial Sequence; identical to SEQ ID NO: 158664
  derived and/or modified CDS sequence (opt3) from glycoprotein__RABV__AB563907.1

SEQ ID NO: 158691 - RNA, 1575 nt, Artificial Sequence; identical to SEQ ID NO: 158682
  derived and/or modified CDS sequence (opt3) from glycoprotein__RABV__AB563911.1

SEQ ID NO: 158692 - RNA, 1575 nt, Artificial Sequence
  derived and/or modified CDS sequence (opt3) from glycoprotein__RABV__AB563912.1
augaucccccaggcccuucucuucgugccucuucuggucuuuagcuugugcuucggcaaguuuccaauuuacaccauaccggacaaauuagggcccugguccccuaucgauauucaccaucugucuuguccaaacaaucuaguuguggaggacgaaggaugcacaaaccucucagguuucaguuauauggagcugaagguaggcuacaucagcgcuauuaaagugaauggguuuacuuguacgggagucgugaccgaagcagagacauauacuaacuucguuggcuacgugaccacaaccuuuaagagaaaacacuucaggcccaugccugaugccugccgggcggcuuauaauuggaagauggccggugacccacgcuacgaagagucccuucauaaccccuauccugauuaccacuggcugcgaacugucaagacaaccaaagagucuuuggugaucauaucgccaucaguagcagaccucgauccguacgacaagagccugcauagucguguuuuucccuccgggaaauguucuggaaucacggugagcuccacuuauugcucaaccaaucacgauuacacaauuuggaugccugaaaacccaagacugggcacuagcugugacaucuucaccaauagcaggggcaagcgggccucuaaaggguccaagacaugcggauuugucgaugagcgcggucucuauaagucauuaaaaggcgcuuguaagcugaaacuuugcgggguguugggacugagacuaauggacggcaccugggcagccauucaaacgagcgaugaaacuaaguggugucccccugaccagcucgugaaccugcacgacuucaggagugaugagaucgagcaucuugucguugaggaacuggugaaaaagcgggaagagugcuuggacgcucucgaaucuauaaugacaaccaaauccguaaguuuucgccgacugucgcacuuaagaaagcuggugccagguuucgggaaggccuacacuauuuucaauaaaacacucauggaggcggaugcacauuauaagucugucaggaccuggaacgagaucauucccuccaaaggaugccuucgggugggcggccguugucacccgcacguuaaugggguguuuuucaacggaaucauccuggguccugacggccaugucuugauucccgaaaugcagucaagucuacugcagcaacacauggagcuccuggaaagcuccgugauaccacuuaugcauccucuggccgaucccucuacgguauuuaaggacgaugacgaggcugaagauuucguugaggugcacuugccagacguccauaaacaggugagcggggucgaucucggacugcccucauggggcaaguacguguuaaugaguaccgguguucugacagugcuaaugcucaugaucuuuuucaugaugugcugucgcagagccaauaggguagaguccgcacagcacagccugggggaacggggccgaaaggucucugugacuucacagaguggacgcguuauuagcuccugggagucuuauaaaucgggcggggaaaccaagcuguga

SEQ ID NO: 158693 - RNA, 1575 nt, Artificial Sequence; identical to SEQ ID NO: 158682
  derived and/or modified CDS sequence (opt3) from glycoprotein__RABV__AB563913.1

SEQ ID NO: 158694 - RNA, 1575 nt, Artificial Sequence
  derived and/or modified CDS sequence (opt3) from glycoprotein__RABV__AB563914.1
augaucccccaggcccuccuguucgugccucuucuggucuuuagcuugugcuucggcaaguuuccaauuuacaccauaccggacaaauuagggcccugguccccuaucgauauucaccaucugucuuguccaaacaaucuaguuguggaggacgaaggaugcacaaaccucucagguuucaguuauauggagcugaagguaggcuacaucagcgcuauuaaagugaauggguuuacuuguacgggagucgugaccgaagcagagacauauacuaacuucguuggcuacgugaccacaaccuuuaagagaaaacacuucaggcccaugccugaugccugccgggcggcuuauaauuggaagauggccggugacccacgcuacgaagagucccuucauaaccccuauccugauuaccacuggcugcgaacugucaagacaaccaaagagucuuuggugaucauaucgccaucaguagcagaccucgauccguacgacaagagccugcauagucguguuuuucccuccgggaaauguucuggaaucacggugagcuccacuuauugcucaaccaaucacgauuacacaauuuggaugccugaaaacccaagacugggcacuagcugugacaucuucaccaauagcaggggcaagcgggccucuaaaggguccaagacaugcggauuugucgaugagcgcggucucuauaagucauuaaaaggcgcuuguaagcugaaacuuugcgggguguugggacugagacuaauggacggcaccugggcagccauucaaacgagcgaugaaacuaaguggugucccccugaccagcucgugaaccugcacgacuucaggagugaugagaucgagcaucuugucguugaggaacuggugaaaaagcgggaagagugcuuggacgcucucgaaucuauaaugacaaccaaauccguaaguuuucgccgacugucgcacuuaagaaagcuggugccagguuucgggaaggccuacacuauuuucaauaaaacacucauggaggcggaugcacauuauaagucugucaggaccuggaacgagaucauucccuccaaaggaugccuucgggugggcggccguugucacccgcacguuaaugggguguuuuucaacggaaucauccuggguccugacggccaugucuugauucccgaaaugcagucauaccuacugcagcaacacauggagcuccuggaaaguagcgugauaccacuuaugcauccucuggccgaucccuccacgguauuuaaggacgaugacgaggcugaagauuucguugaggugcacuugccagacguccauaaacaggugucuggggucgaucucggacugcccagcuggggcaaguauguguuaaugucagccgguguucugaccgugcuaaugcucaugaucuuuuucaugacaugcugucgcagagcaaauaggguagagagugcucagcacucccugggggaacggggccgaaaggucagcgugacuucucagucaggacgcguuauuaguagcugggaguccuacaaaucuggcggggaaaccagacuuuga

SEQ ID NO: 158695 - RNA, 1575 nt, Artificial Sequence; identical to SEQ ID NO: 158682
  derived and/or modified CDS sequence (opt3) from glycoprotein__RABV__AB563915.1

SEQ ID NO: 158696 - RNA, 1575 nt, Artificial Sequence; identical to SEQ ID NO: 158649
  derived and/or modified CDS sequence (opt3) from glycoprotein__RABV__AB563921.1

SEQ ID NO: 158697 - RNA, 1575 nt, Artificial Sequence
  derived and/or modified CDS sequence (opt3) from glycoprotein__RABV__AB563922.1
augaacccccaggcccugauguucgugccucuccuugucuuuagccugugcuucggcaaguuuccaaucuacaccauuccggacaaauuggggcccugguccccuauagauauccaccauuuaucuuguccaaauaaccugguuguggaggacgaaggaugcacaaaucuaucagguuucaguuauauggagcucaagguaggcuacauuagcgcuaucaaagugaacggguuuacuuguacgggagucgugaccgaagcagagacauauacuaauuucguuggcuacgugaccacaaccuuuaagagaaaacacuucaggcccacuccugaugccugccgggcguccuauaacuggaagauggcuggugacccacgcuacgaagagucucugcauaaucccuauccugauuaccacuggcuucgaacagucaagaccacgaaagagucgcuggugauuaucucaccaagcguagccgacuuggauccguacgacaagagucuccauucccguguuuuucccucugggaaauguagcggaauaacuguguccucaaccuauugcaguacaaaccacgauuacacuaucuggaugccugaaaauccaagacugggcaccagcugugacauuuucacaaacucuaggggcaagcgggcauccaaagggucaaagaccugcggauuugucgaugagcgcggucuguauaagagccucaaaggcgccuguaaguuaaaacugugcggggugcuuggauugagacugauggacggcacgugggcugcaauccaaacaagugaugaaacuaaguggugucccccugaccagcuagugaaucuccacgacuucaggucugaugagauugagcaucuggucguugaggaacuugugaaaaagcgggaagagugccuggacgccuuggaauccaucaugaccacuaaaagcguaucguuucgccgacucucucaccugagaaaguuagugccagguuucgggaaggcuuacacaauauucaacaaaacccugauggaggccgaugcgcauuauaaguccgucaggacguggaaugagauuauccccucaaaaggaugccuccgggugggcggccguugucacccgcacguuaacgggguguuuuucaauggaauuauccuugguccugacggccauguccugauccccgaaaugcagaguagcuugcuacagcaacacauggagcugcucgaauccucugugauuccacugaugcauccucuugcagaucccagcaccguauuuaaggacgaugacgaggccgaagauuucguugaggugcaccuuccagacguccauaaacaggugucaggggucgauuugggacuccccaguuggggcaaguacgugcugauguccgcugguguuuuaacagcccugaugcuaaugauauuucucaugacuugcugucgcagagcaaacagggcugagagcgcccagcacucucugggggaacggggccgaaaggugucaguaaccagucagagcggacgcgucaucuccucuugggagucguauaaaagcggcggggaaacaaagcuguga

SEQ ID NO: 158698 - RNA, 1575 nt, Artificial Sequence
  derived and/or modified CDS sequence (opt3) from glycoprotein__RABV__AB563923.1
augaucccccaggcccugauguucgugccucuccuugucuuuagccugugcuucggcaaguuuccaauuuacaccauaccggacaaauuggggcccugguccccuaucgauauucaccauuuaucuuguccaaacaaucugguuguggaggacgaaggaugcacaaaccuaucagguuucaguuauauggagcucaagguaggcuacaucagcgcuauuaaagugaauggguuuacuuguacgggagucgugaccgaagcagagacauauacuaacuucguuggcuacgugaccacaaccuuuaagagaaaacacuucaggcccacuccugaugccugccgggcggcuuauaauuggaagauggccggugacccacgcuacgaagagucccugcauaaccccuauccugauuaccacuggcuucgaacagucaagaccacgaaagagucucuggugaucauaucgccaucaguagcagacuuggauccguacgacaagagccuccauagucguguuuuucccuccgggaaauguucuggaaucacugugagcuccaccuauugcucaacaaaucacgauuacacuauuuggaugccugaaaacccaagacugggcaccaguugugacaucuucacaaauagcaggggcaagcgggccucuaaaggguccaagaccugcggauuugucgaugagcgcggucuguauaagucacucaaaggcgcuuguaaguuaaaacugugcggggugcuuggauugagacugauggacggcacgugggcagccauucaaacuagcgaugaaacaaaguggugucccccugaccagcuagugaaccuccacgacuucaggagugaugagaucgagcaucuggucguugaggaacuugugcggaaacgcgaagagugccuggacgcuuuggaaucuauaaugaccacuaaguccgugagcuuucgaagacucucgcaccugaggaaauuagugccagguuucgggaaggccuacacaauuuucaauaagacccugauggaggcggaugcacauuauaaaucuguccggacguggaacgagaucauucccuccaagggaugccuccgugugggcggccgcugucacccgcacguuaaugggguguuuuucaacggaaucauccuugguccugacggccauguccugauucccgaaaugcagucaaguuugcuacagcaacacauggagcugcucgaaagcuccgugauaccacugaugcauccucuugccgaucccucuaccguauuuaaagacgaugacgaggcugaagauuucguugaggugcaucugccagacguccacaagcagguaagcggggucgauuugggacuccccucauggggcaaauacgugcugaugagugccgguguuuuaacagcacugaugcuaaugaucuuucucaugacuugcuguagaagggcuaaucgggccgaguccgcgcagcacagccugggggaacgaggccgcaaggugucuguaaccucacagaguggaagagucauuagcuccugggagucuuauaagucgggcggggaaacaaaacuuuga

SEQ ID NO: 158699 - RNA, 1575 nt, Artificial Sequence
  derived and/or modified CDS sequence (opt3) from glycoprotein__RABV__AB563926.1
augaucccccaggcccuccuguucgugccucuucuggucuuuagcuugugcuucggcaaguuuccaauuuacaccauaccggacaaauuagggcccugguccccuaucgauauucaccaucugucuuguccaaacaaucuaguuguggaggacgaaggaugcacaaaccucucagguuucaguuauauggagcugaagguaggcuacaucagcgcuauuaaagugaauggguuuacuuguacgggagucgugaccgaagcagagacauauacuaacuucguuggcuacgugaccacaaccuuuaagagaaaacacuucaggcccacuccugaugccugccgggcggcuuauaauuggaagauggccggugacccacgcuacgaagagucccuucauaaccccuauccugauuaccacuggcugcgaacagucaagaccacgaaagagucuuuggugaucauaucgccaucaguagcagaccucgauccguacgacaagagccugcauagucguguuuuucccuccgggaaauguucuggaaucacugugagcuccaccuauugcucaacaaaucacgauuacacuauuuggaugccugaaaacccaagacugggcaccaguugugacaucuucacaaauagcaggggcaagcgggccucuaaaggguccaagaccugcggauuugucgaugagcgcggucucuauaagucauuaaaaggcgcuuguaagcugaaacuuugcgggguguugggacugagacuaauggacggcacgugggcagccauucaaacuagcgaugaaacaaaguggugucccccugaccagcucgugaaccugcacgacuucaggagugaugagaucgagcaucuugucguugaggaacuggugaaaaagcgggaagagugcuuggacgcucucgaaucuauaaugaccacuaaauccgugagcuuucgccgacugucgcacuuaagaaagcugguaccagguuucgggaaggccuacacaauuuucaauaaaacccucauggaggcggaugcacauuauaagucugucaggacguggaacgagaucauucccuccaaaggaugccuucgggugggcggccguugucacccgcacguuaaugggguguuuuucaacggaaucauccuggguccugacggccaugucuugauucccgaaaugcagucaagucuacugcagcaacacauggagcuccuggaaagcuccgugauaccacuuaugcauccucuggccgaucccucuaccguauuuaaggacgaugacgaggcugaagauuucguugaggugcacuugccagacguccauaaacaggugagcggggucgaucucggacugcccucauggggcaaguacguguuaaugagugccgguguucugacagcacuaaugcucaugaucuuucugaugacuugcugucgcagagcuaauagggccgaguccgcgcagcacagccuuggggaaggcgagcggaaggugucuguaaccucacagaguggacgagucauuagcuccugggaaucuuauaaaucgggcggggagacaaaguuguga

SEQ ID NO: 158700 - RNA, 1575 nt, Artificial Sequence; identical to SEQ ID NO: 158650
  derived and/or modified CDS sequence (opt3) from glycoprotein__RABV__AB563927.1

SEQ ID NO: 158701 - RNA, 1575 nt, Artificial Sequence; identical to SEQ ID NO: 158646
  derived and/or modified CDS sequence (opt3) from glycoprotein__RABV__AB563928.1

SEQ ID NO: 158702 - RNA, 1575 nt, Artificial Sequence
  derived and/or modified CDS sequence (opt3) from glycoprotein__RABV__AB563929.1
augaucccccaggcccuccuguucgugccucuucuggucuuuagcuugugcuucggcaaguuuccaauuuacaccauaccggacaaauuagggcccugguccccuaucgauauucaccaucugucuuguccaaacaaucuaguuguggaggacgaaggaugcacaaaccucucagguuucaguuauauggagcugaagguaggcuacaucagcgcuauuaaagugaauggguuuacuuguacgggagucgugaccgaagcagagacauauacuaacuucguuggcuacgugaccacaaccuuuaagagaaaacacuucaggcccacuccugaugccugccgggcggcuuauaauuggaagauggccggugacccacgcuacgaagagucccuucauaaccccuauccugauuaccacuggcugcgaacagucaagaccacgaaagagucuuuggugaucauaucgccaucaguagcagaccucgauccguacgacaagagccugcauagucguguuuuucccuccgggaaauguucuggaaucacugugagcuccaccuauugcucaacaaaucacgauuacacuauuuggaugccugaaaacccaagacugggcaccaguugugacaucuucacaaauagcaggggcaagcgggccucuaaaggguccaagaccugcggauuugucgaugagcgcggucucuauaagucauuaaaaggcgcuuguaagcugaaacuuugcgggguguugggacugagacuaauugacggcacgugggcagccauccaaacuagcgaugaaacaaaguggugucccccugaccagcucgugaaccugcacgacuucaggagugaugagauagagcaucuugucguugaggaacuggugaaaaagcgggaagagugcuuggacgcucucgaaucuauuaugaccacuaaauccgugagcuuucgccgacugucgcacuuaagaaagcugguaccagguuucgggaaggccuacacaaucuucaauaaaacccucauggaggcggaugcacauuauaagucugucaggacguggaacgagauuauccccuccaaaggaugccuucgggugggcggccguugucacccgcacguuaaugggguguuuuucaacggaaucauucuggguccugacggccaugucuugauacccgaaaugcagucaagucuacugcagcaacacauggagcuccuggaaagcuccgugaucccacuuaugcauccucuggccgaucccucuaccguauuuaaggacgaugacgaggcugaagauuucguugaggugcacuugccagacguccauaaacaggugagcggggucgaucucggacugcccucauggggcaaguacguguuaaugagugccgguguucugacagcacuaaugcucaugauuuuucugacuaccugcugucgcagagcuaauagggccgaguccgcgcagcacagccuuggggaacggggccgaaaggugucuguaacaucacagaguggacgcgucaucagcuccugggagucuuauaaaucgggcggggaaacuaaguuguga

SEQ ID NO: 158703 - RNA, 1575 nt, Artificial Sequence; identical to SEQ ID NO: 158652
  derived and/or modified CDS sequence (opt3) from glycoprotein__RABV__AB563930.1

SEQ ID NO: 158704 - RNA, 1575 nt, Artificial Sequence; identical to SEQ ID NO: 158646
  derived and/or modified CDS sequence (opt3) from glycoprotein__RABV__AB563931.1

SEQ ID NO: 158705 - RNA, 1575 nt, Artificial Sequence; identical to SEQ ID NO: 158681
  derived and/or modified CDS sequence (opt3) from glycoprotein__RABV__AB563933.2

SEQ ID NO: 158706 - RNA, 1575 nt, Artificial Sequence; identical to SEQ ID NO: 158620
  derived and/or modified CDS sequence (opt3) from glycoprotein__RABV__AB563934.1

SEQ ID NO: 158707 - RNA, 1575 nt, Artificial Sequence; identical to SEQ ID NO: 158652
  derived and/or modified CDS sequence (opt3) from glycoprotein__RABV__AB563937.1

SEQ ID NO: 158708 - RNA, 1575 nt, Artificial Sequence
  derived and/or modified CDS sequence (opt3) from glycoprotein__RABV__AB563938.1
augaucccccaggcccuccuguucgugccucuucuggucuuuagcuugugcuucggcaaguuuccaauuuacaccauaccggacaaauuagggcccugguccccuaucgauauucaccaucugucuuguccaaacaaucuaguuguggaggacgaaggaugcacaaaccucucagguuucaguuauauggagcugaagguaggcuacaucagcgcuauuaaagugaauggguuuacuuguacgggagucgugaccgaagcagagacauauacuaacuucguuggcuacgugaccacaaccuuuaagagaaaacacuucaggcccacuccugaugccugccgggcggcuuauaauuggaagauggccggugacccacgcuacgaagagucccuucauaaccccuauccugauuaccacuggcugcgaacagucaagaccacgaaagagucuuuggugaucauaucgccaucaguagcagaccucgauccguacgacaagagccugcauagucguguuuuucccuccgggaaauguucuggaaucacugugagcuccaccuauugcucaacaaaucacgauuacacuauuuggaugccugaaaacccaagacugggcaccaguugugacaucuucacaaauagcaggggcaagcgggccucuaaaggguccaagaccugcggauuugucgaugagcgcggucucuauaagucauuaaaaggcgcuuguaagcugaaacuuugcgggguguugggacugagacuaauggacggcacgugggcagccauucaaacuagcgaugaaacaaaguggugucccccugaccagcucgugaaccugcacgacuucaggagugaugagaucgagcaucuugucguugaggaacuggugaaaaagcgggaagagugcuuggacgcucucgaaucuauaaugaccacuaaauccgugagcuuucgccgacugucgcacuuaagaaagcugguaccagguuucgggaaggccuacacaauuuucaauaaaacccucauggaggcggaugcacauuauaagucugucaggacguggaacgagaucauucccuccaaaggaugccuucgggugggcggccguugucacccgcacguuaaugggguguuuuucaacggaaucauccuggguccugacggccaugucuugauucccgaaaugcagucaagucuacugcagcaacacauggagcuccuggaaagcuccgugauaccacuuaugcauccucuggccgaucccucuaccguauuuaaggacgaugacgaggcugaagauuucguugaggugcacuugccagacguccauaaacaggugagcggggucgaucucggacugcccucauggggcaaguacguguuaaugagugccgguguucugacagcacuaaugcucaugaucuuucugaugacuugcuguauucgcgcuaauagagccgaguccgcgcagcacagccuuggggaaaggggccggaaggugucuguaaccucacagaguggacgagucaucagcuccugggagucuuauaaaucgggcggggaaacaaaguuguga

SEQ ID NO: 158709 - RNA, 1575 nt, Artificial Sequence; identical to SEQ ID NO: 158652
  derived and/or modified CDS sequence (opt3) from glycoprotein__RABV__AB563939.1

SEQ ID NO: 158710 - RNA, 1575 nt, Artificial Sequence
  derived and/or modified CDS sequence (opt3) from glycoprotein__RABV__AB563942.1
augaucccccaggcccuccuguucgugccucuucuggucuuuagcuugugcuucggcaaguuuccaauuuacaccauaccggacaaauuagggcccugguccccuaucgauauucaccaucugucuuguccaaacaaucuaguuguggaggacgaaggaugcacaaaccucucagguuucaguuauauggagcugaagguaggcuacaucagcgcuauuaaagugaauggguuuacuuguacgggagucgugaccgaagcagagacauauacuaacuucguuggcuacgugaccacaaccuuuaagagaaaacacuucaggcccacuccugaugccugccgggcggcuuauaauuggaagauggccggugacccacgcuacgaagagucccuucauaaccccuauccugauuaccacuggcugcgaacagucaagaccacgaaagagucuuuggugaucauaucgccaucaguagcagaccucgauccguacgacaagagccugcauagucguguuuuucccuccgggaaauguucuggaaucacugugagcuccaccuauugcucaacaaaucacgauuacacuauuuggaugccugaaaacccaagacugggcaccaguugugacaucuucacaaauagcaggggcaagcgggccucuaaaggguccaagaccugcggauuugucgaugagcgcggucucuauaagucauuaaaaggcgcuuguaagcugaaacuuugcgggguguugggacugagacuaauggacggcacgugggcagccauucaaacuagcgaugaaacaaaguggugucccccugaccagcucgugaaccugcacgacuucaggagugaugagaucgagcaucuugucguugaggaacuggugaaaaagcgggaagagugcuuggacgcucucgaaucuauaaugaccacuaaauccgugagcuuucgccgacugucgcacuuaagaaagcugguaccagguuucgggaaggccuacacaauuuucaauaaaacccucauggaggcggaugcacauuauaagucugucaggacguggaacgagaucauucccuccaaaggaugccuucgggugggcggccguugucacccgcacguuaaugggguguuuuucaacggaaucauccuggguccugacggccaugucuugauucccgaaaugcagucaagucuacugcagcaacacauggagcuccuggaaagcuccauaaucccacuuaugcauccucuggccgaucccucuaccguguuuaaggacgaugacgaggcugaagauuucguagagguucacuugccagacgugcauaaacaggucagcgggguggaucucggacugcccucauggggcaaguacgucuuaaugagugccggugugcugacagcacuaaugcucaugauuuuucugaugacuugcugucgcagaaccaauagggcugaguccgcccagcacagccuuggggaacggggccgaaagguuucugugacaucacagaguggacgcguaaucagcuccugggagucuuauaaaucgggcggggaaacuaaguuguga

SEQ ID NO: 158711 - RNA, 1575 nt, Artificial Sequence
  derived and/or modified CDS sequence (opt3) from glycoprotein__RABV__AB563945.1
augaucccccaggcccuccuguucgugccucuucuggucuuuagcuugugcuucggcaaguuuccaauuuacaccauaccggacaaauuagggcccugguccccuaucgauauucaccaucugucuuguccaaacaaucuaguuguggaggacgaaggaugcacaaaccucucagguuucaguuauauggagcugaagguaggcuacaucagcgcuauuaaagugaauggguuuacuuguacgggagucgugaccgaagcagagacauauacuaacuucguuggcuacgugaccacaaccuuuaagagaaaacacuucaggcccacuccugaugccugccgggcggcuuauaauuggaagauggccggugacccacgcuacgaagagucccuucauaaccccuauccugauuaccacuggcugcgaacagucaagaccacgaaagagucuuuggugaucauaucgccaucaguagcagaccucgauccguacgacaagagccugcauagucguguuuuucccuccgggaaauguucuggaaucacugugagcuccaccuauugcucaacaaaucacgauuacacuauuuggaugccugaaaacccaagacugggcaccaguugugacaucuucacaaauagcaggggcaagcgggccucuaaaggguccaagaccugcggauuugucgaugagcgcggucucuauaagucauuaaaaggcgcuuguaagcugaaacuuugcgggguguugggacugagacuaauggacggcacgugggcagccauucaaacuagcgaugaaacaaaguggugucccccugaccagcucgugaaccugcacgacuucaggagugaugagaucgagcaucuugucguugaggaacuggugaaaaagcgggaagagugcuuggacgcucucgaaucuauaaugaccacuaaauccgugagcuuucgccgacugucgcacuuaagaaagcugguaccagguuucgggaaggccuacacaauuuucaauaaaacccucauggaggcggaugcacauuauaagucugucaggacguggaacgagaucauucccuccaaaggaugccuucgggugggcggccguugucacccgcacguuaaugggguguuuuucaacggaaucauccuggguccugacggccaugucuugauucccgaaaugcagucaagucuacugcagcaacacauggagcuccuggaaagcuccgugauaccacuuaugcauccucuggccgaucccucuaccguauuuaaggacgaugacgaggcugaagauuucguugaggugcacuugccagacguccauaaacaggugagcggggucgaucucggacugcccucauggggcaaguacguguuaaugagugccgguguucugacagcacuaaugcucaugaucuuucugaugacuugcugucgcgggaccaauagagcugaguccgcccagcacagccuuggcgaaaggggacggaaggugucuguaacaucacagaacggccgagucauuaguagcugggaguccuauaaaucugggggagaaacuaaguuguga

SEQ ID NO: 158712 - RNA, 1575 nt, Artificial Sequence
  derived and/or modified CDS sequence (opt3) from glycoprotein__RABV__AB563946.2
augaucccccaggcccuccuguucgugccucuucugauuagcuccuugugcuuuggcaaguucccaauauacaccaucccggacaaauuagggcccuggucuccuauugauauccaccaucugucauguccaaacaaucuagucguugaggacgaaggaugcacaaaccucagugguuuuagcuauauggagcugaaggugggcuacauuuccgcuaucaaaguaaauggguucacuuguacgggaguggucaccgaagcagagacauauacuaacuuugugggcuacguuaccacaaccuucaagagaaaacacuuuaggcccacuccugaugccugccgggcggcuuauaauuggaagauggccggugacccacgcuacgaagagucucuucauaaccccuauccugauuaccacuggcugcgaacagugaagaccacgaaagagucguuggucauaaucucaccaagcguggcagaccucgauccguacgacaagagucugcauucccguguauuccccucugggaaauguagcggaauuacuguuuccucaaccuauugcaguacaaaucacgauuacacuaucuggaugccugaaaacccaagacugggcaccagcugugacauuuuuacaaauucuaggggcaagcgggccuccaaagggucaaagaccugcggauucguggaugagcgcggucucuauaagagcuuaaaaggcgcuuguaagcugaaacuuugcggggucuugggacugagacuaauggacggcacgugggcagccauccaaacaagugaugaaacuaaguggugucccccugaccagcucgugaaccugcacgacuuuaggucugaugagauagagcaucuuguggucgaggaacugguuaaaaagcgggaagagugcuuggacgcucucgaauccauuaugaccacuaaaagcgugucguuccgccgacugucucacuuaagaaagcugguaccagguuuugggaaggccuacacaaucuucaauaaaacccucauggaggcggaugcacauuauaaguccgugaggacguggaacgagauuauccccucaaaaggaugccuucgggucggcggccguugucacccgcacgugaaugggguuuucuuuaacggaaucauucuggguccugacggccauguguugauacccgaaaugcagaguagccuacugcagcaacacauggagcuccuggaauccucugucaucccacuuaugcauccucuggccgaucccagcaccguguucaaggacgaugacgaggcugaagauuuuguagagguucacuugccagacgugcauaaacaggucucagggguggaucucggacugcccaguuggggcaaguacgucuuaauguccgccggugugcugacagcacuaaugcucaugauuuuccugaugacuugcugucgcagagcuaauagggccgagagcgcgcagcacucucuuggggaacggggccgaaagguuucagugaccagucagagcggacgcguaaucuccucuugggagucguauaaaagcggcggggaaacaaaguuguga

SEQ ID NO: 158713 - RNA, 1575 nt, Artificial Sequence; identical to SEQ ID NO: 158687
  derived and/or modified CDS sequence (opt3) from glycoprotein__RABV__AB563947.1

SEQ ID NO: 158714 - RNA, 1575 nt, Artificial Sequence
  derived and/or modified CDS sequence (opt3) from glycoprotein__RABV__AB563948.1
augaucccccaggcccugauguucgugccucuccuugucuuuagccugugcuucggcaaguuuccaauuuacaccauaccggacaaauuggggcccugguccccuaucgauauucaccauuuaucuuguccaaacaaucugguuguggaggacgaaggaugcacaaaccuaucagguuucaguuauauggagcucaagguaggcuacaucagcgcuauuaaagugaauggguuuacuuguacgggagucgugaccgaagcagagacauauacuaacuucguuggcuacgugaccacaaccuuuaagagaaaacacuucaggcccaugccugaugccugccgggcggcuuauaauuggaagauggccggugacccacgcuacgaagagucccugcauaaccccuauccugauuaccacuggcuucgaacugucaagacaaccaaagagucucuggugaucauaucgccaucaguagcagacuuggauccguacgacaagagccuccauagucguguuuuucccgggggaaaauguuccggcaugacggugucuagcacuuauugcuccaccaaucacgauuacacaaucuggaugccugaaaacccaagacugggcacuucaugugacauuuucaccaauaguagggggaagcgggccagcaaaggaucuaagacaugcgguuuugucgaugagcgcggccuguauaagucccucaaaggggcuuguaaguuaaaacugugcggagugcuuggcuugagacugauggacgguaccugggcagccauccaaacgucagaugaaacuaaguggugucccccugaccagcuagugaaccuccacgacuucaggagcgaugagauugagcaucuggucguugaggaacuugugaaaaagcgggaagagugccuggacgcuuuggaaaguaucaugacaaccaaaucuguauccuuucgccgacucagccaccugagaaaguuagugccaggguucggaaaggccuacacuauauucaauaaaacacugauggaggcggaugcacauuauaagucggucaggaccuggaacgagauuauccccucuaaaggcugccuccgggugggcgggcguugucacccgcacguuaauggaguguuuuucaacgguauuauccuuggcccugacgggcauguccugauccccgaaaugcaguccucauugcuacagcaacacauggagcugcucgaaaguagcgugauuccacugaugcauccucuugccgaucccuccacgguauuuaagggagacgaugaggcugaagacuucguugaggugcaucugccagauguccacaaacaggugucuggcgucgacuugggucuccccagcugggggaaguacgugcugaugucagccggcguuuuaaccgcacugaugcuaaugauauuucucaugacaugcuguaagcgcgcuaauagagccgagagugcgcaccacucccugggagaaaggggccggaaagugagcguaacuucucagucagggcgagucaucaguagcugggaguccuauaagucuggaggugaaaccaaacuuuga

SEQ ID NO: 158715 - RNA, 1575 nt, Artificial Sequence
  derived and/or modified CDS sequence (opt3) from glycoprotein__RABV__AB563949.1
augaucccccaggcccugauguucgugccucuccuugucuuuagccugugcuucggcaaguuuccaauuuacaccauaccggacaaauuggggcccugguccccuaucgauauucaccauuuaucuuguccaaacaaucugguuguggaggacgaaggaugcacaaaccuaucagguuucaguuauauggagcucaagguaggcuacaucagcgcuauuaaagugaauggguuuacuuguacgggagucgugaccgaagcagagacauauacuaacuucguuggcuacgugaccacaaccuuuaagagaaaacacuucaggcccaugccugaugccugccgggcggcuuauaauuggaagauggccggugacccacgcuacgaagagucccugcauaaccccuauccugauuaccacuggcuucgaacugucaagacaaccaaagagucucuggugaucauaucgccaucaguagcagacuuggauccguacgacaagagccuccauagucguguuuuucccuccgggaaauguucuggaaugacggugagcuccacuuauugcucaaccaaucacgauuacacaaucuggaugccugaaaacccaagacugggcacuagcugugacauuuucaccaauagcaggggcaagcgggccucuaaaggguccaagacaugcggauuugucgaugagcgcggucuguauaagucacucaaaggcgcuuguaaguuaaaacugugcggggugcuuggauugagacugauggacggcaccugggcagccauccaaacgagcgaugaaacuaaguggugucccccugaccagcuagugaaccuccacgacuucaggagugaugagauugagcaucuggucguugaggaacuugugaaaaagcgggaagagugccuggacgcuuuggaaucuaucaugacaaccaaauccguaaguuuucgccgacucucgcaccugagaaaguuagugccagguuucgggaaggccuacacuauauucaauaaaacacugauggaggcggaugcacauuauaagucugucaggaccuggaacgagauuauccccuccaaaggaugccuccgggugggcggccguugucacccgcacguuaaugggguguuuuucaacggaauuauccuugguccugacggccauguccugauccccgaaaugcagucaaguuugcuacagcaacacauggagcugcucgaaagcuccgugauuccacugaugcauccucuugccgaucccucuacgguauuuaagggggacgaugaggcugaagacuucguugaggugcaucugccagauguccacaaacaggugagcggagucgacuugggccuccccucaugggguaaguacgugcugaugagugccgggguuuuaaccgcacugaugcuaaugauauuucucaugacaugcuguaagcgcgcuaauagagccgaguccgcgcaccacaaccugggcgaaaggggacggaaagugagcguaacuucucagucaggccgagucaucaguagcugggaguccuauaagucugggggagaaaccaaacuuuga

SEQ ID NO: 158716 - RNA, 1575 nt, Artificial Sequence
  derived and/or modified CDS sequence (opt3) from glycoprotein__RABV__AB563950.1
augaucccccaggcccugauguucgugccucuccuugucuuuagccugugcuucggcaaguuuccaauuuacaccauaccggacaaauuggggcccugguccccuaucgauauucaccauuuaucuuguccaaacaaucugguuguggaggacgaaggaugcacaaaccuaucagguuucaguuauauggagcucaagguaggcuacaucagcgcuauuaaagugaauggguuuacuuguacgggagucgugaccgaagcagagacauauacuaacuucguuggcuacgugaccacaaccuuuaagagaaaacacuucaggcccaugccugaugccugccgggcggcuuauaauuggaagauggccggugacccacgcuacgaagagucccugcauaaccccuauccugauuaccacuggcuucgaacugucaagacaaccaaagagucucuggugaucauaucgccaucaguagcagacuuggauccguacgacaagagccuccauagucguguuuuucccuccgggaaauguucuggaaucacggugagcuccacuuauugcucaaccaaucacgauuacacaauuuggaugccugaaaacccaagacugggcacuucgugugacaucuucaccaauagcaggggcaagcgggccucuaaaggguccaagacaugcggauuugucgaugagcgcggucuguauaagucacucaaaggcgcuuguaaguuaaaacugugcggggugcuuggauugagacugauggacggcaccugggcagccauucaaacgagcgaugaaacuaaguggugucccccugaccagcuagugaaccuccacgacuucaggagugaugagaucgagcaucuggucguugaggaacuugugaaaaagcgggaagagugccuggacgcuuuggaaucuauaaugacaaccaaauccgugagcuuucgccgacucucgcaccugagaaaguuaguaccagguuucgggaaggccuacacuauuuucaauaaaacacugauggaggcggaugcacauuauaagucugucaggaccuggaacgagaucauucccuccaaaggaugccuccgggugggcggccguugucacccgcacguuaaugggguguuuuucaacggaaucauccuugguccugacggccauguccugauucccgaaaugcagucaaguuugcuacagcaacacauggagcugcucgaaagcuccgugauaccacugaugcauccucuugccgaucccucuacgguauuuaagggggacgaugaggcugaagacuucguugaggugcaucugccagauguccacaaacaggugagcggagucgacuugggccuccccucaugggguaaguacgugcugaugagugccgggguuuuaaccgcacugaugcuaaugaucuuucucaugacaugcuguaagcgcgcuaauagagccgaguccgcgcaccacagccugggcgaaaggggacggaaagugucuguaacuucacagaguggccgagucauuagcuccugggagucuuauaagagugggggagaaaccaaacuuuga

SEQ ID NO: 158717 - RNA, 1575 nt, Artificial Sequence
  derived and/or modified CDS sequence (opt3) from glycoprotein__RABV__AB563951.1
augaucccccaggcccuccuguucgugccucuucuggucuuuagcuugugcuucggcaaguuuccaauuuacaccauaccggacaaauuagggcccugguccccuaucgauauucaccaucugucuuguccaaacaaucuaguuguggaggacgaaggaugcacaaaccucucagguuucaguuauauggagcugaagguaggcuacaucagcgcuauuaaagugaauggguuuacuuguacgggagucgugaccgaagcagagacauauacuaacuucguuggcuacgugaccacaaccuuuaagagaaaacacuucaggcccacuccugaugccugccgggcggcuuauaauuggaagauggccggugacccacgcuacgaagagucccuucauaaccccuauccugauuaccacuggcugcgaacagucaagaccacgaaagagucuuuggugaucauaucgccaucaguagcagaccucgauccguacgacaagagccugcauagucguguuuuucccuccgggaaauguucuggaaucacugugagcuccaccuauugcucaacaaaucacgauuacacuauuuggaugccugaaaacccaagacugggcaccaguugugacaucuucacaaauagcaggggcaagcgggccucuaaaggguccaagaccugcggauuugucgaugagcgcggucucuauaagucauuaaaaggcgcuuguaagcugaaacuuugcgggguguugggacugagacuaauggacggcacgugggcagccauucaaacuagcgaugaaacaaaguggugucccccugaccagcucgugaaccugcacgacuucaggagugaugagaucgagcaucuugucguugaggaacuggugaaaaagcgggaagagugcuuggacgcucucgaaucuauaaugaccacuaaauccgugagcuuucgccgacugucgcacuuaagaaagcugguaccagguuucgggaaggccuacacaauuuucaauaaaacccucauggaggcggaugcacauuauaagucugucaggacguggaacgagaucauucccaccaaaggaugccuucgggugggcggccguugucacccgcacguuaaugggguguuuuucaacggaaucauccuggguccugacggccaugucuugauucccgaaaugcaguccucacuacugcagcaacacauggagcuccuggaaaguagcgugauaccacuuaugcauccucuggccgaucccuccacaguauuuaaggacgaugacgaggcugaagauuucguugaggugcacuugccagacguccauaaacaggugucuggggucgaucucggacugcccagcuggggcaaguacguguuaaugucagccgguguucugacugcacuaaugcucaugaucuuucugaccacaugcugucgcagagcugacagggccgagagugcgcagcacucccuuggggaacggggccgaaaggugagcguaacuucucagucaggacgcgucauuaguagcugggaguccuauaaaucuggcggggaaaccaaguuguga

SEQ ID NO: 158718 - RNA, 1575 nt, Artificial Sequence; identical to SEQ ID NO: 158643
  derived and/or modified CDS sequence (opt3) from glycoprotein__RABV__AB563952.2

SEQ ID NO: 158719 - RNA, 1575 nt, Artificial Sequence; identical to SEQ ID NO: 158643
  derived and/or modified CDS sequence (opt3) from glycoprotein__RABV__AB563953.2

SEQ ID NO: 158720 - RNA, 1575 nt, Artificial Sequence; identical to SEQ ID NO: 158620
  derived and/or modified CDS sequence (opt3) from glycoprotein__RABV__AB563954.1

SEQ ID NO: 158721 - RNA, 1575 nt, Artificial Sequence
  derived and/or modified CDS sequence (opt3) from glycoprotein__RABV__AB563955.1
augaucccccaggcccuucucuucgugccucuucuggucuuuagcuugugcuucggcaaguuuccaauuuacaccauaccggacaaauuagggcccugguccccuaucgauauucaccaucugucuuguccaaacaaucuaguuguggaggacgaaggaugcacaaaccucucagguuucaguuauauggagcugaagguaggcuacaucagcgcuauuaaagugaauggguuuacuuguacgggagucgugaccgaagcagagacauauacuaacuucguuggcuacgugaccacaaccuuuaagagaaaacacuucaggcccacuccugaugccugccgggcggcuuauaauuggaagauggccggugacccacgcuacgaagagucccuucauaaccccuauccugauuaccacuggcugcgaacagucaagaccacgaaagagucuuuggugaucauaucgccaucaguagcagaccucgauccguacgacaagagcccccauagucguguuccuccauccgggaaauguucuggaaucacugugagcuccaccuauugcucaacaaaucacgauuacacuauuuggaugcccgaaaacccuagacugggcaccaguugugacaucuuuacaaauagcaggggcaagcgggccucuaaaggguccaagaccugcggauucgucgaugagcgcggucuguauaagucacucaaaggcgcuuguaaguuaaaacugugcggggugcuuggauugagacugauggacggcacgugggcagccauucaaacuagcgaugaaacaaagugguguccacccgaccagcuagugaaccuccacgacuuuaggagugaugagaucgagcaucuggucguugaggaacuugugaaaaagcgggaagagugccuggacgcuuuggaaucuauaaugaccacuaaauccgugagcuuccgccgacucucgcaccugagaaaguuaguaccggguuuugggaaggccuacacaauuuucaauaaaacccugauggaggcggaugcacauuauaagucugucaggacguggaacgagaucauuccuuccaaaggaugccuccgggugggcggccguugucacccccacguuaaugggguguucuuuaacggaaucauccuugguccagacggccauguccugauuccugaaaugcagucaaguuugcuacagcaacacauggagcugcucgaaagcuccgugauaccccugaugcauccacuugccgaucccucuaccguauucaaggacgaugacgaggcugaagauuuuguugaggugcaucugccugacguccacaaacaggugagcggggucgauuugggacucccaucauggggcaaguacgugcugaugagugccgguguuuuaacagcacugaugcuaaugaucuuccucacuaccugcugucgcagagcuaauagggccgaguccgcgcagcacagccugggggaacggggccgaaaggugucuguaacaucacagaguggacgcgucauuagcuccugggagucuuauaaaucgggcggggaaacuaagcuguga

SEQ ID NO: 158722 - RNA, 1575 nt, Artificial Sequence
  derived and/or modified CDS sequence (opt3) from glycoprotein__RABV__AB563956.1
augaucccccaggcccuucucuucgugccucuucuggucuuuagcuugugcuucggcaaguuuccaauuuacaccauaccggacaaauuagggcccugguccccuaucgauauucaccaucugucuuguccaaacaaucuaguuguggaggacgaaggaugcacaaaccucucagguuucaguuauauggagcugaagguaggcuacaucagcgcuauuaaagugaauggguuuacuuguacgggagucgugaccgaagcagagacauauacuaacuucguuggcuacgugaccacaaccuuuaagagaaaacacuucaggcccacuccugaugccugccgggcggcuuaugacuggaagauggccggugauccacgcuacgaagagucccuucauaaucccuauccugacuaccacuggcugcgaacagucaagaccacgaaagagucuccagugaucauaucgccgucaguagcagauuuggaccccuacgauaagagccuccauagucguguuccuccauccgggaaauguucuggaaucacugugagcuccaccuauugcucaacaaaccacgacuacacuauuuggaugcccgaaaauccuagacugggcaccaguugugauaucuuuacaaacagcaggggcaagcgggccucuaaaggguccaagaccugcggauucgucgacgagcgcggucuguauaagucacucaaaggcgcuuguaaguuaaaacugugcggggugcuuggauugagacugauggauggcacgugggcagccauucaaacuagcgacgaaacaaagugguguccacccgaccagcuagugaaucuccacgauuuuaggagugacgagaucgagcaucuggucguugaggaacuugugaaaaagcgggaagagugccuggaugcuuuggaaucuauaaugaccacuaaauccgugagcuuccgccgacucucgcaccugagaaaguuaguaccggguuuugggaaggccuacacaauuuucaacaaaacccugauggaggcggacgcacauuauaagucugucaggacguggaaugagaucauuccuuccaaaggaugccuccgggugggcggccguugucacccccacguuaacgggguguucuuuaauggaaucauccuugguccagauggccauguccugauuccugaaaugcagucaaguuugcuacagcaacacauggagcugcucgaaagcuccgugauaccccugaugcauccacuugccgaccccucuaccguauucaaggaugacgaugaggcugaagacuuuguugaggugcaucugccugauguccacaaacaggugagcggggucgacuugggacucccaucauggggcaaguacgugcugaugagugccgguaucuuaacagcacugaugcuaaugauuuuccucacuaccugcugucgcagagcugacagggccgaguccgcgcagcacagccugggggaacggggccgaaagguuucugugacaucacagaguggacgcguaaucagcuccugggagucuuauaaaucgggcggggaaacuaagcuguga

SEQ ID NO: 158723 - RNA, 1575 nt, Artificial Sequence
  derived and/or modified CDS sequence (opt3) from glycoprotein__RABV__AB563957.1
augaucccccaggcccugcucuuugugccucuuauggucuuuagccugugcuucggcaaguuuccaauuuacaccauaccggacaaauuggggcccugguccccuaucgauauucaccauuuaucuuguccaaacaaucugguuguggaggacgaaggaugcacaaaccuaucagguuucaguuauauggagcucaagguaggcuacaucagcgcuauuaaagugaauggguuuacuuguacgggagucgugaccgaagcagagacauauacuaacuucguuggcuacgugaccacaaccuuuaagagaaaacacuucaggcccacuccugaugccugccgggcggcuuauaauuggaagauggccggugacccacgcuacgaagagucccugcauaaccccuauccugauuaccacuggcuucgaacagucaagaccacgaaagagucucuggugaucauaucgccaucaguagcagacuuggauccguacgacaagagccuccauagucgugccuuucccuccgggaaauguucuggaaucacuguuagcuccaccuauugcucaacaaaucacgauuacacuauuuggaugccugaaaacccaagacugggcaccaguugugacaucuucacaaauagcaggggcaagcgggcuucuaaaggguccaagaccugcggauuuguggaugagcgcggucuguauaagucacucaaaggcgcauguaaguuaaaacugugcgggguccuuggauugagacugauggacggcacgugggccgcuauucaaacuagcgaugaaacaaaguggugucccccugaccagcuagugaaccuccacgacuucaggagugaugagaucgagcaucugguggucgaggaacuuguuaaaaagcgggaagagugccuggacgccuuggaaucuauaaugaccacuaaauccgugagcuuucgccgacucucgcaccugagaaaguuaguaccagguuucgggaaggcguacacaauuuucaauaaaacccugauggaggcagaugcccauuauaagucugugaggacguggaacgagaucauucccuccaaaggaugccuccgggucggcggccguugucacccgcacgugaaugggguuuucuucaacggaaucauccuugguccugacggccaugugcugauucccgaaaugcagucaaguuugcuacagcaacacauggagcugcucgaaagcuccgucauaccacugaugcauccucuugcugaucccucuaccguguuuaaggacgaugacgaggccgaagauuucguagagguucaccuuccagacgugcauaaacaggucagcgggguggauuugggacuccccucauggggcaaguacguccugaugagugcugguguguuaacagcacugaugcuaaugaucuuucucaugacuugcugucgcagaaccaauagggccgaguccgcgcagcacagccugggggaacggggccgaaagguuucugugacaucacagaguggacgcguaauuagcuccugggagucuuauaaaucgggcggggaaacuaagcuguga

SEQ ID NO: 158724 - RNA, 1575 nt, Artificial Sequence; identical to SEQ ID NO: 158687
  derived and/or modified CDS sequence (opt3) from glycoprotein__RABV__AB563958.1

SEQ ID NO: 158725 - RNA, 1575 nt, Artificial Sequence
  derived and/or modified CDS sequence (opt3) from glycoprotein__RABV__AB563959.1
augaucccccaggcccugauguucgugccucuccuugucuuuagccugugcuucggcaaguuuccaauuuacaccauaccggacaaauuggggcccugguccccuaucgauauucaccauuuaucuuguccaaacaaucugguuguggaggacgaaggaugcacaaaccuaucagguuucaguuauauggagcucaagguaggcuacaucagcgcuauuaaagugaauggguuuacuuguacgggagucgugaccgaagcagagacauauacuaacuucguuggcuacgugaccacaaccuuuaagagaaaacacuucaggcccaugccugaugccugccgggcggcuuauaauuggaagauggccggugacccacgcuacgaagagucccugcauaaccccuauccugauuaccacuggcuucgaacugucaagacaaccaaagagucucuggugaucauaucgccaucaguagcagacuuggauccguacgacaagagccuccauagucguguuuuucccuccgggaaauguucuggaacgacugugagcuccaccuauugcucaacaaaucacgauuacacuaucuggaugccugaaaacccaagacugggcaccaguugugacauuuucacaaauagcaggggcaagcgggccucuaaaggguccaagaccugcggauuugucgaugagcgcggucuguauaagucacucaaaggcgcuuguaaguuaaaacugugcggggugcuuggauugagacugauggacggcacgugggcagccauccaaacuagcgaugaaacaaaguggugucccccugaccagcuagugaaccuccacgacuucaggagugaugagauugagcaucuggucguugaggaacuugugaaaaagcgggaagagugccuggacgcuuuggaaucuaucaugaccacuaaauccguaucguuucgccgacucucgcaccugagaaaguuagugccagguuucgggaaggccuacacaauauucaauaaaacccugauggaggcggaugcacauuauaagucugucaggacguggaacgagauuauccccuccaaaggaugccuccgggugggcggccguugucacccgcacguuaaugggguguuuuucaacggaauuauccuugguccugacggccauguccugauccccgaaaugcagucaaguuugcuacagcaacacauggagcugcucgaaagcuccgugauuccacugaugcauccucuugccgaucccucuaccguauuuaagggggacgaugaggcugaagacuucguugaggugcaucugccagauguccacaaacaggugagcggagucgacuugggccuccccucaugggguaaguacgugcugaugagugccgggguuuuaacagcacugaugcuaaugauauuucucaugacuugcuguaagcgcgcuaauagagccgaguccgcgcaccacagccugggcgaaaggggacggaaagugucuguaaccucacagaguggccgagucaucagcuccugggagucuuauaagagcgggggagaaacaaaacuuuga

SEQ ID NO: 158726 - RNA, 1575 nt, Artificial Sequence
  derived and/or modified CDS sequence (opt3) from glycoprotein__RABV__AB563960.1
augaucccccaggcccugcuguucgugccuuuucuugucuucagccugugcuuuggcaaguucccaauuuacaccauaccggacaaauuggggcccugguccccuaucgauauucaccauuuaucuuguccaaacaaucugguuguggaggacgaaggaugcacaaaccuaucagguuuuaguuauauggagcucaagguaggcuacaucagcgcuauuaaagugaauggguucacuuguacgggagucgugaccgaagcagagacauauacuaacuuuguuggcuacgugaccacaaccuucaagagaaaacacuuuaggcccaugccugaugccugccgggcggcuuauaauuggaagauggccggugacccacgcuacgaagagucccugcauaaccccuauccugauuaccacuggcuucgaacugucaagacaaccaaagagucucuggugaucauaucgccaucaguagcagacuuggauccguacgacaagagccuccauagucguguuuuccccuccgggaaauguucuggaaucacggugagcuccacuuauugcucaaccaaucacgauuacacaauuuggaugccugaaaacccaagacugggcacuagcugugacaucuuuaccaauagcaggggcaagcgggccucuaaaggguccaagacaugcggauucgucgaugagcgcggucuguauaagucacucaaaggcgcuuguaaguuaaaacugugcggggugcuuggauugagacugauggacggcaccugggcagccauucaaacgagcgaugaaacuaaguggugucccccugaccagcuagugaaccuccacgacuuuaggagugaugagaucgagcaucuggucguugaggaacuugugaaaaagcgggaagagugccuggacgcuuuggaaucuauaaugacaaccaaauccguaaguuuccgccgacucucgcaccugagaaaguuagugccagguuucgggaaggccuacacuauuuuuaauaaaacacugauggaggcggaugcacauuauaagucugucaggaccuggaacgagaucauucccuccaaaggaugccuccgggugggcggccguugucacccgcacguuaaugggguguucuuuaacggaaucauccuugguccugacggccauguccugauucccgaaaugcagucaaguuugcuacagcaacacauggagcugcucgaaagcuccgugauaccacugaugcauccucuugccgaucccucuacgguauucaaggacgaugacgaggcugaagauuuuguugaggugcaccucccagacguccauaaacaggugagcggggucgauuugggacuccccucauggggcaaguacgugcugaugagugccgguguuuuaaccgugcugaugcuaaugaucuucuuuaugacaugcugucgcagagcaaauaggguagaguccgcucagcacagccucggggaacggggccgaaaggucucugugacuucacagaguggacgcguuauuagcuccugggagucuuauaaaucgggcggggaaaccaagcuguga

SEQ ID NO: 158727 - RNA, 1575 nt, Artificial Sequence; identical to SEQ ID NO: 158682
  derived and/or modified CDS sequence (opt3) from glycoprotein__RABV__AB563961.1

SEQ ID NO: 158728 - RNA, 1575 nt, Artificial Sequence; identical to SEQ ID NO: 158682
  derived and/or modified CDS sequence (opt3) from glycoprotein__RABV__AB563962.1

SEQ ID NO: 158729 - RNA, 1575 nt, Artificial Sequence
  derived and/or modified CDS sequence (opt3) from glycoprotein__RABV__AB563963.1
augaucccccaggcccuucucuucgugccucuucuggucuuuagcuugugcuucggcaaguuuccaauuuacaccauaccggacaaauuagggcccugguccccuaucgauauucaccaucugucuuguccaaacaaucuaguuguggaggacgaaggaugcacaaaccucucagguuucaguuauauggagcugaagguaggcuacaucagcgcuauuaaagugaauggguuuacuuguacgggagucgugaccgaagcagagacauauacuaacuucguuggcuacgugaccacaaccuuuaagagaaaacacuucaggcccacuccugaugccugccgggcggcuuauaauuggaagauggccggugacccacgcuacgaagagucccuucauaaccccuauccugauuaccacuggcugcgaacagucaagaccacgaaagagucuuuggugaucauaucgccaucaguagcagaccucgauccguacgacaagagccugcauagucguguuuuucccuccgggaaauguucuggaaucacugugagcuccaccuauugcucaacaaaucacgauuacacuauuuggaugccugaaaacccaagacugggcaccaguugugacaucuucacaaauagcaggggcaagcgggccucuaaaggguccaagaccugcggauuugucgaugagcgcggucucuauaagucauuaaaaggcgcuuguaagcugaaacuuugcgggguguugggacugagacuaauggacggcacgugggcagccauucaaacuagcgaugaaacaaaguggugucccccugaccagcucgugaaccugcacgacuucaggagugaugagaucgagcaucuugucguugaggaacuggugaaaaagcgggaagagugcuuggacgcucucgaaucuauaaugaccacuaaauccgugagcuuucgccgacugucgcacuuaagaaagcugguaccagguuucgggaaggccuacacaauuuucaauaaaacccucauggaggcggaugcacauuauaagucugucaggacguggaacgagaucauucccuccaaaggaugccuucgggugggcggccguugucacccgcacguuaaugggguguuuuucaacggaaucauccuggguccugacggccaugucuugauucccgaaaugcagucaagucuacugcagcaacacauggagcuccuggaaagcuccgugauaccacuuaugcauccucuggccgaucccucuaccaucuuuaaggacgaugacgaggcugaagauuucguagagguucacuugccagacgugcauaaacaggucagcgggguggaucucggacugcccucauggggcaaguacgucuuaaugagugccggugugcugacaguucuaaugcucaugaucuuuuucaugacuugcugucgcagagcaaauaggguggaguccgcucagcacagccugggggaacggggccgaaagguaucugucaccucacagaguggacgcgugauuagcuccugggagucuuauaaaucgggcggggaaacaaagcuguga

SEQ ID NO: 158730 - RNA, 1575 nt, Artificial Sequence; identical to SEQ ID NO: 158682
  derived and/or modified CDS sequence (opt3) from glycoprotein__RABV__AB563964.1

SEQ ID NO: 158731 - RNA, 1575 nt, Artificial Sequence; identical to SEQ ID NO: 158682
  derived and/or modified CDS sequence (opt3) from glycoprotein__RABV__AB563966.1

SEQ ID NO: 158732 - RNA, 1575 nt, Artificial Sequence; identical to SEQ ID NO: 158619
  derived and/or modified CDS sequence (opt3) from glycoprotein__RABV__AB563969.1

SEQ ID NO: 158733 - RNA, 1575 nt, Artificial Sequence
  derived and/or modified CDS sequence (opt3) from glycoprotein__RABV__AB563970.2
augaacccccaggcccugauguucgugccucuccuugucuuuagccugugcuucggcaaguuuccaaucuacaccauuccggacaaauuggggcccugguccccuauagauauccaccauuuaucuuguccaaauaaccugguuguggaggacgaaggaugcacaaaucuaucagguuucaguuauauggagcucaagguaggcuacauuagcgcuaucaaagugaacggguuuacuuguacgggagucgugaccgaagcagagacauauacuaauuucguuggcuacgugaccacaaccuuuaagagaaaacacuucaggcccacuccugaugccugccgggcggcuuauaacuggaagauggccggugacccacgcuacgaagagucccugcauaaucccuauccugauuaccacuggcuucgaacagucaagaccacgaaagagucucuggugauuaucucgccaucaguagcagacuuggauccguacgacaagagccuccauagucguguuuuucccuccgggaaauguucuggaauaacugugagcuccaccuauugcucaacaaaccacgauuacacuaucuggaugccugaaaauccaagacugggcaccaguugugacauuuucacaaacagcaggggcaagcgggccucuaaaggguccaugaccugcggauuugucgaugagcgcggucuguauaagucacucaagggcgcuuguaaauuaaagcugugcggggugcuuggauugagacugauggacggcacgugggcagccauccaaacuagcgaugaaacaaaauggugucccccugaccagcuagugaaucuccacgacuuccauagugaugagauugagcaccuggucguugaggaacuugugaagaaaagggaagagugccuggacgcuuuggaaucuaucaugaccacuaaguccgugagcuuucggcgccucucgcaucugcgaaaauuagugccagguuucgggaaggccuacacaauauucaacaagacccugauggaggcggaugcacacuauaaaucugucagaacguggaaugagauuauccccuccaagggaugccucagggugggcggccggugucacccgcauguuaacgggguguuuuucaauggaauuauccuugguccugacggccacguccugauccccgaaaugcagucaaguuugcuacagcaacauauggagcugcucgaaagcuccgugauuccacugaugcacccucuugccgaucccucuaccguauuuaaagacgaugacgaggcugaagauuucguugaggugcaucugccagacguccacaagcagguaagcggggucgauuugggacuccccucauggggcaaauacgugcugaugagugccgguguuuuaacagcacugaugcuaaugauauuucucaugacuugcugucgucgcgcuaacagagccgaguccgcgcagcacagccugggggaaaggggccggaaggugucuguaaccucacagaguggacgagucaucagcuccugggagucuuauaagucgggcggggaaacaaaacuuuga

SEQ ID NO: 158734 - RNA, 1575 nt, Artificial Sequence
  derived and/or modified CDS sequence (opt3) from glycoprotein__RABV__AB563971.1
augaacccccaggcccugauguucgugccucuccuugucuuuagccugugcuucggcaaguuuccaaucuacaccauuccggacaaauuggggcccugguccccuauagauauccaccauuuaucuuguccaaauaaccugguuguggaggacgaaggaugcacaaaucuaucagguuucaguuauauggagcucaagguaggcuacauuagcgcuaucaaagugaacggguuuacuuguacgggagucgugaccgaagcagagacauauacuaauuucguuggcuacgugaccacaaccuuuaagagaaaacacuucaggcccacuccugaugccugccgggcggcuuauaacuggaagauggccggugacccacgcuacgaagagucccugcauaaucccuauccugauuaccacuggcuucgaacagucaagaccacgaaagagucucuggugauuaucucgccaucaguagcagacuuggauccguacgacaagagccuccauagucguguuuuucccuccgggaaauguucuggaauaacuguguucagcaccuauugcuccacaaaccacgauuacacuaucuggaugccugaaaauccaagacugggcaccucaugugacauuuuuacaaacaguaggggcaagcgggccagcaaagggucuaagaccugcggauucgucgaugagcgcggucuguauaagucccucaaaggcgcuuguaaguuaaaacugugcggggugcuuggauugagacugauggacggcacgugggcagccauccaaacuucagaugaaacaaaguggugucccccugaccagcuagugaaucuccacgacuuuaggagcgaugagauugagcaucuggucguugaggaacuugugaaaaagcgggaagagugccuggacgcuuuggaaaguaucaugaccacuaaaucuguauccuuccgccgacucagccaccugagaaaguuagugccagguuucgggaaggccuacacaauauuuaacaaaacccugauggaggcggaugcacauuauaagucggucaggacguggaaugagauuauccccucuaaaggaugccuccgggugggcggccguugucacccgcacguuaacgggguguucuuuaauggaauuauccuugguccugacggccauguccugauccccgaaaugcaguccucauugcuacagcaacacauggagcugcucgaaaguagcgugauuccacugaugcauccucuugccgaucccuccaccguauucaaggacgaugacgaggcugaagauuuuguugaggugcaccuuccagacguccauaaacaggugucuggggucgauuugggacuccccagcuggggcaaguacgugcugaugucagccgguguuuuaacagcacugaugcuaaugauauuccucaugacuugcugucgcagagcuaacagggccgagagugcgcagcacucccugggggaacggggccgaaaggugagcguaaccucucagucaggacgcgucaucaguagcugggaguccuauaaaucuggcggggaaacaaagcuguga

SEQ ID NO: 158735 - RNA, 1575 nt, Artificial Sequence
  derived and/or modified CDS sequence (opt3) from glycoprotein__RABV__AB563973.2
augaucccccaggcccuccuguucgugccucuucuggucagcuccuugugcuuuggcaaguucccaauuuacaccauaccggacaaauuagggcccuggucuccuaucgauauucaccaucugucauguccaaacaaucuaguuguggaggacgaaggaugcacaaaccucagugguuuuagcuauauggagcugaagguaggcuacaucuccgcuauuaaagugaauggguucacuuguacgggagucgugaccgaagcagagacauauacuaacuuuguuggcuacgugaccacaaccuucaagagaaaacacuuuaggcccacuccugaugccugccgggcggcuuauaauuggaagauggccggugacccacgcuacgaagagucucuucauaaccccuauccugauuaccacuggcugcgaacagucaagaccacgaaagagucguuggugaucauaucaccaagcguagcagaccucgauccguacgacaagagucugcauucccguguuuuccccucugggaaauguagcggaaucacuguguccucaaccuauugcaguacaaaucacgauuacacuauuuggaugccugaaaacccaagacugggcaccagcugugacaucuuuacaaauucuaggggcaagcgggccuccaaagggucaaagaccugcggauucgucgaugagcgcggucucuauaagagcuuaaaaggcgcuuguaagcugaaacuuugcgggguguugggacugagacuaauggacggcacgugggcagccauucaaacaagugaugaaacuaaguggugucccccugaccagcucgugaaccugcacgacuuuaggucugaugagaucgagcaucuugucguugaggaacuggugaaaaagcgggaagagugcuuggacgcucucgaauccauaaugaccacuaaaagcguaucguuccgccgacugucucacuuaagaaagcuggugccagguuuugggaaggccuacacaauuuucaauaaaacccucauggaggcggaugcacauuauaaguccgucaggacguggaacgagaucauucccucaaaaggaugccuucgggugggcggccguugucacccgcacguuaaugggguguucuuuaacggaaucauccuggguccugacggccaugucuugauucccgaaaugcagaguagccuacugcagcaacacauggagcuccuggaauccucugugauaccacuuaugcauccucuggccgaucccagcaccguauucaaggacgaugacgaggcugaagauuuuguugaggugcacuugccagacguccauaaacaggugucaggggucgaucucggacugcccaguuggggcaaguacguguuaacauccgccagcguucugacugcacuaaugcucaugaucuuccugaugaccugcugucgcagagcuaauagggccgagucugcgcagcacucacuuggugaacgggggcgaaaggugaguguaacaagccaguccggccgcgucauuucuucgugggagagcuauaaauccggaggcgaaacuaaguuguga

SEQ ID NO: 158736 - RNA, 1575 nt, Artificial Sequence
  derived and/or modified CDS sequence (opt3) from glycoprotein__RABV__AB563974.1
augaucccccaggcccuccuguucgugccucuucuggucagcuccuugugcuuuggcaaguucccaauuuacaccauaccggacaaauuagggcccuggucuccuaucgauauucaccaucugucauguccaaacaaucuaguuguggaggacgaaggaugcacaaaccucagugguuuuagcuauauggagcugaagguaggcuacaucuccgcuauuaaagugaauggguucacuuguacgggagucgugaccgaagcagagacauauacuaacuuuguuggcuacgugaccacaaccuucaagagaaaacacuuuaggcccacuccugaugccugccgggcggcuuauaauuggaagauggccggugacccacgcuacgaagagucucuucauaaccccuauccugauuaccacuggcugcgaacagucaagaccacgaaagagucguuggugaucauaucaccaagcguagcagaccucgauccguacgacaagagucugcauucccguguuuuccccucugggaaauguagcggaaucacuguguccucaaccuauugcaguacaaaucacgauuacacuauuuggaugccugaaaacccaagacugggcaccagcugugacaucuuuacaaauucuaggggcaagcgggccuccaaagggucaaagaccugcggauucgucgaugagcgcggucucuauaagagcuuaaaaggcgcuuguaagcugaaacuuugcgggguguugggacugagacuaauggacggcacgugggcagccauucaaacaagugaugaaacuaaguggugucccccugaccagcucgugaaccugcacgacuuuaggucugaugagaucgagcaucuugucguugaggaacuggugaaaaagcgggaagagugcuuggacgcucucgaauccauaaugaccacuaaaagcguaucguuccgccgacugucucacuuaagaaagcuggugccagguuuugggaaggccuacacaauuuucaauaaaacccucauggaggcggaugcacauuauaaguccgucaggacguggaacgagaucauucccucaaaaggaugccuucgggugggcggccguugucacccgcacguuaaugggguguucuuuaacggaaucauccuggguccugacggccaugucuugauucccgaaaugcagaguagccuacugcagcaacacauggagcuccuggaauccucugugauaccacuuaugcauccucuggccgaucccagcaccguauucaaggacgaugacgaggcugaagauuuuguugaggugcacuugccagacguccauaaacaggugucaggggucgaucucggacugcccaguuggggcaaguacguguuaacauccgccgguguucugacugcacuaaugcucaugaucuuccugaugaccugcugucgcagagcuaauagggccgagagcgcgcagcacucucuuggggaacggggccgaaaggugucaguaacaagucagagcggacgcgucauuuccucuugggagucguauaaaagcggcggggaaacuaaguuguga

SEQ ID NO: 158737 - RNA, 1575 nt, Artificial Sequence; identical to SEQ ID NO: 158736
  derived and/or modified CDS sequence (opt3) from glycoprotein__RABV__AB563975.2

SEQ ID NO: 158738 - RNA, 1575 nt, Artificial Sequence
  derived and/or modified CDS sequence (opt3) from glycoprotein__RABV__AB563976.1
augaucccccaggcccuccuguucgugccucuucuggucuuuagcuugugcuucggcaaguuuccaauuuacaccauaccggacaaauuagggcccugguccccuaucgauauucaccaucugucuuguccaaacaaucuaguuguggaggacgaaggaugcacaaaccucucagguuucaguuauauggagcugaagguaggcuacaucagcgcuauuaaagugaauggguuuacuuguacgggagucgugaccgaagcagagacauauacuaacuucguuggcuacgugaccacaaccuuuaagagaaaacacuucaggcccacuccugaugccugccgggcggcuuauaauuggaagauggccggugacccacgcuacgaagagucccuucauaaccccuauccugauuaccacuggcugcgaacagucaagaccacgaaagagucuuuggugaucauaucgccaucaguagcagaccucgauccguacgacaagagccugcauagucguguuuuucccuccgggaaauguucuggaaucacugugagcuccaccuauugcucaacaaaucacgauuacacuauuuggaugccugaaaacccaagacugggcaccaguugugacaucuucacaaauagcaggggcaagcgggccucuaaaggguccaagaccugcggauuugucgaugagcgcggucucuauaagucauuaaaaggcgcuuguaagcugaaacuuugcgggguguugggacugagacuaauggacggcacgugggcagccauucaaacuagcgaugaaacaaaguggugucccccugaccagcucgugaaccugcacgacuucaggagugaugagaucgagcaucuugucguugaggaacuggugaaaaagcgggaagagugcuuggacgcucucgaaucuauaaugaccacuaaauccguaucguuucgccgacugucgcacuuaagaaagcuggugccagguuucgggaaggccuacacaauuuucaauaaaacccucauggaggcggaugcacauuauaagucugucaggacguggaacgagaucauucccuccaaaggaugccuucgggugggcggccguugucacccgcacguuaaugggguguuuuucaacggaaucauccuggguccugacggccaugucuugauucccgaaaugcagucaagucuacugcagcaacacauggagcuccuggaaagcuccgugauaccacuuaugcauccucuggccgaucccucuaccguauuuaaggacgaugacgaggcugaagauuucguugaggugcacuugccagacguccauaaacaggugagcggggucgaucucggacugcccucauggggcaaguacguguuaaugagugccgguguucugacagcacuaaugcucaugaucuuucugaugacuugcugucgcgggaccaauagagcugaguccgcccagcacagccuuggcgaaaggggacggaaggugucuguaacaucacagaguggccgagucauuagcuccugggagucuuauaaaagcgggggagaaacuaaguuguga

SEQ ID NO: 158739 - RNA, 1575 nt, Artificial Sequence
  derived and/or modified CDS sequence (opt3) from glycoprotein__RABV__AB563977.1
augaucccccaggcccuccuguucgugccucuucuggucuuuagcuugugcuucggcaaguuuccaauuuacaccauaccggacaaauuagggcccugguccccuaucgauauucaccaucugucuuguccaaacaaucuaguuguggaggacgaaggaugcacaaaccucucagguuucaguuauauggagcugaagguaggcuacaucagcgcuauuaaagugaauggguuuacuuguacgggagucgugaccgaagcagagacauauacuaacuucguuggcuacgugaccacaaccuuuaagagaaaacacuucaggcccacuccugaugccugccgggcggcuuauaauuggaagauggccggugacccacgcuacgaagagucccuucauaaccccuauccugauuaccacuggcugcgaacagucaagaccacgaaagagucuuuggugaucauaucgccaucaguagcagaccucgauccguacgacaagagccugcauagucguguuuuucccuccgggaaauguucuggaaucacugugagcuccaccuauugcucaacaaaucacgauuacacuauuuggaugccugaaaacccaagacugggcaccaguugugacaucuucacaaauagcaggggcaagcgggccucuaaaggguccaagaccugcggauuugucgaugagcgcggucucuauaagucauuaaaaggcgcuuguaagcugaaacuuugcgggguguugggacugagacuaauggacggcacgugggcagccauucaaacuagcgaugaaacaaaguggugucccccugaccagcucgugaaccugcacgacuucaggagugaugagaucgagcaucuugucguugaggaacuggugaaaaagcgggaagagugcuuggacgcucucgaaucuauaaugaccacuaaauccgugagcuuucgccgacugucgcacuuaagaaagcugguaccagguuucgggaaggccuacacaauuuucaauaaaacccucauggaggcggaugcacauuauaagucugucaggacguggaacgagaucauucccuccaaaggaugccuucgggugggcggccguugucacccgcacguuaaugggguguuuuucaacggaaucauccuggguccugacggccaugucuugauucccgaaaugcagucaagucuacugcagcaacacauggagcuccuggaaagcuccgugauaccacuuaugcauccucuggccgaucccucuaccguauuuaaggacgaugacgaggcugaagauuucguugaggugcacuugccagacguccauaaacaggugagcggggucgaucucggacugcccucauggggccgcuacguguuaaugagugccgguguucugacagcacuaaugcucaugaucuuucugacuaccugcuguagaagggcuaaucgggccgaguccgcgcagcacagccuuggggaacgaggccgcaaggugucuguaacaucacagaguggaagagucauuagcuccugggagucuuauaagucgggcggggaaacuaaauuguga

SEQ ID NO: 158740 - RNA, 1575 nt, Artificial Sequence; identical to SEQ ID NO: 158699
  derived and/or modified CDS sequence (opt3) from glycoprotein__RABV__AB563979.1

SEQ ID NO: 158741 - RNA, 1575 nt, Artificial Sequence
  derived and/or modified CDS sequence (opt3) from glycoprotein__RABV__AB563981.1
augaucccccaggcccuucucuucgugccucuuauggucuuuagccugugcuucggcaaguuuccaauuuacaccauaccggacaaauuggggcccugguccccuaucgauauucaccauuuaucuuguccaaacaaucugguuguggaggacgaaggaugcacaaaccuaucagguuucaguuauauggagcucaagguaggcuacaucagcgcuauuaaagugaauggguuuacuuguacgggagucgugaccgaagcagagacauauacuaacuucguuggcuacgugaccacaaccuuuaagagaaaacacuucaggcccacuccugaugccugccgggcggcuuauaauuggaagauggccggugacccacgcuacgaagagucccugcauaaccccuauccugauuaccacuggcuucgaacagucaagaccacgaaagagucucuggugaucauaucgccaucaguagcagacuuggauccguacgacaagagccuccauagucguguuuuucccuccgggaaauguucuggaaucacugugagcuccaccuauugcucaacaaaucacgauuacacuauuuggaugccugaaaacccaagacugggcaccaguugugacaucuucacaaauagcaggggcaagcgggccucuaaaggguccaagaccugcggauuugucgaugagcgcggucuguauaagucacucaaaggcgcuuguaaguuaaaacugugcggggugcuuggauugagacugauggacggcacgugggcagccauucaaacuagcgaugaaacaaaguggugucccccugaccagcuagugaaccuccacgacuucaggagugaugagaucgagcaucuggucguugaggaacuugugaaaaagcgggaagagugccuggacgcuuuggaaucuauaaugaccacuaaauccgugagcuuucgccgacucucgcaccugagaaaguuaguaccagguuucgggaaggccuacacaauuuucaauaaaacccugauggaggcggaugcacauuauaagucugucaggacguggaacgagaucauucccuccaaaggaugccuccgggugggcggccguugucacccgcacguuaaugggguguuuuucaacggaaucauccuugguccugacggccauguccugauucccgaaaugcagucaaguuugcuacagcaacacauggagcugcucgaaagcuccgugauaccacugaugcauccucuugccgaucccucuaccguauuuaaggacgaugacgaggcugaagauuucguugaggugcaucugccagacguccacaaacaggugagcggggucgauuugggacuccccucauggggcaaguacgugcugaugagugccgguguuuuaacagcacugaugcuaaugaucuuucucaugacuugcugucgcagaaccaauagggcugaguccgcccagcacagccugggggaacggggccgaaaggugucuguaacaucacagaguggacgcauuaucagcuccugggagucuuauaaaucgggcggggaaacuaagcuguga

SEQ ID NO: 158742 - RNA, 1575 nt, Artificial Sequence
  derived and/or modified CDS sequence (opt3) from glycoprotein__RABV__AB563983.1
augaucccccaggcccuccuguucgugccucuucuggucuuuagcuugugcuucggcaaguuuccaauuuacaccauaccggacaaauuagggcccugguccccuaucgauauucaccaucugucuuguccaaacaaucuaguuguggaggacgaaggaugcacaaaccucucagguuucaguuauauggagcugaagguaggcuacaucagcgcuauuaaagugaauggguuuacuuguacgggagucgugaccgaagcagagacauauacuaacuucguuggcuacgugaccacaaccuuuaagagaaaacacuucaggcccacuccugaugccugccgggcggcuuauaauuggaagauggccggugacccacgcuacgaagagucccuucauaaccccuauccugauuaccacuggcugcgaacagucaagaccacgaaagagucuuuggugaucauaucgccaucaguagcagaccucgauccguacgacaagagccugcauagucguguuuuucccuccgggaaauguucuggaaucacugugagcuccaccuauugcucaacaaaucacgauuacacuauuuggaugccugaaaacccaagacugggcaccaguugugacaucuucacaaauagcaggggcaagcgggccucuaaaggguccaagaccugcggauuugucgaugagcgcggucucuauaagucauuaaaaggcgcuuguaagcugaaacuuugcgggguguugggacugagacuaauggacggcacgugggcagccauucaaacuagcgaugaaacaaaguggugucccccugaccagcucgugaaccugcacgacuucaggagugaugagauggagcaucuugucguugaggaacuggugaaaaagcgggaagagugcuuggacgcucucgaaucuaucaugaccacuaaauccgugagcuuucgccgacugucgcacuuaagaaagcugguaccagguuucgggaaggccuacacaauauucaauaaaacccucauggaggcggaugcacauuauaagucugucaggacguggaacgagauuauccccaccaaaggaugccuucgggugggcggccguugucacccgcacguuaaugggguguuuuucaacggaauuauccuggguccugacggccaugucuugauccccgaaaugcaguccucacuacugcagcaacacauggagcuccuggaaaguagcgugauuccacuuaugcauccucuggccgaucccuccacaguauuuaaggacgaugacgaggcugaagauuucguugaggugcacuugccagacguccauaaacaggugucuggggucgaucucggacugcccagcuggggcaaguacguguuaaugucagccgguguucugacugcacuaaugcucaugauauuucugaccacaugcugucgcagagcugacagggccgagagugcgcagcacucccuuggggaacggggccgaaaggugagcguaacuucucagucaggacgcgucaucaguagcugggaguccuauaaaucuggcggggaaaccaaguuguga

SEQ ID NO: 158743 - RNA, 1575 nt, Artificial Sequence; identical to SEQ ID NO: 158650
  derived and/or modified CDS sequence (opt3) from glycoprotein__RABV__AB563985.1

SEQ ID NO: 158744 - RNA, 1575 nt, Artificial Sequence
  derived and/or modified CDS sequence (opt3) from glycoprotein__RABV__AB563986.1
augaucccccaggcccuccuguucgugccucuucuggucuuuagcuugugcuucggcaaguuuccaauuuacaccauaccggacaaauuagggcccugguccccuaucgauauucaccaucugucuuguccaaacaaucuaguuguggaggacgaaggaugcacaaaccucucagguuucaguuauauggagcugaagguaggcuacaucagcgcuauuaaagugaauggguuuacuuguacgggagucgugaccgaagcagagacauauacuaacuucguuggcuacgugaccacaaccuuuaagagaaaacacuucaggcccacuccugaugccugccgggcggcuuauaauuggaagauggccggugacccacgcuacgaagagucccuucauaaccccuauccugauuaccacuggcugcgaacagucaagaccacgaaagagucuuuggugaucauaucgccaucaguaccggaccucgaucccuacgacaagagccugcauagucguguuuuuccuuccgggaaauguucuggaaucacugugagcuccaccuauugcucaacaaaucacgauuacacuauuuggaugccagaaaaccccagacugggcaccaguugugacaucuucacaaauagcaggggcaagcgggcaucuaaaggguccaagaccugcggauuugucgaugagcgcggucucuauaagucauuaaaaggcgccuguaagcugaaacuuugcgggguguugggacugagacuaauggacggcacgugggcugcaauucaaacuagcgaugaaacaaagugguguccuccagaccagcucgugaaccugcacgacuucaggagugaugagaucgagcaucuugucguugaggaacuggugaaaaagcgggaagagugcuuggacgcccucgaaucuauaaugaccacuaaauccgugagcuuucgccgacugucgcacuuaagaaagcugguacccgguuucgggaaggcuuacacaauuuucaauaaaacccucauggaggccgaugcgcauuauaagucugucaggacguggaacgagaucauuccguccaaaggaugccuucgggugggcggccguugucacccucacguuaaugggguguuuuucaacggaaucauccugggucccgacggccaugucuugauuccagaaaugcagucaagucuacugcagcaacacauggagcuccuggaaagcuccgugauaccucuuaugcauccccuggcagauccaucuaccguauuuaaggacgaugacgaggccgaagauuucguugaggugcacuugcccgacguccauaaacaggugagcggggucgaucucggacugccuucauggggcaaguacguguuaaugagugcugguguucugacagcccuaaugcucaugaucuuucugaugacuugcugucgcagaaccaauagggcagaguccgcucagcacagccuuggggaacggggccgaaaggugucuguaacaucacagaguggacgcgucauuagcuccugggagucuuauaaaucgggcggggaaacuaaguuguga

SEQ ID NO: 158745 - RNA, 1575 nt, Artificial Sequence
  derived and/or modified CDS sequence (opt3) from glycoprotein__RABV__AB563987.1
augaucccccaggcccuccuguucgugccucuucuggucuuuagcuugugcuucggcaaguuuccaauuuacaccauaccggacaaauuagggcccugguccccuaucgauauucaccaucugucuuguccaaacaaucuaguuguggaggacgaaggaugcacaaaccucucagguuucaguuauauggagcugaagguaggcuacaucagcgcuauuaaagugaauggguuuacuuguacgggagucgugaccgaagcagagacauauacuaacuucguuggcuacgugaccacaaccuuuaagagaaaacacuucaggcccacuccugaugccugccgggcggcuuauaauuggaagauggccggugacccacgcuacgaagagucccuucauaaccccuauccugauuaccacuggcugcgaacagucaagaccacgaaagagucuuuggugaucauaucgccaucaguagcagaccucgauccguacgacaagagccugcauagucguguuuuucccuccgggaaauguucuggaaucacugugagcuccaccuauugcucaacaaaucacgauuacacuauuuggaugccugaaaacccaagacugggcaccaguugugacaucuucacaaauagcaggggcaagcgggccucuaaaggguccaagaccugcggauuugucgaugagcgcggucucuauaagucauuaaaaggcgcuuguaagcugaaacuuugcgggguguugggacugagacuaauggacggcacgugggcagccauucaaacuagcgaugaaacaaaguggugucccccugaccagcucgugaaccugcacgacuucaggagugaugagaucgagcaucuugucguugaggaacuggugaaaaagcgggaagagugcuuggacgcucucgaaucuauaaugaccacuaaauccgugagcuuucgccgacugucgcacuuaagaaagcugguaccagguuucgggaaggccuacacaauuuucaauaaaacccucauggaggcggaugcacauuauaagucugucaggacguggaacgagaucauucccuccaaaggaugccuucgggugggcggccguugucacccgcacguuaaugggguguuuuucaacggaaucauccuggguccugacggccaugucuugauucccgaaaugcagucaagucuacugcagcaacacauggagcuccuggaaagcuccgugauaccacuuaugcauccucuggccgaucccucuaccguauuuaaggacgaugacgaggcugaagauuucguugaggugcacuugccagacguccauaaacaggugagcggggucgaucucggacugcccucauggggcaaguacguguuaaugagugccgguguucugacagcacuaaugcucaugaucuuucugacuaccugcugucgcagagcuaauaaggccgaguccgcgcagcacagccuuggggaaaggggccggaaagugucuguaacaucacagaguggacgagucauuagcuccugggagucuuauaagucgggcggggaaacuaaauuguga

SEQ ID NO: 158746 - RNA, 1575 nt, Artificial Sequence; identical to SEQ ID NO: 158736
  derived and/or modified CDS sequence (opt3) from glycoprotein__RABV__AB563988.1

SEQ ID NO: 158747 - RNA, 1575 nt, Artificial Sequence
  derived and/or modified CDS sequence (opt3) from glycoprotein__RABV__AB563989.1
augaucccccaggcccuucucuucgugccucuucuggucuuuagcuugugcuucggcaaguuuccaauuuacaccauaccggacaaauuagggcccugguccccuaucgauauucaccaucugucuuguccaaacaaucuaguuguggaggacgaaggaugcacaaaccucucagguuucaguuauauggagcugaagguaggcuacaucagcgcuauuaaagugaauggguuuacuuguacgggagucgugaccgaagcagagacauauacuaacuucguuggcuacgugaccacaaccuuuaagagaaaacacuucaggcccacuccugaugccugccgggcggcuuauaauuggaagauggccggugacccacgcuacgaagagucccuucauaaccccuauccugauuaccacuggcugcgaacagucaagaccacgaaagagucuuuggugaucauaucgccaucaguagcagaccucgauccguacgacaagagccugcauagucguguuuuucccuccgggaaauguucuggaaucacugugagcuccaccuauugcucaacaaaucacgauuacacuauuuggaugccugaaaacccaagacugggcaccaguugugacaucuucacaaauagcaggggcaagcgggccucuaaaggguccaagaccugcggauuugucgaugagcgcggucucuauaagucauuaaaaggcgcuuguaagcugaaacuuugcgggguguugggacugagacuaauggacggcacgugggcagccauucaaacuagcgaugaaacaaaguggugucccccugaccagcucgugaaccugcacgacuucaggagugaugagaucgagcaucuugucguugaggaacuggugaaaaagcgggaagagugcauagacgcuuuggaaucuauuaugaccacuaaauccgugagcuuucgccgacucucgcaccugagaaaguuaguaccagguuucgggaaggccuacacaaucuucaauaaaacccugauggaggcggaugcacauuauaagucugucaggacguggaacgagauuauccccuccaaaggaugccuccgggugggcggccguugucacccgcacguuaaugggguguuuuucaacggaaucauucuugguccugacggccauguccugauacccgaaaugcagucaaguuugcuacagcaacacauggagcugcucgaaagcuccgugaucccacugaugcauccucuugccgaucccucuaccguauuuaaggacgaugacgaggcugaagauuucguugaggugcaucugccagacguccacaaacaggugagcggggucgauuugggacuccccucauggggcaaguacgugcugaugagugccgguguuuuaacagcacugaugcuaaugauuuuucucaugacuugcugucgcagaaccaauagggcugaguccgcccagcacagccugggggaacggggccgaaaggugucuguaacaucacagaguggacgcgucaucagcuccugggagucuuauaaaucgggcggggaaacuaagcuguga

SEQ ID NO: 158748 - RNA, 1575 nt, Artificial Sequence
  derived and/or modified CDS sequence (opt3) from glycoprotein__RABV__AB563990.1
augaucccccaggcccugcucuuugugccucuucuggucuuuagcuugugcuucggcaaguuuccaauuuacaccauaccggacaaauuagggcccugguccccuaucgauauucaccaucugucuuguccaaacaaucuaguuguggaggacgaaggaugcacaaaccucucagguuucaguuauauggagcugaagguaggcuacaucagcgcuauuaaagugaauggguuuacuuguacgggagucgugaccgaagcagagacauauacuaacuucguuggcuacgugaccacaaccuuuaagagaaaacacuucaggcccacuccugaugccugccgggcggcuuauaauuggaagauggccggugacccacgcuacgaagagucccuucauaaccccuauccugauuaccacuggcugcgaacagucaagaccacgaaagagucuuuggugaucauaucgccaucaguagcagaccucgauccguacgacaagagccugcauagucguguuuuucccuccgggaaauguucuggaaucacugugagcuccaccuauugcucaacaaaucacgauuacacuauuuggaugccugaaaacccaagacugggcaccaguugugacaucuucacaaauagcaggggcaagcgggccucuaaaggguccaagaccugcggauuugucgaugagcgcggucucuauaagucauuaaaaggcgcuuguaagcugaaacuuugcgggauuuugggacugagacuaauggacggcacgugggcagccauccaaacuagcgaugaaacaaaguggugucccccugaccagcucgugaaccugcacgacuucaggagugaugagauagagcaucuuguggucgaggaacugguuaaaaagcgggaagagugcuuggacgcucucgaaucuauuaugaccacuaaauccgugagcuuucgccgacugucgcacuuaagaaagcugguaccagguuucgggaaggccuacacaaucuucaauaaaacccucauggaggcggaugcacauuauaagucugugaggacguggaacgagauuauccccuccaaaggaugccuucgggucggcggccguugucacccgcacgugaaugggguuuucuucaacggaaucauucuggguccugacggccauguguugauacccgaaaugcagucaagucuacugcagcaacacauggagcuccuggaaagcuccgucaucccacuuaugcauccucuggccgaucccucuaccguguuuaaggacgaugacgaggcugaagauuucguagagguucacuugccagacgugcauaaacaggucagcgggguggaucucggacugcccucauggggcaaguacgucuuaaugagugccggugugcugacagcacuaaugcucaugauuuuucugaugacuugcugucgcagagcuaauagggccgaguccgcgcagcacagccuuggggaacggggccgaaagguuucugugaccucacagaguggacgcguaaucagcuccugggagucuuauaaaucgggcggggaaacaaaguuguga

SEQ ID NO: 158749 - RNA, 1575 nt, Artificial Sequence
  derived and/or modified CDS sequence (opt3) from glycoprotein__RABV__AB563991.1
augaucccccaggcccuccuguucgugccucuucuggucuuuagcuugugcuucggcaaguuuccaauuuacaccauaccggacaaauuagggcccugguccccuaucgauauucaccaucugucuuguccaaacaaucuaguuguggaggacgaaggaugcacaaaccucucagguuucaguuauauggagcugaagguaggcuacaucagcgcuauuaaagugaauggguuuacuuguacgggagucgugaccgaagcagagacauauacuaacuucguuggcuacgugaccacaaccuuuaagagaaaacacuucaggcccacuccugaugccugccgggcggcuuauaauuggaagauggccggugacccacgcuacgaagagucccuucauaaccccuauccugauuaccacuggcugcgaacagucaagaccacgaaagagucuuuggugaucauaucgccaucaguagcagaccucgauccguacgacaagagccugcauagucguguuuuucccuccgggaaauguucuggaaucacugugagcuccaccuauugcucaacaaaucacgauuacacuauuuggaugccugaaaacccaagacugggcaccaguugugacaucuucacaaauagcaggggcaagcgggccucuaaaggguccaagaccugcggauuugucgaugagcgcggucucuauaagucauuaaaaggcgcuuguaagcugaaacuuugcgggguguugggacugagacuaauggacggcacgugggcagccauucaaacuagcgaugaaacaaaguggugucccccugaccagcucgugaaccugcacgacuucaggagugaugagaucgagcaucuugucguugaggaacuggugcggaaacgcgaagagugcuuggacgcucucgaaucuauaaugaccacuaaguccgugagcuuucgaagacugucgcacuuaaggaaacuggugccagguuucgggaaggccuacacaauuuucaauaagacccucauggaggcggaugcacauuauaaaucuguccggacguggaacgagaucauucccuccaagggaugccuucgugugggcggccgcugucacccgcacguuaaugggguguuuuucaacggaaucauccuggguccugacggccaugucuugauucccgaaaugcagucaagucuacugcagcaacacauggagcuccuggaaagcuccgugauaccacuuaugcauccucuggccgaucccucuaccguauuuaaagacgaugacgaggcugaagauuucguugaggugcacuugccagacguccauaagcagguaagcggggucgaucucggacugcccucauggggcaaauacguguuaaugagugccgguguucugacagcacuaaugcucaugaucuuucugaugacuugcuguagaaggaccaaucgggcugaguccgcccagcacagccuuggggaacgaggccgcaaggugucuguaacaucacagaguggaagagucauuagcuccugggagucuuauaagucgggcggggaaacuaaauuguga

SEQ ID NO: 158750 - RNA, 1575 nt, Artificial Sequence; identical to SEQ ID NO: 158736
  derived and/or modified CDS sequence (opt3) from glycoprotein__RABV__AB563992.1

SEQ ID NO: 158751 - RNA, 1575 nt, Artificial Sequence; identical to SEQ ID NO: 158736
  derived and/or modified CDS sequence (opt3) from glycoprotein__RABV__AB563993.1

SEQ ID NO: 158752 - RNA, 1575 nt, Artificial Sequence; identical to SEQ ID NO: 158619
  derived and/or modified CDS sequence (opt3) from glycoprotein__RABV__AB563994.1

SEQ ID NO: 158753 - RNA, 1575 nt, Artificial Sequence; identical to SEQ ID NO: 158620
  derived and/or modified CDS sequence (opt3) from glycoprotein__RABV__AB563996.1

SEQ ID NO: 158754 - RNA, 1575 nt, Artificial Sequence
  derived and/or modified CDS sequence (opt3) from glycoprotein__RABV__AB563997.1
augaucccccaggcccuucucuucgugccuauucuugucuuuagccugugcuucggcaaguuuccaauauacaccaucccggacaaauuggggcccugguccccuauugauauccaccauuuaucuuguccaaacaaucugguuguggaggacgaaggaugcacaaaccuaucagguuucaguuauauggagcucaagguaggcuacauuagcgcuaucaaagugaauggguuuacuuguacgggagucgugaccgaagcagagacauauacuaacuucguuggcuacgugaccacaaccuuuaagagaaaacacuucaggcccacuccugaugccugccgggcggcuuauaauuggaagauggccggugacccacgcuacgaagagucccugcauaaccccuauccugauuaccacuggcuucgaacagucaagaccacgaaagagucucuggugauaaucucgccaucaguagcagacuuggauccguacgacaagagccuccauagucguguuuuucccuccgggaaauguucuggaauuacugugagcuccaccuauugcucaacaaaucacgauuacacuaucuggaugccugaaaacccaagacugggcaccaguugugacauuuucacaaauagcaggggcaagcgggccucuaaaggguccaagaccugcggauuugucgaugagcgcggucuguauaagucacucaaaggcgcuuguaaguuaaaacugugcggggugcuuggauugagacugauggacggcacgugggcagccauccaaacuagcgaugaaacaaaguggugucccccugaccagcuagugaaccuccacgacuucaggagugaugagauagagcaucuggucguugaggaacuugugaaaaagcgggaagagugccuggacgcuuuggaaucuauuaugaccacuaaauccgugagcuuucgccgacucucgcaccugagaaaguuaguaccagguuucgggaaggccuacacaaucuucaauaaaacccugauggaggcggaugcacauuauaagucugucaggacguggaacgagauuauccccuccaaaggaugccuccgggugggcggccguugucacccgcacguuaaugggguguuuuucaacggaaucauucuugguccugacggccauguccugauacccgaaaugcagucaaguuugcuacagcaacacauggagcugcucgaaagcuccgugaucccacugaugcauccucuugccgaucccucuaccguauuuaaggacgaugacgaggcugaagauuucguugaggugcaucugccagacguccacaaacaggugagcggggucgauuugggacuccccucauggggcaaguacgugcugaugagugccgguguuuuaacagcacugaugcuaaugauuuuucucaugacuugcugucgcagagcuuccaggguggagagcgcccagcacucucugggggaacggggccgaaagguaucagucaccagucagagcggacgcgugaucuccucuugggagucguauaaaagcggcggggaaacaaagcuguga

SEQ ID NO: 158755 - RNA, 1575 nt, Artificial Sequence
  derived and/or modified CDS sequence (opt3) from glycoprotein__RABV__AB563998.1
augaucccccaggcccuucucuucgugccucuucuggucuuuagcuugugcuucggcaaguuuccaauuuacaccauaccggacaaauuagggcccugguccccuaucgauauucaccaucugucuuguccaaacaaucuaguuguggaggacgaaggaugcacaaaccucucagguuucaguuauauggagcugaagguaggcuacaucagcgcuauuaaagugaauggguuuacuuguacgggagucgugaccgaagcagagacauauacuaacuucguuggcuacgugaccacaaccuuuaagagaaaacacuucaggcccacuccugaugccugccgggcggcuuauaauuggaagauggccggugacccacgcuacgaagagucccuucauaagcccuauccugauuaccacuggcugcgaacagucaaaaccacgaaggagucuuuggugaucauaucgccaucaguagcagaccucgauccguacgacaaaagccugcauagucguguuuuucccaacgggaaguguuccggaaucacugugucuagcaccuauugcuccacaaaucacgauuacacuauuuggaugccugaaaacccaagacugggcaccucaugugacaucuucacaaauaguaggggcaaacgggccagcaaggggucuaagaccugcggauuugucgaugagcgcggucucuauaaauccuuaaagggcgcuuguaaacugaagcugugcgggguguugggacugagacuaauggacggcacgugggcagccauucaaacuucagaugaaacaaaauggugucccccugaccagcucgugaaccugcacgacuucaggagcgaugagaucgagcaucuugucguugaggaacuggugaagaaacgggaagagugcuuggacgcucucgaaaguauaaugaccacuaagucuguauccuuucgccgacugagccacuuaagaaagcuggugccagguuucgggaaagccuacacaauuuucaauaagacccucauggaggcggaugcacauuauaaaucggucaggacguggaacgagaucauucccucuaagggaugccuucgggugggcggccguugucacccgcacguuaaugggguguuuuucaacggaaucauccuggguccugacggccaugucuugauucccgaaaugcaguccucacuacugcagcaacacauggagcuccuggaaaguagcgugauaccacuuaugcauccucuggccgaucccuccaccguauuuaaagacgaugacgaggcugaagauuucguugaggugcacuugccagacguccauaaacaggugucuggggucgaucucggacugcccagcuggggcaaguacguguuaaugucagccgguguucugacagcacuaaugcucaugaucuuucugaugacuugcugucgcagagcuaauagggccgagagugcgcagcacucccuuggggaacggggccgaaaggugagcguaaccucucagucaggacgcgucauuaguagcugggaguccuauaagucuggcggggaaacaaaauuguga

SEQ ID NO: 158756 - RNA, 1575 nt, Artificial Sequence
  derived and/or modified CDS sequence (opt3) from glycoprotein__RABV__AB563999.1
augaucccccaggcccuccuguucgugccucuucuggucagcuccuugugcuuuggcaaguucccaauuuacaccauaccggacaaauuagggcccuggucuccuaucgauauucaccaucugucauguccaaacaaucuaguuguggaggacgaaggaugcacaaaccucagugguuuuagcuauauggagcugaagguaggcuacaucuccgcuauuaaagugaauggguucacuuguacgggagucgugaccgaagcagagacauauacuaacuuuguuggcuacgugaccacaaccuucaagagaaaacacuuuaggcccacuccugaugccugccgggcggcuuauaauuggaagauggccggugacccacgcuacgaagagucucuucauaaccccuauccugauuaccacuggcugcgaacagucaagaccacgaaagagucguuggugaucauaucaccaagcguagcagaccucgauccguacgacaagagucugcauucccguguuuuccccucugggaaauguagcggaaucacuguguccucaaccuauugcaguacaaaucacgauuacacuauuuggaugccugaaaacccaagacugggcaccagcugugacaucuuuacaaauucuaggggcaagcgggccuccaaagggucaaagaccugcggauucgucgaugagcgcggucucuauaagagcuuaaaaggcgcuuguaagcugaaacuuugcgggguguugggacugagacuaauggacggcacgugggcagccauucaaacaagugaugaaacuaaguggugucccccugaccagcucgugaaccugcacgacuuuaggucugaugagaucgagcaucuugucguugaggaacuggugaaaaagcgggaagagugcuuggacgcucucgaauccauaaugaccacuaaaagcguaucguuccgccgacugucucacuuaagaaagcuggugccagguuuugggaaggccuacacaauuuucaauaaaacccucauggaggcggaugcacauuauaaguccgucaggacguggaacgagaucauucccucaaaaggaugccuucgggugggcggccguugucacccgcacguuaaugggguguucuuuaacggaaucauccuggguccugacggccaugucuugauucccgaaaugcagaguagccuacugcagcaacacauggagcuccuggaauccucugugauaccacuuaugcauccucuggccgaucccagcaccguauucaaggacgaugacgaggcugaagauuuuguugaggugcacuugccagacguccauaaacaggugucaggggucgaucucggacugcccaguuggggcaaguacguguuaacauccgccgguguucugacugcacuaaugcucaugaucuuccugaugaccugcugucgcagagcuaauagggccgagagcgcgcagcacucucuuggggaacggggccgaaaggugucaguaacaagucagagccgcagagucauuuccucuugggagucguauaaaagcggaggcgaaacuaaguuguga

SEQ ID NO: 158757 - RNA, 1575 nt, Artificial Sequence
  derived and/or modified CDS sequence (opt3) from glycoprotein__RABV__AB564001.1
augaucccccaggcccugauguucgugccucuccuugucuuuagccugugcuucggcaaguuuccaauuuacaccauaccggacaaauuggggcccugguccccuaucgauauucaccauuuaucuuguccaaacaaucugguuguggaggacgaaggaugcacaaaccuaucagguuucaguuauauggagcucaagguaggcuacaucagcgcuauuaaagugaauggguuuacuuguacgggagucgugaccgaagcagagacauauacuaacuucguuggcuacgugaccacaaccuuuaagagaaaacacuucaggcccaugccugaugccugccgggcggcuuauaauuggaagauggccggugacccacgcuacgaagagucccugcauaaccccuauccugauuaccacuggcuucgaacugucaagacaaccaaagagucucuggugaucauaucgccaucaguagcagacuuggauccguacgacaagagccuccauagucguguuuuucccuccgggaaauguucuggaaugacggugagcuccacuuauugcucaaccaaucacgauuacacaaucuggaugccugaaaacccaagacugggcaccaguugugacauuuucacuaauagcaggggcaagcgggccucuaaaggguccaagacaugcggauuugucgaugagcgcggucuguauaagucacucaaaggcgcuuguaaguuaaaacugugcggggugcuuggauugagacugauggacggcaccugggcagccauccaaacgagcgaugaaacuaaguggugucccccugaccagcuagugaaccuccacgacuucaggcuggaugagauugagcaucuugucguugaggaacuggugaaaaagcgggaagagugcuuggacgcucucgaaaguaucaugacaaccaaaucuguauccuuucgccgacugagccacuuaagaaagcuggugccagguuucgggaaggccuacacuauauucaauaaaacacucauggaggcggaugcacauuauaagucggucaggaccuggaacgagauuauccccucuaaaggaugccuucgggugggcggccguugucacccgcacguuaaugggguguuuuucaacggaauuauccuggguccugacggccaugucuugauccccgaaaugcaguccucacuacugcagcaacacauggagcuccuggaaaguagcgugauuccacuuaugcauccucuggccgaucccuccacgguauuuaagggggacgaugaggcugaagacuucguugaggugcacuugccagauguccauaaacaggugucuggagucgaccucggccugcccagcugggguaaguacguguuaaugucagccgggguucugaccgcacuaaugcucaugauauuucugaugacaugcuguaagcgcgcuaauagagccgagagugcgcaccacucccuuggcgaaaggggacggaaagugagcguaacuucucagucaggccgagucaucaguagcugggaguccuauaagucugggggagaaaccaaauuguga

SEQ ID NO: 158758 - RNA, 1575 nt, Artificial Sequence
  derived and/or modified CDS sequence (opt3) from glycoprotein__RABV__AB564002.1
augauccccagagcccugauguucgugccucuccuugucuuuagccugugcuucggcaaguuuccaauuuacaccauaccggacaaauuggggcccugguccccuaucgauauucaccauuuaucuuguccaaacaaucugguuguggaggacgaaggaugcacaaaccuaucagguuucaguuauauggagcucaagguaggcuacaucagcgcuauuaaagugaauggguuuacuuguacgggagucgugaccgaagcagagacauauacuaacuucguuggcuacgugaccacaaccuuuaagaggaaacacuuccggcccaugccugaugccugccgcgcggcuuauaauuggaagauggccggugacccacgauacgaagagucccugcauaaccccuauccugauuaccacuggcuucguacugucaagacaaccaaagagucucuggugaucauaucgccaucaguagcagacuuggauccguacgacaagagccuccauaguagaguuuuucccuccgggaaauguucuggaaugacggugagcuccacuuauugcucaaccaaucacgauuacacaaucuggaugccugaaaacccaaggcugggcacuagcugugacauuuucaccaauagccggggcaagcgcgccucuaaaggguccaagacaugcggauuugucgaugagagaggucuguauaagucacucaaaggcgcuuguaaguuaaaacugugcggggugcuuggauugaggcugauggacggcaccugggcagccauccagacgagcgaugaaacuaaguggugucccccugaccaacuggugaaccuccacgacuuccggagugaugagauugagcaucuggucguugaggaacuugugaaaaagcgcgaagagugccuggacgcuuuggaaucuaucaugacaaccaaauccguaaguuuucgaagacucucgcaccugaggaaguuagugccagguuucgggaaggccuacacuauauucaauaaaacacugauggaggcggaugcacauuauaagucuguccggaccuggaacgagauuauccccuccaaaggaugccuccgugugggcggccgcugucacccgcacguuaaugggguguuuuucaacggaauuauccuugguccugacggccauguccugauccccgaaaugcagucaaguuugcuacagcagcacauggagcugcucgaaagcuccgugauuccacugaugcauccucuugccgaucccucuacgguauuuaagggggacgaugaggcugaagacuucguugaggugcaccuaccagauguccauaaacaagugagcggagucgacuugggccuccccucaugggguaaguacgugcugaugagugccgggguuuuaaccgcacugaugcuaaugauauuucucaugacaugcuguaagagagcuaauagggccgaguccgcgcaccacaaccugggcgaacggggacgaaaagugagcguaacuucucagucaggccgcgucaucaguagcugggaguccuauaagucugggggagaaaccaaacuuuga

SEQ ID NO: 158759 - RNA, 1575 nt, Artificial Sequence
  derived and/or modified CDS sequence (opt3) from glycoprotein__RABV__AB564004.1
augaucccccaggcccugauguucgugccucuccuugucuuuagccugugcuugggcaaguucccaauuuacaccauaccggacaaauuagggcccugguccccuaucgauauucaccaucugucuuguccaaacaaucuaguuguggaggacgaaggaugcacaaaccucucagguuuuaguuauauggagcugaagguaggcuacaucagcgcuauuaaagugaauggguucacuuguacgggagucgugaccgaagcagagacauauacuaacuuuguuggcuacgugaccacaaccuucaagagaaaacacuuuaggcccaugccugaugccugccgggcggcuuauaauuggaagauggccggugacccacgcuacgaagagucccuucauaaccccuauccugauuaccacuggcugcgaacugucaagacaaccaaagagucuuuggugaucauaucgccaucaguagcagaccucgauccguacgacaagagccugcauagucguguuuuccccgggggaaaauguuccggcaugacggugucuagcacuuauugcuccaccaaucacgauuacacaaucuggaugccugaaaacccaagacugggcacuucaugugacauuuuuaccaauaguagggggaagcgggccagcaaaggaucuaagacaugcgguuucgucgaugagcgcggccucuauaaguccuuaaaaggggcuuguaagcugaaacuuugcggaguguugggccugagacuaauggacgguaccugggcagccauccaaacgucagaugaaacuaaguggugucccccugaccagcucgugaaccugcacgacuuuaggagcgaugagauugagcaucuugucguugaggaacuggugaaaaagcgggaagagugcuuggacgcucucgaaaguaucaugacaaccaaaucuguauccuuccgccgacugagccacuuaagaaagcuggugccaggguuuggaaaggccuacacuauauucaauaaaacacucauggaggcggaugcacauuauaagucggucaggaccuggaacgagauuauccccucuaaaggcugccuucgggugggcgggcguugucacccgcacguuaauggaguguucuuuaacgguauuauccugggcccugacgggcaugucuugauccccgaaaugcaguccucacuacugcagcaacacauggagcuccuggaaaguagcgugauuccacuuaugcauccucuggccgaucccuccacgguauucaagggagacgaugaggcugaagacuuuguugaggugcacuugccagauguccauaaacaggugucuggcgucgaccucggucugcccagcugggggaaguacguguuaaugucagccggcguucugaccgcacuaaugcucaugauauuccugaugacaugcuguaagcgcgcuaauagagccgagagugcgcaccacucccuuggagaaaggggccggaaagugagcguaacuucucagucagggcgagucaucaguagcugggaguccuauaagucuggaggugaaaccaaauuguga

SEQ ID NO: 158760 - RNA, 1575 nt, Artificial Sequence; identical to SEQ ID NO: 158687
  derived and/or modified CDS sequence (opt3) from glycoprotein__RABV__AB564005.1

SEQ ID NO: 158761 - RNA, 1575 nt, Artificial Sequence; identical to SEQ ID NO: 158687
  derived and/or modified CDS sequence (opt3) from glycoprotein__RABV__AB564006.1

SEQ ID NO: 158762 - RNA, 1575 nt, Artificial Sequence
  derived and/or modified CDS sequence (opt3) from glycoprotein__RABV__AB564007.1
augaucccccaggcccugauguucgugccucuccuugucuuuagccugugcuucggcaaguuuccaauuuacaccauaccggacaaauuggggcccugguccccuaucgauauucaccauuuaucuuguccaaacaaucugguuguggaggacgaaggaugcacaaaccuaucagguuucaguuauauggagcucaagguaggcuacaucagcgcuauuaaagugaauggguuuacuuguacgggagucgugaccgaagcagagacauauacuaacuucguuggcuacgugaccacaaccuuuaagagaaaacacuucaggcccaugccugaugccugccgggcggcuuauaauuggaagauggccggugacccacgcuacgaagagucccugcauaaccccuauccugauuaccacuggcuucgaacugucaagacaaccaaagagucucuggugaucauaucgccaucaguagcagacuuggauccguacgacaagagccuccauagucguguuuuucccgggggaaaauguuccggcaugacggugucuagcacuuauugcuccaccaaucacgauuacacaaucuggaugccugaaaacccaagacugggcacuucaugugacauuuucaccaauaguagggggaagcgggccagcaaaggaucuaagacaugcgguuuugucgaugagcgcggccuguauaagucccucaaaggggcuuguaaguuaaaacugugcggagugcuuggcuugagacugauggacgguaccugggcagccauccaaacgucagaugaaacuaaguggugucccccugaccagcuagugaaccuccacgacuucaggagcgaugagauugagcaucuggucguugaggaacuugugaaaaagcgggaagagugccuggacgcuuuggaaaguaucaugacaaccaaaucuguauccuuucgccgacucagccaccugagaaaguuagugccaggguucggaaaggccuacacuauauucaauaaaacacugauggaggcggaugcacauuauaagucggucaggaccuggaacgagauuauccccucuaaaggcugccuccgggugggcgggcguugucacccgcacguuaauggaguguuuuucaacgguauuauccuuggcccugacgggcauguccugauccccgaaaugcaguccucauugcuacagcaacacauggagcugcucgaaaguagcgugauuccacugaugcauccucuugccgaucccuccacgguauuuaagggagacgaugaggcugaagacuucguugaggugcaccuuccagauguccauaaacaggugucuggcgucgacuugggucuccccagcugggggaaguacgugcugaugucagccggcguuuuaaccgcacugaugcuaaugauauuucucaugacaugcuguaagcgcgcuaauagagccaaaagugcgcaccacucccugggagagaggggccggaaggugagcguaacuucucagucagggcgagucaucaguagcugggaauccuauaaaucuggaggugagaccaagcuguga

SEQ ID NO: 158763 - RNA, 1575 nt, Artificial Sequence; identical to SEQ ID NO: 158649
  derived and/or modified CDS sequence (opt3) from glycoprotein__RABV__AB564008.1

SEQ ID NO: 158764 - RNA, 1575 nt, Artificial Sequence
  derived and/or modified CDS sequence (opt3) from glycoprotein__RABV__AB564009.1
augaacccccaggcccugauguucgugccucuccuugucuuuagccugugcuucggcaaguuuccaaucuacaccauuccggacaaauuggggcccugguccccuauagauauccaccauuuaucuuguccaaauaaccugguuguggaggacgaaggaugcacaaaucuaucagguuucaguuauauggagcucaagguaggcuacauuagcgcuaucaaagugaacggguuuacuuguacgggagucgugaccgaagcagagacauauacuaauuucguuggcuacgugaccacaaccuuuaagagaaaacacuucaggcccacuccugaugccugccgggcggcuuauaacuggaagauggccggugacccacgcuacgaagagucccugcauaaucccuauccugauuaccacuggcuucgaacagucaagaccacgaaagagucucuggugauuaucucgccaucaguagcagacuuggauccguacgacaagagccuccauagucguguuuuucccuccgggaaauguucuggaauaacugugagcuccaccuauugcucaacaaaccacgauuacacuaucuggaugccugaaaauccaagacugggcaccaguugugacauuuucacaaacagcaggggcaagcgggccucuaaaggguccaagaccugcggauuugucgaugagcgcggucuguauaagucacucaaaggcgcuuguaaguuaaaacugugcggggugcuuggauugagacugauggacggcacgugggcagccauccaaacuagcgaugaaacaaaguggugucccccugaccagcuagugaaucuccacgacuucaggagugaugagauugagcaucuggucguugaggaacuugugaaaaagcgggaagagugccuggacgcuuuggaaucuaucaugaccacuaaauccgugagcuuucgccgacucucgcaccugagaaaguuaguaccagguuucgggaaggccuacacaauauucaacaaaacccugauggaggcggaugcacauuauaagucugucaggacguggaaugagauuauccccuccaaaggaugccuccgggugggcggccguugucacccgcacguuaacgggguguuuuucaauggaauuauccuugguccugacggccauguccugauccccgaaaugcagucaaguuugcuacagcaacacguggagcugcucgaaagcuccguaauuccacugaugcauccucuugccgaucccucuaccguuuuuaaggacgaugacgaggcugaagauuucguggagguccaccuuccagacgugcauaaacaggucagcgggguggauuugggacuccccucauggggcaaguacguucugaugagugccgguguguuaacagcacugaugcuaaugauauuucucaugacuugcugucgcagagcuaacagggccgaguccgcgcagcacagccugggggaacggggccgaaagguaucuaucaccucacagaguggacgcgucauuagcuccugggagucuuauaaaucgggcggggaaacaaagcuguga

SEQ ID NO: 158765 - RNA, 1575 nt, Artificial Sequence; identical to SEQ ID NO: 158649
  derived and/or modified CDS sequence (opt3) from glycoprotein__RABV__AB564010.1

SEQ ID NO: 158766 - RNA, 1575 nt, Artificial Sequence; identical to SEQ ID NO: 158649
  derived and/or modified CDS sequence (opt3) from glycoprotein__RABV__AB564011.1

SEQ ID NO: 158767 - RNA, 1575 nt, Artificial Sequence
  derived and/or modified CDS sequence (opt3) from glycoprotein__RABV__AB564012.1
augaacccccaggcccugauguucgugccucuccuugucuuuagccugugcuucggcaaguuuccaaucuacaccauuccggacaaguuggggcccugguccccuauagauauccaccauuuaucuuguccaaauaaccugguuguggaggacgaaggaugcacaaaucuaucagguuucaguuauauggagcucaagguaggcuacauuagcgcuaucaaagugaacggguuuacuuguacgggagucgugaccgaagcagagacauauacuaauuucguuggcuacgugaccacaaccuuuaagagaaaacacuucaggcccacuccugaugccugccgggcggcuuauaacuggaagauggccggugacccacgcuacgaagagucccugcauaaucccuauccugauuaccacuggcuucgaacagucaagaccacgaaagagucucuggugauuaucucgccaucaguagcagacuuggauccguacgacaagagccuccauagucguguuuuucccuccgggaaauguucuggaauaacugugagcuccaccuauugcucaacaaaccacgauuacacuaucuggaugccugaaaauccaagacugggcaccaguugugacauuuucacaaacagcaggggcaagcgggccucuaaaggguccaagaccugcggauuugucgaugagcgcggucuguauaagucacucaaaggcgcuuguaaguuaaaacugugcggggugcuuggauugagacugauggacggcacgugggcagccauccaaacuagcgaugaaacaaaguggugucccccugaccagcuagugaaucuccacgacuuccauagugaugagauugagcaccuggucguugaggaacuugugaaaaagagggaagagugccuggacgcuuuggaaucuaucaugaccacuaaauccgugagcuuucggcgccucucgcaucugcgaaaguuaguaccagguuucgggaaggccuacacaauauucaacaaaacccugauggaggcggaugcacacuauaagucugucagaacguggaaugagauuauccccuccaaaggaugccucagggugggcggccggugucacccgcauguuaacgggguguuuuucaauggaauuauccuugguccugacggccacguccugauccccgaaaugcagucaaguuugcuacagcaacauauggagcugcucgaaagcuccgugauuccacugaugcacccucuugccgaucccucuaccguauuuaaggacgaugacgaggcugaagauuucguugaggugcaucugccagacguccacaaacaggugagcggggucgauuugggacuccccucauggggcaaguacgugcugaugagugccgguguuuuaacagcacugaugcuaaugauauuucucaugacuugcugucgucgcgcuaacagagccgaguccgcgcagcacagccugggggaaaggggccggaaggugucuguaaccucacagaguggacgagucaucagcuccugggagucuuauaaaucgggcggggaaacaaaacuuuga

SEQ ID NO: 158768 - RNA, 1575 nt, Artificial Sequence
  derived and/or modified CDS sequence (opt3) from glycoprotein__RABV__AB564015.1
augaacccccaggcccugauguucgugccucuccuugucuuuagccugugcuucggcaaguuuccaaucuacaccauuccggacaaauuggggcccugguccccuauagauauccaccauuuaucuuguccaaauaaccugguuguggaggacgaaggaugcacaaaucuaucagguuucaguuauauggagcucaagguaggcuacauuagcgcuaucaaagugaacggguuuacuuguacgggagucgugaccgaagcagagacauauacuaauuucguuggcuacgugaccacaaccuuuaagagaaaacacuucaggcccacuccugaugccugccgggcggcuuauaacuggaagauggccggugacccacgcuacgaagagucccugcauaaucccuauccugauuaccacuggcuucgaacagucaagaccacgaaagagucucuggugauuaucucgccaucaguagcagacuuggauccguacgacaagagccuccauagucguguuuuucccuccgggaaauguucuggaauaacugugagcuccaccuauugcucaacaaaccacgauuacacuaucuggaugccugaaaauccaagacugggcaccaguugugacauuuucacaaacagcaggggcaagcgggccucuaaaggguccaagaccugcggauuugucgaugagcgcggucuguauaagucacucaaaggcgcuuguaaguuaaaacugugcggggugcuuggauugagacugauggacggcacgugggcagccauccaaacuagcgaugaaacaaaguggugucccccugaccagcuagugaaucuccacgacuucaggagugaugagauugagcaucuggucguugaggaacuugugaaaaagcgggaagagugccuggacgcuuuggaaucuaucaugaccacuaaauccgugagcuuucgccgacucucgcaccugagaaaguuaguaccagguuucgggaaggccuacacaauauucaacaaaacccugauggaggcggaugcacauuauaagucugucaggacguggaaugagauuauccccuccaaaggaugccuccgggugggcggccguugucacccgcacguuaacgggguguuuuucaauggaauuauccuugguccugacggccauguccugauccccgaacgccagucaaguuugcuacagcaacacauggagcugcucgaaagcuccgugauuccacugaugcauccucuugccgaucccucuaccguauuuaaggacgaugacgaggcugaagauuucguugaggugcaccuuccagacguccauaaacaggugagcggggucgauuugggacuccccucauggggcaaguacgugcugaugagugccgguguuuuaacagcacugaugcuaaugauauuucucaugacuugcuguagaagggcuaaccgggccgaguccgcgcagcacagccugggggaacgaggccgcaaggugucuguaaccucacagaguggaagagucaucagcuccugggagucuuauaaaucgggcggggaaacaaagcuguga

SEQ ID NO: 158769 - RNA, 1575 nt, Artificial Sequence
  derived and/or modified CDS sequence (opt3) from glycoprotein__RABV__AB564016.1
augaacccccaggcccugauguucgugccucuccuuggcuuuucgcugugcuucgggaaguuuccaaucuacaccauuccggacaaauugggacccugguccccuauagauauccaccauuuaucuuguccaaauaaccuggucguugaggacgaagguugcacaaaucuaucaggcuucaguuauauggagcucaaggugggguacauuagcgcuaucaaaguaaacggauuuacuuguacgggcguggucaccgaagcagagacauauacuaauuucguggguuacguuaccacaaccuuuaagagaaaacacuucaggcccacuccugaugccugccgggcggcuuauaacuggaagauggccggggacccacgcuacgaagagucccugcauaaucccuauccugauuaccacuggcuucgaacagugaagaccacgaaagagucucuggucauuaucucgccaucaguggcagacuuggauccguacgacaagagccuccauagucguguauuucccuccggaaaauguucuggcauaacuguuagcuccaccuauugcucaacaaaccacgauuacacuaucuggaugccugaaaauccaagacugggcaccaguugugacauuuucacaaacagcagggggaagcgggccucuaaaggauccaagaccugcgguuuuguggaugagcgcggccuguauaagucacucaaaggggcuuguaaguuaaaacugugcggaguccuuggcuugagacugauggacgguacgugggcagccauccaaacuagcgaugaaacaaaguggugucccccugaccagcuagugaaucuccacgacuucaggagugaugagauugagcaucugguggucgaggaacuuguuaaaaagcgggaagagugccuggacgcuuuggaaucuaucaugaccacuaaauccgugagcuuucgccgacucucgcaccugagaaaguuaguaccaggguucggaaaggccuacacaauauucaacaaaacccugauggaggcggaugcacauuauaagucugugaggacguggaaugagauuauccccuccaaaggcugccuccgggucggcgggcguugucacccgcacgugaacggaguguuuuucaaugguauuauccuuggcccugacgggcauguucugauccccgaaaugcagucaaguuugcuacagcaacacauggagcugcucgaaagcuccgucauuccacugaugcauccucuugccgaucccucuaccguguuuaaggacgaugacgaggcugaagauuucguagagguucaccuuccagacgugcauaaacaggucagcggaguggauuugggccuccccucaugggguaaguacguccugaugagugccgggguguuaacagcacugaugcuaaugauauuucucaugacuugcugucgcagagcuaacagggccgaguccgcgcagcacagccugggcgaacggggacgaaagguuucugugaccucacagaguggccgcguaaucagcuccugggagucuuauaaaagcgggggagaaacaaagcuguga

SEQ ID NO: 158770 - RNA, 1575 nt, Artificial Sequence
  derived and/or modified CDS sequence (opt3) from glycoprotein__RABV__AB564017.1
augaacccccaggcccugauguucgugccucuccuugucuuuagccugugcuucggcaaguuuccaaucuacaccauuccggacaaauuggggcccugguccccuauagauauccaccauuuaucuuguccaaauaaccugguuguggaggacgaaggaugcacaaaucuaucagguuucaguuauauggagcucaagguaggcuacauuagcgcuaucaaagugaacggguuuacuuguacgggagucgugaccgaagcagagacauauacuaauuucguuggcuacgugaccacaaccuuuaagagaaaacacuucaggcccacuccugaugccugccgggcggcuuauaacuggaagauggccggugacccacgcuacgaagagucccugcauaaucccuauccugauuaccacuggcuucgaacagucaagaccacgaaagagucucuggugauuaucucgccaucaguagcagacuuggauccguacgacaagagccuccauagucguguuuuucccuccgggaaauguucuggaauaacugugagcuccaccuauugcucaacaaaccacgauuacacuaucuggaugccugaaaauccaagacugggcaccaguugugacauuuucacaaacagcaggggcaagcgggccucugagggguccaaaaccugcggauuugucgaugaacgcggucuguauaagucacucaagggcgcuuguaaauuaaagcugugcggggugcuuggauugagacugauggacggcacgugggcagccauccaaacuagcgaugagacaaaauggugucccccugaccagcuagugaaucuccacgacuucaggagugaugagauugaacaucuggucguugaggaacuugugaagaaacgggaggaaugccuggacgcuuuggagucuaucaugaccacuaaguccgugagcuuucgccgacucucgcaccugagaaaauuagugccagguuucgggaaggccuacacaauauucaacaagacccugauggaggcggaugcacauuauaaaucugucaggacguggaaugaaauuauccccuccaagggaugccuccgggugggcggccguugucacccgcacguuaacgggguguuuuucaauggaauuauccuugguccugacggccauguccugauccccgagaugcagucaaguuugcuacagcaacacauggaacugcucgagagcuccgugauuccacugaugcauccucuugccgaucccucuaccguauuuaaagacgaugacgaagcugaggauuucguugaggugcaucugccagacguccacaagcagguaagcggggucgauuugggacuccccucauggggcaaauacgugcugaugagugccgguguuuuaacagcacugaugcuaaugauauuucucaugacuugcugucgcagagcuaacagggccgaauccgcgcagcacagccugggggagcggggccgaaaggugucuguaaccucacagaguggacgcgucaucagcuccugggaaucuuauaagucgggcggggagacaaaacuuuga

SEQ ID NO: 158771 - RNA, 1575 nt, Artificial Sequence
  derived and/or modified CDS sequence (opt3) from glycoprotein__RABV__AB569299.1
auggugccccaggcccuucucuucgucccucuucugguuuuuagcuugugcuucggcaaguuuccaaucuacaccauuccggacaaauuagggcccugguccccuauagauauccaccaucugucuuguccaaacaaucuagugguagaggacgaaggaugcacaaaccucucagguuucaguuauauggagcugaaggugggcuacauuagcgcuaucaaagucaauggguuuacuuguacgggagugguuaccgaagcagagacauauacuaacuucgugggcuacgucaccacaaccuuuagaaggaagcacuuccggcccacuccugaugccugccgcgcggcuuauaauuggaaaauggccggugacccacgauacgaagagucccuucauaaccccuauccugauuaccacuggcugcguacagugaagaccacgaaggagucuuugguaauuaucucgccaucaguugcagaccucgauccguacgacaaaagccugcauaguagaguguuucccgggggaaaguguuccggcauaacugucucuagcaccuauugcuccacaaaucacgauuacacuaucuggaugccugaaaacccaaggcugggcaccucaugugacauuuucgugaauagucgggggaaacgcgccagcaagggagguaaaacaugcggcuuuguggaugagagagggcucuauaagucuuuaaagggagcuuguaaacugaagcugugcggcguccccgguuugaggcugauggacgggaccuggguugcaauccaaacguccgaugaaacuaaaugguguccuccagaccagcuagugaaccuccacgacuuccggucagaugagauugagcaucugguaguggaggaacuugucaagaaacgcgaagagugccuggacgccuuggaaagcaucaugacaaccaagagugugucuuuucgaagacucucccaccugaggaaauuaguucccggauucggcaaggcuuacacuauauucaauaagacacugauggaggccgaugcgcauuauaaaagcgugcggaccuggaacgagauuaucccgucgaagggcugccuccgugucgggggacgcugucacccucacgugaaugguguauuuuucaacggcauuauccuugggcccgacggacauguucugaucccagaaaugcagucuuccuugcuacagcaacacauggagcugcucgaaucaagugugauuccucugaugcauccccuugcagauccaagcacggucuuuaaagacggcgaugaggccgaagacuucguggagguccaucugcccgaugugcacaaguugauauccgguguugaccucgggcugccuucuuggggcaaauacguguuaaugagcgcuggaauccugauuacccuaaugcucaugaucuuucugaugacaugcuguagaaggguaaaucaggccggcucaaagcagcacgggcuugagggagcaggucggaaggucagugugacuucccagaacggccgaguuauaagcucuugggaaucauauaaaaacgggggagagacccgcuuguga

SEQ ID NO: 158772 - RNA, 1575 nt, Artificial Sequence
  derived and/or modified CDS sequence (opt3) from glycoprotein__RABV__AB608731.1
augaucccccaggcccuccuguucgugccucuucugauucccagcuugugcauaggcgaguuuccgaucuacaccauucccgacaaguuagggccuuggacaccaaucgauauucaccaucuguccugucccaacaaucuagucgcugaaaacgacggaugcacuucucucucagguuucaguuauauggagcugaaaguuggcuacaucagcgcaauaaaggugaauggguuuacguguaccggaguagugacagaagccgagacuuauaccaacuucgucggcuacgugacaaccacuuuuaaaagaaagcacuucaggccuaugccagaugcgugccgggcugcccaugacuggaaaauggccggugauccccgcuaugaagacucccuucaaaauccuuacccagauuaucacuggcugcgaacaguuaagaccacgaaggagucuuuggugaucauuucgccgucagucgccgaccucgaucccuacgacaaaagccugcauagucguguguuuccuuccgggaagugucugggaaucacuguaucuagcaccuacugcuccacaaaccacgauuauacuauuuggaugccaguugagcccagacucggcaccucaugugacaucuucacaaauaguaggggcaaaaaggcuagcaaagggggacgggugugcgguuuugucgaugaacgcggcuuauacaagucucugaagggggcauguaaacuuaaguugugcggagugccuggcauaagacugauggacgguaccuggguguccauucagacgucagaggacaucaaaugguguccacccgauaggcuagucaaccuccacgacuuccauagcgaugaacuggagcaccuuguuguggaggaacugauuaagcggcgcgagaauugcuuggacgcccucgaaaguaucguaacuacaaaaucuguguccuuucgaagacugagccauuuaaggaagcuggucccgggguucggaaaggcuuauaccaucuuuaacaaaacucucauggaggccgaugcgcacuacaagucggugaaaacauggaaugaaguuauuccuucuaagggcugccuugaggugggcgggaaaugucacccaccagucaacggaguguucuucaaugguauaauccugggcccugacgggaacguauugauucccgagaugcaguccucacuacugcagcaacauauggaacuccuggagaguagcguuaucccacuuaugcacccccuggcagauccuuccaccguguuuaaggaaggagacgaggccgaagauuucgucgaggugcauuugccagacguccacaaacaggugucugauguugaccucggccugccgagcugggguaaguauuuacugaugucagcuggggcccuagcaauacucauucuggcuaucgugcuuaucauuugcugucggcguguaaauaagacgggcaguacccagcgcggacauagagaguccaggggcaaaaugagcgucgcaccccagaacgggaagaucauuucuucaugggaauuguacaaaagugagagcgaaacaggacuguga

SEQ ID NO: 158773 - RNA, 1575 nt, Artificial Sequence
  derived and/or modified CDS sequence (opt3) from glycoprotein__RABV__AB635373.1
auggugccccaggcccuucucuucgucccucuucugguuuuuagcuugugcuucggcaaguuuccaaucuacaccauuccggacaaauuagggcccugguccccuauagauauccaccaucugucuuguccaaacaaucuagugguagaggacgaaggaugcacaaaccucucagguuucaguuauauggagcugaaggugggcuacauuagcgcuaucaaagucaauggguuuacuuguacgggagugguuaccgaagcagagacauauacuaacuucgugggcuacgucaccacaaccuuuagaaggaagcacuuccggcccacuccugaugccugccgcgcggcuuauaauuggaaaauggccggugacccacgauacgaagagucccuucauaaccccuauccugauuaccacuggcugcguacagugaagaccacgaaggagucuuugguaauuaucucgccaucaguugcagaccucgauccguacgacaaaagccugcauaguagaguguuucccgggggaaaguguuccggcauaacugucucuagcaccuauugcuccacaaaucacgauuacacuaucuggaugccugaaaacccaaggcugggcaccucaugugacauuuucaucaauagucgggggaaacgcgccagcaagggagguaaaacaugcggcuuuguggaugagagagggcucuauaagucuuuaaagggagcuuguaaacugaagcugugcggcgugcccgguuugaggcugauggacgggaccugggucgcaauucaaacguccgaugaaacuaaaugguguccuccagaccagcuaguuaaccuccacgacuuccauucagaugagaucgagcaccuggugguagaggaacuugugaagaaacgggaagagugccuggacgccuuggaaagcauaaugacaaccaagagugucucuuuucgccgacucucccaucugagaaaauuagugcccggauucggcaaggcuuacacuauuuucaauaagacacugauggaggccgaugcgcacuauaaaagcguuaggaccuggaacgagaucauuccgucgaagggcugccuccgggugggaggacguugucacccucaugucaaugguguguuuuucaacggcaucauccuugggcccgacggacacguacugauuccagaaaugcagucuuccuugcuacagcaacauauggagcugcucgaaucaaguguuauaccucugaugcacccccuugcagauccaagcacgguguuuaaagacggcgaugaggccgaagacuucgucgaggugcaucugcccgauguccacaaguugaucuccgguguggaccucgggcugccuucuuggggcaaauacguuuuaaugagcgcugggauucugaccacacuaaugcucaugaucuuucugaugauaugcugucgcagagugaaucagacuggcucaaagcagcacgggcuuggaggugccggcaggaagguaagugucaccucccagaacgggcgggugauuagcucuugggagucauauaaaaguggaggcgaaacacgauuguga

SEQ ID NO: 158774 - RNA, 1575 nt, Artificial Sequence
  derived and/or modified CDS sequence (opt3) from glycoprotein__RABV__AB645847.1
auggugccccaggcccugcucgucguuccucuucugggcuucagcuugugcuuugggaaguucccaaucuacaccauuccggacaaauuaggacccugguccccuauagauauccaccaucugucuuguccaaacaaucuagugguagaggacgaagguugcacaaaccucucaggcuuuaguuauauggagcugaaggugggguacauuagcgcuaucaaagucaauggauucacuuguacgggcgugguuaccgaagcagagacauauacuaacuuuguggguuacgucaccacaaccuucaagagaaaacacuuuaggcccacuccugaugaaugccgggccgcguauaauuggaagauggcuggggacccacgcuacgaggagucccuucauaaccccuauccugauuaccacuggcugcgaacagugaagaccacgaaagaaucuuugguaauuaucucgccaucaguugccgaccucgauccguacgacaagagccugcauagucguguguuccccuccggaaaauguucuggcauaacugucagcuccaccuauugcucaacaaaucacgauuacacuaucuggaugccugagaacccaagacugggcaccaguugugacauuuuuacaaauagcagggggaagcgggcaucuaaaggauccaagaccugcgguuucguggaugaacgcggccucuauaagucauuaaaaggggccuguaagcugaaacuuugcggaguguugggccugaagcuaauggacgguacgugggucgcuaugcaaacuagcgaugagacaaaauggugucccccugaccagcucguuaaccugcacgacuuuagaagugaugagaucgaacaucuugugguagaggaccuggugaagaaaagggaagagugcuuggaugcacucgaaucuauuaugaccacuaaguccgucagcuuccggcgccugucgcacuuacgaaagcuggugccaggguuuggaaaagccuacacaaucuucaauaagacccucauggaggcugacgcccauuauaaaucuguuagaacguggaacgaggugauacccuccaagggcugccuuaaagucggcgggaggugucacccgcacgugaauggaguauucuuuaacgguguuauucugggcccugaugggcauguguugauccccgaaaugcagucaagucuacugcggcagcacauggagcuccuggaaagcuccgucauuccacuuaugcauccucuggcggaccccucuaccguguucaaggauggagacgaggcagaagauuuugucgaggugcacuugccagacguucauaagcaagugagcggcguagaucucggucugcccaauugggggaaauacgucucauuaagugccggcgcucugaucgcccuaaugcucaugaucuuccugaugacaugcugucguaaggugaaccgcccugagccaacucagagaucccuugaaggaaaaggcaggaagguuagcgugaccucucagucagggaaagucauuaguagcugggaguccuauaagucuggaggugaaacaucguuguga

SEQ ID NO: 158775 - RNA, 1575 nt, Artificial Sequence
  derived and/or modified CDS sequence (opt3) from glycoprotein__RABV__AB683584.1
augaucccccaggcccuccuguucgugccucuucuggucuuuagcuugugcuucggcaaguuuccaauuuacaccauaccggacaaauuagggcccugguccccuaucgauauucaccaucugucuuguccaaacaaucuaguuguggaggacgaaggaugcacaaaccucucagguuucaguuauauggagcugaagguaggcuacaucagcgcuauuaaagugaauggguuuacuuguacgggagucgugaccgaagcagagacauauacuaacuucguuggcuacgugaccacaaccuuuaagagaaaacacuucaggcccacuccugaugccugccgggcggcuuauaauuggaagauggccggugacccacgcuacgaagagucccuucauaaccccuauccugauuaccacuggcugcgaacagucaagaccacgaaagagucuuuggugaucauaucgccaucaguagcagaccucgauccguacgacaagagccugcauagucguguuuuucccuccgggaaauguucuggaaucacugugagcuccaccuauugcucaacaaaucacgauuacacuauuuggaugccugaaaacccaagacugggcaccaguugugacaucuucacaaauagcaggggcaagcgggccucuaaaggguccaagaccugcggauuugucgaugagcgcggucucuauaagucauuaaaaggcgcuuguaagcugaaacuuugcgggguguugggacugagacuaauggacggcacgugggcagccauucaaacuagcgaugaaacaaaguggugucccccugaccagcucgugaaccugcacgacuucaggagugaugagaucgagcaucuugucguugaggaacuggugaaaaagcgggaagagugcuuggacgcucucgaaucuauaaugaccacuaaauccgugagcuuucgccgacugucgcacuuaagaaagcugguaccagguuucgggaaggccuacacaauuuucaauaaaacccucauggaggcggaugcacauuauaagucugucaggacguggaacgagaucauucccuccaaaggaugccuucgggugggcggccguugucacccgcacguuaaugggguguuuuucaacggaaucauccuggguccugacggccaugucuugauucccgaaaugcagucaagucuacugcagcaacacauggagcuccuggaaagcuccgugauaccacuuaugcauccucuggccgaucccucuaccguauuuaaggacgaugacgaggcugaagaguucguugaggugcacuugccagauguccauaaacaggugagcggggucgaccucggacugcccucauggggcaaguacguguuaaugagugccgguguucugacagcacuaaugcucaugaucuuucugaugacuugcugucgcagagcuaauaggguggaauccgcccagcacagccuuggggagcggggccgaaagguaucugucaccucacagaguggacgcgugauuagcuccugggaaucuuauaaaucgggcggggagacaaaguuguga

SEQ ID NO: 158776 - RNA, 1575 nt, Artificial Sequence; identical to SEQ ID NO: 158673
  derived and/or modified CDS sequence (opt3) from glycoprotein__RABV__AB683585.1

SEQ ID NO: 158777 - RNA, 1575 nt, Artificial Sequence
  derived and/or modified CDS sequence (opt3) from glycoprotein__RABV__AB683586.1
augaucccccaggcccuccuguucgugccucuucuggucuuuagcuugugcuucggcaaguuuccaauuuacaccauaccggacaaauuagggcccugguccccuaucgauauucaccaucugucuuguccaaacaaucuaguuguggaggacgaaggaugcacaaaccucucagguuucaguuauauggagcugaagguaggcuacaucagcgcuauuaaagugaauggguuuacuuguacgggagucgugaccgaagcagagacauauacuaacuucguuggcuacgugaccacaaccuuuaagagaaaacacuucaggcccacuccugaugccugccgggcggcuuauaauuggaagauggccggugacccacgcuacgaagagucccuucauaaccccuauccugauuaccacuggcugcgaacagucaagaccacgaaagagucuuuggugaucauaucgccaucaguagcagaccucgauccguacgacaagagccugcauagucguguuuuucccuccgggaaauguucuggaaucacugugagcuccaccuauugcucaacaaaucacgauuacacuauuuggaugccugaaaacccaagacugggcaccaguugugacaucuucacaaauagcaggggcaagcgggccucuaaaggguccaagaccugcggauuugucgaugagcgcggucucuauaagucauuaaaaggcgcuuguaagcugaaacuuugcgggguguugggacugagacuaauggacggcacgugggcagccauucaaacuagcgaugaaacaaaguggugucccccugaccagcucgugaaccugcacgacuucaggagugaugagaucgagcaucuugucguugaggaacuggugaaaaagcgggaagagugcuuggacgcucucgaaucuauaaugaccacuaaauccgugagcuuucgccgacugucgcacuuaagaaagcugguaccagguuucgggaaggccuacacaauucucaauaaaacccuuauggaggcggaugcacauuauaagucugucaggacguggaacgagaucauucccuccaaaggaugccugcgggugggcggccguugucacccgcacguuaaugggguguucuuuaacggaaucaucuuggguccugacggccauguccuaauucccgaaaugcagucaagucugcuccagcaacacauggagcugcuugaaagcuccgugauaccacugaugcauccuuuggccgaucccucuaccguauucaaggacgaugacgaggcugaagauuuuguugaggugcaccucccagacguccauaaacaggugagcggggucgaucugggauuacccucauggggcaaguacgugcugaugagugccgguguucuaacagcacucaugcugaugaucuuccuuaugacuugcugucgcagagcuaauagggccgaguccgcgcagcacagcuugggggaaggcgagcggaaggugucuguaaccucacagaguggacgagucauuagcuccugggaaucuuauaaaucgggcggggagacaaagcuguga

SEQ ID NO: 158778 - RNA, 1575 nt, Artificial Sequence
  derived and/or modified CDS sequence (opt3) from glycoprotein__RABV__AB683587.1
augaucccccaggcccuccuguucgugccucuucuggucuuuagcuugugcuucggcaaguuuccaauuuacaccauaccggacaaauuagggcccugguccccuaucgauauucaccaucugucuuguccaaacaaucuaguuguggaggacgaaggaugcacaaaccucucagguuucaguuauauggagcugaagguaggcuacaucagcgcuauuaaagugaauggguuuacuuguacgggagucgugaccgaagcagagacauauacuaacuucguuggcuacgugaccacaaccuuuaagagaaaacacuucaggcccacuccugaugccugccgggcggcuuauaauuggaagauggccggugacccacgcuacgaagagucccuucauaaccccuauccugauuaccacuggcugcgaacagucaagaccacgaaagagucuuuggugaucauaucgccaucaguagcagaccucgauccguacgacaagagccugcauagucguguuuuucccuccgggaaauguucuggaaucacugugagcuccaccuauugcucaacaaaucacgauuacacuauuuggaugccugaaaacccaagacugggcaccaguugugacaucuucacaaauagcaggggcaagcgggccucuaaaggguccaagaccugcggauuugucgaugagcgcggucucuauaagucauuaaaaggcgcuuguaagcugaaacuuugcgggguguugggacugagacuaauggacggcacgugggcagccauucaaacuagcgaugaaacaaaguggugucccagugaccagcucgugaaccugcacgacuucaggucugaugagaucgagcaucuugucguugaggaacuggugaaaaagcgggaagagugcuuggacgcucucgaauccauaaugaccacuaaaagcguaucguuucgccgacugucucacuuaagaaagcuggugccugguuucgggaaggccuacacaauuuucaauaaaacccucauggaggcggaugcacauuauaaguccgucaggacguggaacgagaucauuccaucaaaaggaugccuucgggugggcggccguugucacccccacguuaaugggguguuuuucaacggaaucauccuggguccggacggccaugucuugauuccugaaaugcagaguagccuacugcagcaacacauggagcuccuggaauccucugugauaccccuuaugcauccacuggccgauccuagcaccguauuuaaggacgaugacgaggcugaagauuucguugaggugcacuugcccgacguccauaaacaggugucaggggucgaucucggacugccaaguuggggcaaguacguguuaauguccgccgguguucugacagcacuaaugcucaugaucuuucugaugacuugcugucgcagagcuaauagggccgagagcgcgcagcacucucuuggggaacggggccgaaaggugucaguaaccagucagagcggacgcgucauuuccucuugggagucguauaaaagcggcggggaaacaaaguuguga

SEQ ID NO: 158779 - RNA, 1575 nt, Artificial Sequence
  derived and/or modified CDS sequence (opt3) from glycoprotein__RABV__AB683589.1
augaacccccaggcccugauguucgugccucuccuugucuuuagccugugcuucggcaaguuuccaaucuacaccauuccggacaaauuggggcccugguccccuauagauauccaccauuuaucuuguccaaauaaccugguuguggaggacgaaggaugcacaaaucuaucagguuucaguuauauggagcucaagguaggcuacauuagcgcuaucaaagugaacggguuuacuuguacgggagucgugaccgaagcagagacauauacuaauuucguuggcuacgugaccacaaccuuuaagagaaaacacuucaggcccaugccugaugccugccgggcggcuuauaacuggaagauggccggugacccacgcuacgaagagucccugcauaaucccuauccugauuaccacuggcuucgaacugucaagacaaccaaagagucucuggugauuaucucgccaucaguagcagacuuggauccguacgacaagagccuccauagucguguuuuucccuccgggaaauguucuggaauaacggugagcuccacuuauugcucaaccaaccacgauuacacaaucuggaugccugaaaauccaagacugggcacuagcugugacauuuucaccaacagcaggggcaagcgggccucuaaaggguccaagacaugcggauuugucgaugagcgcggucuguauaagucacucaaaggcgcuuguaaguuaaaacugugcggggugcuuggauugagacugauggacggcaccugggcagccauccaaacgagcgaugaaacuaaguggugucccccugaccagcuagugaaucuccacgacuucaggagugaugagauugagcaucuggucguugaggaacuugugaaaaagcgggaagagugccuggacgcuuuggaaucuaucaugacaaccaaauccguaaguuuucgccgacucucgcaccugagaaaguuagugccagguuucgggaaggccuacacuauauucaacaaaacacugauggaggcggaugcacauuauaagucugucaggaccuggaaugagauuauccccuccaaaggaugccuccgggugggcggccguugucacccgcacguuaacgggguguuuuucaauggaauuauccuugguccugacggccauguccugauccccgaaaugcagucaaguuugcuacagcaacacauggagcugcucgaaagcuccgugauuccacugaugcauccucuugccgaucccucuacgguauuuaaggacgaugacgaggcugaagauuucguugaggugcaccuuccagacguccauaaacaggugagcggggucgauuugggacuccccucauggggcaaguacgugcugaugagugccgguguuuuaaccgcacugaugcuaaugauauuucucaugacaugcugucgcagagcuaacagggccgaguccgcgcagcacagccugggggaacggggccgaaaggugucuguaacuucacagaguggacgcgucaucagcuccugggagucuuauaaaucgggcggggaaaccaagcuguga

SEQ ID NO: 158780 - RNA, 1575 nt, Artificial Sequence; identical to SEQ ID NO: 158649
  derived and/or modified CDS sequence (opt3) from glycoprotein__RABV__AB683591.1

SEQ ID NO: 158781 - RNA, 1575 nt, Artificial Sequence
  derived and/or modified CDS sequence (opt3) from glycoprotein__RABV__AB699208.1
auggugccccagguccugcuguucguuccucuucugguguuuagcaugugcuucggcaaguuuccaaucuacaccauuccggacaaauuggggcccugguccccuauagauauccaccauuuaucuuguccaaacaaucugguaguggaggacgaaggaugcacaaaccuaucagguuucaguuauauggagcucaaggucggcuacauuagcgccaucaaagugaauggguuuacuuguacgggaguugugaccgaagcugagacauauacuaacuucgucggcuacgugaccacaaccuuuaagagaaaacacuucaggcccacuccugaugcaugccgggccgcguauaauuggaagauggcuggugacccacgcuacgaagagucccugcauaaccccuauccugauuaccacuggcuucgaacaguaaagaccacgaaagagucucugguuauuaucucgccaucaguggccgacuuggauccguacaauaagagccuccauagucgugucuuucccuccgggaaauguucuggaauaacuaucagcuccaccuauugcgcaacaaaccacgacuacacuauuuggaugccugaaaauccaagacugggcaccucaugugauaucuucacaaacaguaggggcaagcgggccagcaaagggggaaagaccugcgguuuuguggacgagcgcggccuguauaagucucucaaaggggcuuguaaguuaaaacugugcggagugcuuggcuugagacugauggaugguacgugggucgcaaugcaaacuuccgacgaaacaaaguggugucccccugaucagcuaguuaaucuccacgacuucaggucagacgagauugagcaucuggugguagaggaacuugugaaaaagcgggaagagugccuggaugccuuggaaagcaucaugaccacuaaaagugucucuuuucgccgacucucccaccugagaaaguuagugccaggguucggaaaggcuuacacaauauucaacaaaacccugauggaggccgacgcgcauuauaagagcauuaggacguggaaugagaucauucccucgaaaggcugccuccggguuggcgggcguugucacccgcacgugaacggagucuuuuucaaugguaucauccuuggcccugaugggcaugugcugauucccgaaaugcagucuuccuugcuacagcaacacauggagcugcucgaaucaaguguaauaccacugaugcauccucuugcagaccccagcaccguuuuuaaggauggagacgaggccgaagauuucguggagguccaccucccagacgugcauaaacagaucuccggcgucgauuugggucuccccucuugggggaaguacgugcugguuagcgcuggcguguuaguaguccugaugcuaacaauuuuuaucaugacuugcuguggacgcgugagaaggccuaagucaacccagcacagucucggcggggccggacggaaaguuuccgugacaagccagucugguaaggucauaucaaguugggagagcuauaaaaacggcggggaaacucgacuguga

SEQ ID NO: 158782 - RNA, 1575 nt, Artificial Sequence
  derived and/or modified CDS sequence (opt3) from glycoprotein__RABV__AB699209.1
auggugccccagguccugagcuucguuccucuccuuguguuuucuaccugcuucggcaaguuuccaaucuacacaauuccggacaaacuggggcccugguccccuauagauauccaccauuugucauguccaaacaauuuaguaguggaggacgaaggaugcacuaaccugagugguuucagcuauauggagcuaaaggucggcuacauuuccgccaucaaagugaauggguuuacguguaccggaguugugacagaagcugagacuuauaccaacuucgucggcuacgugacaaccacuuuuaagagaaaacacuucaggcccacaccugaugcaugccgggccgcguauaauuggaagauggcuggugacccacgcuacgaagagucucuccauaaccccuauccugauuaccacuggcugcgaaccguaaagacgacuaaagagucgcuuguuauuaucucaccaaauguggccgaccuggauccguacaacaagagcuugcauagucgugucuuucccuccgggaaauguucuggaauaaccaucagcuccacauauugcucaacuaaucacgacuacaccauuuggaugccugaaaacccaagacucggcacaaguugugauaucuucaccaauagcaggggcaagcgggcaucuaaagggggaaagacgugcgguuuuguggacgagcgcggccuguauaagucccugaaaggggccuguaagcucaaauuaugcggagugcugggccuuagauugauggaugguacuugggucgcuaugcaaacaucagacgaaaccaaguggugucccccugaucagcugguuaaccuacacgacuucaggagcgacgagauugagcaucucgugguagaggaacuggugaaaaagcgggaagagugccuugaugcacuggaaaguaucaugacuacaaaaucugucuccuuucgccgauugagccaccucagaaagcuggugccaggguucggaaaggccuacaccauauucaauaaaacguuaauggaggcugacgcccauuauaagucgguuaggaccuggaacgagauuauccccucuaaaggcugccugcgggugggcgggcguugucacccgcacgucaauggaguguuuuucaacgguauuauccucggcccugaugggcauguacuuauccccgaaaugcaguccucacuguugcagcaacacauggagcuacuggaaaguagcguuauuccacucaugcauccucuggcggaccccuccacaguguuuaaggauggagacgaggcagaagauuucgucgaggugcaccuuccagacguccauaaacagauaucuggcguggaucuggguuugcccagcugggggaaguacguucucgugucagccggcguacuggucguguuaaugcugacuaucuuuauuaugaccugcuguggaaagguucgcagaccuaaaaguacacagcacucccuaggcgggacuggaaggaaggugagcgucaccucucagucagguaaagugaucaguagcugggaguccuauaagucuggcggggaaacacggcucuga

SEQ ID NO: 158783 - RNA, 1575 nt, Artificial Sequence
  derived and/or modified CDS sequence (opt3) from glycoprotein__RABV__AB699210.1
auggugccccagguccugagcuucguuccucuccuuguguuuucuaccugcuucggcaaguuuccaaucuacacaauuccggacaaacuggggcccugguccccuauagauauccaccauuugucauguccaaacaauuuaguaguggaggacgaaggaugcacuaaccugagugguuucagcuauauggagcuaaaggucggcuacauuuccgccaucaaagugaauggguuuacguguaccggaguugugacagaagcugagacuuauaccaacuucgucggcuacgugacaaccacuuuuaagagaaaacacuucaggcccacaccugaugcaugccgggccgcguauaauuggaagauggcuggugacccacgcuacgaagagucucuccauaaccccuauccugauuaccacuggcugcgaaccguaaagacgacuaaagagucgcuuguuauuaucucaccaagcguggccgaccuggauccguacaauaagaguuugcauucccgugucuuucccucugggaaauguagcggaauaaccaucuccucaacauauugcaguacuaaccacgacuacaccauuuggaugccugaaaauccaagacucggcacaagcugugauaucuucaccaacucuaggggcaagcgggcauccaaagggggaaagacgugcgguuuuguggacgagcgcggccuguauaagucacugaaaggggccuguaagcucaaauuaugcggagugcugggccuuagauugauggaugguacuugggucgcuaugcaaacaagcgacgaaaccaaguggugucccccugaucagcugguuaaucuacacgacuucaggagugacgagauugagcaucucgugguagaggaacuggugaaaaagcgggaagagugccuugaugcacuggaaucuaucaugacuacaaaauccgucagcuuucgccgauugucgcaccucagaaagcuggugccaggguucggaaaggccuacaccauauucaacaaaacguuaauggaggcugacgcccauuauaagucuguuaggaccuggaaugagauuauccccuccaaaggcugccugcgggugggcgggcguugucacccgcacgucaacggaguguuuuucaaugguauuauccucggcccugaugggcauguacuuauccccgaaaugcagucaagucuguugcagcaacacauggagcuacuggaaagcuccguuauuccacucaugcauccucuggcggaccccucuacaguguuuaaggauggagacgaggcagaagauuucgucgaggugcaccuuccagacguccauaaacagauaagcggcguggaucuggguuugcccucaugggggaaguacguucucgugagugccggcguacuggucguguuaaugcugacuaucuuuauuaugaccugcuguggacgcguuagaaggccuaaguccacacagcacagccuaggcgggacuggacggaaagugucugucaccucacagagugguaaggugaucagcuccugggagucuuauaaaucgggcggggaaacacgacucuga

SEQ ID NO: 158784 - RNA, 1575 nt, Artificial Sequence
  derived and/or modified CDS sequence (opt3) from glycoprotein__RABV__AB699212.1
auggugccccagguccugagcuucguuccucuccuuguguuuucuaccugcuucggcaaguuuccaaucuacacaauuccggacaaacuggggcccugguccccuauagauauccaccauuugucauguccaaacaauuuaguaguggaggacgaaggaugcacuaaccugagugguuucagcuauauggagcuaaaggucggcuacauuuccgccaucaaagugaauggguuuacguguaccggaguugugacagaagcugagacuuauaccaacuucgucggcuacgugacaaccacuuuuaagagaaaacacuucaggcccacaccugaugcaugccgggccgcguauaauuggaagauggcuggugacccacgcuacgaagagucucuccauaaccccuauccugauuaccacuggcugcgaaccguaaagacgacuaaagagucgcuuguuauuaucucaccaagcguggccgaccuggauccguacgacaagaguuugcauucccgugucuuucccucugggaaauguagcggaauaaccaucuccucaacaugcuguaguacuaaucacgauuauaccauuuggaugccugaaaacccaagacucggcacaagcugcgacaucuucaccaauucuaggggcaagcgggcauccaaagggggaaagacgugugguuuuguggaugagcgcggccuguacaagucacugaaaggggccugcaagcucaaauuauguggagugcugggccuuagauugauggacgguacuugggucgcuaugcaaacaagcgaugaaaccaaguggugucccccugaccagcugguuaaccuacacgacuucaggagugaugagauugagcaucucgugguagaggaacuggugaaaaagcgggaagagugccuugacgcacuggaaucuaucaugacuacaaaauccgucagcuuucgccgauugucgcaccucagaaagcuggugccaggguucggaaaggccuauaccauauucaauaaaacguuaauggaggcugaugcccauuacaagucuguuaggaccuggaacgagauuauccccuccaaaggcugccugcgggugggcgggcguugccacccgcacgucaauggaguguuuuucaacgguauuauccucggcccugacgggcauguacuuauccccgaaaugcagucaagucuguugcagcaacacauggagcuacuggaaagcuccguuauuccacucaugcauccucuggcggaucccucuacaguguuuaaggacggagaugaggcagaagacuucgucgaggugcaccuuccagauguccauaaacagauaagcggcguggaccuggguuugcccucaugggggaaguauguucucgugagugccggcguacuggucguguuaaugcugacuaucuuuauuaugaccuguugcggacgcguuagaaggccuaaguccacacagcacagccuaggcgggacuggacggaaagugucugucaccucacagagugguaaggugaucagcuccugggagucuuacaaaucgggcggggaaacacgacucuga

SEQ ID NO: 158785 - RNA, 1575 nt, Artificial Sequence; identical to SEQ ID NO: 158783
  derived and/or modified CDS sequence (opt3) from glycoprotein__RABV__AB699213.1

SEQ ID NO: 158786 - RNA, 1575 nt, Artificial Sequence
  derived and/or modified CDS sequence (opt3) from glycoprotein__RABV__AB733961.1
augaucccccaggcccuucucuucgugccucuucuggucagcuccuugugcuuuggcaaguucccaauuuacaccauaccggacaaauuagggcccuggucuccuaucgauauucaccaucugucauguccaaacaaucuaguuguggaggacgaaggaugcacaaaccucagugguuuuagcuauauggagcugaagguaggcuacaucuccgcuauuaaagugaauggguucacuuguacgggagucgugaccgaagcagagacauauacuaacuuuguuggcuacgugaccacaaccuucaagagaaaacacuuuaggcccacucuugaugccugccgggcggcuuauaauuggaagauggccggugacccucgcuacgaagagucucugcauaacccauaucccgauuaccacugguugcgaacagucaagaccacgaaagagucgcucgugaucauaucaccuagcguagcagaccuggauccauacgacaagagucugcauucccguguuuucccgucugggaaauguagcggaaucacuguguccucaaccuauugcaguacaaaucacgauuacacuauuuggaugcccgaaaacccuagacucggcaccagcugugacaucuuuacaaauucuaggggcaagcgggccuccaaagggucaaagaccugcggauucgucgaugagcgcgguuuauauaagagccugaaaggcgcuuguaagcugaaauugugcggggugcugggacuaagacucauggacggcacgugggcagccauucaaacaagugaugaaacuaagugguguccacccgaccagcuggugaaccuucacgacuuuaggucugaugagaucgagcaucuggucguugaagaguuggugaaaaagcgggaagagugccucgacgcucuggaauccauaaugaccacuaaaagcguaucguuccgccgauuaucucaccugagaaagcucgugccugguuuugggaaggccuacacaauuuucaauaaaacccuuauggaggcggaugcacauuauaaguccgucaggacguggaacgagaucauuccaucaaaaggaugccugcgggugggcggccguugucacccccacguuaaugggguguucuuuaacggaaucaucuuggguccggacggccauguccuaauuccugaaaugcagaguagccugcuccagcaacacauggagcugcuugaauccucugugauaccccugaugcauccauuggccgauccuagcaccguauucaaggacgaugacgaggcugaagauuuuguugaggugcaccuccccgacguccauaaacaggugucaggggucgaucugggauuaccaaguuggggcaaguacgugcugacauccgccgguguucuaacugcacucaugcugaugaucuuccuuaugaccugcugucgcagagcuaauagggccgagagcgcgcagcacucuuugggggaacggggccgaaaggugucaguaacaagucagagcggacgcgucauuuccucuugggagucguauaaaagcggcggggaaacuaagcuguga

SEQ ID NO: 158787 - RNA, 1575 nt, Artificial Sequence
  derived and/or modified CDS sequence (opt3) from glycoprotein__RABV__AB733962.1
augaucccccaggcccuucucuucgugccucuucuggucuuuagcuugugcuuaggcaaguucccaauuuacaccauaccggacaaacuggggcccugguccccuaucgauauucaccaucuaucuuguccaaacaaucucguuguggaggacgaaggaugcacaaaccugucagguuuuaguuauauggagcuuaagguaggcuacaucagcgcuauuaaagugaauggguucacuuguacgggagucgugaccgaagcagagacauauacuaacuuuguuggcuacgugaccacaaccuucaagagaaaacacuuuaggcccacuccugaugccugccgggcggcuuauaauuggaagauggccggugacccacgcuacgaagagucccugcauaaccccuauccugauuaccacugguugcgaacagucaagaccacgaaagagucucucgugaucauaucgccaucaguagcagaccuggauccguacgacaagagccugcauagucguguuuuccccuccgggaaauguucuggaaucacugugagcuccaccuauugcucaacaaaucacgauuacacuauuuggaugccugaaaacccaagacucggcaccaguugugacaucuuuacaaauagcaggggcaagcgggccucuaaaggguccaagaccugcggauucgucgaugagcgcgguuuauauaagucacugaaaggcgcuuguaagcugaaauugugcggggugcugggacuaagacucauggacggcacgugggcagccauucaaacuagcgaugaaaucaaguggugucccccugaccagcuggugaaccuucacgacuuuaggagugaugagauagagcaucuggucguugaagaguuggugaaaaagcgggaagagugccucgacgcucuggaaucuauuaugacaaccaaauccgugagcuuccgccgauuaucgcaccugagaaagcucguaccagguuuugggaaggccuacacuaucuucaauaaaacacuuauggaggcggaugcacauuauaagucugucaggaccuggaacgagauuauccccuccaaaggaugccugcgggugggcggccguugucacccgcacguuaaugggguguucuuuaacggaaucauuuuggguccugacggccauguccuaauacccgaaaugcagucaagucugcuccagcaacacauggagcugcuugaaagcuccgugaucccacugaugcauccuuuggccgaucccucuacgguauucaaggacgaugacgaggcugaagauuuuguugaggugcaccucccagacguccauaaacaggugagcggggucgaucugggauuacccucauggggcaaguacgugcugaugagugccgguguucuaaccgcacucaugcugaugauuuuccuuacaacuugcugucgcagagcuaauagggccgaguccgcgcagcacagcuugggggaacggggccgaaaggugucuguaaccucacagaguggacgcgucaucagcuccugggagucuuauaaaucgggcggggaaacaaagcuguga

SEQ ID NO: 158788 - RNA, 1575 nt, Artificial Sequence; identical to SEQ ID NO: 158619
  derived and/or modified CDS sequence (opt3) from glycoprotein__RABV__AB733963.1

SEQ ID NO: 158789 - RNA, 1575 nt, Artificial Sequence
  derived and/or modified CDS sequence (opt3) from glycoprotein__RABV__AB733964.1
augaucccccaggcccuucucuucgugccucuucuggucuuuagcuugugcuuaggcaaguucccaauuuacaccauaccggacaaacuggggcccugguccccuaucgauauucaccaucuaucuuguccaaacaaucucguuguggaggacgaaggaugcacaaaccugucagguuuuaguuauauggagcuuaagguaggcuacaucagcgcuauuaaagugaauggguucacuuguacgggagucgugaccgaagcagagacauauacuaacuuuguuggcuacgugaccacaaccuucaagagaaaacacuuuaggcccacuccugaugccugccgggcggcuuauaauuggaagauggccggugacccacgcuacgaagagucccugcauaaccccuauccugauuaccacugguugcgaacagucaagaccacgaaagagucucucgugaucauaucgccaucaguagcagaccuggauccguacgacaagagccugcauagucguguuuuccccuccgggaaauguucuggaaucacugugagcuccaccuauugcucaacaaaucacgauuacacuauuuggaugccugaaaacccaagacucggcaccaguugugacaucuuuacaaauagcaggggcaagcgggccucuaaaggguccaagaccugcggauucgucgaugagcgcgguuuauauaagucacugaaaggcgcuuguaagcugaaauugugcggggugcugggacuaagacucauggacggcacgugggcagccauucaaacuagcgaugaaacaaaguggugucccccugaccagcuggugaaccuucacgacuuucauagugaugagaucgagcaccuggucguugaagaguuggugaaaaagagggaagagugccucgacgcucuggaaucuauaaugaccacuaaauccgugagcuuccggcgcuuaucgcaucugcgaaagcucguaccagguuuugggaaggccuacacaauuuucaauaaaacccuuauggaggcggaugcacacuauaagucugucagaacguggaacgagaucauucccaccaaaggaugccugagggugggcggccggugucacccgcauguuaaugggguguucuuuaacggaaucaucuuggguccugacggccacguccuaauucccgaaaugcaguccucacugcuccagcaacauauggagcugcuugaaaguagcgugauaccacugaugcacccuuuggccgaucccuccacaguauucaaggacgaugacgaggcugaagauuuuguugaggugcaucucccagacguccacaaacaggugucuggggucgaucugggauuacccagcuggggcaaguacgugcugaugucagccgguguucuaacugcacucaugcugaugaucuuccuuaccacaugcugucgucgcgcugacagagccgagagugcgcagcacuccuugggggaaaggggccggaaggugagcguaacuucucagucaggacgagucauuaguagcugggaguccuauaaaucuggcggggaaaccaagcuguga

SEQ ID NO: 158790 - RNA, 1575 nt, Artificial Sequence; identical to SEQ ID NO: 158650
  derived and/or modified CDS sequence (opt3) from glycoprotein__RABV__AB733965.1

SEQ ID NO: 158791 - RNA, 1575 nt, Artificial Sequence
  derived and/or modified CDS sequence (opt3) from glycoprotein__RABV__AB733966.1
augaucccccaggcccuccuguucgugccucuucuggucuuuagcuugugcuucggcaaguuuccaauuuacaccauaccggacaaauuagggcccugguccccuaucgauauucaccaucugucuuguccaaacaaucuaguuguggaggacgaaggaugcacaaaccucucagguuucaguuauauggagcugaagguaggcuacaucagcgcuauuaaagugaauggguuuacuuguacgggagucgugaccgaagcagagacauauacuaacuucguuggcuacgugaccacaaccuuuaagagaaaacacuucaggcccacuccugaugccugccgggcggcuuauaauuggaagauggccggugacccacgcuacgaagagucccuucauaaccccuauccugauuaccacuggcugcgaacagucaagaccacgaaagagucuuuggugaucauaucgccaucaguagcagaccucgauccguacgacaagagccugcauagucguguuuuucccuccgggaaauguucuggaaucacugugagcuccaccuauugcucaacaaaucacgauuacacuauuuggaugccugaaaacccaagacugggcaccaguugugacaucuucacaaauagcaggggcaagcgggccucuaaaggguccaagaccugcggauuugucgaugagcgcggucucuauaagucauuaaaaggcgcuuguaagcugaaacuuugcgggguguugggacugagacuaauggacggcacgugggcagccauucaaacuagcgaugaaacaaaguggugucccccugaccagcucgugaaccugcacgacuuccauagugaugagaucgagcaccuugucguugaggaacuggugaaaaagagggaagagugcuuggacgcucucgaaucuauaaugaccacuaaauccgugagcuuucggcgccugucgcauuuacgaaagcugguaccagguuucgggaaggccuacacaauuuucaauaaaacccucauggaggcggaugcacacuauaagucugucagaacguggaacgagaucauucccuccaaaggaugccuuagggugggcggccggugucacccgcauguuaaugggguguuuuucaacggaaucauccuggguccugacggccacgucuugauucccgaaaugcagucaagucuacugcagcaacauauggagcuccuggaaagcuccgugauaccacuuaugcacccucuggccgaucccucuaccguauuuaaggacgaugacgaggcugaagauuucguugaggugcauuugccagacguccacaaacaggugagcggggucgaucucggacugcccucauggggcaaguacguguuaaugagugccgguguucugacagcacuaaugcucaugaucuuucugacuaccugcugucgucgcgcuaauagagccgaguccgcgcagcacagccuuggggaaaggggccggaaggugucuguaacaucacagaguggacgagucauuagcuccugggagucuuauaaaucgggcggggaaacuaaguuguga

SEQ ID NO: 158792 - RNA, 1575 nt, Artificial Sequence; identical to SEQ ID NO: 158748
  derived and/or modified CDS sequence (opt3) from glycoprotein__RABV__AB733967.1

SEQ ID NO: 158793 - RNA, 1575 nt, Artificial Sequence
  derived and/or modified CDS sequence (opt3) from glycoprotein__RABV__AB733968.1
augaucccccaggcccuccuguucgugccucuucuggucuuuagcuugugcuucggcaaguuuccaauuuacaccauaccggacaaauuagggcccugguccccuaucgauauucaccaucugucuuguccaaacaaucuaguuguggaggacgaaggaugcacaaaccucucagguuucaguuauauggagcugaagguaggcuacaucagcgcuauuaaagugaauggguuuacuuguacgggagucgugaccgaagcagagacauauacuaacuucguuggcuacgugaccacaaccuuuaagagaaaacacuucaggcccacuccugaugccugccgggcggcuuauaauuggaagauggccggugacccacgcuacgaagagucccuucauaaccccuauccugauuaccacuggcugcgaacagucaagaccacgaaagagucuuuggugaucauaucgccaucaguagcagaccucgauccguacgacaagagccugcauagucguguuuuucccuccgggaaauguucuggaaucacugugagcuccaccuauugcccuacaaaucacgauuacacuauuuggaugccagaaaaccccagacugggcaccucaugugacaucuucacaaauaguaggggcaagcgggccagcaaagggucuaagaccugcggauuugucgaugagcgcggucucuauaaguccuuaaaaggcgcuuguaagcugaaacuuugcgggguguugggacugagacuaauggacggcacgugggcagccauucaaacuucagaugaaacaaagugguguccuccagaccagcucgugaaccugcacgacuucaggagcgaugagaucgagcaucuugucguugaggaacuggugaaaaagcgggaagagugcuuggacgcucucgaaaguauaaugaccacuaaaucuguauccuuucgccgacugagccacuuaagaaagcuggugcccgguuucgggaaggccuacacaauuuucaauaaaacccucauggaggcggaugcacauuauaagucggucaggacguggaacgagaucauuccgucuaaaggaugccuucgggugggcggccguugucacccucacguuaaugggguguuuuucaacggaaucauccugggucccgacggccaugucuugauuccagaaaugcaguccucacuacugcagcaacacauggagcuccuggaaaguagcgugauaccucuuaugcauccccuggccgauccauccaccguauuuaaggacgaugacgaggcugaagauuucguugaggugcacuugcccgacguccauaaacaggugucuggggucgaucucggacugccuagcuggggcaaguacguguuaaugucagccgguguucugacagcacuaaugcucaugaucuuucugacuaccugcugucgcagagcugacagggccgagagugcgcagcacucccuuggggaacggggccgaaaggugagcguaacaucucagucaggacgcgucauuaguagcugggaguccuauaaaucuggcggggaaacuaaguuguga

SEQ ID NO: 158794 - RNA, 1575 nt, Artificial Sequence; identical to SEQ ID NO: 158647
  derived and/or modified CDS sequence (opt3) from glycoprotein__RABV__AB733969.1

SEQ ID NO: 158795 - RNA, 1575 nt, Artificial Sequence; identical to SEQ ID NO: 158736
  derived and/or modified CDS sequence (opt3) from glycoprotein__RABV__AB733970.1

SEQ ID NO: 158796 - RNA, 1575 nt, Artificial Sequence
  derived and/or modified CDS sequence (opt3) from glycoprotein__RABV__AB733971.1
augaucccccaggcccuccuguucgugccucuucuggucagcuccuugugcuuuggcaaguucccaauuuacaccauaccggacaaauuagggcccuggucuccuaucgauauucaccaucugucauguccaaacaaucuaguuguggaggacgaaggaugcacaaaccucagugguuuuagcuauauggagcugaagguaggcuacaucuccgcuauuaaagugaauggguucacuuguacgggagucgugaccgaagcagagacauauacuaacuuuguuggcuacgugaccacaaccuucaagagaaaacacuuuaggcccacuccugaugccugccgggcggcuuauaauuggaagauggccggugacccacgcuacgaagagucucuucauaaccccuauccugauuaccacuggcugcgaacagucaagaccacgaaagagucguuggugaucauaucaccaagcguagcagaccucgauccguacgacaagagucugcauucccguguuuuccccucugggaaauguagcggaaucacuguguccucaaccuauugcaguacaaaucacgauuacacuauuuggaugccugaaaacccaagacugggcaccagcugugacaucuuuacaaauucuaggggcaagcgggccuccaaagggucaaagaccugcggauucgucaacgagcgcggucucuauaagagcuuaaaaggcgcuuguaagcugaaacuuugcgggguguugggacugaagcuaauggauggcacgugggcagccauucaaacaaguaaugaaacuaaauggugucccccugaccagcucgugaaccugcacgauuuuagaucugacgagaucgagcaucuugucguugaggaacuggugaagaaaagggaagagugcuuggacgcucucgaauccauaaugaccacuaagagcguaucguuccggcgccugucucacuuacgaaagcuggugccagguuuugggaaagccuacacaauuuucaauaagacccucauggaggcggaugcacauuauaaauccgucagaacguggaacgagaucauucccucaaagggaugccuuagggugggcggccggugucacccgcacguuaaugggguguucuuuaacggaaucauccuggguccugacggccaugucuugauucccgaaaugcagaguagccuacugcagcaacacauggagcuccuggaauccucugugauaccacuuaugcauccucuggccgaucccagcaccguauucaaagacgaugacgaggcugaagauuuuguugaggugcacuugccagacguccauaaacaggugucaggggucgaucucggacugcccaguuggggcaaguacguguuaacauccgccgguguucugacugcacuaaugcucaugaucuuccugaugaccugcugucgucgcgcuaacagagccgagagcgcgcagcacucucuuggggaaaggggccggaaggugucaguaacaagucagagcggacgagucauuuccucuugggagucguauaagagcggcggggaaacuaaauuguga

SEQ ID NO: 158797 - RNA, 1575 nt, Artificial Sequence
  derived and/or modified CDS sequence (opt3) from glycoprotein__RABV__AB733972.1
augaucccccaggcccuccuguucgugccucuucuggucuuuagcuugugcuucggcaaguuuccaauuuacaccauaccggacaaauuagggcccugguccccuaucgauauucaccaucugucuuguccaaacaaucuaguuguggaggacgaaggaugcacaaaccucucagguuucaguuauauggagcugaagguaggcuacaucagcgcuauuaaagugaauggguuuacuuguacgggagucgugaccgaagcagagacauauacuaacuucguuggcuacgugaccacaaccuuuaagagaaaacacuucaggcccacuccugaugccugccgggcggcuuauaauuggaagauggccggugacccacgcuacgaagagucccuucauaaccccuauccugauuaccacuggcugcgaacagucaagaccacgaaagagucuuuggugaucauaucgccaucaguagcagaccucgauccguacgacaagagccugcauagucguguuuuucccuccgggaaauguucuggaaucacugugagcuccaccuauugcucaacaaaucacgauuacacuauuuggaugccugaaaacccaagacugggcaccaguugugacaucuucacaaauagcaggggcaagcgggccucuaaaggguccaagaccugcggauuugucgaugagcgcggucucuauaagucauuaaaaggcgcuuguaagcugaaacuuugcgggguguugggacugagacuaauggacggcacgugggcagccauucaaacuagcgaugaaacaaaguggugucccccugaccagcucgugaaccugcacgacuucaggagugaugagaucgagcaucuugucguugaggaacuggugaaaaagcgggaagagugcuuggacgcucucgaaucuauaaugaccacuaaauccgugagcuuucgccgacugucgcacuuaagaaagcugguaccagguuucgggaaggccuacacaauuuucaauaaaacccucauggaggcggaugcacauuauaagucugucaggacguggaacgagaucauucccuccaaaggaugccuucgggugggcggccguugucacccgcacguuaaugggguguuuuucaacggaaucauccuggguccugacggccaugucuugauucccgaaaugcagucaagucuacugcagcaacacauggagcuccuggaaagcuccgugauaccacuuaugcauccucuggccgaucccucuaccguauuuaagaaugacgaugaggcugaagacuucguugaggugcacuugccagauguccauaaacaggugagcggggucgaccucggacugcccucauggggcaaguacguguuaaugagugccgguguucugacagcacuaaugcucaugaucuuucugaugacuugcugucgcagaaccaacagggcugaguccgcccagcacagccuuggggaacggggccgaaaggugucuguaacaucacagaguggacgcgucauuagcuccugggagucuuauaaaucgggcggggaaacuaaguuguga

SEQ ID NO: 158798 - RNA, 1575 nt, Artificial Sequence; identical to SEQ ID NO: 158793
  derived and/or modified CDS sequence (opt3) from glycoprotein__RABV__AB733973.1

SEQ ID NO: 158799 - RNA, 1575 nt, Artificial Sequence
  derived and/or modified CDS sequence (opt3) from glycoprotein__RABV__AB733974.1
augaucccccaggcccuccuguucgugccucuucuggucuuuagcuugugcuucggcaaguuuccaauuuacaccauaccggacaaauuagggcccugguccccuaucgauauucaccaucugucuuguccaaacaaucuaguuguggaggacgaaggaugcacaaaccucucagguuucaguuauauggagcugaagguaggcuacaucagcgcuauuaaagugaauggguuuacuuguacgggagucgugaccgaagcagagacauauacuaacuucguuggcuacgugaccacaaccuuuaagagaaaacacuucaggcccacuccugaugccugccgggcggcuuauaauuggaagauggccggugacccacgcuacgaagagucccuucauaaccccuauccugauuaccacuggcugcgaacagucaagaccacgaaagagucuuuggugaucauaucgccaucaguagcagaccucgauccguacgacaagagccugcauagucguguuuuucccuccgggaaauguucuggaaucacugugagcuccaccuauugcucaacaaaucacgauuacacuauuuggaugccugaaaacccaagacugggcaccaguugugacaucuucacaaauagcaggggcaagcgggccucuaaaggguccaagaccugcggauuugucgaugagcgcggucucuauaagucauuaaaaggcgcuuguaagcugaaacuuugcgggguguugggacugaagcuaauggacggcacgugggcagccauucaaacuagcaacgaaacaaaauggugucccccugaucagcucgugaaucugcacgacuucagaagugacgagaucgagcaucuugucguugaggaacuggugaagaaaagggaagagugcuuggaugcucucgaaucuauaaugaccacuaaguccgugagcuuucggcgccugucgcacuuacgaaagcuggugccagguuucgggaaagccuacacaauuuucaacaagacccucauggaggcggacgcacauuauaaaucugucagaacguggaaugagaucauucccuccaagggaugccuuagggugggcggccggugucacccgcacguuaacgggguguuuuucaauggaaucauccuggguccugauggccaugucuugauucccgaaaugcagucaagucuacugcagcaacacauggagcuccuggaaagcuccgugauaccacuuaugcauccucuggccgaccccucuaccguauuuaaagaugacgaugaggcugaagacuucguugaggugcacuugccagauguccauaagcagguaagcggggucgaccucggacugcccucauggggcaaguacguguuaaugagugccgguguucugacagcacuaaugcucaugaucuuucugaugacuugcugucgucgcgcuaacagagccgaguccgcgcagcacagccuuggggaaaggggccggaaagugucuguaaccucacagaguggacgagucauuagcuccugggagucuuauaagucgggcggggaaacaaaauuguga

SEQ ID NO: 158800 - RNA, 1575 nt, Artificial Sequence; identical to SEQ ID NO: 158799
  derived and/or modified CDS sequence (opt3) from glycoprotein__RABV__AB733975.1

SEQ ID NO: 158801 - RNA, 1575 nt, Artificial Sequence; identical to SEQ ID NO: 158620
  derived and/or modified CDS sequence (opt3) from glycoprotein__RABV__AB733976.1

SEQ ID NO: 158802 - RNA, 1575 nt, Artificial Sequence; identical to SEQ ID NO: 158681
  derived and/or modified CDS sequence (opt3) from glycoprotein__RABV__AB733977.1

SEQ ID NO: 158803 - RNA, 1575 nt, Artificial Sequence
  derived and/or modified CDS sequence (opt3) from glycoprotein__RABV__AB733979.1
augaucccccaggcccuccuguucgugccucuucuggucuuuagcuugugcuucggcaaguuuccaauuuacaccauaccggacaaauuagggcccugguccccuaucgauauucaccaucugucuuguccaaacaaucuaguuguggaggacgaaggaugcacaaaccucucagguuucaguuauauggagcugaagguaggcuacaucagcgcuauuaaagugaauggguuuacuuguacgggagucgugaccgaagcagagacauauacuaacuucguuggcuacgugaccacaaccuuuaagagaaaacacuucaggcccacuccugaugccugccgggcggcuuauaauuggaagauggccggugacccacgcuacgaagagucccuucauaaccccuauccugauuaccacuggcugcgaacagucaagaccacgaaagagucuuuggugaucauaucgccaucaguagcagaccucgauccguacgacaagagccugcauagucguguuuuucccuccgggaaauguucuggaaucacugugagcuccaccuauugcucaacaaaucacgauuacacuauuuggaugccugaaaacccaagacugggcaccaguugugacaucuucacaaauagcaggggcaagcgggccucuaaaggguccaagaccugcggauuugucgaugagcgcggucucuauaagucauuaaaaggcgcuuguaagcugaaacuuugcgggguguugggacugagacuaauggacggcacgugggcagccauucaaacuagcgaugaaacaaaguggugucccccugaccagcucgugaaccugcacgacuucaggagugaugagaucgagcaucuugucguugaggaacuggugaaaaagcgggaagagugcuuggacgcucucgaaucuauaaugaccacuaaauccgugagcuuucgccgacugucgcacuuaagaaagcugguaccagguuucgggaaggccuacacaauuuucaauaaaacccucauggaggcggaugcacauuauaagucugucaggacguggaacgagaucauucccuccaaaggaugccuucgggugggcggccguugucacccgcacguuaaugggguguuuuucaacggaaucauccuggguccugacggccaugucuugauucccgaaaugcagucaagucuacugcagcaacacauggagcuccuggaaagcuccgugauaccacuuaugcauccucuggccgaucccucuaccguauuuaaggacgaugacgaggcugaagauuucguugaggugcacuugccagacguccauaaacaggugagcggggucgaucucggacugcccucauggggcaaguacguguuaaugagugccgguguucugacagcacuaaugcucaugauccugcuuaugacuugcugucgcagagcuaauaggguggaguccgcccagcacagcuugggggaacggggccgaaagguaucugucaccucacagaguggacgcgugauuagcuccugggagucuuauaaaucgggcggggaaacaaagcuguga

SEQ ID NO: 158804 - RNA, 1575 nt, Artificial Sequence
  derived and/or modified CDS sequence (opt3) from glycoprotein__RABV__AB781935.1
auggugccccaggcccuucucuucgucccucuucugguuuuuccauugugcuucggcaaguuuccgaucuacaccauucccgacaaauuagggccuuggagcccaauagauauccaccaucuguccugucccaacaaucuagugguagaggacgaaggaugcacaaaccucucugguuucucauauauggagcugaaggugggcuacauucuugcuaucaaaaugaauggguuuacuuguacgggagucgugaccgaagcagagacauauacuaacuucguuggcuacgugaccacaaccuuuaagagaaaacacuucaggccuacuccagaugccugccgggcggcuuauaauuggaagauggccggugacccccgcuacgaagagagucugcaaaacccuuauccagauuaccgaugguugcguacagucaagaccacgaaagagagccucgugauuaucuccccgucuguagcagaccuggaucccuacgacagaucgcugcauucaaggguuuuuccuagcgggaaguguaguggaguggccgucuccucuacuuauugcagcaccaaucacgauuacacaauauggaugccagaaaacccccggcucggcauguccugugacaucuucacuaauucacgcggcaaaagagcuaguaaggggagcgagaccugcggauuuguggaugaaagggguuuauauaaaucucugaagggcgcauguaagcugaaauugugcggggugcugggacuacggcucauggacggcacaugggucgccaugcagaccuccaacgagacgaagugguguccuccagaucagcugguuaaucuucaugacuuccacucagacgagauugaacaccuggugguagaggaauuggugcgcaaacgagaggaaugccucgaugcucuggagagcaucaugacuacaaagagugucucuuuuagaagguuaucccaucugcggaaacucgugcccgguuucgggaaggccuacaccauuuucaacaaaacucuuauggaggcggacgcacacuauaagagcguucguacauggaaugaaaucauaccgucgaagggaugccugcgcgugggcggcagaugucauccucacgucaacgggguguuuuucaauggaauuaucuugggucccgauggcaacguacuaauuccagagaugcagucuucccugcuccaacagcacauggaacugcuugagucaaguguuaucccucuggugcaucccuuggccgacccaagcaccaucuuuaaagauggggacgaagcugaggauuucgucgaggugcaccuccccgacguccauaaccagguguccggaguugaucugggcuuaccuaauugggguaaguacgugcugcuaucugccggggcacucacggcucugaugcuuauuauauuuuugaugaccugcuguaggcggguaaaccgaagcgaaccaacacagcacaaucugcgcggcacuggaagagaggucucagugaccccgcaaaguggcaaaaucauuuccagcugggaaucucauaagucagggggagagacaaggcucuga

SEQ ID NO: 158805 - RNA, 1575 nt, Artificial Sequence
  derived and/or modified CDS sequence (opt3) from glycoprotein__RABV__AB817099.1
auggugccccaggcccuucucuucgucccucuucugguuuuuagcuugugcuucggcaaguuuccaaucuacaccauuccggacaaauuagggcccugguccccuauagauauccaccaucugucuuguccaaacaaucuagugguagaggacgaaggaugcacaaaccucucagguuucaguuauauggagcugaaggugggcuacauuagcgcuaucaaagucaauggguuuacuuguacgggagugguuaccgaagcagagacauauacuaacuucgugggcuacgucaccacaaccuuuagaaggaagcacuuccggcccacuccugaugccugccgcgcggcuuauaauuggaaaauggccggugacccacgauacgaagagucccuucauaaccccuauccugauuaccacuggcugcguacagugaagaccacgaaggagucuuugguaauuaucucgccaucaguugcagaccucgauccguacgacaaaagccugcauaguagaguguuucccgggggaaaguguuccggcauaacugucucuagcaccuauugcuccacaaaucacgauuacacuaucuggaugccugaaaacccaaggcugggcaccucaugugacauuuucgugaauagucgggggaaacgcgccagcaagggagguaaaacaugcggcuuuguggaugagagagggcucuauaagucuuuaaagggagcuuguaaacugaagcugugcggcguccccgguuugaggcugauggacgggaccuggguugcaauccaaacguccgaugaaacuaaaugguguccuccagaccagcuagugaaccuccacgacuuccggucagaugagauugagcaucugguaguggaggaacuugucaagaaacgcgaagagugccuggacgccuuggaaagcaucaugacaaccaagagugugucuuuucgaagacucucccaccugaggaaauuaguucccggauucggcaaggcuuacacuauauucaauaagacacugauggaggccgaugcgcauuauaaaagcgugcggaccuggaacgagauuaucccgucgaagggcugccuccgugucgggggacgcugucacccucacgugaaugguguauuuuucaacggcauuauccuugggcccgacggacauguucugaucccagaaaugcagucuuccuugcuacagcaacacauggagcugcucgaaucaagugugauuccucugaugcauccccuugcagauccaagcacggucuuuaaagacggcgaugaggccgaagacuucguggagguccaucugcccgaugugcacaaguugauauccgguguugaccucgggcugccuucuuggggcaaauacguguuaaugagcgcuggaauccugaccacacuaaugcucaugauuuuucugaugacuugcuguagaaggguaaaucaggccggcucaaagcagcacgggcuugagggagcaggucggaaggucagugugaccucccagaacggccgaguuaucagcucuugggaaucauauaaaagugggggagagacacgcuuguga

SEQ ID NO: 158806 - RNA, 1575 nt, Artificial Sequence
  derived and/or modified CDS sequence (opt3) from glycoprotein__RABV__AB817100.1
auggugccccaggcccuucucuucgucccucuucugguuuuuagcuugugcuucggcaaguuuccaaucuacaccauuccggacaaauuagggcccugguccccuauagauauccaccaucugucuuguccaaacaaucuagugguagaggacgaaggaugcacaaaccucucagguuucaguuauauggagcugaaggugggcuacauuagcgcuaucaaagucaauggguuuacuuguacgggagugguuaccgaagcagagacauauacuaacuucgugggcuacgucaccacaaccuuuagaaggaagcacuuccggcccacuccugaugccugccgcgcggcuuauaauuggaaaauggccggugacccacgauacgaagagucccuucauaaccccuauccugauuaccacuggcugcguacagugaagaccacgaaggagucuuugguaauuaucucgccaucaguugcagaccucgauccguacgacaaaagccugcauaguagaguguuucccgggggaaaguguuccggcauaacugucucuagcaccuauugcuccacaaaucacgauuacacuaucuggaugccugaaaacccaaggcugggcaccucaugugacauuuucgugaauagucgggggaaacgcgccagcaagggagguaaaacaugcggcuuuguggaugagagagggcucuauaagucuuuaaagggagcuuguaaacugaagcugugcggcguccccgguuugaggcugauggacgggaccuggguugcaauccaaacguccgaugaaacuaaaugguguccuccagaccagcuagugaaccuccacgacuuccggucagaugagauugagcaucugguaguggaggaacuugucaagaaacgcgaagagugccuggacgccuuggaaagcaucaugacaaccaagagugugucuuuucgaagacucucccaccugaggaaauuaguucccggauucggcaaggcuuacacuauauucaauaagacacugauggaggccgaugcgcauuauaaaagcgugcggaccuggaacgagauuaucccgucgaagggcugccuccgugucgggggacgcugucacccucacgugaaugguguauuuuucaacggcauuauccuugggcccgacggacauguucugaucccagaaaugcagucuuccuugcuacagcaacacauggagcugcucgaaucaagugugauuccucugaugcauccccuugcagauccaagcacggucuuuaaagacggcgaugaggccgaagacuucguggagguccaucugcccgaugugcacaaguugauauccgguguugaccucgggcugccuucuuggggcaaauacguguuaaugagcgcuggaauccugauuacccuaaugcucaugaucuuucugaugacaugcuguagaaggguaaaucaggccggcucaaagcagcacgggcuugagggagcaggucggaaggucagugugacuucccagaacggccgaguuauaagcucuugggaaucauauaaaagugggggagagacccgcuuguga

SEQ ID NO: 158807 - RNA, 1575 nt, Artificial Sequence
  derived and/or modified CDS sequence (opt3) from glycoprotein__RABV__AB817101.1
auggugccccaggcccuucucuucgucccucuucugguuuuuagcuugugcuucggcaaguuuccaaucuacaccauuccggacaaauuagggcccugguccccuauagauauccaccaucugucuuguccaaacaaucuagugguagaggacgaaggaugcacaaaccucucagguuucaguuauauggagcugaaggugggcuacauuagcgcuaucaaagucaauggguuuacuuguacgggagugguuaccgaagcagagacauauacuaacuucgugggcuacgucaccacaaccuuuagaaggaagcacuuccggcccacuccugaugccugccgcgcggcuuauaauuggaaaauggccggugacccacgauacgaagagucccuucauaaccccuauccugauuaccacuggcugcguacagugaagaccacgaaggagucuuugguaauuaucucgccaucaguugcagaccucgauccguacgacaaaagccugcauaguagaguguuucccgggggaaaguguuccggcauaacugucucuagcaccuauugcuccacaaaucacgauuacacuaucuggaugccugaaaacccaaggcugggcaccucaugugacauuuucgugaauagucgggggaaacgcgccagcaagggagguaaaacaugcggcuuuguggaugagagagggcucuauaagucuuuaaagggagcuuguaaacugaagcugugcggcguccccgguuugaggcugauggacgggaccuggguugcaauccaaacguccgaugaaacuaaaugguguccuccagaccagcuagugaaccuccacgacuuccggucagaugagauugagcaucugguaguggaggaacuugucaagaaacgcgaagagugccuggacgccuuggaaagcaucaugacaaccaagagugugucuuuucgaagacucucccaccugaggaaauuaguucccggauucggcaaggcuuacacuauauucaauaagacacugauggaggccgaugcgcauuauaaaagcgugcggaccuggaacgagauuaucccgucgaagggcugccuccgugucgggggacgcugucacccucacgugaaugguguauuuuucaacggcauuauccuugggcccgacggacauguucugaucccagaaaugcagucuuccuugcuacagcaacacauggagcugcucgaaucaagugugauuccucugaugcauccccuugcagauccaagcacggucuuuaaagacggcgaugaggccgaagacuucguggagguccaucugcccgaugugcacaaguugauauccgguguugaccucgggcugccuucuuggggcaaauacguguuaaugagcgcuggaauccugaccacacuaaugcucaugauuuuucugaugacuugcuguagaaggguaaaucaggccggcucaaagcagcacgggcuugagggaccaggucggaaggucagugugaccucccagaacggccgaguuaucagcucuugggaaucauauaaaagugggggagagacacgcuuguga

SEQ ID NO: 158808 - RNA, 1575 nt, Artificial Sequence
  derived and/or modified CDS sequence (opt3) from glycoprotein__RABV__AB817102.1
auggugccccagacccugcuguucgucccucuucugguuuuuagcuugugcuucggcaaguuuccaaucuacacaauuccggacaaauuagggcccugguccccuauagauauccaccaucugucuuguccaaacaaucuagugguagaggacgaaggaugcacuaaccucucagguuucaguuauauggagcugaaggugggcuacauuagcgccaucaaagucaauggguuuacguguaccggagugguuacagaagcugagacuuauaccaacuucgugggcuacgucacaaccacuuuuagaaggaagcacuuccggcccacaccugaugcaugccgcgccgcguauaauuggaaaauggcuggugacccacgauacgaagagucccuucauaaccccuauccugauuaccacuggcugcguaccgugaagacgacuaaggagucuuugguaauuaucucgccaucaguugccgaccucgauccguacgacaaaagccugcauaguagaguguuucccgggggaaaguguuccggcauaaccgucucuagcacauauugcuccacuaaucacgauuacaccaucuggaugccugaaaacccaaggcugggcacaucaugugacauuuucgugaauagucgggggaaacgcgcaagcagaggagguaagaccugcggcuuuguggaugagagggggcucuauaaaucuuuaaagggagccuguaagcugaaacuuugcggcguccccgguuugcggcugauggacgggacguggguugcuauccaaacuuccgaugaaacaaagugguguccuccagaccagcuagugaaccuccacgacuuccgcucagaugagauugagcaucugguaguggaggaacuugucaaaaagcgagaagagugccuggacgcauuggaaagcaucaugaccacuaaaagugugucuuuuagaaggcucucccaccuccggaaguuaguucccggauucggcaaagccuacacaauauucaauaagacccugauggaggcugaugcccauuauaagagcgugcguacguggaacgagauuaucccgucgaaaggcugccuccgcgucgggggaagaugucacccucacgugaaugguguauuuuucaacggcauuauccuugggcccgacggacauguucugaucccagaaaugcagucuuccuugcuacagcaacacauggagcugcucgaaucaagugugauuccucugaugcauccccuugcggauccaagcaccgucuuuaaggacggcgaugaggcagaagacuucguggagguccaucugcccgaugugcacaaauugauauccgguguugaccucgggcugccuucuuggggcaaguacguguuaaugagcguaggaauccugacaacucuaaugcucaugauuuuucugaugaccugcuguaggcgggucaaucaggugggcccaaaacagcacgggcuugagggagccggucgaaagguuucagugacaagucagaacggccgcgucaucuccagcugggaaucuuauaagucagggggagagacuagauuguga

SEQ ID NO: 158809 - RNA, 1575 nt, Artificial Sequence
  derived and/or modified CDS sequence (opt3) from glycoprotein__RABV__AB817103.1
auggugccccaggcccuucucuucgucccucuucugguuuuuagcuugugcuucggcaaguuuccaaucuacaccauuccggacaaauuagggcccugguccccuauagauauccaccaucugucuuguccaaacaaucuagugguagaggacgaaggaugcacaaaccucucagguuucaguuauauggagcugaaggugggcuacauuagcgcuaucaaagucaauggguuuacuuguacgggagugguuaccgaagcagagacauauacuaacuucgugggcuacgucaccacaaccuuuagaaggaagcacuuccggcccacuccugaugccugccgcgcggcuuauaauuggaaaauggccggugacccacgauacgaagagucccuucauaaccccuauccugauuaccacuggcugcguacagugaagaccacgaaggagucuuugguaauuaucucgccaucaguugcagaccucgauccguacgacaaaagccugcauaguagaguguuucccgggggaaaguguuccggcauaacugucucuagcaccuauugcuccacaaaucacgauuacacuaucuggaugccugaaaacccaaggcugggcaccucaugugacauuuucgugaauagucgggggaaacgcgccagcaagggagguaaaacaugcggcuuuguggaugagagagggcucuauaagucuuuaaagggagcuuguaaacugaagcugugcggcguccccgguuugaggcugauggacgggaccuggguugcaauccaaacguccgaugaaacuaaaugguguccuccagaccagcuagugaaccuccacgacuuccggucagaugagauugagcaucugguaguggaggaacuugucaagaaacgcgaagagugccuggacgccuuggaaagcaucaugacaaccaagagugugucuuuucgaagacucucccaccugaggaaauuaguucccggauucggcaaggcuuacacuauauucaauaagacacugauggaggccgaugcgcauuauaaaagcgugcggaccuggaacgagauuaucccgucgaagggcugccuccgugucgggggacgcugucacccucacgugaaugguguauuuuucaacggcauuauccuugggcccgacggacauguucugaucccagaaaugcagucuuccuugcuacagcaacacauggagcugcucgaaucaagugugauuccucugaugcauccccuugcagauccaagcacggucuuuaaagacggcgaugaggccgaagacuucguggagguccaucugcccgaugugcacaaguugauauccgguguugaccucgggcugccuucuuggggcaaauacguguuaaugagcgcuggaauccugaccacacuaaugcucaugauuuuucugaugacuugcuguagaaggguaaaucaggccggcucaaagcagcacgggcuugagggagcaggucggaaggucagugugaccucccagaacggccgaaucauaagcucuugggaaucauauaaaagugggggagagacacgcuuguga

SEQ ID NO: 158810 - RNA, 1575 nt, Artificial Sequence; identical to SEQ ID NO: 158806
  derived and/or modified CDS sequence (opt3) from glycoprotein__RABV__AB817104.1

SEQ ID NO: 158811 - RNA, 1575 nt, Artificial Sequence
  derived and/or modified CDS sequence (opt3) from glycoprotein__RABV__AB817105.1
auggugccccaggcccuucucuucgucccucuucugguuuuuagcuugugcuucggcaaguuuccaaucuacaccauuccggacaaauuagggcccugguccccuauagauauccaccaucugucuuguccaaacaaucuagugguagaggacgaaggaugcacaaaccucucagguuucaguuauauggagcugaaggugggcuacauuagcgcuaucaaagucaauggguuuacuuguacgggagugguuaccgaagcagagacauauacuaacuucgugggcuacgucaccacaaccuuuagaaggaagcacuuccggcccacuccugaugccugccgcgcggcuuauaauuggaaaauggccggugacccacgauacgaagagucccuucauaaccccuauccugauuaccacuggcugcguacagugaagaccacgaaggagucuuugguaauuaucucgccaucaguugcagaccucgauccguacgacaaaagccugcauaguagaguguuucccgggggaaaguguuccggcauaacugucucuagcaccuauugcuccacaaaucacgauuacacuaucuggaugccugaaaacccaaggcugggcaccucaugugacauuuucgugaauagucgggggaaacgcgccagcaagggagguaaaacaugcggcuuuguggaugagagagggcucuauaagucuuuaaagggagcuuguaaacugaagcugugcggcguccccgguuugaggcugauggacgggaccuggguugcaauccaaacguccgaugaaacuaaaugguguccuccagaccagcuagugaaccuccacgacuuccggucagaugagauugagcaucugguaguggaggaacuugucaagaaacgcgaagagugccuggacgccuuggaaagcaucaugacaaccaagagugugucuuuucgaagacucucccaccugaggaaauuaguucccggauucggcaaggcuuacacuauauucaauaagacacugauggaggccgaugcgcauuauaaaagcgugcggaccuggaacgagauuaucccgucgaagggcugccuccgugucgggggacgcugucacccucacgugaaugguguauuuuucaacggcauuauccuugggcccgacggacauguucugaucccagaaaugcagucuuccuugcuacagcaacacauggagcugcucgaaucaagugugauuccucugaugcauccccuugcagauccaagcacggucuuuaaagacggcgaugaggccgaagacuucguggagguccaucugcccgaugugcacaaguugauauccgguguugaccucgggcugccuucuuggggcaaauacguguuaaugagcgcuggaauccugaccacacuaaugcucaugauuuuucugaugacuugcuguagaaggguaaaucaggccggcucaaagcagcacgggcuugagggagcaggucggaaggucagugugaccucccagacaggccgaaucauaagcucuugggaaucauauaaaagugggggagagacucgcuuguga

SEQ ID NO: 158812 - RNA, 1575 nt, Artificial Sequence; identical to SEQ ID NO: 158805
  derived and/or modified CDS sequence (opt3) from glycoprotein__RABV__AB817106.1

SEQ ID NO: 158813 - RNA, 1575 nt, Artificial Sequence; identical to SEQ ID NO: 158806
  derived and/or modified CDS sequence (opt3) from glycoprotein__RABV__AB817107.1

SEQ ID NO: 158814 - RNA, 1575 nt, Artificial Sequence; identical to SEQ ID NO: 158806
  derived and/or modified CDS sequence (opt3) from glycoprotein__RABV__AB817108.1

SEQ ID NO: 158815 - RNA, 1575 nt, Artificial Sequence; identical to SEQ ID NO: 158806
  derived and/or modified CDS sequence (opt3) from glycoprotein__RABV__AB817109.1

SEQ ID NO: 158816 - RNA, 1575 nt, Artificial Sequence
  derived and/or modified CDS sequence (opt3) from glycoprotein__RABV__AB817110.1
auggugccccaggcccuucucuucgucccucuucugguuuuuagcuugugcuucggcaaguuuccaaucuacaccauuccggacaaauuagggcccugguccccuauagauauccaccaucugucuuguccaaacaaucuagugguagaggacgaaggaugcacaaaccucucagguuucaguuauauggagcugaaggugggcuacauuagcgcuaucaaagucaauggguuuacuuguacgggagugguuaccgaagcagagacauauacuaacuucgugggcuacgucaccacaaccuuuagaaggaagcacuuccggcccacuccugaugccugccgcgcggcuuauaauuggaaaauggccggugacccacgauacgaagagucccuucauaaccccuauccugauuaccacuggcugcguacagugaagaccacgaaggagucuuugguaauuaucucgccaucaguugcagaccucgauccguacgacaaaagccugcauaguagaguguuucccgggggaaaguguuccggcauaacugucucuagcaccuauugcuccacaaaucacgauuacacuaucuggaugccugaaaacccaaggcugggcaccucaugugacauuuucgugaauagucgggggaaacgcgccagcaagggagguaaaacaugcggcuuuguggaugagagagggcucuauaagucuuuaaagggagcuuguaaacugaagcugugcggcguccccgguuugaggcugauggacgggaccuggguugcaauccaaacguccgaugaaacuaaaugguguccuccagaccagcuagugaaccuccacgacuuccggucagaugagauugagcaucugguaguggaggaacuugucaagaaacgcgaagagugccuggacgccuuggaaagcaucaugacaaccaagagugugucuuuucgaagacucucccaccugaggaaauuaguucccggauucggcaaggcuuacacuauauucaauaagacacugauggaggccgaugcgcauuauaaaagcgugcggaccuggaacgagauuaucccgucgaagggcugccuccgugucgggggacgcugucacccucacgugaaugguguauuuuucaacggcauuauccuugggcccgacggacauguucugaucccagaaaugcagucuuccuugcuacagcaacacauggagcugcucgaaucaagugugauuccucugaugcauccccuugcagauccaagcacggucuuuaaagacggcgaugaggccgaagacuucguggagguccaucugcccgaugugcacaaguugauauccgguguugaccucgggcugccuucuuggggcaaauacguguuaaucagcgcuggcauucugaucacccuaaugcucaugauauuucugaugacaugcuguagaaggguaaaucaggccggaucaaagcagcacgggcuugagggagcaggucggaaggucagugugacuucccagaacggccgaguuauuagcucuugggaaucauauaaaaacgggggagagacccgcuuguga

SEQ ID NO: 158817 - RNA, 1575 nt, Artificial Sequence
  derived and/or modified CDS sequence (opt3) from glycoprotein__RABV__AB817111.1
auggugccccaggcccuucucuucgucccucuucugguuuuuagcuugugcuucggcaaguuuccaaucuacaccauuccggacaaauuagggcccugguccccuauagauauccaccaucugucuuguccaaacaaucuagugguagaggacgaaggaugcacaaaccucucagguuucaguuauauggagcugaaggugggcuacauuagcgcuaucaaagucaauggguuuacuuguacgggagugguuaccgaagcagagacauauacuaacuucgugggcuacgucaccacaaccuuuagaaggaagcacuuccggcccacuccugaugccugccgcgcggcuuauaauuggaaaauggccggugacccacgauacgaagagucccuucauaaccccuauccugauuaccacuggcugcguacagugaagaccacgaaggagucuuugguaauuaucucgccaucaguugcagaccucgauccguacgacaaaagccugcauaguagaguguuucccgggggaaaguguuccggcauaacugucucuagcaccuauugcuccacaaaucacgauuacacuaucuggaugccugaaaacccaaggcugggcaccucaugugacauuuucgugaauagucgggggaaacgcgccagcaagggagguaaaacaugcggcuuuguggaugagagagggcucuauaagucuuuaaagggagcuuguaaacugaagcugugcggcguccccgguuugaggcugauggacgggaccuggguugcaauccaaacguccgaugaaacuaaaugguguccuccagaccagcuagugaaccuccacgacuuccggucagaugagauugagcaucugguaguggaggaacuugucaagaaacgcgaagagugccuggacgccuuggaaagcaucaugacaaccaagagugugucuuuucgaagacucucccaccugaggaaauuaguucccggauucggcaaggcuuacacuauauucaauaagacacugauggaggccgaugcgcauuauaaaagcgugcggaccuggaacgagauuaucccgucgaagggcugccuccgugucgggggacgcugucacccucacgugaaugguguauuuuucaacggcauuauccuugggcccgacggacauguucugaucccagaaaugcagucuuccuugcuacagcaacacauggagcugcucgaaucaagugugauuccucugaugcauccccuugcagauccaagcacggucuuuaaagacggcgaugaggccgaagacuucguggagguccaucugcccgaugugcacaaguugauauccgguguugaccucgggcugccuucuuggggcaaauacguguuaaugagcgcuggaauccugauuacccuaaugcucaugaucuuucugaugacaugcuguagaaggguaaaucaggccggcucacggcagcacgagcuugaaggggcaggacgaaaggucagugugacuucccagaacggucgcguuauaagcucuugggagucauauaagaguggcggggaaaccagauuguga

SEQ ID NO: 158818 - RNA, 1575 nt, Artificial Sequence; identical to SEQ ID NO: 158816
  derived and/or modified CDS sequence (opt3) from glycoprotein__RABV__AB817112.1

SEQ ID NO: 158819 - RNA, 1575 nt, Artificial Sequence
  derived and/or modified CDS sequence (opt3) from glycoprotein__RABV__AB817113.1
auggugccccaggcccuccuguucgucccucuucugguuuuuagcuugugcuucggcaaguuuccaaucuacaccauuccggacaaauuagggcccugguccccuauagaugugcaccaucugucuuguccaaacaaucuaguaguggaggacgaaggaugcacaaaccucucagguuucaguuauauggagcugaaggucggcuacaucagcgcuauuaaagugaauggguuuacuuguacgggaguugugaccgaagcagagacauauacuaaccuugucggcuacgugaccacaaccuucagaaggaagcacuuucggcccacuccugaugccugccgcgcguccuauaauuggaaaauggcuggugacccacgauacgaagagucucugcauaaccccuauccugauuaccacugguugcguacaguaaagaccacgaaggagucgcucguuaucauuucaccaagcguggccgaccuggauccguacgacaaaagucugcauuccagagucuuccccgggggaaaguguucuggcaucacugugagcuccaccuauugcucaacaaaucacgauuacacuauauggaugccugaaaacccaaggcucggcaccaguugugacaucuuugugaauagccgggggaaacgcgcaucuaagggagguaaaacaugcggcuucgucgaugagagaggguuauauaagucccugaagggagccuguaaacuuaaguugugcggcguucccggucugaggcuaauggacgggaccuggguggcuauucaaacgucagaugaaacuaaaugguguccuccagaccagcucguaaaccugcacgacuuucggagcgaugagaucgagcaucuuguggucgaggaacuggugaagaaacgcgaagagugcuuggacgcacucgaaaguauuaugacaaccaagucuguuuccuuccgaagacugagccacuuaaggaaacuggugcccggauuuggcaaggccuacacuaucuucaauaagacacucauggaggcugaugcccauuauaaaucgguccggaccuggaacgagauaauuccgucuaagggcugccuucguguagggggacgcugucacccucacgugaaugguguuuucuuuaacggcaucauucuggggcccgacggacauguguugaucccagaaaugcaguccucacuacugcagcaacacauggagcuccuggaaaguagcgucaucccucuuaugcauccccuggcggauccauccacgguguucaaagacggcgaugaggcagaagacuuugucgaggugcacuugcccgauguucauaagcucauuucugguguggaccugggguuaccuagcuggggcaaauacguacugaugucagccggaauacuaaccacacucaugcugaugaucuuccuuaugacuugcuguagaagggucaaucaggcuggcaguaagcagcacggguuggagggagccggucggaagguguccguuaccagccagaacggccgagugauuucuucaugggaaaguuauaaaagcgggggagagacacgccuguga

SEQ ID NO: 158820 - RNA, 1575 nt, Artificial Sequence
  derived and/or modified CDS sequence (opt3) from glycoprotein__RABV__AB817114.1
auggugccccaggcccuucucuucgucccucuucugguuuuuagcuugugcuucggcaaguuuccaaucuacaccauuccggacaaauuagggcccugguccccuauagauauccaccaucugucuuguccaaacaaucuagugguagaggacgaaggaugcacaaaccucucagguuucaguuauauggagcugaaggugggcuacauuagcgcuaucaaagucaauggguuuacuuguacgggagugguuaccgaagcagagacauauacuaacuucgugggcuacgucaccacaaccuuuagaaggaagcacuuccggcccacuccugaugccugccgcgcggcuuauaauuggaaaauggccggugacccacgauacgaagagucccuucauaaccccuauccugauuaccacuggcugcguacagugaagaccacgaaggagucuuugguaauuaucucgccaucaguugcagaccucgauccguacgacaaaagccugcauaguagaguguuucccgggggaaaguguuccggcauaacugucucuagcaccuauugcuccacaaaucacgauuacacuaucuggaugccugaaaacccaaggcugggcaccucaugugacauuuucgugaauagucgggggaaacgcgccagcaagggagguaaaacaugcggcuuuguggaugagagagggcucuauaagucuuuaaagggagcuuguaaacugaagcugugcggcguccccgguuugaggcugauggacgggaccuggguugcaauccaaacguccgaugaaacuaaaugguguccuccagaccagcuagugaaccuccacgacuuccggucagaugagauugagcaucugguaguggaggaacuugucaagaaacgcgaagagugccuggacgccuuggaaagcaucaugacaaccaagagugugucuuuucgaagacucucccaccugaggaaauuaguucccggauucggcaaggcuuacacuauauucaauaagacacugauggaggccgaugcgcauuauaaaagcgugcggaccuggaacgagauuaucccgucgaagggcugccuccgugucgggggacgcugucacccucacgugaaugguguauuuuucaacggcauuauccuugggcccgacggacauguucugaucccagaaaugcagucuuccuugcuacagcaacacauggagcugcucgaaucaagugugauuccucugaugcauccccuugcagauccaagcacggucuuuaaagacggcgaugaggccgaagacuucguggagguccaucugcccgaugugcacaaguugauauccgguguugaccucgggcugccuucuuggggcaaauacguguuaaugagcgcuggaauccugaccacacuaaugcucaugauuuuucugaugacuugcuguagaaggguaaaucaggccggcucaaagcagcacgggcuugagcgggcaggacgaaaggucagugugaccucccagaacggucgcguuaucagcucuugggaaucauauaaaaguggcggggagacaagauuguga

SEQ ID NO: 158821 - RNA, 1575 nt, Artificial Sequence
  derived and/or modified CDS sequence (opt3) from glycoprotein__RABV__AB817115.1
auggugccccaggcccuucucuucgucccucuucugguuuuuagcuugugcuucggcaaguuuccaaucuacaccauuccggacaaauuagggcccugguccccuauagauauccaccaucugucuuguccaaacaaucuagugguagaggacgaaggaugcacaaaccucucagguuucaguuauauggagcugaaggugggcuacauuagcgcuaucaaagucaauggguuuacuuguacgggagugguuaccgaagcagagacauauacuaacuucgugggcuacgucaccacaaccuuuagaaggaagcacuuccggcccacuccugaugccugccgcgcggcuuauaauuggaaaauggccggugacccacgauacgaagagucccuucauaaccccuauccugauuaccacuggcugcguacagugaagaccacgaaggagucuuugguaauuaucucgccaucaguugcagaccucgauccguacgacaaaagccugcauaguagaguguuucccgggggaaaguguuccggcauaacugucucuagcaccuauugcuccacaaaucacgauuacacuaucuggaugccugaaaacccaaggcugggcaccucaugugacauuuucgugaauagucgggggaaacgcgccagcaagggagguaaaacaugcggcuuuguggaugagagagggcucuauaagucuuuaaagggagcuuguaaacugaagcugugcggcguccccgguuugaggcugauggacgggaccuggguugcaauccaaacguccgaugaaacuaaaugguguccuccagaccagcuagugaaccuccacgacuuccggucagaugagauugagcaucugguaguggaggaacuugucaagaaacgcgaagagugccuggacgccuuggaaagcaucaugacaaccaagagugugucuuuucgaagacucucccaccugaggaaauuaguucccggauucggcaaggcuuacacuauauucaauaagacacugauggaggccgaugcgcauuauaaaagcgugcggaccuggaacgagauuaucccgucgaagggcugccuccgugucgggggacgcugucacccucacgugaaugguguauuuuucaacggcauuauccuugggcccgacggacauguucugaucccagaaaugcagucuuccuugcuacagcaacacauggagcugcucgaaucaagugugauuccucugaugcauccccuugcagauccaagcacggucuuuaaagacggcgaugaggccgaagacuucguggagguccaucugcccgaugugcacaaguugauauccgguguugaccucgggcugccuggcuggggaaaauacguguuaaugucugcuggcauccugaccacacuaaugcucaugauuuuucugaugacuugcuguagaaggguaaaucaggccgggagcaagcagcacggacuugagggugcaggccggaaggucucagugaccagucagaacgggcgaguuaucuccagcugggaaucuuauaaaucaggaggcgagacacgcuuguga

SEQ ID NO: 158822 - RNA, 1575 nt, Artificial Sequence; identical to SEQ ID NO: 158806
  derived and/or modified CDS sequence (opt3) from glycoprotein__RABV__AB817116.1

SEQ ID NO: 158823 - RNA, 1575 nt, Artificial Sequence; identical to SEQ ID NO: 158811
  derived and/or modified CDS sequence (opt3) from glycoprotein__RABV__AB817117.1

SEQ ID NO: 158824 - RNA, 1575 nt, Artificial Sequence; identical to SEQ ID NO: 158806
  derived and/or modified CDS sequence (opt3) from glycoprotein__RABV__AB817118.1

SEQ ID NO: 158825 - RNA, 1575 nt, Artificial Sequence; identical to SEQ ID NO: 158805
  derived and/or modified CDS sequence (opt3) from glycoprotein__RABV__AB817119.1

SEQ ID NO: 158826 - RNA, 1575 nt, Artificial Sequence; identical to SEQ ID NO: 158806
  derived and/or modified CDS sequence (opt3) from glycoprotein__RABV__AB817120.1

SEQ ID NO: 158827 - RNA, 1575 nt, Artificial Sequence; identical to SEQ ID NO: 158806
  derived and/or modified CDS sequence (opt3) from glycoprotein__RABV__AB817121.1

SEQ ID NO: 158828 - RNA, 1575 nt, Artificial Sequence; identical to SEQ ID NO: 158809
  derived and/or modified CDS sequence (opt3) from glycoprotein__RABV__AB817122.1

SEQ ID NO: 158829 - RNA, 1575 nt, Artificial Sequence
  derived and/or modified CDS sequence (opt3) from glycoprotein__RABV__AB817123.1
auggugccccaggcccuucucuucgucccucuucugguuuuuagcuugugcuucggcaaguuuccaaucuacaccauuccggacaaauuagggcccugguccccuauagauauccaccaucugucuuguccaaacaaucuagugguagaggacgaaggaugcacaaaccucucagguuucaguuauauggagcugaaggugggcuacauuagcgcuaucaaagucaauggguuuacuuguacgggagugguuaccgaagcagagacauauacuaacuucgugggcuacgucaccacaaccuuuagaaggaagcacuuccggcccacuccugaugccugccgcgcggcuuauaauuggaaaauggccggugacccacgauacgaagagucccuucauaaccccuauccugauuaccacuggcugcguacagugaagaccacgaaggagucuuugguaauuaucucgccaucaguugcagaccucgauccguacgacaaaagccugcauaguagaguguuucccgggggaaaguguuccggcauaacugucucuagcaccuauugcuccacaaaucacgauuacacuaucuggaugccugaaaacccaaggcugggcaccucaugugacauuuucgugaauagucgggggaaacgcgccagcaagggagguaaaacaugcggcuuuguggaugagagagggcucuauaagucuuuaaagggagcuuguaaacugaagcugugcggcguccccgguuugaggcugauggacgggaccuggguugcaauccaaacguccgaugaaacuaaaugguguccuccagaccagcuagugaaccuccacgacuuccggucagaugagauugagcaucugguaguggaggaacuugucaagaaacgcgaagagugccuggacgccuuggaaagcaucaugacaaccaagagugugucuuuucgaagacucucccaccugaggaaauuaguucccggauucggcaaggcuuacacuauauucaauaagacacugauggaggccgaugcgcauuauaaaagcgugcggaccuggaacgagauuaucccgucgaagggcugccuccgugucgggggacgcugucacccucacgugaaugguguauuuuucaacggcauuauccuugggcccgacggacauguucugaucccagaaaugcagucuuccuugcuacagcaacacauggagcugcucgaaucaagugugauuccucugaugcauccccuugcagauccaagcacggucuuuaaagacggcgaugaggccgaagaguucguggagguccaucugcccgacgugcacaaguugauauccgguguugaucucgggcugccuucuuggggcaaauacguguuaaugagcgcuggaauccugauuacccuaaugcucaugaucuuucugaugacaugcuguagaaggguaaaucaggccggcucaaagcagcacgggcuugaaggagcaggucggaaggucagugugacuucccagaacggccgaguuauaagcucuugggagucauauaaaagugggggagaaacccgcuuguga

SEQ ID NO: 158830 - RNA, 1575 nt, Artificial Sequence; identical to SEQ ID NO: 158806
  derived and/or modified CDS sequence (opt3) from glycoprotein__RABV__AB817124.1

SEQ ID NO: 158831 - RNA, 1575 nt, Artificial Sequence; identical to SEQ ID NO: 158809
  derived and/or modified CDS sequence (opt3) from glycoprotein__RABV__AB817125.1

SEQ ID NO: 158832 - RNA, 1575 nt, Artificial Sequence
  derived and/or modified CDS sequence (opt3) from glycoprotein__RABV__AB817128.1
auggugccccaggcccuucucuucgucccucuucuggcuuuuagcuugugcuucggcaaguuuccaaucuacaccauuccggacaaauuagggcccugguccccuauagauauccaccaucugucuuguccaaacaaucuaguuguggaggacgaaggaugcacaaaccucucagguuucaguuauauggagcugaagguaggcuacauuagcgcaaucaaagugaauggguuuacuuguacgggagucgugaccgaagccgagacauauacuaacuucguuggcuacgugaccacaaccuuuagaaggaagcacuuccggcccacuccugaugcgugccgcgcugccuauaauuggaaaauggcaggggacccacgauacgaagagucccuucauaaccccuauccugauuaccacuggcugcguacagucaagaccacgaaggagucuuuggugauuaucucgccaucaguagccgaccucgauccguacgacaaaagccugcauaguagaguuuuucccgggggaaaguguuccggcauaacugugucuagcaccuauugcuccacaaaucacgauuacacuaucuggaugccugaaaacccaaggcugggcaccucaugugacauuuucgucaauagucgggggaaacgcgcuagcaagggagguaaaacaugcggcuuuguggaugagagagggcucuauaagucuuuaaagggagcauguaaacugaagcugugcggcgugcccgguuugaggcugauggacgggaccugggucgccauccaaacguccgaugaaacuaaaugguguccuccagaccagcuaguuaaccuccacgacuuccggucagaugagauugagcaucuggugguagaggaacuugugaagaaacgcgaagagugccuggacgcuuuggaaagcaucaugacaaccaagagugucucuuuucgaagacucucccaccugaggaaauuagugcccggauucggcaaggccuacacuauauucaauaagacacugauggaggcggaugcacauuauaaaagcguucggaccuggaacgagauuaucccgucgaagggcugccuccguguggguggacgcugucacccucacgucaaugguguguuuuucaacggcauuauccuugggcccgacggacauguacugaucccagaaaugcagucuuccuugcuacagcaacacauggagcugcucgaaucaaguguuauuccucugaugcauccccuugccgauccaagcacgguguuuaaagacggcgaugaggcugaagacuucgucgaggugcaucugcccgauguccacaaguugauauccgguguggaccucgggcugccuucuuggggcaaauacguuuuaaugagcgccggaauccugauuacccuaaugcucaugaucuuucugaugacaugcuguagaagggugaaucaggcaggcucaaagcagcacgggcuugagggagcuggucggaagguaagugucuccagccagaacggccgagugauaucuucaugggaaaguuauaaaagcgggggagagacucgcuuguga

SEQ ID NO: 158833 - RNA, 1575 nt, Artificial Sequence
  derived and/or modified CDS sequence (opt3) from glycoprotein__RABV__AB817129.1
auggugccccaggcccuucucuucgucccucuucugguuuuuagcuugugcuucggcaaguuuccaaucuacaccauuccggacaaauuagggcccugguccccuauagauauccaccaucugucuuguccaaacaaucuagugguagaggacgaaggaugcacaaaccucucagguuucaguuauauggagcugaaggugggcuacauuagcgcuaucaaagucaauggguuuacuuguacgggagugguuaccgaagcagagacauauacuaacuucgugggcuacgucaccacaaccuuuagaaggaagcacuuccggcccacuccugaugccugccgcgcggcuuauaauuggaaaauggccggugacccacgauacgaagagucccuucauaaccccuauccugauuaccacuggcugcguacagugaagaccacgaaggagucuuugguaauuaucucgccaucaguugcagaccucgauccguacgacaaaagccugcauaguagaguguuucccgggggaaaguguuccggcauaacugucucuagcaccuauugcuccacaaaucacgauuacacuaucuggaugccugaaaacccaaggcugggcaccucaugugacauuuucgugaauagucgggggaaacgcgccagcaagggagguaaaacaugcggcuuuguggaugagagagggcucuauaagucuuuaaagggagcuuguaaacugaagcugugcggcguccccgguuugaggcugauggacgggaccuggguugcaauccaaacguccgaugaaacuaaaugguguccuccagaccagcuagugaaccuccacgacuuccggucagaugagauugagcaucugguaguggaggaacuugucaagaaacgcgaagagugccuggacgccuuggaaagcaucaugacaaccaagagugugucuuuucgaagacucucccaccugaggaaauuaguucccggauucggcaaggcuuacacuauauucaauaagacacugauggaggccgaugcgcauuauaaaagcgugcggaccuggaacgagauuaucccgucgaagggcugccuccgugucgggggacgcugucacccucacgugaaugguguauuuuucaacggcauuauccuugggcccgacggacauguucugaucccagaaaugcagucuuccuugcuacagcaacacauggagcugcucgaaucaagugugauuccucugaugcauccccuugcagauccaagcacggucuuuaaagacggcgaugaggccgaagacuucguggagguccaucugcccgaugugcacaaguugauauccgguguugaccucgggcugccuucuuggggcaaauacguguuaaugagcgcuggaauccugauuacccuaaugcucaugaucuuucugaugacaugcuguagaaggguaaaucaggccggcucaaagcagcacgggcuugagggagcaggucggaaggucaguguguccagccagaacggccgaguuauaucuucaugggaaaguuauaaaagcgggggagagacucgcuuguga

SEQ ID NO: 158834 - RNA, 1575 nt, Artificial Sequence; identical to SEQ ID NO: 158806
  derived and/or modified CDS sequence (opt3) from glycoprotein__RABV__AB817130.1

SEQ ID NO: 158835 - RNA, 1575 nt, Artificial Sequence; identical to SEQ ID NO: 158806
  derived and/or modified CDS sequence (opt3) from glycoprotein__RABV__AB817131.1

SEQ ID NO: 158836 - RNA, 1575 nt, Artificial Sequence; identical to SEQ ID NO: 158806
  derived and/or modified CDS sequence (opt3) from glycoprotein__RABV__AB817132.1

SEQ ID NO: 158837 - RNA, 1575 nt, Artificial Sequence
  derived and/or modified CDS sequence (opt3) from glycoprotein__RABV__AB817133.1
auggugccccaggcccuucucuucgucccucuucugguuuuuagcuugugcuucggcaaguuuccaaucuacaccauuccggacaaauuagggcccugguccccuauagauauccaccaucugucuuguccaaacaaucuagugguagaggacgaaggaugcacaaaccucucagguuucaguuauauggagcugaaggugggcuacauuagcgcuaucaaagucaauggguuuacuuguacgggagugguuaccgaagcagagacauauacuaacuucgugggcuacgucaccacaaccuuuagaaggaagcacuuccggcccacuccugaugccugccgcgcggcuuauaauuggaaaauggccggugacccacgauacgaagagucccuucauaaccccuauccugauuaccacuggcugcguacagugaagaccacgaaggagucuuugguaauuaucucgccaucaguugcagaccucgauccguacgacaaaagccugcauaguagaguguuucccgggggaaaguguuccggcauaacugucucuagcaccuauugcuccacaaaucacgauuacacuaucuggaugccugaaaacccaaggcugggcaccucaugugacauuuucgugaauagucgggggaaacgcgccagcaagggagguaaaacaugcggcuuuguggaugagagagggcucuauaagucuuuaaagggagcuuguaaacugaagcugugcggcguccccgguuugaggcugauggacgggaccuggguugcaauccaaacguccgaugaaacuaaaugguguccuccagaccagcuagugaaccuccacgacuuccggucagaugagauugagcaucugguaguggaggaacuugucaagaaacgcgaagagugccuggacgccuuggaaagcaucaugacaaccaagagugugucuuuucgaagacucucccaccugaggaaauuaguucccggauucggcaaggcuuacacuauauucaauaagacacugauggaggccgaugcgcauuauaaaagcgugcggaccuggaacgagauuaucccgucgaagggcugccuccgugucgggggacgcugucacccucacgugaaugguguauuuuucaacggcauuauccuugggcccgacggacauguucugaucccagaaaugcagucuuccuugcuacagcaacacauggagcugcucgaaucaagugugauuccucugaugcauccccuugcagauccaagcacggucuuuaaagacggcgaugaggccgaagacuucguggagguccaucugcccgaugugcacaaguugauauccgguguugaccucgggcugccuucuuggggcaaauacgcuuuaaugagcgccggagugcugaccacacuaaugcucaugaucuuucugaugacuugcuguagaaggguaaaucaggcaggcucaaagcagcacgggcuugagggagcuggucggaaggucagugugaccucccagaacggccgaguuauuagcucuugggaaucauauaaaagugggggagagacacgcuuguga

SEQ ID NO: 158838 - RNA, 1575 nt, Artificial Sequence
  derived and/or modified CDS sequence (opt3) from glycoprotein__RABV__AB817134.1
auggugccccaggcccuucucuucgucccucuucugguuuuuagcuugugcuucggcaaguuuccaaucuacaccauuccggacaaauuagggcccugguccccuauagauauccaccaucugucuuguccaaacaaucuagugguagaggacgaaggaugcacaaaccucucagguuucaguuauauggagcugaaggugggcuacauuagcgcuaucaaagucaauggguuuacuuguacgggagugguuaccgaagcagagacauauacuaacuucgugggcuacgucaccacaaccuuuagaaggaagcacuuccggcccacuccugaugccugccgcgcggcuuauaauuggaaaauggccggugacccacgauacgaagagucccuucauaaccccuauccugauuaccacuggcugcguacagugaagaccacgaaggagucuuugguaauuaucucgccaucaguugcagaccucgauccguacgacaaaagccugcauaguagaguguuucccgggggaaaguguuccggcauaacugucucuagcaccuauugcuccacaaaucacgauuacacuaucuggaugccugaaaacccaaggcugggcaccucaugugacauuuucgugaauagucgggggaaacgcgccagcaagggagguaaaacaugcggcuuuguggaugagagagggcucuauaagucuuuaaagggagcuuguaaacugaagcugugcggcguccccgguuugaggcugauggacgggaccuggguugcaauccaaacguccgaugaaacuaaaugguguacaccugaccagcuagugaaccuccacgacuuccggucagaugagauugagcaucugguaguggaggaacuugucaagaaacgcgaagagugccuggacgccuuggaaagcaucaugaccacuaagagugugucuuuucgaagacucucccaccugaggaaauuaguuccaggauucggcaaggcuuacacaauauucaauaagacccugauggaggccgaugcgcauuauaaaagcgugcggacguggaacgagauuauccccucgaagggcugccuccgugucgggggacgcugucacccgcacgugaaugguguauuuuucaacggcauuauccuugggccugacggacauguucugauccccgaaaugcagucuuccuugcuacagcaacacauggagcugcucgaaucaagugugauuccacugaugcauccucuugcagaucccagcaccgucuuuaaagacggcgaugaggccgaagacuucguggagguccaucugccagaugugcacaaguugauauccgguguugaccucgggcugcccucuuggggcaaauacguguuaaugagcgcuggaauccugauuacacuaaugcucaugaucuuucugaugacuugcuguagaaggguaaaucaggccggcucaaagcagcacgggcuugagggagcaggucggaaggucagugugaccucccagaacggccgaguuauaagcucuugggaaucauauaaaagugggggagagacacgcuuguga

SEQ ID NO: 158839 - RNA, 1575 nt, Artificial Sequence
  derived and/or modified CDS sequence (opt3) from glycoprotein__RABV__AB817135.1
auggugccccaggcccugcuguucgucccucuucugguuuuuagcuugugcuucggcaaguuuccaaucuacaccauuccggacaaauuagggcccugguccccuauagauauccaccaucugucuuguccaaacaaucuagugguagaggacgaaggaugcacaaaccucucagguuucaguuauauggagcugaaggugggcuacauuagcgcuaucaaagucaauggguuuacuuguacgggagugguuaccgaagcagagacauauacuaacuucgugggcuacgucaccacaaccuuuagaaggaagcacuuccggcccacuccugaugccugccgcgcggcuuauaauuggaaaauggccggugacccacgauacgaagagucccuucauaaccccuauccugauuaccacuggcugcguacagugaagaccacgaaggagucuuugguaauuaucucgccaucaguugcagaccucgauccguacgacaaaagccugcauaguagaguguuucccgggggaaaguguuccggcauaacugucucuagcaccuauugcuccacaaaucacgauuacacuaucuggaugccugaaaacccaaggcugggcaccucaugugacauuuucgugaauagucgggggaaacgcgccagcaagggagguaaaacaugcggcuuuguggaugagagagggcucuauaagucuuuaaagggagcuuguaaacugaaacuuugcggcguccccgguuugaggcugauggacgggaccuggguugcaauccaaacguccgaugaaacuaaaugguguccuccagaccagcuagugaaccuccacgacuuccggucagaugagauugagcaucugguaguggaggaacuugucaagaaacgcgaagagugccuggacgccuuggaaagcaucaugacaacccgaagugugucuuuuagaaggcucucccaccuccggaaguuaguucccggauucggcaaggcuuacacuauauucaauaagacacugauggaggccgaugcgcauuauaagagcgugcguaccuggaacgagauuaucccgucgaaaggcugccuccgcgucgggggaagaugucacccucacgugaaugguguauuuuucaacggcauuauccuugggcccgacggacauguucugaucccagaaaugcagucuuccuugcuacagcaacacauggagcugcucgaaucaagugugauuccucugaugcauccccuugcagauccaagcacggucuuuaaggacggcgaugaggccgaagacuucguggagguccaucugcccgaugugcacaaauugauauccgguguugaccucgggcugccuucuuggggcaaguacguguuaaugagcgcuggaauccugauuacccuaaugcucaugaucuuucugaugacaugcuguaggcggguaaaucaggccggcucaaaacagcacgggcuugagggagcaggucgaaaggucagugugacuucccagaacggccgcguuauaagcucuugggaaucauauaagagugggggagagaccagauuguga

SEQ ID NO: 158840 - RNA, 1575 nt, Artificial Sequence; identical to SEQ ID NO: 158805
  derived and/or modified CDS sequence (opt3) from glycoprotein__RABV__AB817136.1

SEQ ID NO: 158841 - RNA, 1575 nt, Artificial Sequence; identical to SEQ ID NO: 158805
  derived and/or modified CDS sequence (opt3) from glycoprotein__RABV__AB817137.1

SEQ ID NO: 158842 - RNA, 1575 nt, Artificial Sequence
  derived and/or modified CDS sequence (opt3) from glycoprotein__RABV__AB817138.1
auggugccccaggcccuucucuucgucccucuucugguuuuuagcuugugcuucggcaaguuuccaaucuacaccauuccggacaaauuagggcccugguccccuauagauauccaccaucugucuuguccaaacaaucuagugguagaggacgaaggaugcacaaaccucucagguuucaguuauauggagcugaaggugggcuacauuagcgcuaucaaagucaauggguuuacuuguacgggagugguuaccgaagcagagacauauacuaacuucgugggcuacgucaccacaaccuuuagaaggaagcacuuccggcccacuccugaugccugccgcgcggcuuauaauuggaaaauggccggugacccacgauacgaagagucccuucauaaccccuauccugauuaccacuggcugcguacagugaagaccacgaaggagucuuugguaauuaucucgccaucaguugcagaccucgauccguacgacaaaagccugcauaguagaguguuucccgggggaaaguguuccggcauaacugucucuagcaccuauugcuccacaaaucacgauuacacuaucuggaugccugaaaaccaaaggcugggcaccucaugugacauuuucgugaauagucgggggaaacgcgccagcaagggagguaaaacaugcggcuuuguggaugagagagggcucuauaagucuuuaaagggagcuuguaaacugaagcugugcggcgucccagguuugaggcugauggacgggaccuggguugcaauccagacguccgaugaaacuaaauggugucccccugaccagcuagugaaccuccacgacuuccggucagaugagauugagcaucugguaguggaggaacuugucaagaaacgcgaagagugccuggacgccuuggaaagcaucaugacaaccaagagugugucuuuucgaagacucucccaccugaggaaauuaguuccaggauucggcaaggcuuacacuauauucaauaagacacugauggaggccgaugcgcauuauaaaagcgugcggaccuggaacgagauuauccccucgaagggcugccuccgugucgggggacgcugucacccgcacgugaaugguguauuuuucaacggcauuauccuugggccugacggacauauccugauucccgaaaugcagucuuccuugcuacaacagcacauggagcugcucgaaucaaguguuauaccacugaugcauccucuugcagaucccagcacgguguuuaaagacggcgaugaggccgaagacuucgucgaggugcaucugccagauguccacaaguugaucuccgguguggaccucgggcugcccucuuggggcaaauacguuuuaaugagcgcuggcauucugaccacacuaaugcucaugaucuuucugaugacuugcuguagaagggugaaucggguaggaucaaagcagcacgggcuugagggagccggucgaaaggucagugugaccucccagaacggccgcguuauaagcucuugggaaucauauaaaagugggggagagacaagauuguga

SEQ ID NO: 158843 - RNA, 1575 nt, Artificial Sequence; identical to SEQ ID NO: 158771
  derived and/or modified CDS sequence (opt3) from glycoprotein__RABV__AB817140.1

SEQ ID NO: 158844 - RNA, 1575 nt, Artificial Sequence; identical to SEQ ID NO: 158816
  derived and/or modified CDS sequence (opt3) from glycoprotein__RABV__AB817141.1

SEQ ID NO: 158845 - RNA, 1575 nt, Artificial Sequence
  derived and/or modified CDS sequence (opt3) from glycoprotein__RABV__AB817142.1
auggugccccagguccuucucuucguuccucuucugguguuuagcuugugcuucggcaaguuuccaaucuacaccauuccggacaaauuagggcccugguccccuauagauauccaccaucugucuuguccaaacaaucuaguaguggaggacgaaggaugcacaaaccucucagguuucaguuauauggagcugaaggucggcuacauuagcgccaucaaagugaauggguuuacuuguacgggaguugugaccgaagcugagacauauacuaacuucgucggcuacgugaccacaaccuuuagaaggaagcacuuccggcccacuccugaugcaugccgcgccgcguauaauuggaaaauggcuggugacccacgauacgaagagucccuucauaaccccuauccugauuaccacuggcugcguacaguaaagaccacgaaggagucuuugguuauuaucucgccaucaguggccgaccucgauccguacgacaaaagccugcauaguagagucuuucccgggggaaaguguuccggcauaacugugucuagcaccuauugcuccacaaaucacgauuacacuaucuggaugccugaaaacccaaggcugggcaccucaugugacauuuucgugaauagucgggggaaacgcgcaagcaagggagguaaaacaugcggcuuugucgaugagagagggcucuauaagucuuuaaagggagccuguaaacugaagcugugcggcguucccgguuugaggcugauggacgggaccuggguggcuauccaaacguccgaugaaacuaaaugguguccuccagaccagcuaguaaaccuccacgacuuccggucagaugagauugagcaucugguggucgaggaacuugugaagaaacgcgaagagugccuggacgcauuggaaagcaucaugacaaccaagaguguuucuuuucgaagacucucccaccugaggaaauuagugcccggauucggcaaggccuacacuauauucaauaagacacugauggaggcugaugcccauuauaaaagcguccggaccuggaacgagauuaucccgucgaagggcugccuccguguugggggacgcugucacccucacguaaaugguguguuuuucaacggcauuauccuugggcccgacggacaugugcugaucccagaaaugcagucuuccuugcuacagcaacacauggagcugcucgaaucaagugucauuccucugaugcauccccuugcggauccaagcacgguguuuaaagacggcgaugaggcagaagacuucgucgaggugcaucugcccgauguucacaaguugauauccgguguggaccucgggcugccuucuuggggcaaauacguauuaaugagcgccggaauccugaccacacuaaugcucaugauuuuucugaugacuugcuguagaagggucaaucaggcuggcucaaagcagcacgggcuugagggagccggucggaaggugaguguuaccucccagaacggccgagugaucagcucuugggaaucauauaaaagugggggagagacacgcuuguga

SEQ ID NO: 158846 - RNA, 1575 nt, Artificial Sequence
  derived and/or modified CDS sequence (opt3) from glycoprotein__RABV__AB817143.1
auggugccccaggcccuucucuucgucccucuucugguuuuuagcuugugcuucggcaaguuuccaaucuacaccauuccggacaaauuagggcccugguccccuauagauauccaccaucugucuuguccaaacaaucuagugguagaggacgaaggaugcacaaaccucucagguuucaguuauauggagcugaaggugggcuacauuagcgcuaucaaagucaauggguuuacuuguacgggagugguuaccgaagcagagacauauacuaacuucgugggcuacgucaccacaaccuuuagaaggaagcacuuccggcccacuccugaugccugccgcgcggcuuauaauuggaaaauggccggugacccacgauacgaagagucccuucauaaccccuauccugauuaccacuggcugcguacagugaagaccacgaaggagucuuugguaauuaucucgccaucaguugcagaccucgauccguacgacaaaagccugcauaguagaguguuucccgggggaaaguguuccggcauaacugucucuagcaccuauugcuccacaaaucacgauuacacuaucuggaugccugaaaacccaaggcugggcaccucaugugacauuuucgugaauagucgggggaaacgcgccagcaagggagguaaaacaugcggcuuuguggaugagagagggcucuauaagucuuuaaagggagcuuguaaacugaagcugugcggcguccccgguuugaggcugauggacgggaccuggguugcaauccaaacguccgaugaaacuaaaugguguccuccagaccagcuagugaaccuccacgacuuccggucagaugagauugagcaucugguaguggaggaacuugucaagaaacgcgaagagugccuggacgccuuggaaagcaucaugacaaccaagagugugucuuuucgaagacucucccaccugaggaaauuaguucccggauucggcaaggcuuacacuauauucaauaagacacugauggaggccgaugcgcauuauaaaagcgugcggaccuggaacgagauuaucccgucgaagggcugccuccgugucgggggacgcugucacccucacgugaaugguguauuuuucaacggcauuauccuugggcccgacggacauguucugaucccagaaaugcagucuuccuugcuacagcaacacauggagcugcucgaaucaagugugauuccucugaugcauccccuugcagauccaagcacggucuuuaaagacggcgaugaggccgaagacuucguggagguccaucugcccgaugugcacaaguugauauccgguguugaccucgggcugccuucuuggggcaaauacguguuaaugagcgcuggaauccugauuacccuaaugcucaugaucuuucugaugacaugcuguagaaggguaaaucaggccggcucaaagcagcacgggcuugagggaacuggucggaaggucagugugaccucccagaacggccgaguuauaagcucuugggaaucauauaaaagugggggagagacacgcuuguga

SEQ ID NO: 158847 - RNA, 1575 nt, Artificial Sequence; identical to SEQ ID NO: 158806
  derived and/or modified CDS sequence (opt3) from glycoprotein__RABV__AB817144.1

SEQ ID NO: 158848 - RNA, 1575 nt, Artificial Sequence; identical to SEQ ID NO: 158809
  derived and/or modified CDS sequence (opt3) from glycoprotein__RABV__AB817146.1

SEQ ID NO: 158849 - RNA, 1575 nt, Artificial Sequence
  derived and/or modified CDS sequence (opt3) from glycoprotein__RABV__AB838709.1
augaucccccaggcccuccuguucgugccucuucuggucuuuagcuugugcuucggcaaguuuccaauuuacaccauaccggacaaauuagggcccugguccccuaucgauauucaccaucugucuuguccaaacaaucuaguuguggaggacgaaggaugcacaaaccucucagguuucaguuauauggagcugaagguaggcuacaucagcgcuauuaaagugaauggguuuacuuguacgggagucgugaccgaagcagagacauauacuaacuucguuggcuacgugaccacaaccuuuaagagaaaacacuucaggcccacuccugaugccugccgggcggcuuauaauuggaagauggccggugacccacgcuacgaagagucccuucauaaccccuauccugauuaccacuggcugcgaacagucaagaccacgaaagagucuuuggugaucauauguccaucgguagcagaccucgauccguacgacaagucacugcauagccguguuuuucccagugggaaaugcuccggaaucacugugucuagcaccuauuguuccacaaaucacgauuacacuauuuggaugccugaaaacccaagacugggcaccucaugcgacaucuucacaaauaguaggggcaagcgggccagcaaagggucuaagaccuguggauuugucgaugagcgcggucucuauaaguccuuaaaaggcgcuugcaagcugaaacuuugugggguguugggacugagacuaauggacggcacgugggcagccauucaaacuucagaugaaacaaaguggugucccccugaccagcucgugaaccugcacgacuucaggagcgaugagaucgagcaucuugucguugaggaacuggugaaaaagcgggaagagugcuuggacgcucucgaaaguauaaugaccacuaaaucuguauccuuucgccgacugagccacuuaagaaagcuggugccagguuucgggaaggccuacacaauuuucaauaaaacccucauggaggcggaugcacauuauaagucggucaggacguggaacgagaucauucccucuaaaggaugccuucgggugggcggccguugccacccgcacguuaaugggguguuuuucaacggaaucauccuggguccugacggccaugucuugauucccgaaaugcaguccucacuacugcagcaacacauggagcuccuggaaaguagcgugauaccacuuaugcauccucuggccgaucccuccaccguauuuaaggacgaugacgaggcugaagauuucguugaggugcacuugccagacguccauaaacaggugucuggggucgaucucggacugcccagcuggggcaaguacguguuaaugucagccgguguucugacagcacuaaugcucaugaucuuucugacuaccuguugccgcagagcuaauagggccgagagugcgcagcacucccuuggggaacggggccgaaaggugagcguaacaucucagucaggacgcgucauuaguagcugggaguccuauaaaucuggcggggaaacuaaguuguga

SEQ ID NO: 158850 - RNA, 1575 nt, Artificial Sequence; identical to SEQ ID NO: 158682
  derived and/or modified CDS sequence (opt3) from glycoprotein__RABV__AB838710.1

SEQ ID NO: 158851 - RNA, 1575 nt, Artificial Sequence
  derived and/or modified CDS sequence (opt3) from glycoprotein__RABV__AB905545.1
augaucccccaggcccuucucuucgugccucuucugauuagcuccucuugcuugggcaaguuuccaauauacaccaucccggacaaauuagggcccuggucaccuauugauauccaccaucugaguuguccaaacaaucuagucguugaggacgaaggaugcacaaaccucagcgguuucuccuauauggagcugaaggugggcuacauuucugcuaucaaaguaaauggguuuacuuguacgggaguggucaccgaagcagagacauauacuaacuucgugggcuacguuaccacaaccuuuaagagaaaacacuucaggcccauaccugaugccugccgggcggcuuauaauuggaagauggccggugacccacgcuacgaagagucgcuucaaaaccccuauccugauuaccauuggcugcgaacugugaagacaaccaaagagucauugaucauuaucagcccaagugucgcagaccucgauccguacgacaagucccugcacucucguguguuucccgggggaaaaugucugggcauuacgguaagcuccacuuauugcucaaccaaucaugauuacacaaucuggaugccugaggaaccaagacucggcaccaguugugacauauucacuagcucuaaggggaaaaaggccuccaagggagguaaaacaugcggcuuuguugaugaaaggggguuauauaagucacugaaaggagcuuguaagcugaaauugugcggcgugcugggucuacggcucauggacgggaccugggucagcauucagacgagugaugacacuaaguggugucccccugaccagcuggugaaccuucacgauuuccacucugacgagaucgagcaucugguggucgaagaguugguuaaaaagcgcgaagagugccucgaugcacuggaauccauuaugacaaccaagagcgugucguuuagaagguuaucuuaccugcggaaacucguaccaggauucggcaaggccuauacuaucuuuaauaaaacacuuauggaggcugacgcccacuacaaguccgugcgcaccuggaacgagaucauucccucaaaaggcugccugaagguccgagaaagaugucauccgccuguggaugggguuuucuucaauggaauaaucuugggucccgacggcaacgugcuaauuccagagaugcagaguagccugcuccaacagcacauggaacugcuugaguccucugucaucccucugaugcaccccuuggcggauccaagcacgguguuuaaggaaggggacgaggcagaggauuucguagaaguucaucuccccgacgugcacaaacagauaucaggagucgaucugggcuuaccuaguugggguaaguaucugcuaaugauugccgggggccucgcuacccuggugcuuaucaucugcuccauggccuguugcaggcggacaaaacguacugagagccgcagaaggggaucuggcgaaucagggaagaaagucaccgcaacaccacagacuaagaaggugguuaguagcugggaguuguacaaauccgaaggagacgcucggcuguga

SEQ ID NO: 158852 - RNA, 1575 nt, Artificial Sequence
  derived and/or modified CDS sequence (opt3) from glycoprotein__RABV__AB981663.1
augaucccccaggcccugcuguucgugccucuucuggucuuuagcuugugcuucggcaaguuuccaauuuacaccauaccggacaaauuagggcccugguccccuaucgauauucaccaucugucuuguccaaacaaucuaguuguggaggacgaaggaugcacaaaccucucagguuucaguuauauggagcugaagguaggcuacaucagcgcuauuaaagugaauggguuuacuuguacgggagucgugaccgaagcagagacauauacuaacuucguuggcuacgugaccacaaccuuuaagagaaaacacuucaggcccacuccugaugccugccgggcggcuuauaauuggaagauggccggugacccacgcuacgaagagucccuucauaaccccuauccugauuaccacuggcugcgaacagucaagaccacgaaagagucuuuggugaucauaucgccaucaguaagcgaccucgauccguacgacaagagucugcauucccguguuuuucccucugggaaauguagcggaaucacuguguccucaaccuauugcccuacaaaucacgauuacacuauuuggaugccagaaaaccccagacugggcaccaguugugacaucuucacaaauagcaggggcaagcgggcaucuaaaggguccaagaccugcggauuugucgaugagcgcggucucuauaagucauuaaaaggcgccuguaagcugaaacuuugcgggguguugggacugagacuaauggacggcacgugggcugcaauucaaacuagcgaugaagccaagugguguccuccagaccagcucgugaacauccacgacuucaggagugaugagauagagcaucuggucguugaggaacuugugaaaaagcgggaagagugccuggacgcuuuggaaucuauuaugacaaccaaauccgugagcuuucgccgacucucgcaccugagaaaguuaguacccgguuucgggaaggccuacacuaucuucaauaaaacacugauggaggcggaugcacauuauaagucugucaggaccuggaacgagauuaucccguccaaaggaugccuccgggugggcggccguugucacccucacguuaaugggguguuuuucaacggaaucauucuuggucccgacggccauguccugauaccagaaaugcagucaaguuugcuacagcaacacauggagcugcucgaaagcuccgugaucccucugaugcauccccuugccgauccaucuacgguauuuaaggacggggaugaggcugaagacuucguugaggugcaccuccccgauguccauaaacaggugagcggagucgacuugggccucccuucaugggguaaguacgugcugaugaguguuggggccaugauugcauuaaugcugaccaucuuucuaacaacuugcugucgcaagaccaauggcgcuggauccauacagcacagaccaggcgagacagggaggaaagugagcguaacuucucagucaggacgggucauuaguagcugggaauccuauaagucugguggcgagaccaaacucuga

SEQ ID NO: 158853 - RNA, 1575 nt, Artificial Sequence
  derived and/or modified CDS sequence (opt3) from glycoprotein__RABV__AB981664.1
augaucccccaggcccugcuguucgugccucuucuggucuuuagcuugugcuucggcaaguuuccaauuuacaccauaccggacaaauuagggcccugguccccuaucgauauucaccaucugucuuguccaaacaaucuaguuguggaggacgaaggaugcacaaaccucucagguuucaguuauauggagcugaagguaggcuacaucagcgcuauuaaagugaauggguuuacuuguacgggagucgugaccgaagcagagacauauacuaacuucguuggcuacgugaccacaaccuuuaagagaaaacacuucaggcccacuccugaugccugccgggcggcuuauaauuggaagauggccggugacccacgcuacgaagagucccuucauaaccccuauccugauuaccacuggcugcgaacagucaagaccacgaaagagucuuuggugaucauaucgccaucaguaagcgaccucgauccguacgacaagagucugcauucccguguuuuucccucugggaaauguagcggaaucacuguguccucaaccuauugcccuacaaaucacgauuacacuauuuggaugccagaaaaccccagacugggcaccaguugugacaucuucacaaauagcaggggcaagcgggcaucuaaaggguccaagaccugcggauuugucgaugagcgcggucucuauaagucauuaaaaggcgccuguaagcugaaacuuugcgggguguugggacugagacuaauggacggcacgugggcugcaauucaaacuagcgaugaagugaagugguguccuccagaccagcucgucaacauccacgacuucaggagugaugagauagagcaucugguuguggaggaacuugugaaaaagcgggaagagugccuggacgccuuggaaucuauuaugacauccaaaagcguaucguuucgccgacucucucaccugagaaaguuaguccccgguuucgggaaggcuuacaccaucuucaauaaaacucugauggaggccgaugcgcauuauaaguccgugaggacauggaacgagauuaucccgucaaaaggaugccuccggguuggcggccguugucacccucacgugaauggggucuuuuucaacggaaucauucuuggucccgacggccaugugcugauaccagaaaugcagaguagcuugcuacagcaacacauggagcugcucgaauccucuguaaucccucugaugcauccccuugcagauccaagcaccguuuuuaaggacggggaugaggccgaagacuucguggagguccaccuccccgaugugcauaaacaggucucaggaguggacuugggccucccuaguugggguaaguacguucugauguccgugggggcuaugauugccuuaaugcugaugaucuuucuaaugacgugcugucgcaaggcaaauggcgcugagagcauacagcacagacucggagaaaccggcaggaaaguaucugucacaucacagagugggcgggugauuagcuccugggagucuuauaagucgggaggugaaacuaaacuguga

SEQ ID NO: 158854 - RNA, 1575 nt, Artificial Sequence
  derived and/or modified CDS sequence (opt3) from glycoprotein__RABV__AF344305.1
auggugccccaggcccugcucgucguuccucuucugggcuucagcuugugcuuugggaaguucccaaucuacaccauuccggacaaauuaggacccugguccccuauagauauccaccaucugucuuguccaaacaaucuagugguagaggacgaagguugcacaaaccucucaggcuuuaguuauauggagcugaaggugggguacauuagcgcuaucaaagucaauggauucacuuguacgggcgugguuaccgaagcagagacauauacuaacuuuguggguuacgucaccacaaccuucaagagaaaacacuuuaggcccacuccugaugaaugccgggccgcgcauaauuggaagauggcuggggacccacgcuaugaggagucccuucacaaccccuacccugauuaucauuggcugcgaacagugaagaccacgaaagaaucuuugguaauuaucucgccaucaguugccgaccucgauccguacgacaagagccugcacagucguguguuccccuccggaaaauguucuggcauaacugucagcuccaccuacugcucaacaaaucacgauuauacuaucuggaugccugagaacccaagacugggcaccaguugugacauuuuuacaaauagcagggggaagcgggcaucuaaaggauccaagaccugcgguuucguggaugaacgcggccucuacaagucauuaaaaggggccuguaagcugaaacuuugcggaguguugggccugaagcuaauggacgguacgugggucgcuaugcaaacuagcgaugagacaaaauggugucccccugaccagcucguuaaccugcaugaccuuagaagugaugagaucgaacaccuggugguagaggaauuggugaagaaaagggaggaaugccucgacgcacuggagucuauuaugaccacuaaguccgucagcuuucggcgcuuaucgcaucugcgaaagcucgugccaggguucggaaaagccuauacaaucuuuaauaagacccuuauggaggcugaugcccacuacaaaucuguuagaacguggaacgaaauaauucccuccaagggcugccugaaagugggcgggaggugucacccgcaugucaauggaguguucuucaacgguguaaucuugggcccugacgggcacguucuaauucccgagaugcagucaagucugcuccagcaacauauggaacugcuugagagcuccgugaucccacugaugcacccuuuggcggaucccucuaccgucuuuaaggacggagaugaagcagaggacuucguggagguccaucucccagaugugcacaagcagguuagcggcguggaccuggguuuacccaauugggggaaauauaucucacugagugccggcgcucuaauugcccucaugcugauaauccuuuugaugacaugcugucggaagguaaaccguccugaaccaacucagcgcucccuggagggcaaaaagagaaaagucagcgugaccucucagucaggaaagguuauuaguagcugggaauccuacaagucugggggagagacaaggcucuga

SEQ ID NO: 158855 - RNA, 1575 nt, Artificial Sequence
  derived and/or modified CDS sequence (opt3) from glycoprotein__RABV__AF344307.1
auggugccccaggcccugcucgucguuccucuucugggcuucagcuugugcuuugggaaguucccaaucuacaccauuccggacaaauuaggacccugguccccuauagauauccaccaucugucuuguccaaacaaucuagugguagaggacgaagguugcacaaaccucucaggcuuuaguuauauggagcugaaggugggguacauuagcgcuaucaaagucaauggauucacuuguacgggcgugguuaccgaagcagagacauauacuaacuuuguggguuacgucaccacaaccuucaagagaaaacacuuuaggcccacuccugaugaaugccgggccgcguauaauuggaagauggcuggggacccacgcuacgaggagucccuucauaaccccuauccugauuaccacuggcugcgaacagugaagaccacgaaagaaucuuugguaauuaucucgccaucaguugccgaccucgauccguacgacaagagccugcauagucguguguuccccuccggaaaauguucuggcauaacugucagcuccaccuauugcucaacaaaucacgauuacacuaucuggaugccugagaacccaagacugggcaccaguugugacauuuuuacaaauagcagggggaagcgggcaucuaaaggauccaagaccugcgguuucguggaugaacgcggccucuauaagucauuaaaaggggccuguaagcugaaacuuugcggaguguugggccugaagcuaauggacgguacgugggucgcuaugcaaacuagcgaugagacaaaauggugucccccugaccagcucguuaaccugcacgaccuuagaagugaugagaucgaacaucuggugguagaggaauuggugaagaaaagggaggaaugccucgacgcacuggagucuauuaugaccacuaaguccgucagcuuucggcgcuuaucgcaccugaggaagcucgugccaggguucggaaaagccuacacaaucuuuaauaagacccuuauggaggcugaugcccauuauaaaucuguuagaacguggaacgaaauaauucccuccaagggcugccugaaaguggagggccgaugucacccgcacgucaaugggguguucuucaacggaguaaucuuggguccugacggccauguucuaauucccgaaaugcagucaagucugcuccagcaacacauggagcugcuugaaagcuccgugaucccacugaugcauccuuuggcggaucccucuaccgucuuuaaggacggggaugaggcagaggacuucguggaaguccaccucccagaugugcauaagcagguuagcggaguggaccugggcuuacccaauugggguaaauacaucucacugagugccggggcucuaauugcccucaugcugauaauccuuuugaugacaugcugucggaagguaaaccguccugagccaacucagcgcucccuggaaggcaaaaagagaaaagucagcgugaccucucagucaggaaagguuauuaguagcugggaguccuauaagucuggcggggaaacaaggcucuga

SEQ ID NO: 158856 - RNA, 1575 nt, Artificial Sequence
  derived and/or modified CDS sequence (opt3) from glycoprotein__RABV__AF499686.2
auggugccccaggcccugcucuuugucccucuucugguuuuuccauugugcuucggcaaguuuccgaucuacaccauucccgacaaauuagggccuuggagcccaauagauauccaccaucuguccugucccaacaaucuagugguagaggacgaagagugcacaaaccucucuggauucucauauauggaacugaagguggguuacauucuugcuaucaaagucaauggcuuuacuuguacgggggugguuaccgaggcagaaacauauacuaacuucgugggauacgucaccacaaccuuuaagagaaaacacuucaggccuacuccagaugccugccgggcggcuuauaauuggaagauggccggcgacccccgcuacgaggagagucugcauaacccuuauccagauuaccgaugguugcguacagugaagaccacgaaagaaagccucguaauuaucuccccgucuguugcagaccuggaucccuacgacagaucgcugcacucaaggguguuuccuagcgguaaguguaguggggucgccguguccucuacuuauugcagcaccaaucaugauuacacaauauggaugccagagaacccccggcucggaauguccugugacaucuucacuaauucacgcggcaaaagagcuaguaagggcagcgaaaccugcggguuuguggaugagaggggauuauauaaaucucugaagggugcauguaagcugaaauugugcggcguccuggggcuacggcucauggacggaacauggguuuccaugcaaaccucaaacgagacgaagugguguccuccagauaaacuggugaaucuucacgacuuccgcagcgacgaaauugagcaccugguaguggaagaguugguccgaaagagagaagagugccucgaugcccuggagaguaucauggcuacuaaaucuguguccuuuaggcgguuaagccaucugcguaagcucguucccggcuucgguaaagccuacacaauuuucaacaagacccuuauggaagcggacgcacacuauaagucggugucuacuuggaaugagguccugccguccaaagggugcuugcgcgugggaggcagaugucauccucacguaaacggcguuuucuucaaugggaucauacuaggacccgaugguaacgugcugauuccagaaaugcagucaagucuccugcagcagcacauggagcuucuggaaagcuccgucaucccuuuggugcauccccucgccgacccaucuacagucuuuaaggauggcgacgaggcugaggauuucguggaaguucaccuucccgacgugcauaaccaaguaagcggggucgauuuaggacugccuaauuggggcaaauacgugcuacucucagccggugcacugaccgcucuuauguugauuaucuuucugaugacgugcuguaggcggguuaaccgaagugagccaacccagcacaaucuccgcgggacaggcagagaaguguccgucacuccgcagagcggaaagaucauuucuucaugggagagucauaaaagcggcggggaaaccaggcuguga

SEQ ID NO: 158857 - RNA, 1575 nt, Artificial Sequence
  derived and/or modified CDS sequence (opt3) from glycoprotein__RABV__AJ871962.1
auggugccccaggcccugcuguucgucccucuucugggcuuuagcuugugcuucgggaaguuuccaaucuacaccauuccggacgaguuaggacccugguccccuauagauauccaccaccugucuuguccaaacaaucuaguuguggaagacgaggguugcacaaaccucucagaguucaguuauauggagcugaaaguaggcuacauuagcgcuaucaaggugaauggguuuacuuguacgggagucgugaccgaagcagagacauauacuaacuucguuggcuacgugaccacaaccuuuaaaagaaagcacuucaggcccacuccugaugccugccgggcggcuuauaauuggaaaauggccggugacccacgcuacgaggaaucccuucauaaccccuauccugauuaccacuggcugcgaacaguccguaccacgaaggagucuuugauuaucauaucgccaucagugacugaccucgauccguacgacaagagccugcauaguagaguauuucccgggggaaaauguuccggcaucaccguuucuagcacauauugcuccacuaaucacgauuacaccauuuggaugccugaaaacccaaggccccggacaccuugugacaucuucaccaauucacgcggcaagagagcaaguaaagggaacaagacgugcggauuuguggaugagaggggucuguauaaaagccucaagggcgccugucgguuaaagcugugcgggguccuuggauugcgccugauggacggcacuuggguggcuaugcaaacaucugaugagaccaaaugguguccacccgaccagcuagugaaucuccacgacuuccgauccgaugaaauugagcaucuggucguugaagaacuugugaagaaaagagaagagugccuggacgcauuggagucaaucaugacuacaaagagcguaaguuuuaggcggcucucucaccuccguaaauuagugccggguuucgggaaggccuacaccauauucaacaaaacgcugauggaagcugaugcccauuauaaguccguccgcaccuggaaugagauuaucccuagcaagggaugccucaaagugggcggcagaugucacccccacguuaacgggguguuuuucaauggaauuauccuugguccagacggccauguccugaucccugaaaugcagucgucuuugcuacagcaacacauggagcugcucaaguccucagugauuccccugaugcauccacuugcggaucccaguacaguauuuaaagaaggggacgaggcagaggauuucguugaagugcaucugccugacgucuacaagcagauaagcggaguggauuugggccucccaaacugggguaaauauguccugaugacugccggggcuaugaucggcuuagugcugauuuuuagucuaaugaccuggugcaggcgggccaaccgaccggagucuaagcagcgcagcuucggaggcacagggagaaauguuucagugacuucccaguccggaaagguaauccccagcugggaaucuuacaaaucagguggccaaaccaggcucuga

SEQ ID NO: 158858 - RNA, 1575 nt, Artificial Sequence
  derived and/or modified CDS sequence (opt3) from glycoprotein__RABV__AY683208.1
auggugccccaggcccuacucuucgucccuuuucuuggcuucagccugugcuuugggaaguucccaaucuacaccauuccggacaaauugggacccugguccccuauagauauccaccauuuaucuuguccaaacaaucugguuguggaggacgaagguugcacaaaccuaucaggcuuuaguuaucucgagcugaagguagggcacauuagcgcuaucaaagugaauggauucacuuguacgggcgucgugaccgaagcagagacauacacuaacuuuguugguuaugugaccacaaccuucaagagaaaacauuuuaggcccacuccugaugccugccgggcggcuuacaauuggaagacagccggggacccacgcuaugaagagucccuucaaaaccccuacccugauuaucaguggcugcgaaccguccguacgacuaaggagucuuuggugauuaucucgccaucagcagccgaccucgauccguacgacaaaagccugcacaguagaguauuccccuccggaaaguguucuggcauaaccguuagcuccguguacugcucaacaaaucaugauuauacuaucuggaugccugaaaacccaaggcagggcaugaguugugacauuuuuaccaauagccgggggaaacgcgcuucuaaggagagaaaaacaugcggauucgucgaugaaaggggucuguacaagucccuccggggcucauguaaguuaaaacugugcggggugcuuggauugcgccugauggacggcaccuggguggcaaugcagacgagcaacgagacuaagugguguagucccgaucaacuggucaaucuccacgacuuucacucugacgagaucgaacaucugguuguggaggaacuugugaaaaagcgagaggaaugccuggaugccuuggaguccauuaugacaaccaaaagcguaucguucagaaggcucucucaucugcggaaguuagucccugguuucgggaaggcuuauacuaucauaaacaaaacacugauggaggccgaagcgcacuacaaguccgugcguaccuggaaugagauuguuccaucaaaaggaugccuccgcguggaaggcagaugucacccccacgucaacggcguguuuuucaaugggaucauucuuggaccggacggucauguacugaucccugagaugcagaguagcuugcuacagcagcacauggaacugcucgaguccucuguuaucccccugaugcauccacuugcagauccuagcacgguguuuaaggagggcgacgaagccgaggauuucgucgaagugcacuuucccgacguccauaaaaaggugucagagguugaucugggguugccaaacuggggagaauaugugcuccugagugcuggcaccuuaauugcccugaugcuaauaaucuuccucaugauuugcaggcggcgaguaaaccgccccgaguccacacaaagaagccugagggguacugagaugaaagucucugugaccccucagucagggaaguuuaagaguagcugggaauccuacaaaucuggcgacgaggcacggcuuuga

SEQ ID NO: 158859 - RNA, 1575 nt, Artificial Sequence
  derived and/or modified CDS sequence (opt3) from glycoprotein__RABV__AY705373.1
augaucccccaggcccuccuguucgugccucuucugauucccagcuugugcuuaggcaaguuuccgauauacaccauccccgacaaacuggggccuugguccccaauugauauccaccaucuaucuugucccaacaaucucgucguugaggacgaaggaugcacaucacugagugguuucagcuauauggagcuuaaggugggcuacauuuccgcuaugaaaguaaacggguuuacuuguacgggaguggucaccgaagcagagacauauacuaauuucgugggcuacguuaccacaaccuuuaagagaaaacacuucaggccuaugccagaugccugccgggcggcucaugacuggaagaucgccggugauccccgcuaugaagacucucugcaaaacccuuacccagauuaucacugguugcgaacugugaagacaaccaaagagucgcucgucauaaucucaccgagcguggcagaccuggaucccuacgacaagagucugcauucccguguauuuccuucugggaaaugucucggaauuacgguuagcuccacuuacugcccaaccaaucacgauuauacaaucuggaugcccguggaggccagauuaggcacuucaugugacauuuucaccaacaguaggggcaagaaagcuagcaaagggggacggacaugcgguuuugucgaugaacgcggccuguacaagucucuuaagggggcauguaaguugaaacugugcggagugccuggccuaagacucaugaaugguaccuggguguccauccagacgucagacgacauaaagugguguccacccgaucagcuggucaaccuucacgacuuccauagcgaugagauugaacaccugguuguggaggaguugaucaaaaagagggaagggugccucgacgcccuggagaguauuaugacuacaaaaucuguauccuuucggcgcuuaagccaucugcgaaagcucgugccgggauucggcaaggcuuauaccaucuuuaauaacacucuuauggaagccgaugcgcacuacaaaucggucagaacauggaaugaggugaucccuucuaagggcugccugaaaguugggggaaggugucacccaccagugaacggugucuucuucaauggcauuauauuggggccugacggaaacgugcuaauccccgaaaugcaguccucacugcuccaacagcauauggagcugcuugagaguagcguaauuccacugaugcaccccuuggcagauccuuccaccguuuuuaaggacggcgaugaagccgaggacuucguggaaguccaucucccagaugugcacaaacaggucucugacguggaccuggguuuaccgagcugggggaaguaucugcuaaugucagcuggcgcccucgcaacgcugauccuugcuauauuuuugauuaccugcugucggcgugccaaucgcacaaagaguacucagagaggacauagggaguccggcgggaaaguuagcguggcgccccaaaacggaaagaucaucucuucaugggaacuguacaaaagugagagcgagaccgguauguga

SEQ ID NO: 158860 - RNA, 1575 nt, Artificial Sequence
  derived and/or modified CDS sequence (opt3) from glycoprotein__RABV__AY956319.1
auggugccccaggcccugcuguucgucccucuucugguugugagcaugugcuuuggcaaguucccaaucuacaccguaccggacaaauuggggcccugguccccuauugauauacaccauuuaucuuguccaaacaaucugguggucgaggacgaaggaugcacaaaccuaucagguuuuaguuauauggagcucaaggugggcuacaucagcgcuauuaaaguuaauggguucacuuguacgggaguggucaccgaagcagagacauauacuaacuuugugggcuacguaaccacaaccuucaagagaaaacacuuuaggcccacuccugaugccugccgggcggcuuauaauuggaagauggccggugacccacgcuacgaagagucccugcauaaccccuauccugauuaccacuggcuucgaacaguuaagaccacgaaagagucucuggugaucauuucgccaucagucgcagacuuggauccguacgacaagagccuccauagucguguguuccccuccgggaaauguucuggaaucacuauaagcuccaccuauugcucaacaaaucacgauuacacuaucuggaugccugaaaacccaagacugggcaccaguugugacauuuuuacaaauagcaggggcaagcgggccucuaaagggggaaagaccugcgguuucguggaugagcgcggccuguauaagucccucaaaggggcuuguaaguuaaaacugugcggaguccuuggcuugagacugauggacgguacguggguugcaaugcaaacuucagaugaaacaaaguggugucccccugaccagcuagugaaccuccacgacuuuaggagcgaugagaucgagcaucugguaguggaggaacuugucaaaaagcgggaagagugccuggacgccuuggaaaguauuaugaccacuaaaucuguguccuuccgccgacucagccaccugagaaaguuaguuccaggguuuggaaaggcuuacacaaucuucaauaaaacccugauggaggccgaugcgcauuauaagucggugaggacguggaacgagauaauucccucuaaaggcugccuccgggucggcgggcguugucacccgcacgugaauggaguauucuuuaacgguaucauucuuggcccugacgggcauguucugauccccgaaaugcaguccucauugcuacagcaacacauggagcugcucgaaaguagcgugaucccacugaugcauccucuugcagaucccuccaccgucuucaaggacggagaugaggccgaagacuuuguggagguccaccucccagaugugcauaaacagguuucuggcguggacuugggucuccccagcugggggaaguacguacuggucucagcuggcguguuaguugugcugaugcuaacaauuuucauaaugacuugcugucgcagaguccacaggccuaagaguacccagcacggacucggcgggacaggacggaaaguguccguaacuagccagucugguaaggugaucucaaguugggagagcuauaaauccggcggggaaacccgacuguga

SEQ ID NO: 158861 - RNA, 1575 nt, Artificial Sequence
  derived and/or modified CDS sequence (opt3) from glycoprotein__RABV__DQ074978.1
auggugccccaggcccuccuguucgucccucuucugguuuuuccauugugcuucggcaaguuuccgaucuacaccauucccgacaaauuagggccuuggagcccaauagauauccaccaucuguccugucccaacaaucuagugguagaggacgaaggaugcacaaaccucucugguuucucauauauggagcugaaggugggcuacauuagugcuaucaaaaugaauggguuuacuuguacgggagucgugaccgaagcagagacauauacuaacuucguuggcuacgugaccacaaccuuuaagagaaaacacuucaggccuacuccagaugccugccgggcggcuuauaauuggaagauggccggugacccccgcuacgaagagagccuucauaacccuuauccagauuaccacuggcugcgaacagucaagaccacgaaagaguccuuggugauuaucucuccgucgguagcagaccucgaucccuacgacauaucacugcauagccguguuuuuccugggggaaauuguaguggcguggccgucuccucuacuuauugcagcaccaaccacgauuacacaaucuggaugccagaaaaucccagacugggcauguccugugacauuuucacuaacucaagggggaagcgggagaguaaaggaagcgaaaccugcgguuuuguggaugagcgcggccucuauaagucuuuaaaaggggcuuguaagcugaaacuuugcggaguguugggccugagacuaauggacgguacaugggucgcaaugcaaaccuccaaugagacgaaaugguguccuccagggcagcucguuaaccugcacgauuucaggucagacgaaaucgagcaucuugugguagaggaacuggugcggaagcgcgaagagugcuuggacgcccucgagagcauuaugacuacaaaaagugucucuuuucgaagacugucccacuuaaggaagcuggugcccggauucggcaaggcuuacaccaucuucaauaagacucucauggaagccgaugcgcauuauaaaagcguucggacauggaacgagauaauuccgucgaagggcugccuucgugucgggggacgcugucacccucacgugaaugguguguuuuucaacggcaucauucuggggcccgacggaaacguauugaucccagaaaugcagucuucccuacugcagcaacauauggagcuccugguuucaagugugaucccucuuaugcacccccuggcagauccaagcaccgucuuuaagaauggcgacgaagccgaggauuucguggagguccauuugcccgacgugcacgaaagaauuuccgguguugaucucgggcugccuaacuggggcaaauacguguuacugucugcuggagcccuaacggcacucaugcugauaaucuuucuuaugaccugcuggaggcggguaaaucgaagcgagccaacacagcauaacuugcgcggcacugggagagaagucucagugaccccgcagaguggaaagauuaucuccagcugggagucucacaaaucagguggcgaaacaaggcuguga

SEQ ID NO: 158862 - RNA, 1575 nt, Artificial Sequence
  derived and/or modified CDS sequence (opt3) from glycoprotein__RABV__DQ076093.1
auggugccccaggcccuccuguucgucccucuucugguuuuuagcaugugcuucggcaaguuuccaaucuacaccauuccggacaaauuggggcccugguccccuauagauauccaccauuuaucuuguccaaacaaucuggugguagaggacgaaggaugcacaaaccuaucagguuucaguuauauggagcucaaggugggcuacauuagcgcuaucaaagucaauggguuuacuuguacgggagugguuaccgaagcagagacauauacuaacuucgugggcuacgucaccacaaccuuuaagagaaaacacuucaggcccacuccugaugccugccgggcggcuuauaauuggaagauggccggugacccacgcuacgaagagucccugcauaaccccuauccugauuaccacuggcuucgaacagugaagaccacgaaagagucucugguaauuaucucgccaucaguugcagacuuggauccguacgacaagagccuccauagucguguguuucccaaugggaaauguuccggaauaacuaucucuagcaccuauugcccuacaaaccacgauuacacuauuuggcugccagaaaaucccagacugggcaccuccugugacaucuucacaaacucaaggggcaagcgggccaguaaagggagcaagaccugcggauuugucgaugagcgcggucucuauaagucuuuaaaaggcgcuuguaagcugaaacuuugcgggguguugggacugagacuaauggacggcacguggguggcaaugcaagccuccgaugaaacuaagugguguccuccagaccagcucgucaaucugcacgacuucaggucagaugagauugagcaucuuguuguggaggaacuggugaaaaagcgggaagagugcuuggacgcucucgaaagcaucaugacaaccaaaaguguaucuuuucgccgacugucccacuuaagaaagcugguccccgguuucgggaaggccuacacuauauucaacaaaacacucauggaggcggaugcacauuauaagagcgugaggaccuggaaugagauuaucccgucgaaaggaugccuucggguuggcggccguugucacccucacgugaacggggucuuuuucaauggaauuauccugggucccgacggccauguguugaucccagaaaugcagucuucccuacugcagcaacacauggagcuccuggaaucaaguguaauuccucuuaugcauccccuggccgauccaagcacgguuuuuaaggacggggaugaggcugaaaacuucguggagguccacuugcccgacgugcauaaacagauauccggagucgaucucggccugccuaacugggguaaguacguguuaguuucugccggggugcugaucgcacuaaugcucauuaucuuucugaugaccugcuguggccgcguaaauagaccaaagagcacacagcacaaccuuggaggcacugggaggaaagucucagugaccccgcagaguggaaagguuauauccagcugggagucuuauaaaucagguggcgggacacgguuguga

SEQ ID NO: 158863 - RNA, 1575 nt, Artificial Sequence
  derived and/or modified CDS sequence (opt3) from glycoprotein__RABV__DQ076096.1
auggugccccaggcccuccuguucgucccucuucugguuuuuagcaugugcuucggcaaguuuccaaucuacaccauuccggacaaauuggggcccugguccccuauagauauccaccauuuaucuuguccaaacaaucuggugguagaggacgaaggaugcacaaaccuaucagguuucaguuauauggagcucaaggugggcuacauuagcgcuaucaaagucaauggguuuacuuguacgggagugguuaccgaagcagagacauauacuaacuucgugggcuacgucaccacaaccuuuaagagaaaacacuucaggcccacuccugaugccugccgggcggcuuauaauuggaagauggccggugacccacgcuacgaagagucccugcauaaccccuauccugauuaccacuggcuucgaacagugaagaccacgaaagagucucugguaauuaucucgccaucaguugcagacuuggauccguacgacaagagccuccauagucguguguuucccaaugggaaauguuccggaauaacuaucucuagcaccuauugcccuacaaaccacgauuacacuauuuggcugccagaaaaucccagacugggcaccuccugugacaucuucacaaacucaaggggcaagcgggccaguaaagggagcaagaccugcggauuugucgaugagcgcggucucuauaagucuuuaaaaggcgcuuguaagcugaaacuuugcgggguguugggacugagacuaauggacggcacguggguggcaaugcaagccuccgaugaaacuaagugguguccuccagaccagcucgucaaucugcacgacuucaggucagaugagauugagcaucuuguuguggaggaacuggugaaaaagcgggaagagugcuuggacgcucucgaaagcaucaugacaaccaaaaguguaucuuuucgccgacugucccacuuaagaaagcugguccccgguuucgggaaggccuacacuauauucaacaaaacacucauggaggcggaugcacauuauaagagcgugaggaccuggaaugagauuaucccgucgaaaggaugccuucggguuggcggccguugucacccucacgugaacggggucuuuuucaauggaauuauccugggucccgacggccauguguugaucccagaaaugcagucuucccuacugcagcaacacauggagcuccuggaaucaaguguaauuccucuuaugcauccccuggccgauccaagcacgguuuuuaaggacggggaugaggcugaaaacuucguggagguccacuugcccgacgugcauaaacagauauccggagucgaucucggccugccuaacugggguaaguacguguuaguuucugccggggugcugaucgcacuaaugcucaccauuuuucugaugacaugcuguggccgcguaaauagaccaaagagcacucagcacaaccuuggaggcaccgggaggaaagucucagugacaccgcagaguggaaagguuaucuccagcugggagucuuauaaaucagguggcgggacucgguuguga

SEQ ID NO: 158864 - RNA, 1575 nt, Artificial Sequence
  derived and/or modified CDS sequence (opt3) from glycoprotein__RABV__DQ076097.1
auggugccccaggcccuccuguucgucccucuucugguuuuuagcaugugcuucggcaaguuuccaaucuacaccauuccggacaaauuggggcccugguccccuauagauauccaccauuuaucuuguccaaacaaucuggugguagaggacgauggaugcacaaaccuaucagguuucaguuauauggaacucaaggugggcuacauuagcgcuaucaaagucaauggguuuacuuguacgggagugguuaccgaggcagaaacauauacuaacuucgugggcuacgucaccacaaccuuuaagagaaaacacuucaggcccacuccugacgccugccgggcggcuuauaauuggaagauggccggugauccacgcuacgaggaaucccugcauacacccuauccugacuaccacuggcuucgaaccgugaagacgacuaaagagucucugguaauuaucucgccaucaguugcagauuuggacccguacgauaagagccuccauagucguguguuucccaacgggaaauguuccggaauaaccaucucuagcacauauugcccuacuaaucacgacuacaccauuuggcugccagagaaccccagacugggcacauccugugauaucuucaccaauucaaggggcaagcgggccaguaaagggagcaagacgugcggauuugucgacgaacgcggucucuauaagucuuuaaaaggcgcuuguaagcugaaacuuugcgggguguugggacugagacuaauggauggcacuuggguggcaaugcaagccuccgacgagacaaagugguguccuccagaccagcucgucaaccugcacgauuucaggucagacgaaauugagcaucuuguuguggaggaacuggugaaaaagcgggaggaaugcuuggaugcucucgagagcaucaugaccacuaaaaguguaucuuuucgccgacugucccacuuaagaaagcugguccccgguuucgggaaggccuacacaauauucaauaaaacccucauggaagcggacgcacauuauaagagcgugaggacguggaacgagauuaucccgucgaaaggaugccuucggguuggcggccguugucacccucacgugaauggggucuuuuucaacggaauuauccugggucccgauggccauguguugaucccagagaugcagucuucccuacugcagcaacacauggaacuccuggagucaaguguaauuccucuuaugcauccccuggccgacccaagcaccguuuuuaaggauggggacgaagcugagaauuucguggaaguccacuugcccgaugugcauaaacagauauccggagucgaccucggccugccuaacugggguaaguacguguuaguuucugccggggugcugaucgcacuaaugcucauuaucuuucugaugacaugcuguggccgcguaaacagaccaaagagcacucagcacaaucuuggaggcaccgggaggaaagucucagugacaccgcagaguggaaagguuauauccagcugggagucuuauaaaucagguggcgggacucgguuguga

SEQ ID NO: 158865 - RNA, 1575 nt, Artificial Sequence; identical to SEQ ID NO: 158862
  derived and/or modified CDS sequence (opt3) from glycoprotein__RABV__DQ076098.1

SEQ ID NO: 158866 - RNA, 1575 nt, Artificial Sequence
  derived and/or modified CDS sequence (opt3) from glycoprotein__RABV__DQ076099.1
auggugccccaggcccuccuguucaucccucuucuggucuuuccaaugugcuucggcaaguuuccgauuuacaccauacccgacaaauuggggccuuggagcccaaucgauauucaccauuuauccugucccaacaaucugguuguggaggacgaagagugcacaaaccuaucuggauucucauauauggaacucaagguagguuacaucagugcuauuaaagugaauggcuuuacuuguacgggggucgugaccgaggcagaaacauauacuaacuucguuggauacgugaccacaaccuuuaagagaaaacacuucaggccuacuccagaugccugccgggcggcuuauaauuggaagauggccggcgacccccgcuacgaggagagccugcauaacccuuauccagauuaccacuggcuucgaacagucaagaccacgaaagaaucccuggugaucauaucuccgucgguagcagacuuggaucccuacgacaagucacuccauagccguguuuuuccuaaugguaaauguagugggaucacuauuuccucuaccuauugcccaacaaaccacgauuacacuaucuggcugcccgagaauccuagacugggaaccagcugugacauuuucgccaacuccaggggcaagcgggcuucaaaaggcaguaagacaugcggguuuguggaugaacgcggacucuauaagagcuuaaaaggugcauguaagcugaaacuuugcggcgucuuggggcugagacuaauggacggaaccuggguggccaugcaaacgucugaugagacuaagugguguccacccgaccagcucgugaaucugcacgacuucagguccgaugagaucgaacaucuugucguugaggaacuggugaaaaagcgggaggaaugcuuggacgcucucgagucaauaaugacaaccaaaagcguaaguuuucgccgacugucucacuuaagaaagcuggugccgggcuucgguaaggccuacacuauuuucaacaaaacacucauggaggcggaugcacauuauaaguccgucaggaccuggaaugaaaucauuccuagcaaagggugccuucgggugggaggccguugucacccccacguuaacggcguguuuuucaaugggaucauccugggacaugacggucacgucuugauuccagagaugcagucgucucuacugcagcaacauauggaacuccuggaguccucagugauaccucuuaugcacccccuggccgauccaaguacgguauuuaaggacggcgaugaagcugaggacuucguugaggugcauuugcccgauguccacaaacagaucagcgggguggaccucggacugccuaacuggggcaaguacgucuuaguguccgccgguguucugauugcacuaaugcucaucauauuucugaugaccugcugugggcgcgugaacagaccaaagucuacacagcacaaucuuggcgaaacuggaaggaaaguaagcgucaccucacagaguggcaaggugauuuccagcugggagucuuauaaaucagggggagguacacgguuguga

SEQ ID NO: 158867 - RNA, 1575 nt, Artificial Sequence
  derived and/or modified CDS sequence (opt3) from glycoprotein__RABV__DQ076100.1
auggugccccaggcccuccuguucgucccucuucugguuuuuagcaugugcuucggcaaguuuccaaucuacaccauuccggacaaauuggggcccugguccccuauagauauccaccauuuaucuuguccaaacaaucuggugguagaggacgaaggaugcacaaaccuaucagguuucaguuauauggagcucaaggugggcuacauuagcgcuaucaaagucaauggguuuacuuguacgggagugguuaccgaagcagagacauauacuaacuucgugggcuacgucaccacaaccuuuaagagaaaacacuucaggcccacuccugaugccugccgggcggcuuauaauuggaagauggccggugacccacgcuacgaagagucccugcauaaccccuauccugauuaccacuggcuucgaacagugaagaccacgaaagagucucugguaauuaucucgccaucaguugcagacuuggauccguacgacaagagccuccauagucguguguuucccaaugggaaauguuccggaauaacuaucucuagcaccuauugcccuacaaaccacgauuacacuauuuggcugccagaaaaucccagacugggcaccuccugugacaucuucacaaacucaaggggcaagcgggccaguaaagggagcaagaccugcggauuugucgaugagcgcggucucuauaagucuuuaaaaggcgcuuguaagcugaaacuuugcgggguguugggacugagacuaauggacggcacguggguggcaaugcaaacuuccgaugaaacaaagugguguccuccagaccagcucgucaaucugcacgacuucaggucagaugagauugagcaucuuguuguggaggaacuggugaaaaagcgggaagagugcuuggacgcccucgaaagcaucaugaccacuaaaaguguaucuuuucgccgacugucccacuuaagaaagcugguccccgguuucgggaaggcuuacacaauauucaacaaaacccucauggaggccgaugcgcauuauaagagcgugaggacguggaaugagauuaucccgucgaaaggaugccuucggguuggcggccguugucacccucacgugaacggggucuuuuucaauggaauuauccugggucccgacggccauguguugaucccagaaaugcagucuucccuacugcagcaacacauggagcuccuggaaucaaguguaauuccucuuaugcauccccuggcagauccaagcaccguuuuuaaggacggggaugaggccgaagacuucguggagguccacuugcccgaugugcauaaacagauauccggagucgaccucggccugccuaacugggguaaguacguguuaguuucugcuggggugcugaucgcccuaaugcucauuaucuuucugaugacaugcuguggccgcguaaacagaccaaagagcacucagcacaaucuuggaggcaccgggaggaaagucucagugacaagucaguccggaaagguuauaagcucuugggagucauauaaaagugguggcgaaacucgguuguga

SEQ ID NO: 158868 - RNA, 1575 nt, Artificial Sequence
  derived and/or modified CDS sequence (opt3) from glycoprotein__RABV__DQ076102.1
auggugccccaggcccuccuguucgucccucuucugguuuuuagcaugugcuucggcaaguuuccaaucuacaccauuccggacaaauuggggcccugguccccuauaggaauccaccauuuaucuuguucaaacaaucuggugguagaggaugaagguugcacaaaccuaaguggcuucagcuauauggagcucaaggugggguacauuuccgcuaucaaagucaauggauuuacuuguacgggcgugguuaccgaagcagagacauauacuaacuucguggguuacgucaccacaaccuuuaagagaaaacacuucaggccaacucccgacgccugccgggcggcuuauaauuggaagauggccggggauccucgcuacgaagagucucugcauaacccauaucccgacuaccacuggcuucgaacagugaagaccacgaaagagucgcugguaauuaucucaccuagcguugcagauuuggacccauacgauaagagucuccauucccguguguuuccgaauggaaaauguucuggcauaacuaucagcuccaccuauugccccacaaaccacgacuacacuauuuggcugccugaaaauccaagacugggcaccucaugugauaucuucacaaacaguagggggaagcgggccagcaaaggaucuaagaccugcgguuuugucgacgagcgcggccucuauaaguccuuaaaaggggcuuguaagcugaaacuuugcggaguguugggccugagacuaauggaugguacguggguggcaaugcaaacuucagacgaaacaaaguggugucccccugaucagcucgucaaucugcacgacuucaggagcgacgagauugagcaucuuguuguggaggaacuggugaaaaagcgggaagagugcuuggaugcccucgaaaguaucaugaccacuaaaucuguauccuuucgccgacugagccacuuaagaaagcuggucccaggguucggaaaggcuuacacaauauucaacaaaacccucauggaggccgacgcgcauuauaagucggugaggacguggaaugagauuauccccucuaaaggcugccuucggguuggcgggcguugucacccgcacgugaacggagucuuuuucaaugguauuauccugggcccugaugggcauguguugauccccgaaaugcaguccucacuacugcagcaacacauggagcuccuggaaaguagcguaauuccacuuaugcauccucuggcagaccccuccaccguuuuuaaggauggagacgaggccgaagauuucguggagguccacuugccagacgugcauaaacagauaucuggcgucgaucucggucugcccaacugggggaaguacguguuaguuagcgcuggcgugcugaucgcccuaaugcucauuaucuuucugaugacaugcuguggacgcguaaacagaccuaagucaacucagcacaaucuuggcgggaccggaaggaaagucagugugacaucccagagcgguaagguuauaucuucaugggagaguuauaaaagcggcggggaaacucgguuguga

SEQ ID NO: 158869 - RNA, 1575 nt, Artificial Sequence
  derived and/or modified CDS sequence (opt3) from glycoprotein__RABV__DQ076103.1
auggugccccaggcccuccuguucgucccucuucugguuuuuagcaugugcuucggcaaguuuccaaucuacaccauuccggacaaauuggggcccugguccccuauagauauccaccauuuaucuuguccaaacaaucuggugguagaggacgaaggaugcacaaaccuaucagguuucaguuauauggagcucaaggugggcuacauuagcgcuaucaaagucaauggguuuacuuguacgggagugguuaccgaagcagagacauauacuaacuccgugggcuacgucaccacaaccuucaagagaaaacacuuuaggcccacuccugaugccugccgggcggcuuauaauuggaagauggccggugacccacgcuacgaagagucucugcauaaccccuauccugauuaccacuggcuucgaacagugaagaccacgaaagagucgcugguaauuaucucaccaagcguugcagacuuggauccguacgacaagagucuccauucccguguguuccccaaugggaaauguucuggaauaacuaucagcuccaccuauugcccuacaaaccacgauuacacuauuuggcugccagaaaaucccagacugggcaccucaugugacaucuuuacaaacaguaggggcaagcgggccagcaaagggucuaagaccugcggauucgucgaugagcgcggucucuauaaguccuuaaaaggcgcuuguaagcugaaacuuugcgggguguugggacugagacuaauggacggcacguggguggcaaugcaaacuucagaugaaacaaagugguguccuccagaccagcucgucaaucugcacgacuuuaggagcgaugagauugagcaucuuguuguggaggaacuggugaaaaagcgggaagagugcuuggacgcccucgaaaguaucaugaccacuaaaucuguauccuuccgccgacugagccacuuaagaaagcugguccccgguuuugggaaggcuuacacaauauucaacaaaacccucauggaggccgaugcgcauuauaagucggugaggacguggaaugagauuaucccgucuaaaggaugccuucggguuggcggccguugucacccucacgugaacggggucuucuuuaauggaauuauccugggucccgacggccauguguugaucccagaaaugcaguccucacuacugcagcaacacauggagcuccuggaaaguagcguaauuccucuuaugcauccccuggcagauccauccaccguuuucaaggacggggaugaggccgaagacuuuguggagguccacuugcccgaugugcauaaacagauaucuggagucgaccucggccugccuaacugggguaaguacguguuaguuagcgcuggggugcugaucgcccuaaugcucauuaucuuccugaugacaugcuguggccgcguaaacagaccaaagucaacucagcacaaucuuggaggcaccgggaggaaagucagugugacaucccagagcggaaagguuauaucuucaugggagaguuauaaaagcgguggcgaaacucgguuguga

SEQ ID NO: 158870 - RNA, 1575 nt, Artificial Sequence
  derived and/or modified CDS sequence (opt3) from glycoprotein__RABV__DQ076104.1
auggugccccaggcccuccuguucgucccucuucugguuuuuagcaugugcuucggcaaguuuccaaucuacaccauuccggacaaauuggggcccugguccccuauagauauccaccauuuaucuuguccaaacaaucuggugguagaggacgaaggaugcacaaaccuaucagguuucaguuauauggagcucaaggugggcuacauuagcgcuaucaaagucaauggguuuacuuguacgggagugguuaccgaagcagagacauauacuaacuucgugggcuacgucaccacaaccuuuaagagaaaacacuucaggcccacuccugaugccugccggacagcguauaauuggaagauggcuggugacccacgcuacgaagagucccugcauaaccccuauccugauuaccacuggcuucgaaccgugaagacgacuaaagagucucugguaauuaucucgccaucaguugccgacuuggauccguacgacaagagccuccauagucguguguuucccaaugggaaauguuccggaauaaccaucucuagcacauauugcccuacuaaccacgauuacaccauuuggcugccagaaaaucccagacugggcacauccugugacaucuucaccaacucaaggggcaagcgggcaaguaaagggagcaagacgugcggauuugucgaugagcgcggucucuauaagucuuuaaaaggcgccuguaagcugaaacuuugcgggguguugggacugagacuaauggacggcacuuggguggcuaugcaaacauccgaugaaaccaagugguguccuccagaccagcucgucaaucugcacgacuucaggucagaugagauugagcaucuuguuguggaggaacuggugaaaaagcgggaagagugcuuggacgcacucgaaagcaucaugacuacaaaaaguguaucuuuucgccgacugucccacuuaagaaagcugguccccgguuucgggaaggccuacaccauauucaacaaaacgcucauggaggcugaugcccauuauaagagcgugaggaccuggaaugagauuaucccgucgaaaggaugccuucggguuggcggccguugucacccucacgugaacggggucuuuuucaauggaauuauccugggucccgacggccauguguugaucccagaaaugcagucuucccuacugcagcaacacauggagcuccuggaaucaaguguaauuccucuuaugcauccccuggcggauccaagcacaguuuuuaaggacggggaugaggcagaagacuucguggagguccacuugcccgaugugcauaaacagauauccggagucgaccucggccugccuaacugggguaaguacguguuaguuucugccggggugcugaucgcucuaaugcucauuaucuuucugaugacuugcuguggccgcguaaacagaccaaagagcacccagcacaaucuuggaggcacagggaggaaagucucagugaccagucaguccggaaagguuauaagcucuugggagucauauaaaagugguggcgaaacucgguuguga

SEQ ID NO: 158871 - RNA, 1575 nt, Artificial Sequence
  derived and/or modified CDS sequence (opt3) from glycoprotein__RABV__DQ076105.1
auggugccccaggcccuucucuucgucccucuucugguuuuuagcaugugcuucggcagauuuccaaucuacaccauuccggacaaguuggggcccugguccccuauagauauccaccauuuaucuuguccaaacaaucuggugguagaggacgaaggaugcacaaaccuaucagguuucaguuauauggagcucaaagugggcuacauuagcgcuaucaaggucaauggguuuacuuguacgggagugguuaccgaagcagagacauauacuaacuucgugggcuacgucaccacaaccuuuaaaaggaagcacuuccggcccacuccugaugccugccgcgcggcuuauaauuggaaaauggccggugacccacgauacgaagagucccugcauaaccccuauccugauuaccacuggcuucguacagugaagaccacgaaggagucucugguaauuaucucgccaucaguugcagacuuggauccguacgacaaaagccuccauaguagaguguuucccaaugggaaguguuccggaauaacuaucucuagcaccuauugcccuacaaaccacgauuacacuauuuggcugccagaaaaucccaggcugggcaccuccugugacaucuucacaaacucacggggcaaacgcgccaguaaggggagcaaaaccugcggauuugucgaugagagaggucucuauaagucuuuaaagggcgcuuguaaacugaagcugugcgggguguugggacugaggcuaauggacggcacguggguggcaaugcaaacuuccgaugaaacaaaaugguguccuccagaccagcucgucaaucugcacgacuuccggucagaugagauugagcaucuuguuguggaggaacugguaaagaaacgcgaagagugcuuggacgcccucgaaagcaucaugaccacuaagagugugucuuuucgaagacugucccacuuaaggaaacugguccccgguuucgggaaggcuuacacaauauucaacaagacccucauggaggccgaugcgcauuauaaaagcgugcggacguggaaugagauuaucccgucgaagggaugccuucguguuggcggccgcugucacccucacgugaacggggucuuuuucaauggaauuauccugggucccgacggccauguguugaucccagaaaugcagucuucccuacugcagcaacacauggagcuccuggaaucaaguguaauuccucuuaugcauccccuggcagauccaagcaccguuuuuaaagacggggaugaggccgaagacuucguggagguccacuugcccgaugugcauaagcagauauccggagucgaccucggccugccuaacugggguaaauacguguuaguuucugcuggggugcugaucgcccuaaugcucaugauuuuucugaugacaugcuguggcagaguaaacaggccaaagagcacucagcacaaucuuggaggcaccgggcggaaggucucagugacaagucaguccggaaaaguuaucagcucuugggagucauauaagagugguggcgaaacucgauuguga

SEQ ID NO: 158872 - RNA, 1575 nt, Artificial Sequence
  derived and/or modified CDS sequence (opt3) from glycoprotein__RABV__DQ849044.1
augaucccccaggugcuccuguucgucccucuucugguuuuuagcuccugcuucggcaaguuuccaauuuacaccauaccggacaaauuggggcccuggucuccuaucgauauucaccauuuaucauguccaaacaaucuggugguagaggacgaaggaugcacaaaccuaagugguuucagcuauauggagcucaaggugggcuacaucuccgccauuaaagucaauggguuuacuuguacgggagugguuaccgaagcugagacauauacuaacuucgugggcuacgucaccacaaccuuuaagagaaaacacuucaggcccacuccugaugcaugccgggccgcguauaauuggaagauggcuggugacccacgcuacgaagagucucugcauaaccccuauccugauuaccacuggcuucgaacagugaagaccucgaaagagucacugguaaucauaagcccaaguguugccgacuuggauccguacgacaagucccuccauucucguguguuucccgggggaaaauguagcggcaucacggucuccucaacuugcuguaguaccaaucacgauuauacaauuuggaugccugaaaacccaagacugggcacuagcugcgacaucuucaccaauucuagggggaagcgggcauccaaaggagguaagacauguggcuuuguggaugagcgcgggcuguacaagucaauuaaaggagccugcaagcucaaauuauguggcgugcugggucuuagauugauggacgggaccugggucgcuauccaaacgagcgaugaaauaaaguggugcagucccgaccagcugguuaaccuacacgacuuccauucugaugagauugagcaccucgugguagaggaacuggugaaaaagagggaagagugccuugacgcacuggaaacuaucaugacaaccaaauccgucagcuuucggcgcuugucgcaucuccgaaagcuggugccuggauucggcaaggccuauacuauuuucaauaaaacauuaauggaggcugaugcccacuacaagucuaucagaaccuggaacgagaucauuccauccaaaggcugucugaggguugggggacggugccacccccaugugaauggugucuuuuucaacggcauaauccucgggccggacggacacgugcuuauuccugaaaugcagucaagucuguugcaucagcacauggagcuacuggaaagcuccguaaucccccucaugcauccacuggcggauccuucuacgguuuuuaaggacggcgaugaggcagaagacuucguggagguccaccuucccgaugugcacaaacaaauaagcggugucgaccugggguugccaaauuggggcaaguaugugcucguuucagccggagcucugaccgccuuaaugcugaugauuuuucuaaugacauguugccguaagacuaaccgcgcagagaguauccagcauucccccggcgaaaccgggagaaaagugagcguaacaucucacaacggaagggucaucucaaguugggagagcuacaaguccgguggcgaaacuaaacucuga

SEQ ID NO: 158873 - RNA, 1575 nt, Artificial Sequence
  derived and/or modified CDS sequence (opt3) from glycoprotein__RABV__DQ849045.1
augaucccccaggugcugcuguucgucccucuucugguuuuuagcuccugcuucggcaaguuuccaauuuacaccauaccggacaaauuggggcccuggucuccuaucgauauucaccauuuaucauguccaaacaaucuggugguagaggacgaaggaugcacaaaccuaagugguuucagcuauauggagcucaaggugggcuacaucuccgccauuaaagucaauggguuuacuuguacgggagugguuaccgaagcugagacauauacuaacuucgugggcuacgucaccacaaccuuuaagagaaaacacuucaggcccacuccugaugcaugccgggccgcguauaauuggaagauggcuggugacccacgcuacgaagagucucugcauaaccccuauccugauuaccacuggcuucgaacagugaagaccucgaaagagucacugguaaucauaagcccaaguguugccgacuuggauccguacgacaagucccuccauucucguguguuucccgggggaaaauguagcggcaucacggucuccucaacuugcuguuucaccaaucacgauuauacaauuuggaugccugaaaacccaagacugggcaccaguugcgacaucuuuacuaauagcagggggaagcgggcaucuaaaggagguaagacauguggcuucguggaugagcgcgggcuguacaagucccucaaaggagccugcaaguuaaaacuguguggcgugcuugguuugagacugauggacgggaccugggucgcuauucaaacgucagaugaaaucaaguggugcagccccgaccagcuaguuaaccuccacgacuuucauagugaugagauagagcaccuggugguagaggaacuugugaaaaagagggaagagugccuggacgcauuggaaacuauuaugacaaccaaaucugucuccuuccggcgccucagccaucugcgaaaguuagugccuggauucggcaaggccuauacuaucuuuaauaaaacacugauggaggcugaugcccacuacaagucgauuagaaccuggaacgagaucaucccaucuaaaggcugucucaggguugggggacggugccacccccaugugaauggugucuucuuuaacggcauuauacuugggccggacggacacgugcugaucccugaaaugcaguccucauugcuacaucagcacauggagcugcucgaaaguagcguaauuccccugaugcauccacuugcggauccuuccacgguuuucaaggacggcgaugaggcagaagacuuuguggagguccaccuccccgaugugcacaaacaaaucucuggugucgacuuggggcucccaaauuggggcaaguaugugcugguuagcgccggagcuuuaaccgcccugaugcuaaugauauuccucaugacauguugccguaagacuaaccgcgcagagucaauucagcauagucccggcgaaaccgggagaaaaguguccguaacaagccacaacggaagggucaucucuucaugggagaguuacaagagcgguggcgaaacuaaacuguga

SEQ ID NO: 158874 - RNA, 1575 nt, Artificial Sequence
  derived and/or modified CDS sequence (opt3) from glycoprotein__RABV__DQ849046.1
augaucccccaggugcugcuguucgucccucuucugguuuuuagcuccugcuucggcaaguuuccaauuuacaccauaccggacaaauuggggcccuggucuccuaucgauauucaccauuuaucauguccaaacaaucuggugguagaggacgaaggaugcacaaaccuaagugguuucagcuauauggagcucaaggugggcuacaucuccgccauuaaagucaauggguuuacuuguacgggagugguuaccgaagcugagacauauacuaacuucgugggcuacgucaccacaaccuuuaagagaaaacacuucaggcccacuccugaugcaugccgggccgcguauaauuggaagauggcuggugacccacgcuacgaagagucucugcauaaccccuauccugauuaccacuggcuucgaacagugaagaccucgaaagagucacugguaaucauaagcccaaguguugccgacuuggauccguacgacaagucccuccauucucguguguuucccgggggaaaauguagcggcaucacggucuccucaacuugcuguuucaccaaucacgaauauacaauuuggaugccugagaacccaagacugggcaccaguugcgauaucuuuacuaauagcagggggaagcgggcaucuaaaggagguaagacauguggcuucguggacgaacgcgggcuguacaagucccucaaaggagccugcaaguuaaaacuguguggcgugcuugguuugagacugauggaugggaccugggucgcuauucaaacgucagacgagaucaaguggugcagccccgaucagcuaguuaaccuccacgacuuucauagugacgagauagaacaccuggugguagaggaacuugugaaaaagagggaggaaugccuggaugcauuggagacuauuaugacaaccaaaucugucuccuuccggcgccucagccaucugcgaaaguuagugccuggauucggcaaggccuauacuaucuuuaauaaaacacugauggaggcugacgcccacuacaagucgauuagaaccuggaacgaaaucaucccaucuaaaggcugucucaggguugggggacggugccacccccaugugaauggugucuucuuuaacggcauuauacuugggccggauggacacgugcugaucccugagaugcaguccucauugcuacaucagcacauggaacugcucgagaguagcguaauuccccugaugcauccacuugcggacccuuccacgguuuucaaggauggcgacgaagcagaggauuuuguggagguccaccuccccgacgugcacaaacaaaucucuggugucgauuuggggcucccaaauuggggcaaguaugugcugguuagcgccggagcuuuaaccgcccugaugcuaaugauauuccucaugacauguugccguaagacuaaccgcgcagaaucaauucagcauagucccggcgagaccgggagaaaaguguccguaacaagccacaacggaagggucaucucuucaugggaaaguuacaagagcgguggcgagacuaaacuguga

SEQ ID NO: 158875 - RNA, 1575 nt, Artificial Sequence
  derived and/or modified CDS sequence (opt3) from glycoprotein__RABV__DQ849047.1
augaucccccaggugcugcuguucgucccucuucugguuuuuagcuccugcuucggcaaguuuccaauuuacaccauaccggacaaauuggggcccuggucuccuaucgauauucaccauuuaucauguccaaacaaucuggugguagaggacgaaggaugcacaaaccuaagugguuucagcuauauggagcucaaggugggcuacaucuccgccauuaaagucaauggguuuacuuguacgggagugguuaccgaagcugagacauauacuaacuucgugggcuacgucaccacaaccuuuaagagaaaacacuucaggcccacuccugaugcaugccgggccgcguauaauuggaagauggcuggugacccacgcuacgaagagucucugcauaaccccuauccugauuaccacuggcuucgaacagugaagaccucgaaagagucacugguaaucauaagcccaaguguugccgacuuggauccguacgacaagucccuccauucucguguguuucccgggggaaaauguagcggcaucacggucuccucaacuugcuguaguaccaaucacgauuauacaauuuggaugccugaaaacccaagacugggcacuagcugcgacaucuucaccaauucuagggggaagcgggcauccaaaggagguaagacauguggcuuuguggaugagcgcgggcuguacaagucacucaaaggagccugcaaguuaaaacuguguggcgugcuugguuugagacugauggacgggaccugggucgcuauucaaacgagcgaugaaaucaaguggugcagucccgaccagcuaguuaaccuccacgacuuccauucugaugagauagagcaccuggugguagaggaacuugugaaaaagagggaagagugccuggacgcauuggaaacuauuaugacaaccaaauccgucagcuuucggcgccucucgcaucugcgaaaguuagugccuggauucggcaaggccuauacuaucuucaauaaaacacugauggaggcugaugcccacuacaagucuauuagaaccuggaacgagaucaucccauccaaaggcugucucaggguugggggacggugccacccccaugugaauggugucuuuuucaacggcauuauacuugggccggacggacacgugcugaucccugaaaugcagucaaguuugcuacaucagcacauggagcugcucgaaagcuccguaauuccccugaugcauccacuugcggauccuucuacgguuuuuaaggacggcgaugaggcagaagacuucguggagguccaccuccccgaugugcacaaacaaaucagcggugucgacuuggggcucccaaauuggggcaaguaugugcugguuucagccggagcuuuaaccgcccugaugcuaaugauauuucucaugacauguugccguaagacuaaccgcgcagagaguauucagcauucccccggcgaaaccgggagaaaagugagcguaacaucucacaacggaagggucaucucaaguugggagagcuacaaguccgguggcgaaacuaaacuguga

SEQ ID NO: 158876 - RNA, 1575 nt, Artificial Sequence; identical to SEQ ID NO: 158875
  derived and/or modified CDS sequence (opt3) from glycoprotein__RABV__DQ849048.1

SEQ ID NO: 158877 - RNA, 1575 nt, Artificial Sequence
  derived and/or modified CDS sequence (opt3) from glycoprotein__RABV__DQ849049.1
augaucccccaggugcuguuguucgucccucuucugguuuuucucagcugcuucggcaaguuuccaauuuacaccauaccggacaaauuagggcccugguccccuaucgauauucaccaucugucuuguccaaacaaucuagugguagaggacgaaggaugcacaaaccucucagguuucaguuauauggagcugaaggugggcuacaucagcgccauuaaagucaauggguuuacuuguacgggagugguuaccgaagcugagacauauacuaacuucgugggcuacgucaccacaaccuuuaagagaaaacacuucaggcccacuccugaugcaugccgggccgcguauaauuggaagauggcuggugacccacgcuacgaagagucccuucauaaccccuauccugauuaccacuggcugcgaacagugaagaccucuaaagagucguugguaaucauaucaccaagcguugccgaccucgauccguacgacaagagucugcauucccguguguuucccgggggaaaauguucuggcaucacggucagcuccacuugcuguucaaccaaucacgauuauacaauuuggaugccugaaaacccaagacugggcaccaguugcgacaucuucacuaauagcagggggaagcgggcaucuaaaggagguaagacauguggcuuuguggaugagcgcgggcucuacaaguccuuaaaaggagccugcaagcugaaacuuuguggcguguugggucugagacuaauggacgggaccugggucgcuauucaaacgucagaugaaaucaaguggugcagccccgaccagcucguuaaccugcacgacuuccauagugaugagauagagcaccuugugguagaggaacuggugaaaaagagggaagagugcuuggacgcacucgaaacuauuaugacaaccaaaucugucuccuuucggcgccugagccauuuacgaaagcuggugccuggauucggcaaggccuauacuaucuucaauaaaacacucauggaggcugaugcccacuacaagucgauuagaaccuggaacgagaucaucccaucuaaaggcugucuuaggguugggggacggugccacccccaugugaauggugucuuuuucaacggcauuauacuggggccggacggacacguguugaucccugaaaugcaguccucacuacugcaucagcacauggagcuccuggaaaguagcguaauuccccuuaugcauccacuggcggauccuuccacgguuuuuaaggacggcgaugaggcagaagacuucguggagguccacuugcccgaugugcacaaacaaaucucuggugucgaccucgggcugccaaauuggggcaaguauguguuaguuagcgccggagcucugaccgcccuaaugcucaugauauuucugaugacauguugccguaagacuaaccgcgcagagucaauucagcauagucccggcgaaaucgggagaaaaguguccguaaccagccacaacggaagggucaucucuucaugggagaguuacaagagcgguggcgaaacaaaacuuuga

SEQ ID NO: 158878 - RNA, 1575 nt, Artificial Sequence; identical to SEQ ID NO: 158875
  derived and/or modified CDS sequence (opt3) from glycoprotein__RABV__DQ849050.1

SEQ ID NO: 158879 - RNA, 1575 nt, Artificial Sequence; identical to SEQ ID NO: 158875
  derived and/or modified CDS sequence (opt3) from glycoprotein__RABV__DQ849051.1

SEQ ID NO: 158880 - RNA, 1575 nt, Artificial Sequence
  derived and/or modified CDS sequence (opt3) from glycoprotein__RABV__DQ849052.1
augaucccccaggugcugcuguucgucccucuucugguuuuuagcuccugcuucggcaaguuuccaauuuacaccauaccggacaaauuggggcccuggucuccuaucgauauucaccauuuaucauguccaaacaaucuggugguagaggacgaaggaugcacaaaccuaagugguuucagcuauauggagcucaaggugggcuacaucuccgccauuaaagucaauggguuuacuuguacgggagugguuaccgaagcugagacauaucccaacuucgugggcuacgucacuaccacauuuaagagaaaacacuucaggccuaccccagaugcaugccgggccgcguauaauuggaagauggcuggugacccccgcuacgaagagucucugcauaacccuuauccagauuaccacuggcuucgaacugugaagacaucgaaagagucacugguaaucauaagcccgaguguugccgacuuggaucccuacgacaagucccuccauucucguguguuuccugggggaaaauguagcggcaucaccgucuccucaacgugcuguuucacuaaucacgauuauaccauuuggaugccagaaaaccccagacugggcacaaguugcgacaucuuuacuaauagcagggggaagcgggcaucuaaaggagguaagaccuguggcuucguggaugagcgcgggcuguacaagucccucaaaggagccugcaaguuaaaacuguguggcgugcuugguuugagacugauggacgggacaugggucgcuauucaaaccucagaugaaaucaaguggugcagcccugaccagcuaguuaaccuccacgacuuucauagugaugagauagagcaccuggugguagaggaacuugugaaaaagagggaagagugccuggacgcauuggaaacgauuaugacuacaaaaucugucuccuuccggcgccucagccaucugcgaaaguuagugccaggauucggcaaggccuauaccaucuuuaauaaaacucugauggaggcugaugcccacuacaagucgauuagaacauggaacgagaucauccccucuaaaggcugucucaggguugggggacggugccacccgcaugugaauggugucuucuuuaacggcauuauacuugggccugacggacacgugcugauccccgaaaugcaguccucauugcuacaucagcacauggagcugcucgaaaguagcguaauuccacugaugcauccucuugcggaucccuccaccguuuucaaggacggcgaugaggcagaagacuuuguggagguccaccucccagaugugcacaaacaaaucucuggugucgacuuggggcuccccaauuggggcaaguaugugcugguuagcgccggagcuuuaacggcccugaugcuaaugauauuccucaugaccuguugccguaagacaaaccgcgcagagucaauucagcauaguccuggcgaaacugggagaaaaguguccguaaccagccacaacggaagggucaucucuucaugggagaguuacaagagcgguggcgaaacaaaacuguga

SEQ ID NO: 158881 - RNA, 1575 nt, Artificial Sequence
  derived and/or modified CDS sequence (opt3) from glycoprotein__RABV__DQ849053.1
augaucccccaggugcugcuguucgucccucuucugguuuuuagcuccugcuucggcaaguuuccaauuuacaccauaccggacaaauuggggcccuggucuccuaucgauauucaccauuuaucauguccaaacaaucuggugguagaggacgaaggaugcacaaaccuaagugguuucagcuauauggagcucaaggugggcuacaucuccgccauuaaagucaauggguuuacuuguacgggagugguuaccgaagcugagacauauacuaacuucgugggcuacgucaccacaaccuuuaagagaaaacacuucaggcccacuccugaugcaugccgggccgcguauaauuggaagauggcuggugacccacgcuacgaagagucucugcauaaccccuauccugauuaccacuggcuucgaacagugaagaccucgaaagagucacugguaaucauaagcccaaguguugccgacuuggauccguacgacaagucccuccauucucguguguuucccgggggaaaauguagcggcaucacggucuccucaacuugcuguaguaccaaucacgauuauacaauuuggaugccugaaaacccaagacugggcacuagcugcgacaucuucaccaauucuagggggaagcgggcauccaaaggagguaagacauguggcuuuguggaugagcgcgggcuguacaagucacucaaaggagccugcaaguuaaaacuguguggcgugcuugguuugagacugauggacgggaccugggucgcuauucaaacgagcgaugaaaucagguggugcagucccgaccagcuaguuaaccuccacgacuuccauucugaugagauagagcaccuggugguagaggaacuugugaagaaacgggaagagugccuggacgcauuggaaacuauuaugacaaccaaguccgucagcuuucgccgacucucgcaucugagaaaauuagugccuggauucggcaaggccuauacuaucuucaauaagacacugauggaggcugaugcccacuacaaaucuauuaggaccuggaacgagaucaucccauccaagggcugucuccggguugggggacguugccacccccaugugaauggugucuuuuucaacggcauuauacuugggccggacggacacgugcugaucccugaaaugcagucaaguuugcuacaucagcacauggagcugcucgaaagcuccguaauuccccugaugcauccacuugcggauccuucuacgguuuuuaaagacggcgaugaggcagaagacuucguggagguccaccuccccgaugugcacaagcaaaucagcggugucgacuuggggcucccaaauuggggcaaauaugugcugguuucagccggagcuuuaaccgcccugaugcuaaugauauuucucaugacauguugccgcaagacuaacagagcagagaguauucagcauucccccggcgaaaccgggaggaaggugagcguaacaucucacaacggacgggucaucucaaguugggagagcuacaaauccgguggcgaaacuaagcuguga

SEQ ID NO: 158882 - RNA, 1575 nt, Artificial Sequence
  derived and/or modified CDS sequence (opt3) from glycoprotein__RABV__DQ849054.1
augaucccccaggugcugcuguucgucccucuucugguuuuuagcuccugcuucggcaaguuuccaauuuacccgauacccgacaaauuggggccuuggucuccaaucgauauucaccauuuaucaugucccaacaaucuggugguagaggacgaaggaugcaccaaccuaagugguuucagcuauauggagcucaaggugggcuacaucuccgccauuaaagucaauggguuuacauguacuggagugguuacggaagcugagaccuauccuaacuucgugggcuacgucacaacuaccuuuaagagaaaacacuucaggccaacacccgaugcaugccgggccgcguauaauuggaagauggcuggugacccucgcuacgaagagucucugcauaacccauauccggauuaccacuggcuucgaaccgugaagacuucgaaagagucacugguaaucauaagccccaguguugccgacuuggauccuuacgacaagucccuccauucucguguguuuccagggggaaaauguagcggcaucacagucuccucaaccugcuguuucacgaaucacgauuauacuauuuggaugcccgaaaacccuagacugggcaccaguugcgacaucuuuacaaauagcagggggaagcgggcaucuaaaggagguaagacuuguggcuucguggaugagcgcgggcuguacaagucccucaaaggagccugcaaguuaaaacuguguggcgugcuugguuugagacugauggacgggaccugggucgcuauucaaacaucagaugaaaucaaguggugcagcccagaccagcuaguuaaccuccacgacuuucauagugaugagauagagcaccuggugguagaggaacuugugaaaaagagggaagagugccuggacgcauuggaaaccauuaugacgacuaaaucugucuccuuccggcgccucagccaucugcgaaaguuagugcccggauucggcaaggccuauacaaucuuuaauaaaacccugauggaggcugaugcccacuacaagucgauuagaacuuggaacgagaucaucccgucuaaaggcugucucaggguugggggacggugccacccucaugugaauggugucuucuuuaacggcauuauacuugggcccgacggacacgugcugaucccagaaaugcaguccucauugcuacaucagcacauggagcugcucgaaaguagcguaauuccucugaugcauccccuugcggauccauccacaguuuucaaggacggcgaugaggcagaagacuuuguggagguccaccuccccgaugugcacaaacaaaucucuggugucgacuuggggcucccuaauuggggcaaguaugugcugguuagcgccggagcuuuaaccgcccugaugcuaaugauauuccucaugacguguugccguaagaccaaccgcgcagagucaauucagcauaguccaggcgaaacagggagaaaaguguccguaacuagccacaacggaagggucaucucuucaugggagaguuacaagagcgguggcgaaaccaaacuguga

SEQ ID NO: 158883 - RNA, 1575 nt, Artificial Sequence
  derived and/or modified CDS sequence (opt3) from glycoprotein__RABV__DQ849055.1
augaucccccaggugcugcuguucgucccucuucugguuuuuagcuccugcuucggcaaguuuccaauuuacaccauaccggacaaauuggggcccuggucuccuaucgauauucaccauuuaucauguccaaacaaucuggugguagaggacgaaggaugcacaaaccuaagugguuucagcuauauggagcucaaggugggcuacaucuccgccauuaaagucaauggguuuacuuguacgggagugguuaccgaagcugagacauauacuaacuucgugggcuacgucaccacaaccuuuaagagaaaacacuucaggcccacuccugaugcaugccgggccgcguauaauuggaagauggcuggugacccacgcuacgaagagucucugcauaaccccuauccugauuaccacuggcuucgaacagugaagaccucgaaagagucacugguaaucauaagcccaaguguugccgacuuggauccguacgacaagucccuccauucucguguguuucccgggggaaaauguagcggcaucacggucuccucaacuugcuguuucaccaaucacgauuauacaauuuggaugccugaaaacccaagacugggcaccaguugcgacaucuuuacuaauagcagggggaagcgggcaucuaaaggagguaagacauguggcuucguggaugagcgcgggcuguacaagucccucaaaggagccugcaaguuaaaacuguguggcgugcuugguuugagacugauggacgggaccugggucgcuauucaaacgucagaugaaaucaaguggugcagccccgaccagcuaguuaaccuccacgacuuucauagugaugagauagagcaccuggugguagaggaacuugugaaaaagagggaagagugccuggacgcauuggaaacuauuaugacaaccaaaucugucuccuuccggcgccucagccaucugcgaaaguuagugccuggauucggcaaggccuauacuaucuuuaauaaaacacugauggaggcugaugcccacuacaagucgauuagaaccuggaacgagaucaucccaucuaaaggcugucucaggguugggggacggugccacccccaugugaauggugucuucuuuaacggcauuauacuugggccggacggacacgugcugaucccugaaaugcaguccucauugcuacaucagcacauggagcugcucgaaagugcgguaauuccccugaugcauccacuugcagauccuagcacgguuuucaaggacggcgaugaggccgaagacuuuguggagguccaccuccccgaugugcacaaacaaaucuccggugucgacuuggggcucccaaauuggggcaaguaugugcugguuucugcuggagccuuaaccgcacugaugcuaaugauauuccucaugacauguugccguaagacuaaccgcgcugagagcauucagcauucacccggcgaaaccgggagaaaagugaguguaacaucccacaacggaagggucaucagcucuugggagucauacaagagugguggcgaaacuaaacuguga

SEQ ID NO: 158884 - RNA, 1575 nt, Artificial Sequence
  derived and/or modified CDS sequence (opt3) from glycoprotein__RABV__DQ849056.1
augaucccccaggugcugcuguucgucccucuucugguuuuuagcuccugcuucggcaaguuuccaauuuacaccauaccggacaaauuggggcccuggucuccuaucgauauucaccauuuaucauguccaaacaaucuggugguagaggacgaaggaugcacaaaccuaagugguuucagcuauauggagcucaaggugggcuacaucuccgccauuaaagucaauggguuuacuuguacgggagugguuaccgaagcugagacauauacuaacuucgugggcuacgucaccacaaccuuuaagagaaaacacuucaggcccacuccugaugcaugccgggccgcguauaauuggaagauggcuggugacccacgcuacgaagagucucugcauaaccccuauccugauuaccacuggcuucgaacagugaagaccucgaaagagucacugguaaucauaagcccaaguguugccgacuuggauccguacgacaagucccuccauucucguguguuucccgggggaaaauguagcggcaucacggucuccucaacuuggugcaguaccaaucacgauuauacaauuuggaugccugaaaacccaagacugggcacuagcugugacaucuucaccaauucuagggggaagcgggcauccaaaggagguaagacaugcggcuuuguggaugagcgcgggcuguacaagucacucaaaggagccuguaaguuaaaacugugcggcgugcuugguuugagacugauggacgggaccugggucgcuauucaaacgagcgaugaaaucaagugguguagucccgaccagcuaguuaaccuccacgacuuccauucugaugagauagagcaccuggugguagaggaacuugugaaaaagagggaagagugccuggacgcauuggaaacuauuaugacaaccaaauccgucagcuuucggcgccucucgcaucugcgaaaguuagugccuggauucggcaaggccuauacuaucuucaauaaaacacugauggaggcugaugcccacuacaagucuauuagaaccuggaacgagaucaucccauccaaaggcugccucaggguugggggacggugucacccccaugugaauggugucuuuuucaacggcauuauacuugggccggacggacacgugcugaucccugaaaugcagucaaguuugcuacaucagcacauggagcugcucgaaagcuccguaauuccccugaugcauccacuugcggauccuucuacgguuuuuaaggacggcgaugaggcagaagacuucguggagguccaccuccccgaugugcacaaacaaaucagcggugucgacuuggggcucccaaauuggggcaaguaugugcugguuucagccggagcuuuaaccgcccugaugcuaaugauauuucucaugacaugcugucguaagacuaaccgcgcagagaguauucagcauucccccggcgaaaccgggagaaaagugagcguaacaucucacaacggaagggucaucucaaguugggagagcuacaaguccgguggcgaaacuaaacuguga

SEQ ID NO: 158885 - RNA, 1575 nt, Artificial Sequence
  derived and/or modified CDS sequence (opt3) from glycoprotein__RABV__DQ849057.1
augaucccccaggugcugcuguucgucccucuucugguuuuuagcuccugcuucggcaaguuuccaauuuacaccauaccggacaaauuggggcccuggucuccuaucgauauucaccauuuaucauguccaaacaaucuggugguagaggacgaaggaugcacaaaccuaagugguuucagcuauauggagcucaaggugggcuacaucuccgccauuaaagucaauggguuuacuuguacgggagugguuaccgaagcugagacauauacuaacuucgugggcuacgucaccacaaccuuuaagagaaaacacuucaggcccacuccugaugcaugccgggccgcguauaauuggaagauggcuggugacccacgcuacgaagagucucugcauaaccccuauccugauuaccacuggcuucgaacagugaagaccucgaaagagucacugguaaucauaagcccaaguguugccgacuuggauccguacgacaagucccuccauucucguguguuucccgggggaaaauguagcggcaucacggucuccucaacuugcuguaguaccaaucacgauuauacaauuuggaugccugaaaacccaagacugggcacuagcugcgacaucuucaccaauucuagggggaagcgggcauccaaaggagguaagacauguggcuuuguggaugagcgcgggcuguacaagucacucaaaggagccugcaaguuaaaacuguguggcgugcuugguuugagacugauggacgggaccugggucgcuauucaaacgagcgaugaaaucaaguggugcagucccgaccagcuaguuaaccuccacgacuuccauucugaugagauagagcaccuggugguagaggaacuugugaaaaagagggaagagugccuggacgcauuggaaacuauuaugacaaccaaauccgucagcuuucggcgccucucgcaucugcgaaaguuagugccuggauucggcaaggccuauacuaucuucaauaaaacacugauggaggcugaugcccacuacaagucuauuagaaccuggaacgagaucaucccauccaaaggcugucucaggguugggggacggugccacccccaugugaauggugucuuuuucaacggcauuauacuugggccggacggacacgugcugaucccugaaaugcagucaaguuugcuacaucagcacauggagcugcucgaaagcuccguaauuccccugaugcauccacuugcggauccuucuacgaucuuuaaggacggcgaugaggcagaagacuucguugaggugcaccuccccgauguccacaaacaaauaagcgguguggacuuggggcucccaaauuggggcaaguauguccuggugucagccggagcuuuaaccgcccugaugcuaaugauuuuucucaugacauguugccguaagacuaaccgcgcagagaguauccagcauucccccggcgaaaccgggagaaaaguuagcgugacaucucacaacggaaggguaaucucaaguugggagagcuacaaguccgguggcgaaacuaaacuguga

SEQ ID NO: 158886 - RNA, 1575 nt, Artificial Sequence
  derived and/or modified CDS sequence (opt3) from glycoprotein__RABV__DQ849058.1
augaucccccaggugcuccuguucgucccucuucugguuuuuagcuccugcuucggcaaguuuccaauuuacaccauaccggacaaauuggggcccuggucuccuaucgauauucaccauuuaucauguccaaacaaucuggugguagaggacgaaggaugcacaaaccuaagugguuucagcuauauggagcucaaggugggcuacaucuccgccauuaaagucaauggguuuacuuguacgggagugguuaccgaagcugagacauauacuaacuucgugggcuacgucaccacaaccuuuaagagaaaacacuucaggcccacuccugaugcaugccgggccgcguauaauuggaagauggcuggugacccacgcuacgaagagucucugcauaaccccuauccugauuaccacugggugcgaacaguaaagaccucgaaagagucacuuguuaucauaagcccaaguguggccgaccuggauccguacgacaaguccuugcauucucgugucuuucccgggggaaaauguagcggcaucacgguguccucaacuugcuguaguaccaaucacgauuauacaauuuggaugccugaaaacccaagacucggcacuagcugcgacaucuucaccaauucuagggggaagcgggcauccaaaggagguaagacauguggcuuuguggaugagcgcgggcuguacaagucacugaaaggagccugcaagcucaaauuauguggcguccugggucuuagauugauggacgggaccuggguugcuauucaaacgagcgaugaaaucaaguggugcagucccgaccagcuggugaaccuacacgacuuccauucugaugagauagagcaccucguaguggaggaacuggucaaaaagagggaagagugccuugacgcacuggaaacuauuaugacaaccaaauccgugagcuuucggcgcuugucgcaucuccgaaagcugguuccuggauucggcaaggccuauacuaucuucaauaaaacauuaauggaggcugaugcccacuacaagucuauuagaaccuggaacgagaucaucccauccaaaggcugucugagggucgggggacggugccacccccaugugaaugguguguuuuucaacggcauuauacucgggccggacggacacguacuuaucccugaaaugcagucaagucuguugcaucagcacauggagcuacuggaaagcuccguuauuccccucaugcauccacuggcggauccuucuacgguguuuaaggacggcgaugaggcagaagacuucgucgaggugcaccuucccgauguccacaaacaaaucagcgguguggaccugggguugccaaauuggggcaaguauguucucgugucagccggagcucugaccgccuuaaugcugaugauauuucuaaugacauguugccguaagacuaaccgcgcagagaguauucagcauucccccggcgaaaccgggagaaaaguaagcgucacaucucacaacggaagggugaucucaaguugggagagcuacaaguccgguggcgaaacuaaacucuga

SEQ ID NO: 158887 - RNA, 1575 nt, Artificial Sequence
  derived and/or modified CDS sequence (opt3) from glycoprotein__RABV__DQ849059.1
augaucccccaggugcugcuguucgucccucuucugguuuuuagcuccugcuucggcaaguuuccaauuuacaccauaccggacaaauuggggcccuggucuccuaucgauauucaccauuuaucauguccaaacaaucuggugguagaggacgaaggaugcacaaaccuaagugguuucagcuauauggagcucaaggugggcuacaucuccgccauuaaagucaauggguuuacuuguacgggagugguuaccgaagcugagacauauacuaacuucgugggcuacgucaccacaaccuuuaagagaaaacacuucaggcccaugccugaugcaugccgggccgcguauaauuggaagauggcuggugacccacgcuacgaagagucucugcauaaccccuauccugauuaccacuggcuucgaacugugaagacaaccaaagagucgcugguaaucauaucaccaagcguugccgacuuggauccguacgacaagagucuccauucccguguguuucccgggggaaaauguucuggcaucacggucagcuccacuugcuguucaaccaaucacgauuauacaauuuggaugccugaaaacccaagacugggcaccaguugcgacaucuucacuaauagcagggggaagcgggcaucuaaaggagguaagacauguggcuuuguggaugagcgcgggcuguacaagucccucaaaggagccugcaaguuaaaacuguguggcgugcuugguuugagacugauggacgggaccugggucgcuauucaaacgucagaugaaaucaaguggugcagccccgaccagcuaguuaaccuccacgacuuccauagugaugagauagagcaccuggugguagaggaacuugugaaaaagagggaagagugccuggacgcauuggaaacuauuaugacaaccaaaucugucuccuuucggcgccucagccaucugcgaaaguuagugccuggauucggcaaggccuauacuaucuucaauaaaacacugauggaggcugaugcccacuacaagucgauuagaaccuggaacgagaucaucccaucuaaaggcugucucaggguugggggacggugccacccccaugugaauggugucuuuuucaacggcauuauacuugggccggacggacacgugcugaucccugaaaugcaguccucauugcuacaucagcacauggagcugcucgaaaguagcguaauuccccugaugcauccacuugcggauccuuccacgguuuuuaaggacggcgaugaggcagaagacuucguggagguccaccuccccgaugugcacaaacaaaucucuggugucgacuuggggcucccaaauuggggcaaguaugugcugauaagcgccggagcuuuaaccgcccugaugucaaugauuuuucuaaugacauguugccguaagacuaaccgcgcagagaguauccagcauucccccggcgaaaccgggagaaaaguuagcgugacaucucacaacggaaggguaaucucaaguugggagagcuacaaguccgguggcgaaacuaaacucuga

SEQ ID NO: 158888 - RNA, 1575 nt, Artificial Sequence; identical to SEQ ID NO: 158887
  derived and/or modified CDS sequence (opt3) from glycoprotein__RABV__DQ849060.1

SEQ ID NO: 158889 - RNA, 1575 nt, Artificial Sequence
  derived and/or modified CDS sequence (opt3) from glycoprotein__RABV__DQ849061.1
augaucccccaggugcugcuguucgucccucuucugguuuuuagcuccugcuucggcaaguuuccaauuuacaccauaccggacaaauuggggcccuggucuccuaucgauauucaccauuuaucauguccaaacaaucuggugguagaggacgaaggaugcacaaaccuaagugguuucagcuauauggagcucaaggugggcuacaucuccgccauuaaagucaauggguuuacuuguacgggagugguuaccgaagcugagacauauacuaacuucgugggcuacgucaccacaaccuuuaagagaaaacacuucaggcccaugccugaugcaugccgggccgcguauaauuggaagauggcuggugacccacgcuacgaagagucucugcauaaccccuauccugauuaccacuggcuucgaacugugaagacaaccaaagagucgcugguaaucauaucaccaagcguugccgacuuggauccguacgacaagagucuccauucccguguguuucccgggggaaaauguucuggcaucacggucagcuccacuugcuguucaaccaaucacgauuauacaauuuggaugccugaaaacccaagacugggcaccaguugcgacaucuucacuaauagcagggggaagcgggcaucuaaaggagguaagacauguggcuuuguggaugagcgcgggcuguacaagucccucaaaggagccugcaaguuaaaacuguguggcgugcuugguuugagacugauggacgggaccugggucgcuauucaaacgucagaugaaaucaaguggugcagccccgaccagcuaguuaaccuccacgacuuccauagugaugagauagagcaccuggugguagaggaacuugugaaaaagagggaagagugccuggacgcauuggaaacuauuaugacaaccaaaucugucuccuuucggcgccucagccaucugcgaaaguuagugccuggauucggcaaggccuauacuaucuucaauaaaacacugauggaggcugaugcccacuacaagucgauuagaaccuggaacgagaucaucccaucuaaaggcugucucaggguugggggacggugccacccccaugugaauggugucuuuuucaacggcauuauacuugggccggacggacacgugcugaucccugaaaugcaguccucauugcuacaucagcacauggagcugcucgaaaguagcguaauuccccugaugcauccacuugcggauccuuccacgguuuuuaaggacggcgaugaggcagaagacuucguggagguccaccuccccgaugugcacaaacaaaucucuggugucgacuuggggcucccaaauuggggcaaguaugugcugauaagcguuggagccuuaaccgcucugaugcuaaugauuuuucucaugacauguugccguaagacuaaccgcgccgagucaacccagcauagucccggcgaaacagggagaaaaguguccguaacuagccacaacggaagggucaucucuucaugggagaguuacaagagcgguggcgaaaccaaacuguga

SEQ ID NO: 158890 - RNA, 1575 nt, Artificial Sequence
  derived and/or modified CDS sequence (opt3) from glycoprotein__RABV__DQ849062.1
augaucccccaggugcugcuguucgucccucuucugguuuuuagcuccugcuucggcaaguuuccaauuuacaccauaccggacaaauuggggcccuggucuccuaucgauauucaccauuuaucauguccaaacaaucuggugguagaggacgaaggaugcacaaaccuaagugguuucagcuauauggagcucaaggugggcuacaucuccgccauuaaagucaauggguuuacuuguacgggagugguuaccgaagcugagacauauacuaacuucgugggcuacgucaccacaaccuuuaagagaaaacacuucaggcccaugccugaugcaugccgggccgcguauaauuggaagauggcuggugacccacgcuacgaagagucucugcauaaccccuauccuggguaccacuggcuucgaacugugaagacaaccaaagagucgcugguaaucauaucaccaagcguugccgauuuggacccguacgauaagagucuccauucccguguguuucccggaggcaaauguucuggcaucacggucagcuccacuugcuguucaaccaaucacgacuauacaauuuggaugccugaaaacccaagacuggggaccaguugcgauaucuucacuaauagcaggggaaagcgggcaucuaaagguggcaagacauguggguuuguggacgagcgcggacuguacaagucccucaaaggcgccugcaaguuaaaacuguguggugugcuuggguugagacugauggauggaaccugggucgcuauucaaacgucagacgaaaucaaguggugcagccccgaucagcuaguuaaccuccacgacuuccauagugacgagauagagcaccuggugguagaggaacuugugaaaaagagggaagagugccuggaugcauuggaaacuauuaugacaaccaaaucugucuccuuucggcgccucagccaucugcgaaaguuagugccuggcuucggcaaggccuauacuaucuucaauaaaacacugauggaggcugacgcccacuacaagucgauuagaaccuggaacgagaucaucccaucuaaagggugucucaggguuggaggucggugccacccccaugugaauggcgucuuuuucaacgggauuauacuuggaccggauggccacgugcugaucccugaaaugcaguccucauugcuacaucagcacauggagcugcucgaaaguagcguaauuccccugaugcauccacuugcggacccuuccacgguuuuuaaggauggugacgaggcagaagauuucguggagguccaccuccccgacgugcacaaacaaaucucuggggucgauuugggccucccaaauuggggaaaguaugugcugauaagcgccggcgcuuuaaccgcccugaugcuaaugauuuuucucaugacauguugccguaagacuaaccgcgcagagucaauccagcauagucccggggaaaccggaagaaaaguuuccgugacaagccacaacgguaggguaaucucuucaugggagaguuacaagagcggcggggaaacuaaacuguga

SEQ ID NO: 158891 - RNA, 1575 nt, Artificial Sequence
  derived and/or modified CDS sequence (opt3) from glycoprotein__RABV__DQ849063.1
augaucccccaggugcugcuguucgucccucuucugguuuuuagcuccugcuucggcaaguuuccaauuuacaccauaccggacaaauuggggcccuggucuccuaucgauauucaccauuuaucauguccaaacaaucuggugguagaggacgaaggaugcacaaaccuaagugguuucagcuauauggagcucaaggugggcuacaucuccgccauuaaagucaauggguuuacuuguacgggagugguuaccgaagcugagacauauacuaacuucgugggcuacgucaccacaaccuuuaagagaaaacacuucaggcccaugccugaugcaugccgggccgcguauaauuggaagauggcuggugacccacgcuacgaagagucucugcauaaccccuauccugauuaccacuggcuucgaacugugaagacaaccaaagagucgcugguaaucauaucaccaagcguugccgacuuggauccguacgacaagagucuccauucccguguguuucccgggggaaaauguucuggcaucacggucagcuccacuugcuguucaaccaaucacgauuauacaauuuggaugccugaaaacccaagacugggcaccaguugcgacaucuucacuaauagcagggggaagcgggcaucuaaaggagguaagacauguggcuuuguggaugagcgcgggcuguacaagucccucaaaggagccugcaaguuaaaacuguguggcgugcuugguuugagacugauggacgggaccugggucgcuauucaaacgucagaugaaaucaaguggugcagccccgaccagcuaguuaaccuccacgacuuccauagugaugagauagagcaccuggugguagaggaacuugugaaaaagagggaagagugccuggacgcauuggaaacuauuaugacaaccaaaucugucuccuuucggcgccucagccaucugcgaaaguuagugccuggauucggcaaggccuauacuaucuucaauaaaacacugauggaggcugaugcccacuacaagucgauuagaaccuggaacgagaucaucccaucuaaaggcugucucaggguugggggacggugccacccccaugugaauggugucuuuuucaacggcauuauacuugggccggacggacacgugcugaucccugaaaugcaguccucauugcuacaucagcacauggagcugcucgaaaguagcguaauuccccugaugcauccacuugcggauccuuccacgguuuuuaaggacggcgaugaggcagaagacuucguggagguccaccuccccgaugugcacaaacaaaucucuggugucgacuuggggcucccaaauuggggcaaguaugugcugauaagcgccggagcuuuaaccgcccugaugcuaaugauuuuucucaugacauguugccguaagacuaaccgcgcagagucaauccagcauagucccggcgaaaccgggagaaaaguuuccgugacaagccacaacggaaggguaaucucuucaugggagaguuacaagagcgguggcgaaacuaaacuguga

SEQ ID NO: 158892 - RNA, 1575 nt, Artificial Sequence
  derived and/or modified CDS sequence (opt3) from glycoprotein__RABV__DQ849064.1
augauccuccaggugcugcuuuucgccccgcuguuggucuuuagcuccugcuucggcaaguuuccuauuuacaccauaccagacaaauuagggccguggucucccaucgauauucaccaucugucauguccuaacaaucuaguuguggaggacgaaggaugcacaaaccucagugguuucagcuauauggagcugaagguaggcuacaucuccgcuauuaaagugaauggguuuacuuguacgggagucgugaccgaagcagagacauauacuaacuucguuggcuacgugaccacaaccuuuaagagaaaacacuucaggccaaugcccgaugccugccgggcggcuuauaauuggaagauggccggugacccucgcuacgaagagucucuucauaacccauaucccgauuaccacuggcugcgaacugucaagacaaccaaagagucguuggugaucauaucaccuagcguagcagaccucgauccauacgacaagagucugcauucccguguuuuucccgggggaaaauguucuggcaucacggugagcuccacuugcuguucaaccaaucacgauuauacaauuuggaugcccgaaaacccuagacugggcaccaguugcgacaucuucacuaauagcagggggaagcgggccucuaaaggagguaagacauguggcuuugucgaugagcgcgggcucuacaaguccuuaaaaggagcuugcaagcugaaacuuuguggcguguugggucugagacuaauggacgggaccuggguggcaauucaaacgucagaugaaaucaaguggugcccacccgaccagcucgucaaccugcacgacuuccauagcgaugagauagagcaccuuguuguggaggaacuggugaaaaagagggaagagugcuuggacgcccucgaaacuauuaugacaaccaaaagugugucuuuucggcgccugucccauuuacgaaagcuggucccuggauucggcaaggcuuauacuaucuucaauaaaacacucauggaggccgaugcgcacuacaagagcauuagaaccuggaacgagaucaucccaucgaaaggcugucuuaggguagggggacggugccacccccauguuaaugguguguuuuucaacggcauuauacuggggccggacggacacgucuugaucccugaaaugcagucuucccuacugcaucagcacauggagcuccuggaaucaagugugauuccccuuaugcauccacuggcagauccuagcacgguauuuaaggacggcgaugaggccgaagacuucguugaggugcacuugcccgauguccacaaacaaaucuccgguguggaccucgggcugccaaauuggggcaaguaugucuuaauaucugcuggagcccugaccgcacuaaugcucaugauuuuucugaugacauguugccguaagaacaaccgcgcugagagcauccagcauucacccggcgaaacugggagaaaagugaguguuaccucccacaauggaagggugaucagcucuugggagucauacaagagugguggcgaaacaaaacuuuga

SEQ ID NO: 158893 - RNA, 1575 nt, Artificial Sequence
  derived and/or modified CDS sequence (opt3) from glycoprotein__RABV__DQ849065.1
augaucccccaggugcugcuguucgucccucuucugguuuuuagcuccugcuucggcaaguuuccaauuuacaccauaccggacaaauuggggcccuggucuccuaucgauauucaccauuuaucauguccaaacaaucuggugguagaggacgaaggaugcacaaaccuaagugguuucagcuauauggagcucaaggugggcuacaucuccgccauuaaagucaauggguuuacuuguacgggagugguuaccgaagcugagacauauacuaacuucgugggcuacgucaccacaaccuuuaagagaaaacacuucaggcccaugccugaugcaugccgggccgcguauaauuggaagauggcuggugacccacgcuacgaagagucucugcauaaccccuauccugauuaccacuggcuucgaacugugaagacaaccaaagagucgcugguaaucauaucaccaagcguugccgacuuggauccguacgacaagagucuccauucccguguguuucccgggggaaaauguucuggcaucacggucagcuccacuugcuguucaaccaaucacgauuauacaauuuggaugccugaaaacccaagacugggcaccaguugcgacaucuucacuaauagcagggggaagcgggcaucuaaaggagguaagacauguggcuuuguggaugagcgcgggcuguacaagucccucaaaggagccugcaaguuaaaacuguguggcgugcuugguuugagacugauggacgggaccugggucgcuauucaaacgucagaugaaaucaaguggugcagccccgaccagcuaguuaaccuccacgacuuccauagugaugagauagagcaccuggugguagaggaacuugugaaaaagagggaagagugccuggacgcauuggaaacuauuaugacaaccaaaucugucuccuuucggcgccucagccaucugcgaaaguuagugccuggauucggcaaggccuauacuaucuucaauaaaacacugauggaggcugaugcccacuacaagucgauuagaaccuggaacgagaucaucccaucuaaaggcugucucaggguugggggacggugccacccccaugugaauggugucuuuuucaacggcauuauacuugggccggacggacacgugcugaucccugaaaugcaguccucauugcuacaucagcacauggagcugcucgaaaguagcguaauuccccugaugcauccacuugcggauccuuccacgguuuuuaaggacggcgaugaggcagaagacuucguggagguccaccuccccgaugugcacaaacaaaucucuggugucgacuuggggcucccaaauuggggcaaguaugugcugauaagcgccggagcuuuaaccgcccugaugcuaacaauuuuucucaugacuuguugccguaagaccaaccgcgcagagucaauccagcauagucccggcgaaacagggagaaaaguuuccgugacuagccacaacggaaggguaaucucuucaugggagaguuacaagagcgguuccgaaaccaaacuguga

SEQ ID NO: 158894 - RNA, 1575 nt, Artificial Sequence
  derived and/or modified CDS sequence (opt3) from glycoprotein__RABV__DQ849066.1
augaucccccaggugcugcuguucgucccucuucugguuuuuagcuccugcuucggcaaguuuccaauuuacaccauaccggacaaauuggggcccuggucuccuaucgauauucaccauuuaucauguccaaacaaucuggugguagaggacgaaggaugcacaaaccuaagugguuucagcuauauggagcucaaggugggcuacaucuccgccauuaaagucaauggguuuacuuguacgggagugguuaccgaagcugagacauauacuaacuucgugggcuacgucaccacaaccuuuaagagaaaacacuucaggcccaugccugaugcaugccgggccgcguauaauuggaagauggcuggugacccacgcuacgaagagucucugcauaaccccuauccugauuaccacuggcuucgaacugugaagacaaccaaagagucgcugguaaucauaucaccaagcguugccgacuuggauccguacgacaagagucuccauucccguguguuucccgggggaaaauguucuggcaucacggucagcuccacuugcuguucaaccaaucacgauuauacaauuuggaugccugaaaacccaagacugggcaccaguugcgacaucuucacuaauagcagggggaagcgggcaucuaaaggagguaagacauguggcuuuguggaugagcgcgggcuguacaagucccucaaaggagccugcaaguuaaaacuguguggcgugcuugguuugagacugauggacgggaccugggucgcuauucaaacgucagaugaaaucaaguggugcagccccgaccagcuaguuaaccuccacgacuuccauagugaugagauagagcaccuggugguagaggaacuugugaaaaagagggaagagugccuggacgcauuggaaacuauuaugacaaccaaaucugucuccuuucggcgccucagccaucugcgaaaguuagugccuggauucggcaaggccuauacuaucuucaauaaaacacugauggaggcugaugcccacuacaagucgauuagaaccuggaacgagaucaucccaucuaaaggcugucucaggguugggggacggugccacccccaugugaauggugucuuuuucaacggcauuauacuugggccggacggacacgugcugaucccugaaaugcaguccucauugcuacaucagcacauggagcugcucgaaaguagcguaauuccccugaugcauccacuugcggauccuuccacgguuuuuaaggacggcgaugaggcagaagacuucguggagguccaccuccccgaugugcacaaacaaaucucuggugucgacuuggggcucccaaauuggggcaaguaugugcugauaagcgccggagcuuuaaccgcccugaugcuaacaauuuuucucaugacuuguugccguaagaccaaccgcgcaggcucaauccagcauagucccggggagacaggaagaaaaguuuccgugacuagccacaacgguaggguaaucucuucaugggaaaguuacaagagcggcuccgagaccaaacuguga

SEQ ID NO: 158895 - RNA, 1575 nt, Artificial Sequence; identical to SEQ ID NO: 158894
  derived and/or modified CDS sequence (opt3) from glycoprotein__RABV__DQ849067.1

SEQ ID NO: 158896 - RNA, 1575 nt, Artificial Sequence; identical to SEQ ID NO: 158893
  derived and/or modified CDS sequence (opt3) from glycoprotein__RABV__DQ849068.1

SEQ ID NO: 158897 - RNA, 1575 nt, Artificial Sequence
  derived and/or modified CDS sequence (opt3) from glycoprotein__RABV__DQ849069.2
augaucccccaggcccuccuguucgugccucuucuggucuuuagcuucugcuuuggcaaguucccaauuuacaccauaccggacaaauuggggcccugguccccuaucgauauucaccauuuaucuuguccaaacaaucugguuguggaggacgaaggaugcacaaaccuaucagguuuuaguuauauggagcucaagguaggcuacaucagcgcuauuaaagugaauggguucacuuguacgggagucgugaccgaagcagagacauauacuaacuuuguuggcuacgugaccacaaccuucaagagaaaacacuuuaggcccacuccugaugccugccgggcggcuuauaauuggaagauggccggugacccacgcuacgaagagucccugcauaaccccuauccugauuaccacuggcuucgaacagucaagaccacgaaagagucucuggugaucauaucgccaucaguaagcgacuuggauccguacgacaagagucuccauucccguguuuuccccucugggaaauguagcagaaucacuguguccucaaccuauugcccuacaaaucacgauuacacuauuuggaugccagaaaaccccaggcugggaaccaguugugacaucuuuacaaauagccggggcaagcgcgcaucuaaaggcuccaagaccugcggguucgucgaugagagaggacuguauaagucacucaaaggugccuguaaguuaaaacugugcggcgugcuuggguugacgcugauggacggaacuuggguggcuauucaaacaagcgaugaagcaaagugguguccuccagaccagcuagucaacauccacgacuuuaggagugaugagauagagcaucucguuguggaggaacugguaaagaaacgggaagagugccuugacgcccuggaaucuauuaugaccacuaaauccgugagcuuccgccgauugucgcaccucagaaagcugguccccggcuucgguaaggcuuacacaaucuuuaauaaaaccuuaauggaggccgaugcgcauuauaagucugugaggacguggaacgagauuaucccguccaaagggugccugcggguuggaggccguugucacccucacgugaauggcgucuucuuuaacgggaucauucucggacccgacggucaugugcuuauaccagaaaugcagucaagucuguugcagcaacacauggagcuacuggaaagcuccguaaucccucucaugcauccccuggcagauccaucuaccguuuucaaggaggacgaugaagccgaggacuuuguggagguccaccuucccgaugugcauaaacaggucagcggcguggaccugggguugccuucauggggaaaguacguucucaugagugugggcgcuaugauugcccugauguuaaugaucuuccugaugacaugcugucgcagagcaaauggugcugaauccauacagcacagccuaggggagacuggcaggaagguaucugucaccucacagaguggacgggugauuagcuccugggaaucuuauaaaucgggcggggagacaaagcucuga

SEQ ID NO: 158898 - RNA, 1575 nt, Artificial Sequence
  derived and/or modified CDS sequence (opt3) from glycoprotein__RABV__DQ849070.1
augaucccccaggugcugcuguucgucccucuucugguuuuuagcuccugcuucggcaaguuuccaauuuacaccauaccggacaaauuggggcccuggucuccuaucgauauucaccauuuaucauguccaaacaaucuggugguagaggacgaaggaugcacaaaccuaagugguuucagcuauauggagcucaaggugggcuacaucuccgccauuaaagucaauggguuuacuuguacgggagugguuaccgaagcugagacauauacuaacuucgugggcuacgucaccacaaccuuuaagagaaaacacuucaggcccaugccugaugcaugccgggccgcguauaauuggaagauggcuggugacccacgcuacgaagagucucugcauaaccccuauccugauuaccacuggcuucgaacugugaagacaaccaaagagucgcugguaaucauaucaccaagcguugccgacuuggauccguacgacaagagucuccauucccguguguuucccgggggaaaauguucuggcaucacggucagcuccacuugcuguucaaccaaucacgauuauacaauuuggaugccugaaaacccaagacugggcaccaguugcgacaucuucacuaauagcagggggaagcgggcaucuaaaggagguaagacauguggcuuuguggaugagcgcgggcuguacaagucccucaaaggagccugcaaguuaaaacuguguggcgugcuugguuugagacugauggacgggaccugggucgcuauucaaacgucagaugaaaucaaguggugcagccccgaccagcuaguuaaccuccacgacuuccauagugaugagauagagcaccuggugguagaggaacuugugaaaaagagggaagagugccuggacgcauuggaaacuauuaugacaaccaaaucugucuccuuucggcgccucagccaucugcgaaaguuagugccuggauucggcaaggccuauacuaucuucaauaaaacacugauggaggcugaugcccacuacaagucgauuagaaccuggaacgagaucaucccaucuaaaggcugucucaggguugggggacggugccacccccaugugaauggugucuuuuucaacggcauuauacuugggccggacggacacgugcugaucccugaaaugcaguccucauugcuacaucagcacauggagcugcucgaaaguagcguaauuccccugaugcauccacuugcggauccuuccacgguuuuuaaggacggcgaugaggcagaagacuucguggauguccaccuccccgacgugcacaaacaaaucucuggugucgauuuggggcucccaaauuggggcaaguaugugcugauaagcgccggagcuuuaaccgcccugaugcuaaugauuuuucucaugacauguugccguaaggcaaaccgcgcugagucaauccagcauaaccccggcgagacugggagaaaaguuagugugaccucccacaauggaaggguaaucagcucuugggaaucauacaagagugguggcgagacaaaacuguga

SEQ ID NO: 158899 - RNA, 1575 nt, Artificial Sequence; identical to SEQ ID NO: 158575
  derived and/or modified CDS sequence (opt3) from glycoprotein__RABV__DQ849071.1

SEQ ID NO: 158900 - RNA, 1575 nt, Artificial Sequence
  derived and/or modified CDS sequence (opt3) from glycoprotein__RABV__DQ849072.1
augaucccccaggcccuccuguucgugccucuucuggucuuuagcuugugcuucggcaaguuuccaauuuacaccauaccggacaaauuagggcccugguccccuaucgauauucaccaucugucuuguccaaacaaucuaguuguggaggacgaaggaugcacaaaccucucagguuucaguuauauggagcugaagguaggcuacaucagcgcuauuaaagugaauggguuuacuuguacgggagucgugaccgaagcagagacauauacuaacuucguuggcuacgugaccacaaccuuuaagagaaaacacuucaggcccacuccugaugccugccgggcggcuuauaauuggaagauggccggugacccacgcuacgaagagucccuucauaaccccuauccugauuaccacuggcugcgaacagucaagaccacgaaagagucuuuggugaucauaucgccaucaguagcagaccucgauccguacgacaagagccugcauagucguguuuuucccuccgggaaauguucuggaaucacugugagcuccaccuauugcucaacaaaucacgauuacacuauuuggaugccugaaaacccaagacugggcaccaguugugacaucuucgucaauagcaggggcaagcgggccucuaaaggguccaagacaugcggauuuguggaugagcgcggucucuauaagucauuaaaaggcgcuuguaagcugaaacuuugcgggguguugggacugagacuaauggacggcaccugggucgcaauucaaacgagcgaugaaacuaaguggugucccccugaccagcucguuaaccugcacgacuucaggagugaugagaucgagcaucuugugguagaggaacuggugaaaaagcgggaagagugcuuggacgcccucgaaucuauaaugacaaccaaauccgucagcuuucgccgacugucgcacuuaagaaagcuggugccagguuucgggaaggcuuacacuauuuucaauaaaacacucauggaggccgaugcgcauuauaagucuguuaggaccuggaacgagaucauucccuccaaaggaugccuucgggugggcggccguugucacccgcacgucaaugggguguuuuucaacggaaucauccuggguccugacggccauguauugauucccgaaaugcagucaagucuacugcagcaacacauggagcuccuggaaagcuccguuauaccacuuaugcauccucuggcagaucccucuacgaucuuuaaggacggggaugaggccgaagacuucguggagguccacuugccagaugugcauaaacaggucagcggaguggaccucggccugcccaauugggguaaguacguuuuaaugucagcuggggcccugaccgcacuaaugcucaugauuuuucugaugacaugcugucgcaagacugauagaaccggcaguacacaccacuccccuggagagacuggcaggaaagugagcguaaccucucagaacgggcgggucaucgcuucaugggaaaguuauaagagcggaggugagacaaaacuuuga

SEQ ID NO: 158901 - RNA, 1575 nt, Artificial Sequence
  derived and/or modified CDS sequence (opt3) from glycoprotein__RABV__DQ849073.1
augaucccccaggugcuccuguucgucccucuucugguuuuuagcuccugcuugggcaaguucccaauuuacaccauaccggacaaauuagggcccuggucuccuaucgauauucaccaucugucauguccaaacaaucuagugguagaggacgaaggaugcacaaaccucagugguuuuagcuauauggagcugaaggugggcuacaucuccgccauuaaagucaauggguucacuuguacgggagugguuaccgaagcugagacauauacuaacuuugugggcuacgucaccacaaccuucaagagaaaacacuuuaggcccaugccugaugcaugccgggccgcguauaauuggaagauggcuggugacccacgcuacgaagagucucuucauaaccccuauccugauuaccacuggcugcgaacugugaagacaucgaaagagucauugguaaucauaagcccaaguguugccgaccucgauccguacgacaagucccugcauucucguguguuccccgggggaaaauguagcggcaucaccgucuccucaacgugcuguaguacuaaucacgauuauaccauuuggaugccugaaaacccaagacugggcacaagcugcgacaucuuuacuaauucuagggggaagcgggcauccaaaggagguaagaccuguggcuucguggaugagcgcgggcucuacaagucauuaaaaggagccugcaagcugaaacuuuguggcguguugggucugagacuaauggacgggacaugggucgcuauucaaaccagcgaugaaaucaaguggugcagucccgaccagcucguuaaccugcacgacuuucauucugaugagauagagcaccuugugguagaggaacuggugaaaaagagggaagagugcuuggacgcacucgaaacgauuaugacuacaaaauccgucagcuuccggcgccugucgcauuuacgaaagcuggugccuggauuuggcaaggccuauaccaucuucaauaaaacucucauggaggcugaugcccacuacaagucuauuagaacauggaacgagaucaucccauccaaaggcugucuuaggguugggggacggugccacccccaugugaauggugucuucuuuaacggcauuauacuggggccggacggacacguguugaucccugaaaugcagucaagucuacugcaucagcacauggagcuccuggaaagcuccguaauuccccuuaugcauccacuggcggauccuucuaccguuuucaaggacggcgaugaggcagaagacuuuguggagguccacuugcccgaugugcacaaacaaaucagcggugucgaccucgggcugccaaauuggggcaaguauguguuaauaucagccggagcucugacggccaguaugcuaaugauuuuccucaugaccuguugccguaagacaaaccgcgcagaguccauccagcauagccccggcgaaacugggagaaaaguuucugugaccucacacaacggaaggguaaucaguagcugggaguccuacaagucugguggcgaaacaaaacuguga

SEQ ID NO: 158902 - RNA, 1575 nt, Artificial Sequence
  derived and/or modified CDS sequence (opt3) from glycoprotein__RABV__DQ875050.1
auggugccccagguccuccuguucguucuucuguugggcuuuagcuuaugcuucgggaaguuuccuaucuacaccauuccagacgagcugggaccguggucccccauagauauccaccaucuaucuuguccuaacaaucucgugguagaagacgaggguugcacaaaccugucagaguucaguuauauggagcuuaaagugggcuacauuagcgccaucaaggucaauggguuuacuuguacgggagugguuaccgaagcugagacauauacuaacuucgugggcuacgucaccacaaccuuuaaaagaaagcacuucaggccaacucccgaugcaugccgggccgcguauaauuggaaaauggcuggugacccucgcuacgaggaaucccugcauaacccauaucccgauuaccacugguugcgaacagugcguaccacgaaggagucucucauuaucauaucgccuucaguaacugaccuggauccauacgacaagagccugcauaguagaguuuuuccggggaggaaauguuccggaaucaccgugucuagcacauauugcuccacuaaucacgauuacaccauuuggaugcccgaaaacccucggccacgcacacccugugacaucuucaccaauucaagaggcaagagggccaguaacggcaauaaaacgugcggguuugucgaugagcggggacucuauaagagcuuaaaaggugcaugucgccugaaacuuugcggcguguuggggcugcgacuaauggacggaacuuggguggccaugcaaacaucuggcgagaccaagugguguccuccagaucagcucgucaaccugcacgacuucagauccgacgaaauugagcaucuuguuguggaagaacugguaaagaagagggaagagugcuuggaugcucucgagucaaucaugacuacaaaaagcgugaguuuucggcgucugucucacuuacgcaagcugguccccgguuucgggaaagcauacaccauauucaauaagacgcucauggaagccgacgcucauuauaaauccgugagaaccuggaacgagauuaucccgagcaagggaugccuuaagguuggcgggaggugucacccucacgugaauggcgucuuuuucaacggacugauuuugggucccgaugaccaugugcuaaucccagaaaugcagucgucucugcuccagcaacacauggagcugcuugaauccucaguaaucccucugaugcaucccuuggccgauccaaguacaguuuuuaaagagggcgacgaggcggaagauuucguggagguccaccuccccgacguguacaagcagauuagcggggucgaucugggauuaccuaacuggggcaaauaugugcugaugacugccggugcaaugauagggcuaguucucaucuuuucccugaugaccuggugccggcgagcuaaucgcccagaaucuaagcagagaaguuucggcggaacaggcgggaacgugucaguaacuagccaguccggaaaagucauuccgagcugggagucuuacaagucagguggcgaaaucaggcuuuga

SEQ ID NO: 158903 - RNA, 1575 nt, Artificial Sequence
  derived and/or modified CDS sequence (opt3) from glycoprotein__RABV__DQ875051.1
auggugccccaggcccugcuccuugucccucuguugggcuucagcuuaugcuuugggaaguucccaaucuacaccauuccgacaaaacugggacccugguccccuauagacauccaccaucuaucuuguccaaacaaucucguuguggaggaugaagguugcacuaaccugucaggcuuuaguuauauggagcuuaagguagggagaauuagcgcuaucaaagugaauggauucacguguaccggcgucgugacagaagcagagacuuacaccaacuuuguugguuaugugacaaccacuuucaagaggaaacacuuucggcccaugccugggugcauguacucccgcguccaacuggaagacggacgaucuccacagauugaggagucguugcauaaucccuauccugauuaccacuggcuccguacagugagaaccacgaaggaaucacugaucauaaucagcccaaguguaacugaccuggauccguaugacaagucccuccauucuaggguuuuccccggccggaaauguagcggcauuaccguguccucaacauacugcaguacuaaccacgauuacaccgucuggaugccugagaucuuacgccuggggacaagcugugacauuuuuaccaauucuagaggaaagagggccuccaaagguucaaagacgugcggcuucguggaugaacgggggcuuuauaagagcuugaaaggagcguguaagcugaaacuaugcggcgugccaggucuccgccugauggacgggacuugggucgcuaugcagacaaguaacgagaccaaguggugucccccuggacagcuuguuaaucugcacgauuugcauucugacgagaucgaacaccucgugguagaggaacuggugaaaaagcgagaggaaugcuuagaugcccuggaguccauaacuacaaccaaaagcgucucguuuagaaggcucucucaucuucggaagcuggugccaggcuucggcaaagcauacacgauuuuuaacaagaccuugauggaggccgaagcucacuauaaguccguucguacauggaaugagaucauucccucaaaagggugccuacgcgugggagguggcugucacccgcaugucaacgggguguucuucaauggaaucauccugggcccugacggucacguacucauucccgaaaugcaaaguagccugcuucagcagcauauagagcuguuggaauccucuguuaucccacucaugcacccucuggcagaccccuuuacuguguucaaggauggggacgagauugaggauuuugucgaagugcauuuaccagacguccacgaacaggugagcggcguugaucugggacuacccaacuggggcgaguacgugcuccugucagccgggacccuuaucgcuuugaugcugauaauuuuccucaucacaugcuguaaaagaguagacaggccugagaguacucaacggucccugcgaggaaccggucgcaaugucagcgugacaucucagucaggcaaguuuaucccaaguagagaaagcuauaaauccgggggagagaccggccuuuga

SEQ ID NO: 158904 - RNA, 1575 nt, Artificial Sequence
  derived and/or modified CDS sequence (opt3) from glycoprotein__RABV__E02022.1
auggugccccaggcccugcuccuugucccuauccugggcuucagcuccugcuuugggaaguucccaauuuacaccauaccggacacauugggacccuggucuccuaucgauauucaccauuuaucauguccaaacaaucugguuguggaggacgaagguugcacuaaccuaaguggcuuuagcuauauggagcucaaaguagggcacaucuccgcuauuaaggugaauggauucacguguaccggcgucgugacagaagcagagacuuacaccaacuuuguugguuaugugacaaccacuuucaaaagaaagcauuuuaggcccacaccugaugccugccgggcggcuuacaauuggaaaauggccggggacccacgcuaugaagagucucugcacucgcccuacccugauuaucauuggcuucgaaccgucaagacgacuaaggagucacuggugaucauaagcccaaguguaguugacuuggauccguacgacaacucccuccacucucguguguuccccagcggaaaauguuccggcaucaccgucucaaguguguacugcagcacaaaucacgauuauacuguguggaugccugaaucucugagacugggcaccuccugugacauuuuuacaaacucaagggggaagcgggucagcaaaggaaguaagaccugcgguuucguugaugagcgcggccucuacaaaucuuuaaagggggcauguaagcugaaacuuugcggagugagaggcuugaggcugauggacgguacguggguagccaugcaaacuuccaaugaaacaaagugguguccacccgaucagcuagugaaccuccaugaccugcggagcgacgagaucgagcaccuugucauugaggaacuggugaaaaagcgcgaagagugcuuggaugcucucgaaucgaucauaaccacuaaaucuguuuccuuucgaagacugucauauuuaaggaagcuggugccuggguucggaaaagcauacacaauuuuuaauaagacccucauggaggccgaggcucauuauaagaguguccggacguggaacgaaaucauuccaagcaaaggcugccuucgugugggcgggcgcugucacccccacguaaauggaguuuucuucaacgguaucauccugggcccggacgggcauguguugauuccugagaugcaguccucucuacugcagcaacacauagaacuccuggagagcucagucaucccccuuaugcauccacuggccgauccuuuuaccguguucaaggacggagaugaaacagaggacuuuauugagguccacuugcccgaugugcaugaacagguuaguggcguggaccucggucugccaaauuggggcgaguacguauuacuguccgcggggacucuaaucgcacucaugcugauaauuuuccuuaugaccugcuguagaaaagucgauaggcccgaaagcacacagcggucuuugcgaggaacuggccgcaacgugucaguuaccagucagagcgggaaguuuaucccuuccugggagucuuauaaaucgggaggugaaacaggccuguga

SEQ ID NO: 158905 - RNA, 1575 nt, Artificial Sequence
  derived and/or modified CDS sequence (opt3) from glycoprotein__RABV__EF206707.1
auggugccccaggcccuucucuucgucccucuucugguuuuuccauugugcuucggcaaguuuccgaucuacaccauucccgacaaauuagggccuuggagcccaauagauauccaccaucuguccugucccaacaaucuagugguagaggacgaaggaugcacaaaccucucugguuucucauauauggagcugaaggugggcuacauucuugcuaucaaaaugaauggguuuacuuguacgggagucgugaccgaagcagagacauauacuaacuucguuggcuacgugaccacaaccuuuaagagaaaacacuucaggccuacuccagaugccugccgggcggcuuauaauuggaagauggccggugacccccgcuacgaagagagucugcauaacccuuauccagauuaccgaugguugcguacagucaagaccacgaaagagagccucgugauuaucuccccgucuguagcagaccuggaucccuacgacagaucgcugcacucaaggguuuuuccuagcgggaaguguaguggaguggccgucuccucuacuuauugcagcaccaaucaugauuacacaauauggaugccagaaaacccccggcucggcauguccugugacaucuucacuaauucacgcggcaaaagagcuaguaaggggagcgagaccugcggauuuguggaugaaagggguuuauauaaaucucugaagggcgcauguaagcugaaauugugcggggugcugggacuacggcucauggacggcacaugggucgccaugcaaaccuccaacgagacgaagugguguccuccagaucagcugguuaaucuucacgacuuccgcucagacgagauugaacaccuggugguagaggaauuggugcgaaaaagagaggaaugccucgaugcucuggagagcaucaugacuacaaagagugucucuuuuaggcgguuaucccaucugcguaaacucgugcccgguuucgggaaggccuacaccauuuucaacaaaacucuuauggaggcggacgcacacuauaagagcguucgcacauggaaugaaauccugccgucgaagggaugcuugagagugggcgggaggugucauccucacgucaacggcguguuuuucaauggaauaauucuaggucccgauggcaacguacugaucccagagaugcagucuucccuccugcagcaacacauggaacuucuggagucaaguguuauuccuuuggugcauccccucgccgacccaagcaccgucuuuaaagauggggacgaagcugaggauuucguggagguccaucugcccgacgugcacaaccagguuuccggaguggauuuaggccugccuaauugggguaaguacguacuacucucugccggggcacugacggcucuuauguugaucaucuuucugaugaccugcugucggcgagucaaccgcagcgaaccaacacagcacaaucucagaggcacuggaagggaggugucaguuaccccgcagaguggcaaaauuauauccagcugggaaucucauaagucagggggagagacacggcuguga

SEQ ID NO: 158906 - RNA, 1575 nt, Artificial Sequence
  derived and/or modified CDS sequence (opt3) from glycoprotein__RABV__EF206709.1
auggugccccaggcccugcuguucgucccucuucugguuuuuccauugugcuucggcaaguuuccgaucuacaccauucccgacaaauuagggccuuggagcccaauagauauccaccaucuguccugucccaacaaucuagugguagaggacgaaggaugcacaaaccucucugguuucucauauauggagcugaaggugggcuacauucuugcuaucaaagucaauggguuuacuuguacgggagugguuaccgaagcagagacauauacuaacuucgugggcuacgucaccacaaccuuuaagagaaaacacuucaggccuacuccagaugccugccgggcggcuuauaauuggaagauggccggugacccccgcuacgaagagagucugcauaacccuuauccagauuaccgaugguugcguacagugaagaccacgaaagagagccucguaauuaucuccccgucuguugcagaccuggaucccuacgacagaucgcugcacucaaggguguuuccuagcgggaaguguaguggagucgccguguccucuacuuauugcagcaccaaucaugauuacacaauauggaugccagaaaacccccggcucggcauguccugugacaucuucacuaauucacgcggcaaaagagcuaguaaggggagcgagaccugcggauuuguggaugaaagggguuuauauaaaucucugaagggcgcauguaaacuuaaauugugcgggguccugggacuacggcucauggacggcacauggguuuccaugcaaaccucaaacgagacgaagugguguccuccagauaaacuggugaaucuucacgacuuccgcagcgacgagauugaacaccugguaguggaggaauugguccgaaagagagaggaaugccucgaugcccuggagaguaucaugacuacaaaaucuguguccuuuaggcgguuaagccaucugcguaagcucguucccgguuucgggaaggcuuacaccauuuucaacaagacucuuauggaggccgacgcgcacuauaagucggugcgcacauggaaugaaauccugccgucuaaaggaugcuugagagucggcgggaggugucauccucacgugaacggcguauuuuucaauggaauaauucuaggucccgauggcaacguucugaucccagagaugcaguccucacuccugcagcagcacauggaacuucuggagaguagcgugauuccuuugguccauccccucgcagacccauccaccguguuuaaggauggggacgaagccgaggauuucgucgaggugcaccuccccgacguucauaaccaagugucuggaguagauuuaggccugccuaauugggguaaauacguccuacucagcgcuggggcccugacggcacuuauguugaucaucuuucugaugaccugcugucggcgagugaaccgcucagaaccaacacagcacaaucucagaggcacuggaagggagguuagugugaccccgcaguccggcaagauuauaagcucuugggaaucacauaaaagugggggagagacacggcuguga

SEQ ID NO: 158907 - RNA, 1575 nt, Artificial Sequence
  derived and/or modified CDS sequence (opt3) from glycoprotein__RABV__EF206715.1
auggugccccaggcccugcuguucgucccucuucugguuuuuccauugugcuucggcaaguuuccgaucuacaccauucccgacaaauuagggccuuggagcccaauagauauccaccaucuguccugucccaacaaucuagugguagaggacgaaggaugcacaaaccucucugguuucucauauauggagcugaaggugggcuacauucuugcuaucaaagucaauggguuuacuuguacgggagugguuaccgaagcagagacauauacuaacuucgugggcuacgucaccacaaccuuuaagagaaaacacuucaggccuacuccagaugccugccgggcggcuuauaauuggaagauggccggugacccccgcuacgaagagagucugcauaacccuuauccagauuaccgaugguugcguacagugaagaccacgaaagagagccucguaauuaucuccccgucuguugcagaccuggaucccuacgacagaucgcugcacucaaggguguuuccuagcgggaaguguaguggagucgccguguccucuacuuauugcagcaccaaucaugauuacacaauauggaugccagaaaacccccggcucggcauguccugugacaucuucacuaauucacgcggcaaaagagcuaguaaggggagcgagaccugcggauuuguggaugaaagggguuuauauaaaucucugaagggcgcauguaaacuuaaauugugcgggguccugggacuacggcucauggacggcacauggguuuccaugcaaccuucaaacgagaccaagugguguccacccgauaaacuggugaaucuucacgacuuccgcagcgacgagauugaacaccugguaguggaggaauugguccgaaagagagaggaaugccucgaugcccuggagaguaucaugacgacuaaaucuguguccuuuaggcgguuaagccaucugcguaagcucguuccggguuucgggaaggcuuacacaauuuucaacaagacccuuauggaggccgacgcgcacuauaagucggugcgcacuuggaaugaaauccugccuucuaaaggaugcuugagagucggcgggaggugucauccccacgugaacggcguauuuuucaauggaauaauucuagguccagauggcaacguucugaucccugagaugcaguccucacuccugcagcagcacauggaacuucuggagaguagcgugauucccuugguccauccacucgcagaccccuccacaguguuuaaggauggggacgaagccgaggauuucgucgaggugcaccucccugacguucauaaccaagugucuggaguagauuuaggccugccaaauugggguaaauacguccuacucagcgcuggggcccugaccgcacuuauguugaucaucuuucugaugacgugcugucggcgagugaaccgcucagaaccgacccagcacaaucucagaggcacaggaagggagguuagugugacuccccaguccggcaagauuauaagcucuugggaaucacauaaaagugggggagagacccggcuguga

SEQ ID NO: 158908 - RNA, 1575 nt, Artificial Sequence
  derived and/or modified CDS sequence (opt3) from glycoprotein__RABV__EF206716.1
auggugccccaggcccugcuguucgucccucuucugguuuuuccauugugcuucggcaaguuuccgaucuacaccauucccgacaaauuagggccuuggagcccaauagauauccaccaucuguccugucccaacaaucuagugguagaggacgaaggaugcacaaaccucucugguuucucauauauggagcugaaggugggcuacauucuugcuaucaaagucaauggguuuacuuguacgggagugguuaccgaagcagagacauauacuaacuucgugggcuacgucaccacaaccuuuaagagaaaacacuucaggccuacuccagaugccugccgggcggcuuauaauuggaagauggccggugacccccgcuacgaagagagucugcauaacccuuauccagauuaccgaugguugcguacagugaagaccacgaaagagagccucguaauuaucuccccgucuguugcagaccuggaucccuacgacagaucgcugcacucaaggguguuuccuagcgggaaguguaguggagucgccguguccucuacuuauugcagcaccaaucaugauuacacaauauggaugccagaaaacccccggcucggcauguccugugacaucuucacuaauucacgcggcaaaagagcuaguaaggggagcgagaccugcggauuuguggaugaaagggguuuauauaaaucucugaagggcgcauguaaacuuaaauugugcgggguccugggacuacggcucauggacggcacauggguuuccaugcaaaccucaaacgagacgaagugguguccuccagauaaacuggugaaucuucacgacuuccgcagcgacgagauugaacaccugguaguggaggaauugguccgaaagagagaggaaugccucgaugcccuggagaguaucaugacuacaaaaucuguguccuuuaggcgguuaagccaucugcguaagcucguucccgguuucgggaaggcuuacaccauuuucaacaagacucuuauggaggccgacgcgcacuauaagucggugggaacauggaaugaaauccugccgucuaaaggcugcuugcgcgucggcgggagaugucauccucacgugaacggaguauuuuucaaugguauaauucuaggccccgaugggaacguucugaucccagagaugcaguccucacuccugcagcagcacauggaacuucuggagaguagcgugauuccuuugguccauccccucgcagacccauccaccguguuuaaggauggagacgaagccgaggauuucgucgaggugcaccuccccgacguucauaaccaagugucuggcguagauuuaggucugccuaauugggggaaauacguccuacucagcgcuggcgcccugacggcacuuauguugaucaucuuucugaugaccugcuguaggcgggugaaccgaucagaaccaacacagcacaaucuccgcggaacuggcagagagguuagugugaccccgcaguccgggaagauuauaagcucuugggaaucacauaaaaguggaggugagacaaggcuguga

SEQ ID NO: 158909 - RNA, 1575 nt, Artificial Sequence
  derived and/or modified CDS sequence (opt3) from glycoprotein__RABV__EF206717.1
auggugccccaggcccuccuguucgucccucuucugguuuuuccauugugcuucggcaaguuuccgaucuacaccauucccgacaaauuagggccuuggagcccaauagauauccaccaucuguccugucccaacaaucuagugguagaggacgaaggaugcacaaaccucucugguuucucauauauggagcugaaggugggcuacauuagugcuaucaaaaugaauggguuuacuuguacgggagucgugaccgaagcagagacauauacuaacuucguuggcuacgugaccacaaccuuuaagagaaaacacuucaggccuacuccagaugccugccgggcggcuuauaauuggaagauggccggugacccccgcuacgaagagagccuucauaacccuuauccagauuaccgauggcugcguacagucaagaccacgaaagaguccuuggugauuaucucuccgucgguagcagaccucgaucccuacgacagaucacugcacagcaggguuuuuccuagugggaaguguuccggaguggccgucucuagcacuuauugcuccaccaaucaugauuacacaauauggaugccagaaaacccccggcugggcaugucaugugacaucuucacuaauagucgcggcaaaagagcuagcaaggggucugagaccugcggauuuguggaugaaaggggucucuauaaauccuuaaagggcgcauguaagcugaaacuuugcgggguguugggacugcggcuaauggacggcacaugggucgccaugcaaaccucaaacgagacgaagugguguccuccagaucagcucguuaaucugcacgacuuccgcagcgacgagauugaacaccuugugguagaggaacuggugcgaaaaagagaggaaugcuuggaugcucucgagaguaucaugacuacaaagucugucuccuuuaggcggcugagccauuuacguaaacuggugcccgguuucgggaaggccuacaccauuuucaacaaaacucucauggaggcggacgcacacuauaagucgguucgcacauggaaugaaauccuuccgucuaagggaugccugagagugggcgggaggugucauccucacgucaacggcguguuuuucaauggaauaauuuugggucccgauggcaacguacuaaucccagagaugcaguccucacugcuccagcaacacauggaacugcuugagaguagcguuauuccucugaugcaucccuuggccgacccauccaccguguuuaaagauggggacgaagcugaggauuucgucgaggugcaccuccccgacguccauaaacaggugucuggaguugaucugggcuuaccuaacugggguaaguacgugcugcuaagcgccggggcacucacggcucugaugcuuaucaucuuuuugaugaccugcugucggcgaguaaaucgcucagaaccaacacagcacaaccugagaggcacuggaagggaggucagugugaccccgcaguccggcaagauuauaagcucuugggaaucauauaaaagugggggagagacacggcucuga

SEQ ID NO: 158910 - RNA, 1575 nt, Artificial Sequence
  derived and/or modified CDS sequence (opt3) from glycoprotein__RABV__EF206719.1
auggugccccaggcccugcuguucgucccucuucugguuuuuccauugugcuucggcaaguuuccgaucuacaccauucccgacaaauuagggccuuggagcccaauagauauccaccaucuguccugucccaacaaucuagugguagaggacgaaggaugcacaaaccucucugguuucucauauauggagcugaaggugggcuacauucuugcuaucaaagucaauggguuuacuuguacgggagugguuaccgaagcagagacauauacuaacuucgugggcuacgucaccacaaccuuuaagagaaaacacuucaggccuacuccagaugccugccgggcggcuuauaauuggaagauggccggugacccccgcuacgaagagagucugcauaacccuuauccagauuaccgaugguugcguacagugaagaccacgaaagagagccucguaauuaucuccccgucuguugcagaccuggaucccuacgacagaucgcugcacucaaggguguuuccuagcgggaaguguaguggagucgccguguccucuacuuauugcagcaccaaucaugauuacacaauauggaugccagaaaacccccggcucggcauguccugugacaucuucacuaauucacgcggcaaaagagcuaguaaggggagcgagaccugcggauuuguggaugaaagggguuuauauaaaucucugaagggcgcauguaaacuuaaauugugcgggguccugggacuacggcucauggacggcacauggguuuccaugcaaaccucaaacgagacgaagugguguccuccagauaaacuggugaaucuucacgacuuccgcagcgacgagauugaacaccugguaguggaggaauugguccgaaagagagaggaaugccucgaugcccuggagaguaucaugacuacaaaaucuguguccuuuaggcgguuaagccaucugcguaagcucguucccgguuucgggaaggcuuacaccauuuucaacaagacucuuauggaggccgacgcgcacuauaagucgguggaaacauggaaugagauccugccgucuaaaggaugcuugcgcgucggcggcagaugucauccucacgugaacgggguauuuuucaauggaauaauucuaggucccgauggcaacguucugaucccagaaaugcaguccucacuccugcagcagcacauggagcuucuggaaaguagcgugauuccuuugguccauccccucgcagacccauccaccguguuuaaggauggggacgaggccgaggauuucgucgaagugcaccuccccgacguucauaaccaagugucuggaguagauuuaggccugccuaauugggguaaauacguccuacucagcgcuggggcccugacggcacuuauguugaucaucuuucugaugaccugcuguaggcgggugaaccgaucagagccaacacagcacaaucuccgcggcacuggaagagaaguuagugugaccccgcaguccggcaagauuauaagcucuugggagucacauaaaagugggggagaaacaauccuguga

SEQ ID NO: 158911 - RNA, 1575 nt, Artificial Sequence; identical to SEQ ID NO: 158906
  derived and/or modified CDS sequence (opt3) from glycoprotein__RABV__EF206720.1

SEQ ID NO: 158912 - RNA, 1575 nt, Artificial Sequence
  derived and/or modified CDS sequence (opt3) from glycoprotein__RABV__EF437215.1
auggugccccagguccugcuguucguuccucuucugguguuuagcaugugcuucggcaaguuuccaaucuacaccauuccggacaaauuggggcccugguccccuauagauauccaccauuuaucuuguccaaacaaucugguaguggaggacgaaggaugcacaaaccuaucagguuucaguuauauggagcucaaggucggcuacauuagcgccaucaaagugaauggguuuacuuguacgggaguugugaccgaagcugagacauauacuaacuucgucggcuacgugaccacaaccuuuaagagaaaacacuucaggcccacuccugaugcaugccgggccgcguauaauuggaagauggcuggugacccacgcuacgaagagucccugcauaaccccuauccugauuaccacuggcuucgaacaguaaagaccacgaaagagucucugguuauuaucucgccaucaguggccgacuuggauccguacgacaagagccuccauagucgugucuuucccuccgggaaauguucuggaauaacuaucagcuccaccuauugcucaacaaaucacgauuacacuauuuggaugccugaaaacccaagacugggcaccaguugugacaucuucacaaauagcaggggcaagcgggcaucuaaagggggaaagaccugcgguuuuguggaugagcgcggccuguauaagucccucaaaggggccuguaaguuaaaacugugcggagugcuuggcuugagacugauggacgguacgugggucgcuaugcaaacuucagaugaaacaaaguggugucccccugaccagcuaguuaaccuccacgacuucaggagcgaugagauugagcaucuggugguagaggaacuugugaaaaagcgggaagagugccuggacgcauuggaaaguaucauggccaccaaaucugucuccuuucgccgacucagccaccugagaaaguuagugccaggguucggaaaggcuuacacuauauucaauaaaacacugauggaggccgaugcgcauuauaagucgguuaggaccuggaacgagauuauccccucuaaaggcugccuccgggugggcgggcguugucacccgcacgucaauggaguguuuuucaacgguauuauccuuggcccugacgggcauguacugauccccgaaaugcaguccucauugcuacagcaacacauggagcugcucgaaaguagcguuauuccacugaugcauccucuugcagaucccuccacgguguuuaaggacggagaugaggccgaagacuucgucgaggugcaccucccagauguccauaaacagauaucuggcguggacuugggucuccccagcugggggaaguacguucuggugucagcuggcguauuagucgugcugaugcuaaccaucuuuauuaugacaugcuguggacgcguucacagaccuaagaguacucagcacggccucgggggaaccgguaggaaaguguccgucacaagccagucuggcaaggugaucucaaguugggagagcuauaaauccgggggagaaacucggcuguga

SEQ ID NO: 158913 - RNA, 1575 nt, Artificial Sequence
  derived and/or modified CDS sequence (opt3) from glycoprotein__RABV__EF556198.1
augacuccccaggugcugcuguucgucccucuucugguuuuuagcuccugcuucggcaaguuuccaaucuacacaauuccggacaaauuggggcccuggucuccuauagauauccaccauuuaucauguccaaacaaucuggugguagaggacgaaggaugcacuaaccuaagugguuucagcuauauggagcucaaggugggcuacauuuccgccaucaaagucaauggguuuacguguaccggagugguuacagaagcugagacuuauaccaacuucgugggcuacgucacaaccacuuuuaagagaaaacacuucaggcccaugccugaugcaugccgggccgcguauaauuggaagauggcuggugacccacgcuacgaagagucucugcauaaccccuauccugauuaccacuggcuucgaacagugaagaccacgaaagagucgcugguaauuaucucaccaagcguugccgacuuggauccguacgacaagagucuccauucccguguguuucccgggggaaaauguucuggcauaacugucagcuccgcaugcuguucaaccaaucacgauuauacaaucuggaugccugaaaacccaagacugggcaccaguugcgacauuuucaccaauagcagggggaagcgggccucuaaaggagguaagacauguggcuuuguggaugagcgcgggcuguacaagucccucaaaggagcuugcaaguuaaaacuguguggcgugcuugguuugagacugauggacgggaccugggucgcaauccaaacgucagaugaaauuaaguggugcagccccgaccagcuaguuaaccuccacgacuuccauagugaugagaucgagcaccuggugguagaggaacuugugaaaaagagggaagagugccuggacgccuuggaaacuauaaugacaaccaaaucugucuccuuucggcgccucagccaucugcgaaaguuagugccuggaucgggcaaggcuuauacuauuuucaauaaaacacugauggaggccgaugcgcacuacaagucuaucagaaccuggaacgagauuaucccauccaaaggcugucucaggguugggggacggugccacccccaugugaauggugucuucuuuaacggcaucauucuugggccggacggacacgugcugauaccugaaaugcagucaaguuugcuacaucagcacauggagcugcucgaaagcuccguaaucccccugaugcauccacuugcagauccuucuacgguuuucaaggacggcgaugaggccgaagacuuuguggagguccaccuccccgaugugcacaaacaaauuagcggugucgacuuggggcucccaaauuggggcaaguaugugcugaucucagcuggagccuuaaccgcacugaugcuaacaauauuccucaugacuuguugccguaagaccaaccgcgcugagaguauucagcauucccccggcgaaacagggagaaaaguuagcgugacuucucacaacggaaggguaaucucaaguugggagagcuacaaguccgguucugaaaccaaacuguga

SEQ ID NO: 158914 - RNA, 1575 nt, Artificial Sequence
  derived and/or modified CDS sequence (opt3) from glycoprotein__RABV__EF564174.1
augaucccccaggcccuccuguucgugccucuucuggucuuuccauugugcuucggcaaguuuccgauuuacaccauacccgacaaauuagggccuuggagcccaaucgauauucacaaccuguccugucccaauaaccuaguuguggaggacgaaggaugcacaaaucucucugguuucucauauauggagcugaagguaggcuacaucagugcuauuaaagugaacggguuuacuuguacgggagucgugaccgaagcagagacauauacuaauuucguuggcuacgugaccacaaccuuuaagagaaaacauuucaggccuacuccagaugccugccggagcgcguauaacuggaagauggcuggugacccccgcuacgaagagucccuucacaauccuuauccagauuaccauuggcugcgaacagucaagaccacgaaagagucugugguaaucauaucgccgucaguugccgacuuggaucccuacgacaagagccuccacagucguguguuuccuagagggaaauguuccggaaucacugucucuagcgcauauugcuccaccaaccaugauuacacaauuuggaugccagaaaaucccaggcugggcacuucaugugacaucuucaccaacagucggggcaagcgcgccagcaaagggucuaagacaugcggauuuguggaugagagaggucuguauaagucccucaaaggcgcuuguaaguuaaaacugugcggggugcuuggauugaggcugauggacggcaccugggucgcaauucaaacgucaaaugaaacuaagugguguccuccagaucagcuaguuaaccuccacgacuuccacagcgacgagaucgagcaucuggugguagaggaacuuguggaaaaacgggaggaaugccuggaugccuuggagaguauaaugacaaccaaucccgucucuuuucgccgacucuccccgcugagaaaguuagugccugguuucgggaaggcuuacacuauuuucaacaagacacugauggaggccgacgcgcacuauaagagcguucagaccugggaugaaaucauucccucgaaaggaugccucagggugggcgcacggugucauccacacgucaauggcguguuuuucaacgggaucauccuuggaccugacggucacguacugauucccgagaugcagucuuccuugcuacaacagcauauggaacugcucgagucaaguguuauaccacugaugcacccccuugccgauccuagcacgguguuuaaggacggcgaugaagucgaggacuucguggagguccaucugccagaugugcacaaacagguuuccgggguggacuugggacucccgaacuggggcaaggauguacugaugggugcuggggucuuaaccgcccugaugcuaaugaucuuucucaugacaugcugucgucgcacuaauagagcagaaucuauucagcauagccugggcgagaccggaaggaaagugucaguuacaagucaauccggccgggugaucagcucuugggaaucauacaagagugggggagagacuaaacuuuga

SEQ ID NO: 158915 - RNA, 1581 nt, Artificial Sequence
  derived and/or modified CDS sequence (opt3) from glycoprotein__RABV__EF614261.1
augcccagccaggccguguuccugguccucaccacaguauuuucccaaugcgugggcaaguucccuaucuacacuauuccagacaaacuugggccguggucucccauagauauccaccaucugucauguccuaacaauuugguaguggaggacgauggaugcacgaccuuaagugguuuuacauauauggaacugaaggucggcuacauuacuaccaucaaaguggacggguucacauguaccggaauuguuacugaggcugaaacauauaccaacuuugugggcuacgucacgacuaccuucaagagaaaacacuuuaggccaggucccagcgcaugccgggaugccuauaauuggaaggcggcuggggacccucgcuacgaggaaucccuacauaacccauaucccgauucucacuggcuccgaacagugacuaccacaaaggagucgcugcuuaucauaucaccuagcguaguugacauggaugccuacgacaaaagucuguuguccaagaucuucccaaauggaaaauguccgggcgugucuauugcaagccccuuuugcuccaccaaccaugauuacacgaucuggaugccugagaauacuaagacaggcaugucaugugacauuuucaccacaaguaaagggaagcgugccacuaaggauggaaaacucugcgguuuugucgacgaaagaggccuguauaagagccugaaagggucuuguaagcucaaauuaugcggaguguccggccugaggcuuauggacgguucaugggugagcauccagaaccacgaggaagcuaagugguguccacccgaucaguuggucaauguucacgacuuccauagugaugagauagagcaccugauuguggaggagcuaguuaaaaagcgggaagaaugccucgacgcacuggaaucuaucaugaccacgaaguccauuagcuuucgcagacuuucgcaucugaggaaauuggugccuggguucggaaaggccuacaccaucaucaacaaaacacucauggaggcugaugcccacuauaagucuauucgggagugguccgaaauaaucccaucaaaaggcugccuggucgcgggcgggcgcuguuaccaccaucacaauggaguguucuuuaacgguauuaucuuaagucccgacggccauguucugauaccggagaugcagagcgcacuccuucaacagcacauugaacuguuggaguccucugugaucccucuaaugcauccccuggccgauccaagcacugucuucaagggggacgauggagcugaagacuuuguggagguacaccucccugauguucagaagcagaucucaggcauugaccugggucuucccgaguggaaacgauauuuccugaucgggguggccgcauugacccucuuugcucugacaauuuucgucguggucugcuguagaagggugcggcgucgcgaaagagccaagccaaaucccguugaguuaauaaggaaagugaguguaacuucccaaagcggcaaggucaucccuucuugggaaucauacaaaguggaggcggaaggacagagucaggccuga

SEQ ID NO: 158916 - RNA, 1575 nt, Artificial Sequence; identical to SEQ ID NO: 158891
  derived and/or modified CDS sequence (opt3) from glycoprotein__RABV__EF643518.1

SEQ ID NO: 158917 - RNA, 1575 nt, Artificial Sequence
  derived and/or modified CDS sequence (opt3) from glycoprotein__RABV__EU008924.1
augaucccccaggcccugcuguucgugccucuucuggucuuuagcuccugcuucggcaaguuuccaauuuacaccauaccggacaaauuggggcccuggucuccuaucgauauucaccauuuaucauguccaaacaaucugguuguggaggacgaaggaugcacaaaccuaagugguuucagcuauauggagcucaagguaggcuacaucuccgcuauuaaagugaauggguuuacuuguacgggagucgugaccgaagcagagacauauacuaacuucguuggcuacgugaccacaaccuuuaagagaaaacacuucaggcccaugccuggugccugccgggcggcuuauaauuggaagauggccggggauccacgcuacgaagagucucugcauaaccccuauccugacuaccacuggcuucgaacugucaagacaaccaaagagucgcuggugaucauaucaccaagcguagcagauuuggacccguacgauaagagucuccauucccguguuuuucccucuggaaaauguagcggcaucacgguguccucaacuugcuguaguaccaaucacgacuauacaauuuggaugccugaaaacccaagacugggcacuagcugcgauaucuucaccaauucuagggggaagcgggccuccaaaggagguaagacauguggcuuugucgacgagcgcgggcuguacaagucacucaaaggagcuugcaaguuaaaacuguguggcgugcuugguuugagacugauggaugggaccuggguggcaauucaaacgagcgacgaaaucaaguggugcagucccgaucagcuagucaaccuccacgacuuccauucugacgagauagagcaccugguuguggaggaacuugugaaaaagagggaagagugccuggaugccuuggaaacuauuaugacaaccaaauccgugagcuuucggcgccucucgcaucugcgaaaguuagucccuggauucggcaaggcuuauacuaucuucaauaaaacacugauggaggccgacgcgcacuacaagucuauuagaaccuggaacgagaucaucccauccaaaggcugucucaggguagggggacggugccacccccauguuaaugguguguuuuucaacggcauuauacuugggccggauggacacguccugaucccugaaaugcagucaaguuugcuacaucagcacauggagcugcucgaaagcuccgugauuccccugaugcauccacuugcagacccuucuacgguauuuaaggauggcgacgaggccgaagauuucguugaggugcaccuccccgacguccacaaacaaaucagcgguguggauuuggggcucccaaauuggggcaaguauguccugauaucagugggagcuuuaaccgcccugaugaguaugauuuuucuaaugacauguugccguaagacuaaccgcgcagaguccauccagcauagccccggcgaaaccgggagaaaaguuucugugacaucacacaacggaaggguaaucaguagcugggaguccuacaagucugguggcgaaacuaaacucuga

SEQ ID NO: 158918 - RNA, 1575 nt, Artificial Sequence
  derived and/or modified CDS sequence (opt3) from glycoprotein__RABV__EU008925.1
augaucccccaggcccuccuguucgugccucuucuggucuuuagcuugugcuucggcaaguuuccaauuuacaccauaccggacaaauuagggcccugguccccuaucgauauucaccaucugucuuguccaaacaaucuaguuguggaggacgaaggaugcacaaaccucucagguuucaguuauauggagcugaagguaggcuacaucagcgcuauuaaagugaauggguuuacuuguacgggagucgugaccgaagcagagacauauacuaacuucguuggcuacgugaccacaaccuuuaagagaaaacacuucaggcccaugccuggugccugccgggcggcuuauaauuggaagauggccggggauccacgcuacgaagagucccuucauaaccccuauccugacuaccacuggcugcgaacugucaagacaaccaaagagucuuuggugaucauaucgccaucaguagcagaucucgacccguacgauaagagccugcauagucguguuuuucccggaggcaaauguuccggcaucacggugucuagcacuugcuguuccaccaaucacgacuauacaauuuggaugccugaaaacccaagacuggggacuucaugcgauaucuucaccaauaguaggggaaagcgggccagcaaagguggcaagacauguggguuugucgacgagcgcggacucuacaagucuuuaaaaggcgcuugcaagcugaaacuuugugguguguuggggcugagacuaauggauggaaccuggguggcaauucaaacguccgacgaaaucaaguggugcucacccgaucagcucgucaaccugcacgacuuccauagcgacgagauagagcaccuuguuguggaggaacuggugaaaaagagggaagagugcuuggaugcccucgaaacuauuaugacaaccaaaaguguaucuuuucggcgccugucccauuuacgaaagcuggucccuggcuucggcaaggcuuauacuaucuucaauaaaacacucauggaggccgacgcgcacuacaagagcauuagaaccuggaacgagaucaucccaucgaaagggugucuuagggugggaggucggugccacccccauguuaauggcguguuuuucaacgggauuauacugggaccggauggccacgucuugaucccugaaaugcagucuucccuacugcaucagcacauggagcuccuggaaucaagugugauuccccuuaugcauccacuggcagacccuagcacgguauuuaaggauggugacgaggccgaagauuucguugaggugcacuugcccgacguccacaaacaaaucuccgggguggaucucggccugccaaauuggggaaaguaugucuuaauaucugcuggcgcccugaccgcacuaaugagcaugauuuuucucaugacauguugccguaagacuaaccgcgcugggucaauccagcauagucccggagagaccgguagaaaaguguccguuacaagccacaacggcagggugaucucuucaugggaaaguuacaagagcgggggagagacuaaacuguga

SEQ ID NO: 158919 - RNA, 1575 nt, Artificial Sequence
  derived and/or modified CDS sequence (opt3) from glycoprotein__RABV__EU008926.1
augaucccccaggcccuccuguucgugccucuucuggucuuuagcuccugcuucggcaaguuuccaauuuacaccauaccggacaaauuggggcccuggucuccuaucgauauucaccauuuaucauguccaaacaaucugguuguggaggacgaaggaugcacaaaccuaagugguuucagcuauauggagcucaagguaggcuacaucuccgcuauuaaagugaauggguuuacuuguacgggagucgugaccgaagcagagacauauacuaacuucguuggcuacgugaccacaaccuuuaagagaaaacacuucaggcccaugccuggugccugccgggcggcuuauaauuggaagauggccggggauccacgcuacgaagagucucugcauaaccccuauccugacuaccacuggcuucgaacugucaagacaaccaaagagucgcuggugaucauaucaccaagcguagcagauuuggacccguacgauaagagucuccauucccguguuuuucccggaggcaaauguucuggcaucacggugagcuccacuugcuguucaaccaaucacgacuauacaauuuggaugccugaaaacccaagacuggggaccaguugcgauaucuucacuaauagcaggggaaagcgggccucuaaagguggcaagacauguggguuugucgacgagcgcggacuguacaagucccucaaaggcgcuugcaaguuaaaacuguguggugugcuuggguugagacugauggauggaaccuggguggcaauucaaacgucagacgaaaucaaguggugcagccccgaucagcuagucaaccuccacgacuuccauagugacgagauagagcaccugguuguggaggaacuugugaaaaagagggaagagugccuggaugccuuggaaacuauuaugacaaccaaaucuguauccuuucggcgccucagccaucugcgaaaguuagucccuggcuucggcaaggcuuauacuaucuucaauaaaacacugauggaggccgacgcgcacuacaagucgauuagaaccuggaacgagaucaucccaucuaaagggugucucagggugggaggucggugccacccccauguuaauggcguguuuuucaacgggauuauacuuggaccggauggccacguccugaucccugaaaugcaguccucauugcuacagcaacauauggagcugcucgaaaguagcgugauuccccugaugcacccacuugcagacccuuccacgguauuuaaggauggugacgaggccgaagauuucguugaggugcaucugcccgacguccacaaacagaucucugggguggauuugggccucccaaauuggggaaaguauguccugaugagcgcuggcgccuuaaccgcacugaugucaaugauauuucuaaugacauguugccguaagacuaaccgcgcugagaguauucagcacucccccggggaaaccggaagaaaagugagcguuacaucucauaacgguagggugaucucaaguugggagagcuacaaguccggcggggaaacuaaacucuga

SEQ ID NO: 158920 - RNA, 1575 nt, Artificial Sequence
  derived and/or modified CDS sequence (opt3) from glycoprotein__RABV__EU008927.1
augaucccccaggcccuccuguucgugccucuucuggucuuuuugagcugcuucggcaaguuuccaauuuacaccauaccggacaaauuagggcccugguccccuaucgauauucaccaucugucuuguccaaacaaucuaguuguggaggacgaaggaugcacaaaccucucagguuucaguuauauggagcugaagguaggcuacaucagcgcuauuaaagugaauggguuuacuuguacgggagucgugaccgaagcagagacauauacuaacuucguuggcuacgugaccacaaccuuuaagagaaaacacuucaggcccaugccugaugccugccgggcggcuuauaauuggaagauggccggugacccacgcuacgaagagucccuucauaaccccuauccugauuaccacuggcugcgaacugucaagacaaccaaagagucuuuggugaucauaucgccaucaguagcagaccucgauccguacgacaagagccugcauagucguguuuuucccgggggaaaauguuccggcaucacggugucuagcacuugcuguuccaccaaucacgauuauacaauuuggaugccugaaaacccaagacugggcacuucaugcgacaucuucaccaauaguagggggaagcgggccagcaaaggaucuaagacaugugguuuugucgaugagcgcggccucuacaaguccuuaaaaggggcuugcaagcugaaacuuuguggaguguugggccugagacuaauggacgguaccuggguggcaauucaaacgucagaugaaaucaaguggugcagccccgaccagcucgucaaccugcacgacuuccauagugaugagauagagcaccuuguuguggaggaacuggugaaaaagagggaagagugcuuggacgcccucgaaacuauuaugacaaccaaaucuguauccuuucggcgccugagccauuuacgaaagcuggucccuggguucggaaaggcuuauacuaucuucaauaaaacacucauggaggccgaugcgcacuacaagucgauuagaaccuggaacgagaucaucccaucuaaaggcugucuuagggugggcgggcggugccacccccauguuaauggaguguuuuucaacgguauuauacugggcccggacgggcacgucuugaucccugaaaugcaguccucacuacugcaucagcacauggagcuccuggaaaguagcgugauuccccuuaugcauccacuggcagauccuuccacgguauuuaaggacggagaugaggccgaagacuucguugaggugcacuugcccgauguccacaaacaaaucucuggcguggaccucggucugccaaauugggggaaguaugucuuaauaagcgcuggcgcccugaccgcacuaaugucaaugauuuuucucaugacauguugccguaagacuaaccgcgcugagaguauccagcauucccccggagaaaccggcagaaaagugagcguuacaucucacaacgggagggugaucucaaguugggagagcuacaaguccggaggugaaacuaaacuguga

SEQ ID NO: 158921 - RNA, 1575 nt, Artificial Sequence
  derived and/or modified CDS sequence (opt3) from glycoprotein__RABV__EU008928.1
augaucccccaggugcugcuguucgucccucuucugguuuuuagcuccugcuucggcaaguuuccaauuuacaccauaccggacaaauuggggcccuggucuccuaucgauauucaccauuuaucauguccaaacaaucuggugguagaggacgaaggaugcacaaaccuaagugguuucagcuauauggagcucaaggugggcuacaucuccgccauuaaagucaauggguuuacuuguacgggagugguuaccgaagcugagacauauacuaacuucgugggcuacgucaccacaaccuuuaagagaaaacacuucaggcccaugccugaugcaugccgggccgcguauaauuggaagauggcuggugacccacgcuacgaagagucucugcauaaccccuauccugauuaccacuggcuucgaacugugaagacaaccaaagagucgcugguaaucauaucaccaagcguugccgacuuggauccguacgacaagagucuccauucccguguguuucccucugggaaauguagcggaaucacggucuccucaacuugcuguaguaccaaucacgauuauacaauuuggaugccugaaaacccaagacugggcacuagcugcgacaucuucaccaauucuaggggcaagcgggcauccaaagggggaaagacaugugguuuuguggaugagcgcggccuguacaagucacucaaaggggccugcaaguuaaaacuguguggagugcuuggcuugagacugauggacgguaccugggucgcuauucaaacgagcgaugaaaucaaguggugucccccugaccagcuaguuaaccuccacgacuuccauagugaugagauagagcaccuggugguagaggaacuugugaaaaagagggaagagugccuggacgcauuggaaucuauuaugacuacaaaauccgucagcuuucggcgccucucgcaucugcgaaaguuagugccaggguucggaaaggccuauaccaucuucaauaaaacucugauggaggcugaugcccacuacaagucuauuagaacauggaacgagaucauccccuccaaaggcugccucaggguuggcgggcggugccacccgcaugugaauggagucuuuuucaacgguauuauacuuggcccugacgggcacgugcugauccccgaaaugcagucaaguuugcuacaucagcacauggagcugcucgaaagcuccguaauuccacugaugcauccucuugcggaucccucuaccguuuuuaaggacggagaugaggcagaagacuucguggagguccaccucccagaugugcacaaacaaaucagcggcgucgacuugggucuccccaauugggggaaguaugugcugauaucagccggcgcuuuaacggcccugaugaguaugauuuuucuaaugaccuguugccguaagacaucccgcgcagagagcacucagcauucuccuggagaaaccggcagaaaaguuucagugacaagucacaacgggaggguaaucagcuccugggagucuuacaagucgggaggugaaacuaaacucuga

SEQ ID NO: 158922 - RNA, 1575 nt, Artificial Sequence
  derived and/or modified CDS sequence (opt3) from glycoprotein__RABV__EU086128.1
auggugccccagguccuccuguucguuccucuucugguguuuagcaugugcuucggcaaguuuccaaucuacaccauuccggacaaauuggggcccugguccccuauagauauccaccauuuaucuuguccaaacaaucugguaguggaggacgaaggaugcacaaaccuaucagguuucaguuauauggagcucaaggucggcuacauuagcgccaucaaagugaauggguuuacuuguacgggaguugugaccgaagcugagacauauacuaacuucgucggcuacgugaccacaaccuuuaagagaaaacacuucaggcccacuccugaugcaugccgggccgcguauaauuggaagauggcuggugacccacgcuacgaagagucccugcauaaccccuauccugauuaccacuggcuucgaacaguaaagaccacgaaagagucucugguuauuaucucgccaucaguggccgacuuggauccguacgacaagagccuccauagucgugucuuucccuccgggaaaugucugggaauaacuaucucuagcaccuauugcuccacaaaucacgauuacacuauuuggaugccugaaaacccaagacugggcaccucaugugacaucuucacaaauaguaggggcaagcgggcaagcaaagggucuaagaccugcggauuuguggaugagcgcggucucuauaaguccuuaaaaggcgccuguaagcugaaacuuugcgggguguugggacugagacuaauggacggcacgugggucgcuaugcaaacuucagaugaaacaaaguggugucccccugaccagcucguuaaccugcacgacuucaggagcaaugagauugagcaucuugugguagaggaacuggugaaaaagcgggaagagugcuuggaugcacucgaaaguaucaugaccacuaaaucugucuccuuucgccgacugagccacuuaagaaagcuggugccagguuucgggaaggccuacacaauauucaacaaaacccucauggaggcugacgcccauuauaagucgguuaggacguggaaugagauuauccccucuaaaggaugccuucgggugggcggccguugucacccgcacgucaacgggguguuuuucaauggaauuauccuggguccugauggccauguauugauccccgaaaugcaguccucacuacugcagcaacacauggaccuccuggagaguagcguuauuccacuuaugcauccucuggcggaucccuccaccguguuuaaggacggggaugaagcagaggacuucgucgaagugcacuugccagauguccauaaacagauaucuggaguggaccucggccugcccagcugggguaaguacguuuuagugucagccgggguacuggucgugcuaaugcucacaaucuuuauuaugacuugcuguggccgcguucacagaccuaagaguacccagcacucccugggaggcacagggaggaaagugagcgucacuucucagucaggaaaggugaucaguagcugggaguccuauaaacgggguggcgagacccgacuuuga

SEQ ID NO: 158923 - RNA, 1575 nt, Artificial Sequence
  derived and/or modified CDS sequence (opt3) from glycoprotein__RABV__EU086129.1
augaucccccaggcccuccuguucgugccuuuucuugcuuucagccugugcuuuggcaaguucccaauuuacaccauaccggacaaauuggggcccugguccccuaucgauauucaccauuuaucuuguccaaacaaucuggucguugaggacgaaggaugcacaaaccuaucagguuuuaguuauauggagcucaaggugggcuacaucagcgcaauuaaaguaaauggguucacuuguacgggaguggucaccgaagccgagacauauacuaacuuuaucggcuacgugaccacaaccuucagaaggaagcacuuucggcccacuccugaugcgugccgcgcugccuauaauuggaaaauggccggugacccacgauacgaagagucccugcauaaccccuauccugauuaccacuggcuucguacaguuaagaccacgaaggagucucuggugauaaucucgccaucagucagcgacuuggauccguacgacaaaagucuccauuccagaguguuccccucugggaaguguagcggaauuacuguauccucaaccuauugcccuacaaaucacgauuacacuaucuggaugccagaaaaccccaggcugggcaccaguugugacauuuuuacaaauagccggggcaaacgcgcaucuaagggguccaaaaccugcggauucguugaugagagaggucuguauaagucacucaagggcgcuuguaaauuaaagcugugcggggugcuuggauugaggcugauggacggcacgugggcagccauccaaacuagcgaugaagcuaaaugguguccuccagaccagcuagucaacauacacgacuuucggagugaugagauugagcaucucgugguggaggaacuggucaagaaacgcgaagagugccuugacgcccuggaaucuaucaugacaaccaaguccguuagcuuccgaagauugucgcaccucaggaaacuggugcccgguuucgggaaggcguacacuauuuuuaauaagacauuaauggaggcagaugcccauuauaaaucuguacggaccuggaacgagaucaucccguccaagggaugccugcgugugggcggccgcugucacccucacgucaaugggguguucuuuaacggaauuauacucggucccgacggccauguucuuaucccagaaaugcagucaagucuguugcagcaacacauggagcuacuggaaagcuccgugauuccucucaugcauccccuggcugauccaucuacggucuucaaagacggggaugaggccgaagacuuuguggagguacaccuucccgauguucauaaacaggugagcggagucgaccugggcuugccuucaugggguaaguacgugcucaugagugucggggcacugaucguguuaaugcugaugauauuccuaaccacaugcuguagaaaggcuaauggcgccgaguccauuaggcaccggcucggagaaacuggccgaaagguuagcgugaccucucagaacgggcgcguaaucucaaguugggagagcuauaaauccggaggugaaacaaagcuguga

SEQ ID NO: 158924 - RNA, 1575 nt, Artificial Sequence
  derived and/or modified CDS sequence (opt3) from glycoprotein__RABV__EU086130.1
augaucccccaggcccugcuguucgugccucuucuggucuuuagcuugugcuacggcaaguucccaauuuauaccauaccggacaaauuagggcccugguccccuaucgauauucaccaucugucuuguccaaacaaucuaguuguggaggacgaaggaugcacaaaccucucagguuuuaguuacauggagcugaagguaggcuauaucagcgcuauuaaagugaauggguucacuuguacgggagucgugaccgaagcagagacauacacuaacuuuguuggcuaugugaccacaaccuucaagagaaaacacuuuaggcccacuccugaugccugccgggcggcuuacaauuggaagauggccggugacccacgcuaugaagagucccuucauaaccccuacccugauuaccacuggcugcgaacagucaagaccacgaaagagucuuuggugaucauaucgccaucaguaagcgaccucgauccguaugacaagagucugcauucccguguuuuccccucugggaaauguagcggaaucacuguguccucaaccuacugcccuacaaaucacgauuauacuauuuggaugccagaaaaccccagacugggcaccaguugugacaucuuuacaaauagcaggggcaagcgggcaucuaaaggguccaagaccugcggauucgucgaugagcgcggucucuacaagucauuaaaaggcgccuguaagcugaaacuuugcgggguguugggacugagacuaauggacggcacgugggcugcaauucaaacuagcgaugaagccaagugguguccuccagaccagcucgugaacauccacgacuuuaggagugaugagauagagcaucuggucguugaggaacuugugaaaaagcgggaagagugccuggacgcuuuggaaucuauuaugacaaccaaauccgugagcuuccgccgacucucgcaccugagaaaguuaguacccgguuuugggaaggccuauacuaucuucaauaaaacacugauggaggcggaugcacauuacaagucugucaggaccuggaacgagauuaucccguccaaaggaugccuccgggugggcggccguugucacccucacguuaaugggguguucuuuaacggaaucauucuuggucccgacggccauguccugauaccagaaaugcagucaaguuugcuacagcaacacauggagcugcucgaaagcuccgugaucccucugaugcauccccuugccgauccaucuacgguauucaaggacggggaugaggcugaagacuuuguugaggugcaccuccccgauguccauaaacaggugagcggagucgacuugggccucccuucaugggguaaguaugugcugaugaguguuggggccaugauugcauuaaugcuggugaucuuccuaaccacaugcugucgcaagguaaauggcgcugagacuauacagcacagacucggagaaaccggcaggaaagucuccgugacaagccagucugggcggguuauuucaaguugggagagcuacaaguccggaggugaaacuaaacuguga

SEQ ID NO: 158925 - RNA, 1575 nt, Artificial Sequence
  derived and/or modified CDS sequence (opt3) from glycoprotein__RABV__EU086131.1
augaucccccaggcccuucucuucgugccucuucuggucuuuagcuugugcuuaggcaaguucccaauuuacaccauaccggacaaacuggggcccugguccccuaucgauauucaccaucuaucuuguccaaacaaucucguuguggaggacgaaggaugcacaaaccugucagguuuuaguuauauggagcuuaagguaggcuacaucagcgcuauuaaagugaauggguucacuuguacgggagucgugaccgaagcagagacauauacuaacuuuguuggcuacgugaccacaaccuucaagagaaaacacuuuaggcccacuccugaugccugccgggcggcuuauaauuggaagauggccggugacccacgcuacgaagagucccugcauaaccccuauccugauuaccacugguugcgaacagucaagaccacgaaagagucucucgugaucauaucgccaucaguaagcgaccuggauccguacgacaagagucugcauucccguguuuuccccgggggaaaauguucuggcaucacugugagcuccaccuauugcccuacaaaucacgauuacacuauuuggaugccagaaaaccccagacucggcaccucaugugacaucuuuacaaauaguagggggaagcgggcaagcaaaggaucuaagaccugcgguuucgucgaugagcgcggcuuauauaagucccugaaaggggccuguaagcugaaauugugcggagugcugggccuaagacucauggacgguacgugggcugcaauucaaacuucagaugaagccaagugguguccuccagaccagcuggugaacauccacgacuuuaggagcgaugagauagagcaucuugucguugaggaacuggugaaaaagcgggaagagugcuuggacgcucucgaaaguauuaugacaaccaaaucuguauccuuccgccgacugagccacuuaagaaagcuggugcccggguuuggaaaggccuacacuaucuucaauaaaacacucauggaggcggaugcacauuauaagucggucaggaccuggaacgagauuaucccgucuaaaggcugccuucgggugggcgggcguugucacccucacguuaauggaguguucuuuaacgguaucauucugggccccgacgggcaugucuugauaccagaaaugcaguccucacuacugcagcaacacauggagcuccuggaaaguagcgugaucccucuuaugcauccccuggccgauccauccacgguauucaaggacggagaugaggcugaagacuuuguugaggugcacuugcccgauguccauaaacaggugucuggcgucgaccucggucugccuagcugggggaaguacguguuaaugucaguuggcgccaugauugcacugaugcuaaugaucuuccucaccacaugcugucgcaaggcuaauggagccgagacuauacagcacagacugggcgaaaccgggaggaaagugaguguaacaucccagagcggacgggucauuucuucaugggagaguuauaagagcgguggcgaaacuaaacuuuga

SEQ ID NO: 158926 - RNA, 1575 nt, Artificial Sequence
  derived and/or modified CDS sequence (opt3) from glycoprotein__RABV__EU086132.1
augaucccccaggcccugcuguucgugccucuucuggucuuuagcuugugcuucggcaaguuuccaauuuacaccauaccggacaaauuagggcccugguccccuaucgauauucaccaucugucuuguccaaacaaucuaguuguggaggacgaaggaugcacaaaccucucagguuucaguuauauggagcugaagguaggcuacaucagcgcuauuaaagugaauggguuuacuuguacgggagucgugaccgaagcagagacauauacuaacuucguuggcuacgugaccacaaccuuuaagagaaaacacuucaggcccacuccugaugccugccgggcggcuuauaauuggaagauggccggugacccacgcuacgaagagucccuucauaaccccuauccugauuaccacuggcugcgaacagucaagaccacgaaagagucuuuggugaucauaucgccaucaguaagcgaccucgauccguacgacaagagucugcauucccguguuuuucccucugggaaauguagcggaaucacuguguccucaaccuauugcccuacaaaucacgauuacacuauuuggaugccagaaaaccccagacugggcaccaguugugacaucuucacaaauagcaggggcaagcgggcaucuaaaggguccaagaccugcggauuugucgaugagcgcggucucuauaagucauuaaaaggcgccuguaagcugaaacuuugcgggguguugggacugagacuaauggacggcacgugggcugcaauucaaacuagcgaugaagccaagugguguccuccagaccagcucgugaacauccacgacuucaggagugaugagauagagcaucuggucguugaggaacuugugaaaaagcgggaagagugccuggacgcuuuggaaucuauuaugacaaccaaauccgugagcuuucgccgacucucgcaccugagaaaguuaguacccgguuucgggaaggccuacacuaucuucaauaaaacacugauggaggcggaugcacauuauaagucugucaggaccuggaacgagauuaucccguccaaaggaugccuccgggugggcggccguugucacccucacguuaaugggguguuuuucaacggaaucauucuuggucccgacggccauguccugauaccagaaaugcagucaaguuugcuacagcaacacauggagcugcucgaaagcuccgugaucccucugaugcauccccuugccgauccaucuacgguauuuaaggacggggaugaggcugaagacuucguugaggugcaccuccccgauguccauaaacaggugagcggagucgacuugggccucccuucaugggguaaguacgugcugaugaguguuggggccaugauugcauuaaugcugaugauccuacucaccacaugcugucgcaaggugaauggcgcugagacuauacagcacagacugggagaaaccggcaggaaaguauccgucacaagccagucugggcgggugauuucaaguugggagagcuauaaguccggaggugaaacuaaacuuuga

SEQ ID NO: 158927 - RNA, 1575 nt, Artificial Sequence
  derived and/or modified CDS sequence (opt3) from glycoprotein__RABV__EU086133.1
augaucccccaggcccugcuguucgugccucuucuggucuuuagcuugugcuucggcaaguuuccaauuuacaccauaccggacaaauuagggcccugguccccuaucgauauucaccaucugucuuguccaaacaaucuaguuguggaggacgaaggaugcacaaaccucucagguuucaguuauauggagcugaagguaggcuacaucagcgcuauuaaagugaauggguuuacuuguacgggagucgugaccgaagcagagacauauacuaacuucguuggcuacgugaccacaaccuuuaagagaaaacacuucaggcccacuccugaugccugccgggcggcuuauaauuggaagauggccggugacccacgcuacgaagagucccuucauaaccccuauccugauuaccacuggcugcgaacagucaagaccacgaaagagucuuuggugaucauaucgccaucaguaagcgaccucgauccguacgacaagagucugcauucccguguuuuucccucugggaaauguagcggaaucacuguguccucaaccuauugcccuacaaaucacgauuacacuauuuggaugccagaaaaccccagacugggcaccaguugugacaucuucacaaauagcaggggcaagcgggcaucuaaaggguccaagaccugcggauuugucgaugagcgcggucucuauaagucauuaaaaggcgccuguaagcugaaacuuugcgggguguugggacugagacuaauggacggcacgugggcugcaauucaaacuagcgaugaagccaagugguguccuccagaccagcucgugaacauccacgacuucaggagugaugagauagagcaucuggucguugaggaacuugugaaaaagcgggaagagugccuggacgcuuuggaaucuauuaugacaaccaaauccgugagcuuucgccgacucucgcaccugagaaaguuaguacccgguuucgggaaggccuacacuaucuucaauaaaacacugauggaggcggaugcacauuauaagucugucaggaccuggaacgagauuaucccguccaaaggaugccuccgggugggcggccguugucacccucacguuaaugggguguuuuucaacggaaucauucuuggucccgacggccauguccugauaccagaaaugcagucaaguuugcuacagcaacacauggagcugcucgaaagcuccgugaucccucugaugcauccccuugccgauccaucuacgguauuuaaggacggggaugaggcugaagacuucguugaggugcaccuccccgauguccauaaacaggugagcggagucgacuugggccucccuucaugggguaaguacgugcugaugaguguuggggccaugauugcauuaaugcugaugaucuuucuaaccacaugcugucgcaaggugaauggcgcugagacuauacagagaaggcucggagaaaccggccggaaaguauccgucacaagccagucugggcgagugauuucaaguugggagagcuauaaguccggaggugaaacuaaacuguga

SEQ ID NO: 158928 - RNA, 1575 nt, Artificial Sequence
  derived and/or modified CDS sequence (opt3) from glycoprotein__RABV__EU086134.1
augaucccccaggcccugcuguucgugccucuucuggucuuuagcuugugcuucggcaaguuuccaauuuacaccauaccggacaaauuagggcccugguccccuaucgauauucaccaucugucuuguccaaacaaucuaguuguggaggacgaaggaugcacaaaccucucagguuucaguuauauggagcugaagguaggcuacaucagcgcuauuaaagugaauggguuuacuuguacgggagucgugaccgaagcagagacauauacuaacuucguuggcuacgugaccacaaccuuuaagagaaaacacuucaggcccacuccugaugccugccgggcggcuuauaauuggaagauggccggugacccacgcuacgaagagucccuucauaaccccuauccugauuaccacuggcugcgaacagucaagaccacgaaagagucuuuggugaucauaucgccaucaguaagcgaccucgauccguacgacaagagucugcauucccguguuuuucccucugggaaauguagcggaaucacuguguccucaaccuauugcccuacaaaucacgauuacacuauuuggaugccagaaaaccccagacugggcaccaguugugacaucuucacaaauagcaggggcaagcgggcaucuaaaggguccaagaccugcggauuugucgaugagcgcggucucuauaagucauuaaaaggcgccuguaagcugaaacuuugcgggguguugggacugagacuaauggacggcacgugggcugcaauucaaacuagcgaugaagccaagugguguccuccagaccagcucgugaacauccacgacuucaggagugaugagauagagcaucuggucguugaggaacuugugaaaaagcgggaagagugccuggacgcuuuggaaucuauuaugacaaccaaauccgugagcuuucgccgacucucgcaccugagaaaguuaguacccgguuucgggaaggccuacacuaucuucaauaaaacacugauggaggcggaugcacauuauaagucugucaggaccuggaacgagauuaucccguccaaaggaugccuccgggugggcggccguugucacccucacguuaaugggguguuuuucaacggaaucauucuuggucccgacggccauguccugauaccagaaaugcagucaaguuugcuacagcaacacauggagcugcucgaaagcuccgugaucccucugaugcauccccuugccgauccaucuacgguauuuaaggacggggaugaggcugaagacuucguugaggugcaccuccccgauguccauaaacaggugagcggagucgacuugggccucccuucaugggguaaguacgugcugaugaguguuggggccaugauugcauuaaugcugaugaucuuucuaaccacaugcugucgcaaggugaauagagcugagacuauacagaggcggcucggcgaaaccggacgaaaaguauccgucacaagccagacuggccgcgugauuucuucaugggagaguuauaagagcgggggagaaaccaaacuguga

SEQ ID NO: 158929 - RNA, 1575 nt, Artificial Sequence
  derived and/or modified CDS sequence (opt3) from glycoprotein__RABV__EU086135.1
augaucccccaggugcugcuguucgucccucuucugguuuuuagcuccugcuucggcaaguuuccaauuuacaccauaccggacaaauuggggcccuggucuccuaucgauauucaccauuuaucauguccaaacaaucuggugguagaggacgaaggaaguacaaaccuaagcgguuuccccuauauggagcucaaggugggcuacaucuccgccauuaaagucaauggguuuacuugcacgggagugguuaccgaagcugagccuuauacaaacuucgugggcuacgucacuaccacauuuaagagaaaacacuucaggccaaugcccgaugcaugucgggccgcguauaauuggaagauggcuggugacccucgcuacgaagagucucugcauaacccauauccggauuaccacuggcuucgaaccgugaagacuacaaaagagucgcugguaaucauaucacccagcguugccgacuuggauccuuacgacaagagucuccauucccguguguuuccagggggaaaaugcucuggcaucaccgucagcuccacguguugcucaacuaaucacgauuauaccauuuggaugcccgaaaacccuagacugggcacaaguugugacaucuucacuaauagcagggggaagcgggcaucuaaaggagguaagaccugcggcuguguggaugagcgcgggcuguacaagucccucaaaagagccugcaaguuaaaacuguguggagugcuuggcuugaggcugauggacgguacaugggucgcuauucaaaccucagaugaaaucaaguggugcagcccagaccagcuaguuaaccuccacgacuuucauagugaugagauagagcaccuggugguagaggaacuugugaaaaagcgggaagagugccuggacgcauuggaaacgauuaugacuacaaaaucugucuccuuccgccgacucagccaucugagaaaguuagugcccggguuuggaaaggccuauaccaucuucaauaaaacucugauggaggcugaugcccacuacaagucgauuaggacauggaacgagaucaucccgucuaaaggcugucuccggguuggcgggcguugccacccucaugugaauggagucuucuuuaacgguauuauacuuggccccgacgggcacgugcugaucccagaaaugcaguccucauugcuacaucagcacauggagcugcucgaaaguagcguaauuccucugaugcauccccuugcggauccauccaccguuuucaaggacggagaugaggcagaagacuuuguggagguccaccuccccgaugugcacaaacaaaucucuggcgucgacuugggucucccuaauugggggaaguaugugcugauaagcgccggcgcuuuaacggcccugaugcuaaccauuuuccucaugacauguugccgcaagacuaacagagcagagucaauccagcauaguccaggagaaaccggcaggaaaguuuccgugacaagccacaacgggcggguaaucucuucaugggagaguuacaagagcggauccgaaacuaaacuguga

SEQ ID NO: 158930 - RNA, 1575 nt, Artificial Sequence
  derived and/or modified CDS sequence (opt3) from glycoprotein__RABV__EU086136.1
augaucccccaggugcuccuguucgucccucuucugguuuuuagcuccugcuucggcaaguuuccaauuuacaccauaccggacaaauuggggcccuggucuccuaucgauauucaccauuuaucauguccaaacaaucuggugguagaggacgaaggaugcacaaaccuaagugguuucagcuauauggagcucaaggugggcuacaucuccgccauuaaagucaauggguuuacuuguacgggagugguuaccgaagcugagacauauacuaacuucgugggcuacgucaccacaaccuuuaagagaaaacacuucaggcccaugccugaugcaugccgggccgcguauaauuggaagauggcuggugacccacgcuacgaagagucucugcauaaccccuauccugauuaccacuggcuucgaacugugaagacaaccaaagagucgcugguaaucauaucaccaagcguugccgacuuggauccguacgacaagagucuccauucccguguguuucccgggggaaaauguucuggcaucacggucagcuccacuugcuguucaaccaaucacgauuauacaauuuggaugccugaaaacccaagacugggcaccaguugcgacaucuucacuaauagcagggggaagcgggcaucuaaaggagguaagacauguggcuuuguggaugagcgcggguucgugaagucccugaaaggagccugcaagcucaaauuauguggcguccugggucuuagauugauggacgggaccuggguugcuauucaaacgucagaugaaaucaaguggugcagccccgaccagcuggugaaccuacacgacuuucauagugaugagauagagcaccucguaguggaggaacuggucaaaaagagggaagagugccuugacgcacuggaaacuuucaugacaaccaaaucuguguccuuccggcgcuugagccuccugcgaaaguuaguuccuggauuuggcaaggccuucacuauuuuuaauaaaacacugauggaggcugaugcccauuucaagucgauccucaccuggaacgagauuuuuccauacaaaugguguuucagacuuggcgaaauccugcacccccacgugaauagggucuuuuucaacgggaucauuuugggaccggacggucaugugcuaauaccugagaugcagucuucccugcuccaccagcauauggaacugcuugagucaaguguaaucccccugaugcacccauuggcggauccuagcacgguuuuuaaggacggcgaugaagcagaggacuucguggauguccaucuccccgacgugcacaaacaaauuuccggggucgaucugggauuaccaaauuggggcaaguaugugcugaucucugccggugcucuaaccgcccucaugcugaugauauuucuuaugacaugcugucggaaggcaaaccgugcugagagcauucagcacaaccccggggaaacuggccgcaaaguuucagugaccagucauaauggaagaguaaucuccagcugggagucuuacaagucaggcggggaaacaaaauuguga

SEQ ID NO: 158931 - RNA, 1575 nt, Artificial Sequence
  derived and/or modified CDS sequence (opt3) from glycoprotein__RABV__EU086137.1
augaucccccaggugcuccuguucgucccucuucugguuuuuagcuccugcuucggcaaguuuccaauuuacaccauaccggacaaauuggggcccuggucuccuaucgauauucaccauuuaucauguccaaacaaucuggugguagaggacgaaggaugcacaaaccuaagugguuucagcuauauggagcucaaggugggcuacaucuccgccauuaaagucaauggguuuacuuguacgggagugguuaccgaagcugagacauauacuaacuucgugggcuacgucaccacaaccuuuaagagaaaacacuucaggcccaugccugaugcaugccgggccgcguauaauuggaagauggcuggugacccacgcuacgaagagucucugcauaaccccuauccugauuaccacuggcuucgaacugugaagacaaccaaagagucgcugguaaucauaucaccaagcguugccgacuuggauccguacgacaagagucuccauucccguguguuucccgggggaaaauguucuggcaucacggucagcuccacuugcuguucaaccaaucacgauuauacaauuuggaugccugaaaacccaagacugggcaccaguugcgacaucuucacuaauagcagggggaagcgggcaucuaaaggagguaagacauguggcuuuguggaugagcgcgggcuguacaagucccucaaaggagccugcaaguuaaaacuguguggcgugcuugguuugagacugauggacgggaccugggucgcuauucaaacgucagaugaaaucaaguggugcagccccgaccagcuaguuaaccuccacgacuuccauagugaugagauagagcaccuguuuguggaggaacuuguuaaaaagagggaagagugccuggacgcauuggaaacuauuaugacaaccaaaucuguguccuucaagcggcucagccaucugacuaauuuagucccuggauucggcaaggccuauacaaucuuuaacaaaacccugauggaggcugaugcccacuacaagucgauuccaacguggaaugagaucauccccucuaaaggcugucucaaguucgggggacgcugccacccgccugugaacgguguauuuuucaauggcauuauacuugggcccgacggacaugugcugaucccagaaaugcaguccucauugcuacaccagcauauggagcugcucgaaaguagcgucauuccucugaugcacccccuugcggauccauccaccguguuuaaagacggcgaugaggcagaagacuucguagauguucaucugcccgacgugcacaagcaaaucucuggugucgauuuggggcucccuaacuggggcaaguaugugcugauaagcgccggagcuuuaacagcccugaugcuaaugauuuuucucaugacuuguugccgaaaagcaaacagagcugagucaauccagcacaauccaggcgagaccgggaggaaggucagugugacaucccauaacggacggguuaucagcucuugggaaucauacaaaagugguggcgagacuaagcuguga

SEQ ID NO: 158932 - RNA, 1575 nt, Artificial Sequence
  derived and/or modified CDS sequence (opt3) from glycoprotein__RABV__EU086138.1
augaucccccaggugcuccuguucgucccucuucugguuuuuagcuccugcuucggcaaguuuccaauuuacaccauaccggacaaauuggggcccuggucuccuaucgauauucaccauuuaucauguccaaacaaucuggugguagaggacgaaggaugcacaaaccuaagugguuucagcuauauggagcucaaggugggcuacaucuccgccauuaaagucaauggguuuacuuguacgggagugguuaccgaagcugagacauauacuaacuucgugggcuacgucaccacaaccuuuaagagaaaacacuucaggcccaugccugaugcaugccgggccgcguauaauuggaagauggcuggugacccacgcuacgaagagucucugcauaaccccuauccugauuaccacuggcuucgaacugugaagacaaccaaagagucgcugguaaucauaucaccaagcguugccgacuuggauccguacgacaagagucuccauucccguguguuucccgggggaaaauguucuggcaucacggucagcuccacuuggugcucaaccaaucacgauuauacaauuuggaugccugaaaacccaagacugggcaccaguugugacaucuucacuaauagcagggggaagcgggcaucuaaaggagguaagacaugcggcuuuguggaugagcgcgggcuguacaagucccucaaaggagccuguaaguuaaaacugugcggcgugcuugguuugagacugauggacgggaccugggucgcuauucaaacgucagaugaaaucaagugguguagccccgaccagcuaguuaaccuccacgacuuccauagugaugagauagagcaccuggugguagaggaacuugugaaaaagagggaagagugccuggacgcauuggaaacuauuaugacaaccaaaucugucuccuuucggcgccucagccaucugcgaaaguuagugccuggauucggcaaggccuauacuaucuucaauaaaacacugauggaggcugaugcccacuacaagucgauuagaaccuggaacgagaucaucccaucuaaaggcugccucaggguugggggacggugucacccccuugugaauggugucuccuuuaacggcauuauacuggggccggacggacauguguugaucccugaaaugcagucaagucuacugcaccagcauauggagcuccuggaaagcuccguaauuccccuuaugcacccacuggcggauccuucuacgguuuucaaggacggcgaugaggcagaagacuuuguggagguccauuugcccgaugugcacaaacaaaucagcggugucgaccucgggcugccaaauuggggcaaguauguguuaauaucagccggagcucugaccgcccuaaugcucacaauuuuccugaugaugugcugucguaagacuaaccgcgcagagaguauccagcacucccccggcgaaaucgggagaaaaguuagcgugaccucucauaacggaaggguaauuucaaguugggagagcuacaaguccgguucugaaacaaaacuuuga

SEQ ID NO: 158933 - RNA, 1575 nt, Artificial Sequence
  derived and/or modified CDS sequence (opt3) from glycoprotein__RABV__EU086139.1
augaucccccaggugcugcuguucgucccucuucugguuuuuagcuccugcuucggcaaguuuccaauuuacaccauaccggacaaauuggggcccuggucuccuaucgauauucaccauuuaucauguccaaacaaucuggugguagaggacgaaggaugcacaaaccuaagugguuucagcuauauggagcucaaggugggcuacaucuccgccauuaaagucaauggguuuacuuguacgggagugguuaccgaagcugagacauauacuaacuucgugggcuacgucaccacaaccuuuaagagaaaacacuucaggcccaugccugaugcaugccgggccgcguauaauuggaagauggcuggugacccacgcuacgaagagucucugcauaaccccuauccugauuaccacuggcuucgaacugugaagacaaccaaagagucgcugguaaucauaucaccaagcguugccgacuuggauccguacgacaauagucuccauucccguguguuucccgggggaaaguguucuggcaucacggucagcuccacuugcuguucaaccaaccacgauuauacaauuuggaugccugaaaauccaagacugggcaccaguugcgacaucuucacuaacagcagggggaaacgggcaucuaagggagguaaaacauguggcuuuguggaugagcgcgggcuguacaagucccucaagggagccugcaaauuaaagcuguguggcgugcuugguuugagacugauggacgggaccugggucgcuauucaaacgucagaugaaaucaaauggugcagccccgaccagcuaguuaaucuccacgacuuccauagugaugagauagagcaccuggugguagaggaacuugugaagaaaagggaagagugccuggacgcauuggaaacuauuaugacaaccaagucugucuccuuucggcgccucagccaucugcgaaaauuagugccuggauucggcaaggccuauacuaucuucaacaagacacugauggaggcugaugcccacuacaaaucgauuagaaccuggaaugagaucaucccaucuaagggcugucucaggguugggggacggugccacccccaugugaacggugucuuuuucaauggcauuauacuugggccggacggacacgugcugaucccugaaaugcaguccucauugcuacaucagcacauggagcugcucgaaaguagcguaauuccccugaugcauccacuugcggauccuuccacgguuuuuaaagacggcgaugaggcagaagacuucguggagguccaccuccccgaugugcacaagcaaaucucuggugucgacuuggggcucccaaacuggggcaaauaugugcugauaagcgccggagcuuuaaccgcccugaugcuaacaauuuuucucaugacuuguugccguaagaccaaccgcgcagagucaauccagcauagucccggcgaaaucgggagaaagguuuccgugacaagccacaauggaaggguaauuucuucaugggagaguuacaaaagcgguuccgaaacuaagcuguga

SEQ ID NO: 158934 - RNA, 1575 nt, Artificial Sequence
  derived and/or modified CDS sequence (opt3) from glycoprotein__RABV__EU086140.1
augaucccccaggugcuucucuucgucccucuucugguuuuuagcuccugcuucggcaaguuuccaauuuacaccauaccggacaaauuggggcccuggucuccuaucgauauucaccauuuaucauguccaaacaaucuggugguagaggacgaaggaugcacaaaccuaagugguuucagcuauauggagcucaaggugggcuacaucuccgccauuaaagucaauggguuuacuuguacgggagugguuaccgaagcugagacauauacuaacuucgugggcuacgucaccacaaccuuuaagagaaaacacuucaggcccaugccugaugcaugccgggccgcguauaauuggaagauggcuggugacccacgcuacgaagagucucugcauaaccccuauccugauuaccacuggcuucgaacugugaagacaucgaaagagucacugguaaucauaagcccaaguguugccgacuuggauccguacgacaagucccuccauucucguguguuucccgggggaaaauguagcggcaucaccgucuccucaacgugcuguaguacuaaucacgauuauaccauuuggaugccugaaaacccaagacugggcacaagcugcgacaucuucacuaauucuagggggaagcgggcauccaaaggagguaagaccuguggcuuuguggaugagcgcgggcuguacaagucacucaaaggagccugcaaguuaaaacuguguggcgugcuugguuugagacugauggacgggacaugggucgcuauucaaaccagcgaugaaaucaaguggugcagucccgaccagcuaguuaaccuccacgacuuccauucugaugagauagagcaccuggugguagaggaacuugugaaaaagagggaagagugccuggacgcauuggaaacgauuaugacuacaaccuccgucagcuuucggcgccucucgcaucugcgaaaauuagugccuggauucggcagagccuucucuaucuuuaauaagacucugguugaggcugaugcccucuuccaguccuuuaggacauggaacgagauuaucccaucaaagggcugucuucgggucgggggacguugccacccccacgugaaugguguguucuuuaacggcaucauucuggggccggacggacauguauugauaccugaaaugcagaguagccuacugcaccaacauauggagcuccuggaauccucuguuaucccccuuaugcacccacuggcggauccuagcaccguguucaaagacggcgaugaggcagaagacuuugucgaggugcauuugcccgauguccacaagcagauuucagguguggaccucgggcugccaaauuggggcaaauauguuuuaaucagugccggagcucugacggcccuaaugcucaugauauuccugaugaccuguugccgcaagacaaacagagcagaguccauucagcacagccccggcgaaacugggaggaaagugucuguaaccucacauaacggacgggucaucaguagcugggaguccuacaagucugguggcgaaacaaagcuguga

SEQ ID NO: 158935 - RNA, 1575 nt, Artificial Sequence
  derived and/or modified CDS sequence (opt3) from glycoprotein__RABV__EU086141.1
augaucccccaggugcuucucuucgucccucuucugguuuuuagcuccugcuugggcaaguucccaauuuacaccauaccggacaaguuagggcccuggucuccuaucgauauucaccaucugucauguccaaacaaucuagugguagaggacgaaggaugcacaaaccucagugguuuuagcuauauggagcugaaggugggcuacaucuccgccauuaaagucaauggguucacuuguacgggagugguuaccgaagcugagacauauacuaacuuugugggcuacgucaccacaaccuucaagagaaaacacuuuaggcccaugcuugaugcaugccgggccgcguauaauuggaagauggcuggugacccucgcuacgaagagucucugcauaacccauaucccgauuaccacugguugcgaacugugaagacaucgaaagagucacucguaaucauaagcccuaguguugccgaccuggauccauacgacaagucccugcauucucguguguuccccgggggaaaauguagcggcaucaccgucuccucaacgugcuguaguacuaaucacgauuauaccauuuggaugccggaaaacccuagacucggcacaagcugcgacaucuuuacuaauucuagggggaagcgggcauccaaaggagguaagaccuguggcuucguggaugagcgcggguuauacaagucacugaaaggagccugcaagcugaaauuguguggcgugcugggucuaagacucauggacgggacaugggucgcuauucaaaccagcgaugaaaucaaguggugcaguccagaccagcugguuaaccuucacgacuuucauucugaugagauagagcaccuggugguagaagaguuggugaaaaagagggaagagugccucgacgcacuggaaacgauuaugacuacaaaauccgucagcuuccggcgcuuaucgcaucugcgaaagcucgugcccggauuuggcaaggccuauaccaucuucaauaaaacucuuauggaggcugaugcccacuacaagucuauuagaacauggaacgagaucaucccuuccaaaggcugucugaggguugggggacggugccacccacaugugaaugaagucuucuuuaacgguauuauauugggccccgacgggcacgugcuaaucccggagaugcagucaagucugcuccaucagcacauggaacugcuugagagcuccguaauuccucugaugcaucccuugaccgauccaucuacgguuuucaaggacggagaugaagcggaggacuuuguggagguccaccucccugaugugcacaaacaaaucagcggcggugaccugggguuacccaauuggggcaaguauguccugauaucagcaggagcccuaaccgcuaguaugcucaugauuuuccugaugacauguugccguaagacuaaccgcgccgaauccauccagcauagcccaggcgagaccggggaagaggugucuggaacaucacagacugguagaguuaucaguagcugggaauccuacaaaucuggcggggagaccaaacuuuga

SEQ ID NO: 158936 - RNA, 1575 nt, Artificial Sequence
  derived and/or modified CDS sequence (opt3) from glycoprotein__RABV__EU086142.1
augaucccccaggugcuccuguucgucccucuucugguuuuuagcuccugcuugggcaaguucccaauuuacaccauaccggacaaauuagggcccuggucuccuaucgauauucaccaucugucauguccaaacaaucuagugguagaggacgaaggaugcacaaaccucagugguuuuagcuauauggagcugaaggugggcuacaucuccgccauuaaagucaauggguucacuuguacgggagugguuaccgaagcugagacauauacuaacuuugugggcuacgucaccacaaccuucaagagaaaacacuuuaggcccaugcuugaugcaugccgggccgcguauaauuggaagauggcuggugacccucgcuacgaagagucucugcauaacccauaucccgauuaccacugguuccgaacugugaagacaucgaaagagucauugguaaucauaagcccuaguguugccgaccucgauccauacgacaagucccugcauucucguguguuucccgggggaaaauguagcggcaucaccgucuccucaacgugcuguaguacuaaucacgauuauaccauuuggaugccggaaaacccuagacugggcacaagcugcgacaucuucacuaauucuagggggaagcgggcauccaaaggagguaagaccuguggcuuuguggaugagcgcgggcucuacaagucauuaaaaggagccugcaagcugaaacuuuguggcguguugggucugagacuaauggacgggacaugggucgcuauucaaaccagcgaugaaaucaaguggugcaguccagaccagcucguuaaccugcacgacuuccauucugaugagauagagcaccuugugguagaggaacuggugaaaaagagggaagagugcuuggacgcacucgaaacgauuaugacuacaaaauccgucagcuuucggcgccugucgcauuuacgaaagcuggugcccggauucggcaaggccuauaccaucuucaauaaaacucucauggaggcugaugcccacuacaagucuauuagaacauggaacgagaucaucccuuccaaaggcugucuuaggguugggggacggugccacccacaugugaauggugucuuuuucaacggcauuauacuggggcccgacggacacguguugaucccggaaaugcagucaugucuacugcaucagcacauggagcuccuggaaaguagcuuuauuccucuuaugcugcccuuggcggauccauccaccguauucaaggacggcgaugaggcagaagacuuuguugaggugcaucucccugauguccacaaacaaaucucugguggggaccugggcuuacccaauuggggaaaguaugugcugauaagcgccggcgcucuaacggccucaaugcucaugauuuuccugaugaccugcugucguaagacaaaccgcgcagagaguauccagcacuccccaggggaaacuggaagaaaagucagcgugaccucucauaacgguaggguuaucucaaguugggagagcuacaaguccggcggggaaacaaaacuuuga

SEQ ID NO: 158937 - RNA, 1575 nt, Artificial Sequence
  derived and/or modified CDS sequence (opt3) from glycoprotein__RABV__EU086143.1
augaucccccaggugcuucucuucgucccucuucugguuuuuagcuccugcuucggcaaguuuccaauuuacaccauaccggacaaauuggggcccuggucuccuaucgauauucaccauuuaucauguccaaacaaucuggugguagaggacgaaggaugcacaaaccuaagugguuucagcuauauggagcucaaggugggcuacaucuccgccauuaaagucaauggguuuacuuguacgggagugguuaccgaagcugagacauauacuaacuucgugggcuacgucaccacaaccuuuaagagaaaacacuucaggcccaugccugaugcaugccgggccgcguauaauuggaagauggcuggugacccacgcuacgaagagucucugcauaaccccuauccugauuaccacuggcuucgaacugugaagacaucgaaagagucacugguaaucauaagcccaaguguugccgacuuggauccguacgacaagucccuccauucucguguguuucccgggggaaaauguagcggcaucaccgucuccucaacgugcuguaguacuaaucacgauuauaccauuuggaugccugaaaacccaagacugggcacaagcugcgacaucuucacuaauucuagggggaagcgggcauccaaaggagguaagaccuguggcuuuguggaugagcgcgggcuguacaagucacucaaaggagccugcaaguuaaaacuguguggcgugcuugguuugagacugauggacgggacaugggucgcuauucaaaccagcgaugaaaucaaguggugcagucccgaccagcuaguuaaccuccacgacuuccauucugaugagauagagcaccuggugguagaggaacuugugaaaaagagggaagagugccuggacgcauuggaaacgauuaugacuacaaaauccgucagcuuucggcgccucucgcaucugcgaaaguuagugccuggauucggcaaggccuauaccaucuucaauaaaacucugauggaggcugaugcccacuacaagucuauuagaacauggaacgagaucaucccauccaaaggcugucucaggguugggggacggugccacccccaugugaauggugucuuuuucaacggcauuauacuugggccggacggacacgugcugaucccugaaaugcagucaaguuugcuacaucagcacauggagcugcucgaaagcuccguaauuccccugaugcauccacuugcggauccuucuaccguuuuuaaggacggcgaugaggcagaagacuucguggagguccaucugcccgaugugcacaaacaaaucagcggugucgacuuggggcucccaaauuggggcaaguaugugcugauaucagccggagcuuuaacggcccugaugcuaaugauuuuucucaugaccuguugccgucgccugaacagagcagagaguauccagcacucccccggcgaaacagggaggaagguuagcgugacuucucacucaggacggguaaucaguagcugggaguccuacaaaucugguggcgaaaccaagcuguga

SEQ ID NO: 158938 - RNA, 1575 nt, Artificial Sequence; identical to SEQ ID NO: 158575
  derived and/or modified CDS sequence (opt3) from glycoprotein__RABV__EU086144.1

SEQ ID NO: 158939 - RNA, 1575 nt, Artificial Sequence
  derived and/or modified CDS sequence (opt3) from glycoprotein__RABV__EU086145.1
augaucccccaggcccuccuguucgugccucuucuggucuuuagcuugugcuucggcaaguuuccaauuuacaccauaccggacaaauuagggcccugguccccuaucgauauucaccaucugucuuguccaaacaaucuaguuguggaggacgaaggaugcacaaaccucucagguuucaguuauauggagcugaagguaggcuacaucagcgcuauuaaagugaauggguuuacuuguacgggagucgugaccgaagcagagacauauacuaacuucguuggcuacgugaccacaaccuuuaagagaaaacacuucaggcccacuccugaugccugccgggcggcuuauaauuggaagauggccggugacccacgcuacgaagagucccuucauaaccccuauccugauuaccacuggcugcgaacagucaagaccacgaaagagucuuuggugaucauaucgccaucaguagcagaccucgauccguacgacaagagccugcauagucguguuuuucccuccgggaaauguucuggaaucacugugagcuccaccuauugcucaacaaaucacgauuacacuauuuggaugccugaaaacccaagacugggcaccaguugugacaucuucgucaauagcaggggcaagcgggccucuaaaggguccaagacaugcggauuuguggaugagcgcggucucuauaagucauuaaaaggcgcuuguaagcugaaacuuugcgggguguugggacugagacuaauggacggcaccugggucgcaauucaaacgagcgaugaaacuaaguggugucccccugaccagcucguuaaccugcacgacuucaggagugaugagaucgagcaucuugugguagaggaacuggugaaaaagcgggaagagugcuuggacgcccucgaaucuauaaugacaaccaaauccgucagcuuucgccgacugucgcacuuaagaaagcuggugccagguuucgggaaggcuuacacuauuuucaauaaaacacucauggaggccgaugcgcauuauaagucuguuaggaccuggaacgagaucauucccuccaaaggaugccuucgggugggcggccguugucacccgcacgucaaugggguguuuuucaacggaaucauccuggguccugacggccauguauugauucccgaaaugcagucaagucuacugcagcaacacauggagcuccuggaaagcuccguuauaccacuuaugcauccucuggcagaucccucuacgaucuuuaaggacggguacgaggccgaagauuucguggagguccacuugccagacgugcauaaacaggucagcggaguggaucucggccugcccaauugggguaaguauguuuuaaugucagcuggggcccugaccgcacuaaugcucaugauuuuucugaugacaugcugucgcaagacugacagaaccggcaguacacaccacuccccuggagagacuggcaggaaagugagcguaaccucucagaacgggcgggucaucgcuucaugggaaaguuacaagagcggaggugagacaaaacuuuga

SEQ ID NO: 158940 - RNA, 1575 nt, Artificial Sequence; identical to SEQ ID NO: 158891
  derived and/or modified CDS sequence (opt3) from glycoprotein__RABV__EU086146.1

SEQ ID NO: 158941 - RNA, 1575 nt, Artificial Sequence; identical to SEQ ID NO: 158893
  derived and/or modified CDS sequence (opt3) from glycoprotein__RABV__EU086147.1

SEQ ID NO: 158942 - RNA, 1575 nt, Artificial Sequence
  derived and/or modified CDS sequence (opt3) from glycoprotein__RABV__EU086148.1
augaucccccaggugcugcuguucgucccucuucugguuuuuagcuccugcuucggcaaguuuccaauuuacaccauaccggacaaauuggggcccuggucuccuaucgauauucaccauuuaucauguccaaacaaucuggugguagaggacgaaggaugcacaaaccuaagugguuucagcuauauggagcucaaggugggcuacaucuccgccauuaaagucaauggguuuacuuguacgggagugguuaccgaagcugagacauauacuaacuucgugggcuacgucaccacaaccuuuaagagaaaacacuucaggcccaugccugaugcaugccgggccgcguauaauuggaagauggcuggugacccacgcuacgaagagucucugcauaaccccuauccugauuaccacuggcuucgaacugugaagacaaccaaagagucgcugguaaucauaucaccaagcguugccgacuuggauccguacgacaagagucuccauucccguguguuucccgggggaaaauguucuggcaucacggucagcuccacuugcuguucaaccaaucacgauuauacaauuuggaugccugaaaacccaagacugggcaccaguugcgacaucuucacuaauagcagggggaagcgggcaucuaaaggagguaagacauguggcuuuguggaugagcgcgggcuguacaagucccucaaaggagccugcaaguuaaaacuguguggcgugcuugguuugagacugauggacgggaccugggucgcuauucaaacgucagaugaaaucaaguggugcagccccgaccagcuaguuaaccuccacgacuuccauagugaugagauagagcaccuggugguagaggaacuugugaaaaagagggaagagugccuggacgcauuggaaacuauuaugacaaccaaaucugucuccuuucggcgccucagccaucugcgaaaguuagugccuggauucggcaaggccuauacuaucuucaauaaaacacugauggaggcugaugcccacuacaagucgauuagaaccuggaacgagaucaucccaucuaaaggcugucucaggguugggggacggugccacccccaugugaauggugucuuuuucaacggcauuauacuugggccggacggacacgugcugaucccugaaaugcaguccuguuugcuacaucagcacauggagcugcucgaaucaaguguaauuccccugaugcauccacuugcggauccuagcacgguuuuuaaggacggcgaugaggcagaagacuucguggagguccaccuccccgaugugcacaaacaaaucuccggugucgacuuggggcucccaaauuggggcaaguaugugcugauaucugccggagcuuuaaccgcccugaugagcaugauuuuucuaaugacaugcugucguaagacuaaccgcgcagagucaauccagcauagucccggcgaaaccgggagaaaaguuuccgugacaagccacaacggaaggguaaucucuucaugggagaguuacaagagcgguggcgaaacuaaacucuga

SEQ ID NO: 158943 - RNA, 1575 nt, Artificial Sequence
  derived and/or modified CDS sequence (opt3) from glycoprotein__RABV__EU086149.1
augaucccccaggugcugcuguucgucccucuucugguuagcuccucuugcuuuggcaaguucccaauuuacaccauaccggacaaauuggggcccuggucaccuaucgauauucaccauuuaaguuguccaaacaaucuggugguagaggacgaaggaugcacaaaccuaagcgguuuuuccuauauggagcucaaggugggcuacaucucugccauuaaagucaauggguucacuuguacgggagugguuaccgaagcugagacauauacuaacuuugugggcuacgucaccacaaccuucaagagaaaacacuuuaggcccaugccugaugcaugccgggccgcguauaauuggaagauggcuggugacccacgcuacgaagagucgcugcauaaccccuauccugauuaccacuggcuucgaacugugaagacaaccaaagagucacugguaaucauaagcccaaguguugccgacuuggauccguacgacaagucccuccauucucguguguuccccgggggaaaauguagcggcaucacggucuccucaacuugcuguaguaccaaucacgauuauacaauuuggaugccugaaaacccaagacugggcacuagcugcgacaucuuuaccaauucuagggggaagcgggcauccaaaggagguaagacauguggcuucguggaugagcgcgggcuguacaagucacucaaaggagccugcaaguuaaaacuguguggcgugcuugguuugagacugauggacgggaccugggucgcuauucaaacgagcgaugaaaucaaguggugcagucccgaccagcuaguuaaccuccacgacuuucauucugaugagauagagcaccuggugguagaggaacuugugaaaaagagggaagagugccuggacgcauuggaaacuauuaugacaaccaaauccgucagcuuccggcgccucucgcaucugcgaaaguuagugccuggauuuggcaaggccuauacuaucuucaauaaaacacugauggaggcugaugcccacuacaagucuauuagaaccuggaacgagaucaucccauccaaaggcugucucaggguugggggacggugccacccccaugugaauggugucuucuuuaacggcauuauacuugggccggacggacacgugcugaucccugaaaugcagucaaguuugcuacaucagcacauggagcugcucgaaagcuccguaauuccccugaugcauccacuugcggauccuucuacgguuuucaaggacggcgaugaggcagaagacuuuguggagguccaccuccccgaugugcacaaacaaaucagcggugucgacuuggggcucccaaauuggggcaaguaugugcugauaucagccggagcuuuaaccgcccugaugaguaugauuuuccuaaugacauguugccguaagacuaaccgcgcagaguccauccagcauagccccggcgaaaccgggagaaaaguuucugugacaucacacaacggaaggguaaucaguagcugggaguccuacaagucugguggcgaaacuaaacucuga

SEQ ID NO: 158944 - RNA, 1575 nt, Artificial Sequence
  derived and/or modified CDS sequence (opt3) from glycoprotein__RABV__EU086150.1
augauccuccaggugcugcuuuucgucccccugcaaguuuuuagcuccugcuucggcgaguuuccuauuuacaccauaccagacaaguuggggccguggucucccaucgauauucaccauuuaucauguccuaacaaucuggugguaaaagacgaaggaugcacaaaccuaagugguuucagcuauauggagcucaaggugggcuacaucuccgccauuaaagucaauggguuuacuuguacgggagugguuaccgaagcugagacauauacuaacuucgugggcuacgucaccacaaccuuuaagagaaaacacuucaggccaaugcccgaugcaugccgggccgcguauaauuggaagauggcuggugacccucgcuacgaagagucucugcauaacccauaucccgauuaccacuggcuucgaacugugaagacaaccaaagagucgcugguaaucauaucaccuagcguugccgacuuggauccauacgacaagagucuccauucccguguguuucccgggggaaaauguucuggcaucacggucagcuccacuugcuguucaaccaaucacgauuauacaauuuggaugccggaaaacccuagacugggcaccaguugcgacaucuucacuaauagcagggggaagcgggcaucuaaaggagguaagacauguggcuuuguggaugagcgcgggcuguacaagucccucaaaggagccugcaaguuaaaacuguguggcgugcuugguuugagacugauggacgggaccugggucgcuauucagacgucagaugaaaucaaguggugcccacccgaccagcuaguuaaccuccacgacuuccauagcgaugagauagagcaccuggugguagaggaacuugugaaaaagagggaagagugccuggacgcauuggaaacuauuaugacaaccaaaagugucucuuuucggcgccucucccaucugcgaaaguuagugccuggauucggcaaggccuauacuaucuucaauaaaacacugauggaggcugaugcccacuacaagagcauuagaaccuggaacgagaucaucccaucgaaaggcugucucaggguugggggacggugccacccccaugugaauggugucuuuuucaacggcauuauacuugggccggacggacacgugcugaucccugaaaugcagucuuccuugcuacaucaacacauggagcugcucgaaucaaguguaauuccccugaugcauccacuugcggauccuagcacgguuuuuaaggacggcgaugaggcagaagacuucguggagguccaucugcccgaugugcacaaacagaucuccggugucgacuuggggcucccaaauuggggcaaguaugugcugguuucugccggagcuuuaaccgcccugaugcuaaugauauuucucaugacauguugccguaagacuaaccgcgcagagagcauucagcacucacccggcgaaaccgggagaaaagugaguguaacaucccacaacggaagggucaucagcucuugggagucauacaagagugguggcgaaacuaaacuguga

SEQ ID NO: 158945 - RNA, 1575 nt, Artificial Sequence
  derived and/or modified CDS sequence (opt3) from glycoprotein__RABV__EU086151.1
augaucccccaggcccuccuguucgugccucuucuggucuuuagcuugugcuucggcaaguuuccaauuuacaccauaccggacaaauuagggcccugguccccuaucgauauucaccaucugucuuguccaaacaaucuaguuguggaggacgaaggaugcacaaaccucucagguuucaguuauauggagcugaagguaggcuacaucagcgcuauuaaagugaauggguuuacuuguacgggagucgugaccgaagcagagacauauacuaacuucguuggcuacgugaccacaaccuuuaagagaaaacacuucaggcccacuccugaugccugccgggcggcuuauaauuggaagauggccggugacccacgcuacgaagagucccuucauaaccccuauccugauuaccacuggcugcgaacagucaagaccacgaaagagucuuuggugaucauaucgccaucaguagcagaccucgauccguacgacaagagccugcauagucguguuuuucccaaugggaaauguuccggaaucacugugucuagcaccuauugcuccacaaaccacgauuacacuauuuggaugccugaaaauccaagacugggcaccucaugugacaucuucacaaacaguaggggcaagcgggccagcaaagggucuaagaccugcggauuugucgaugagcgcggucucuauaaguccuuaaaaggcgcuuguaagcugaaacuuugcgggguguugggacugagacuaauggacggcacguggguggcacuccaaacuucagaugaaacaaagugguguagccccgaccagcuggucaaucuucacgacuuccauagugaugagauugagcaccugguuguggaagaguugguaaagaaaagggaagagugccucgacgcccuggaaucuaucaugaccacuaaauccgugagcuuucggcgcuuaucgcaucugcgaaagcucgucccugguuucgggaaggcuuacacaauauucaacaaaacccuuauggaggccgaugcgcacuauaagucuauuagaacguggaaugagaucauuccauccaaaggaugccugagggugggcggcaagugucacccccauguuaacgggguguuuuucaauggaaucaucuuggguccggacggccacguccuaauuccugaaaugcagucaagucugcuccaucagcacauggagcugcuugaaagcuccgugauaccccugaugcauccauuggcagauccuucuaccguauuuaaagacggggaugaggccgaagacuucguugaggugcaccuccccgauguccacaagcaaaucagcggaguggaccugggcuuaccaaacugggguaaguacguccugaugucagcuggggcccuaacagugcucaugcugacuauuuuucuuguuaccugcugucggaaaacaaaccgugcagagaguauccagcauuccagcggcgaaacuggacgcaaggugucuguaaccucacagaauggcagagucauaaguagcugggaguccuauaaaucugggggagaaacaaaguuguga

SEQ ID NO: 158946 - RNA, 1575 nt, Artificial Sequence
  derived and/or modified CDS sequence (opt3) from glycoprotein__RABV__EU086152.1
augaucccccaggcccugcuguucgugccucuucuggucuuuagcuugugcuucggcaaguuuccaauuuacaccauaccggacaaauuagggcccugguccccuaucgauauucaccaucugucuuguccaaacaaucuaguuguggaggacgaaggaugcacaaaccucucagguuucaguuauauggagcugaagguaggcuacaucagcgcuauuaaagugaauggguuuacuuguacgggagucgugaccgaagcagagacauauacuaacuucguuggcuacgugaccacaaccuuuaagagaaaacacuucaggcccacuccugaugccugccgggcggcuuauaauuggaagauggccggugacccacgcuacgaagagucccuucauaaccccuauccugauuaccacuggcugcgaacagucaagaccacgaaagagucuuuggugaucauaucgccaucaguaagcgaccucgauccguacgacaagagucugcauucccguguuuuucccucugggaaauguagcggaaucacuguguccucaaccuauugcccuacaaaucacgauuacacuauuuggaugccagaaaaccccagacugggcaccaguugugacaucuucacaaauagcaggggcaagcgggcaucuaaaggguccaagaccugcggauuugucgaugagcgcggucucuauaagucauuaaaaggcgccuguaagcugaaacuuugcgggguguugggacugagacuaauggacggcacgugggcugcaauucaaacuagcgaugaagccaagugguguccuccagaccagcucgugaacauccacgacuucaggagugaugagauagagcaucuggucguugaggaacuugugaaaaagcgggaagagugccuggacgcuuuggaaucuauuaugacaaccaaauccgugagcuuucgccgacucucgcaccugagaaaguuaguacccgguuucgggaaggccuacacuaucuucaauaaaacacugauggaggcggaugcacauuauaagucugucaggaccuggaacgagauuaucccguccaaaggaugccuccgggugggcggccguugucacccucacguuaaugggguguuuuucaacggaaucauucuuggucccgacggccauguccugauaccagaaaugcagucaaguuugcuacagcaacacauggagcugcucgaaagcuccgugaucccucugaugcauccccuugccgauccaucuacgguauuuaaggacggggaugaggcugaagacuucguugaggugcaccuccccgauguccauaaacaggugagcggagucgacuugggccucccuucaugggguaaguacgugcugaugaguguuggggccaugauugcauuaaugcugaugaucuuucuaaugaccugcugucgcaaguccaauggcgcugagagcauacagcacagacucggagaaacaggcaggaaagugucuguaacuucacagagugggcgggucauuagcuccugggagucuuauaagucgggaggugaaaccaaacuguga

SEQ ID NO: 158947 - RNA, 1575 nt, Artificial Sequence
  derived and/or modified CDS sequence (opt3) from glycoprotein__RABV__EU086153.1
auggugccccagguccugugguucguuccucuccuuguguuuagcaugugcuucggcaaguuuccaaucuacaccauuccggacaaacuggggcccugguccccuauagauauccaccauuugucuuguccaaacaauuuaguaguggaggacgaaggaugcacaaaccugucagguuucaguuauauggagcuaaaggucggcuacauuagcgccaucaaagugaauggguuuacuuguacgggaguugugaccgaagcugagacauauacuaacuucgucggcuacgugaccacaaccuuuaagagaaaacacuucaggcccacuccugaugcaugccgggccgcguauaauuggaagauggcuggugacccacgcuacgaagagucccuccauaaccccuauccugauuaccacuggcugcgaacaguaaagaccacgaaagagucucuuguuauuaucucgccaucaguggccgaccuggauccguacgacaagagcuugcauagucgugucuuucccuccgggaaauguucuggaauaacuaucagcuccaccuauugcucaacaaaucacgauuacacuauuuggaugccugaaaacccaagacucggcaccaguugugacaucuucacaaauagcaggggcaagcgggcaucuaaaggguccaagaccugcggauuuguggaugagcgcggucuguauaagucacugaaaggcgccuguaagcucaaauuaugcggggugcugggacuuagauugauggacggcacgugggucgcuaugcaaacuagcgaugaaacaaaguggugucccccugaccagcugguuaaccuacacgacuucaggagugaugagauugagcaucucgugguagaggaacuggugaaaaagcgggaagagugccuugacgcacuggaaucuaucaugaccacuaaauccgucagcuuucgccgauugucgcaccucagaaagcuggugccagguuucgggaaggccuacacaauauucaauaaaaccuuaauggaggcugaugcccauuauaagucuguuaggacguggaacgagauuauccccuccaaaggaugccugcgggugggcggccguugucacccgcacgucaaugggguguuuuucaacggaauuauccucgguccugacggccauguacuuauccccgaaaugcagucaagucuguugcagcaacacauggagcuacuggaaagcuccguuauuccacucaugcauccucuggcggaucccucuaccguguuuaaggacggggaugaggcagaagacuucgucgaggugcaccuuccagauguccauaaacagauaagcggaguggaccugggcuugcccaauugggguaaguacguucucgugucagccgggguacuggucguguuaaugcuggcuaucuuuauuaugacaugcuguggccgcguuaacagaccuaagaguacucagcacucccuagagggaaccggcaggaaagugagcgucacaucucagucagggaaggugaucaguagcugggaauccuauaaaucuggaggugagacucggcucuga

SEQ ID NO: 158948 - RNA, 1575 nt, Artificial Sequence
  derived and/or modified CDS sequence (opt3) from glycoprotein__RABV__EU086154.1
auggugccccagguccugugguucguuccucuccuuguguuuagcaugugcuucggcaaguuuccaaucuacaccauuccggacaaacuggggcccugguccccuauagauauccaccauuugucuuguccaaacaauuuaguaguggaggacgaaggaugcacaaaccugucagguuucaguuauauggagcuaaaggucggcuacauuagcgccaucaaagugaauggguuuacuuguacgggaguugugaccgaagcugagacauauacuaacuucgucggcuacgugaccacaaccuuuaagagaaaacacuucaggcccacuccugaugcaugccgggccgcguauaauuggaagauggcuggugacccacgcuacgaagagucccuccauaaccccuauccugauuaccacuggcugcgaacaguaaagaccacgaaagagucucuuguuauuaucucgccaucaguggccgaccuggauccguacgacaagagcuugcauagucgugucuuucccuccgggaaauguucuggaauaacuaucagcuccaccuauugcucaacaaaucacgauuacacuauuuggaugccugaaaacccaagacucggcaccaguugugacaucuucacaaauagcaggggcaagcgggcaucuaaaggguccaagaccugcggauuuguggaugagcgcggucuguauaagucacugaaaggcgccuguaagcucaaauuaugcggggugcugggacuuagauugauggacggcacgugggucgcuaugcaaacuagcgaugaaacaaaguggugucccccugaccagcugguuaaccuacacgacuucaggagugaugagauugagcaucucgugguagaggaacuggugaaaaagcgggaagagugccuugacgcacuggaaucuaucaugaccacuaaauccgucagcuuucgccgauugucgcaccucagaaagcuggugccagguuucgggaaggccuacacaauauucaauaaaaccuuaauggaggcugaugcccauuauaagucuguuaggacguggaacgagauuauccccuccaaaggaugccugcgggugggcggccguugucacccgcacgucaaugggguguuuuucaacggaauuauccucgguccugacggccauguacuuauccccgaaaugcagucaagucuguugcagcaacacauggagcuacuggaaagcuccguuauuccacucaugcauccucugucugaucccagcaccguguuuaaggacggggaugaggcggaagacuucgucgaggugcaccuuccagauguccauaaacagauaucaggaguggaccugggcuugcccaauugggguaaguacguucucgugagugcagggguacuggucguguuaaugcuggccaucuuuauuaugacaugcuguggccgcguuaacagaccuaaguccacucagcacagccuagagggaaccggcaggaaagugucugucacaucacagagugggaaggugaucagcuccugggaaucuuauaaaucgggaggugagacucggcucuga

SEQ ID NO: 158949 - RNA, 1575 nt, Artificial Sequence; identical to SEQ ID NO: 158681
  derived and/or modified CDS sequence (opt3) from glycoprotein__RABV__EU086155.1

SEQ ID NO: 158950 - RNA, 1575 nt, Artificial Sequence
  derived and/or modified CDS sequence (opt3) from glycoprotein__RABV__EU086156.1
auggugccccagguccuucucuucguuccucuucugguguuuagcuugugcuucggcaaguuuccaaucuacaccauuccggacaaauuagggcccugguccccuauagauauccaccaucugucuuguccaaacaaucuaguaguggaggacgaaggaugcacaaaccucucagguuucaguuauauggagcugaaggucggcuacauuagcgccaucaaagugaauggguuuacuuguacgggaguugugaccgaagcugagacauauacuaacuucgucggcuacgugaccacaaccuuuaagagaaaacacuucaggcccacuccugaugcaugccgggccgcguauaauuggaagcuggcuggugacccacgcuacgaagagucccugcauaaccccuauccugauuaccacugguugcgaacaguaaagaccacgaaagagucucucguuauuaucucgccaucaguggccgaccuggauccguacgacaagagccugcauagucgugucuuuuccgggggaaaauguucuggcauaacugugagcuccaccuauugcucaacaaaucacgauuacacuaucuggaugcccgaaaacccuagacucggcaccaguugugacauuuucgugaauagcagggggaagcgggcaucuaaaggagguaagacaugcggcuuugucgaugagcgcggguuauauaagucccugaaaggagccuguaaacuuaaguugugcggcguuccaggucugagacuaauggacgggaccugggcugcaauccaaacgucagaugaaacuaaguggugucccccugaccagcucgugaaccugcacgacuucaggagcgaugagauugagcaucuuguaguggaggaacuggucaaaaagcgggaagagugcuuggacgcccucgaaaguaucaugacaaccaaaucuguguccuuucgccgacugagccacuuaagaaagcugguuccaggauucggcaaggcuuacacuauauucaauaaaacacucauggaggccgaugcgcauuaugagucggugaggaccuggaacgaaauuauccccucuaagggcugccuucgggucgggggacguugucacccgcacgugaaugguguauuuuucaacggcauuauccuggggccugacggacauguuuugauccccgagaugcaguccucacuacugcagcaacacauggaacuccuggagaguagcgugauuccacuuaugcauccucuggcagaucccuccacggucuugaaagacggcgaugaagccgaggacuuuguggagguccaccucccagaugugcauaagcugauaucugguguugacuuagggcugcccagcuggggcaaauacgugcuaaugucagcuggaguacucaccgcccugaugcuuaugaucuucuugaugacaugcugucgcagaggcaaucaggcagggaguaagcagcacggacuggaagguacuggcaggaaggucuccgugaccagccagaacgggaaaguuauuucuucaugggagaguuauaagagcggaggcgaaacacggcucuga

SEQ ID NO: 158951 - RNA, 1575 nt, Artificial Sequence
  derived and/or modified CDS sequence (opt3) from glycoprotein__RABV__EU086157.1
augaucccccaggcccuucucuucgugccucuucuggucuuuagcuugugcuucggcaaguuuccaauuuacaccauaccggacaaauuagggcccugguccccuaucgauauucaccaucugucuuguccaaacaaucuaguuguggaggacgaaggaugcacaaaccucucagguuucaguuauauggagcugaagguaggcuacaucagcgcuauuaaagugaauggguuuacuuguacgggagucgugaccgaagcagagacauauacuaacuucguuggcuacgugaccacaaccuuuaagagaaaacacuucaggcccacuccugaugccugccgggcggcuuauaauuggaagauggccggugacccacgcuacgaagagucccuucauaaccccuauccugauuaccacuggcugcgaacagucaagaccacgaaagagucuuuggugaucauaucgccaucaguaagcgaccucgauccguacgacaagagucugcauucccguguuuuucccucugggaaauguagcggaaucacuguguccucaaccuauugcccuacaaaucacgauuacacuauuuggaugccagaaaaccccagacugggcaccaguugugacaucuucacaaauagcaggggcaagcgggcaucuaaaggguccaagaacugcggauuugucgaugagcgcggucucuauagaucauuaaagggcgccuguaaacugaagcugugcgggguguugggacugaggcuaauggacggcaccugggcugcaauucaaacgagcgaugaagccaaaugguguccuccagaccagcucgugaauauccacgacuuccggagugaugagauagagcaucuggucguugaggaacuugugaagaaacgcgaagagugccuggacgcuuuggaaucuauuaugacuacaaaguccgugagcuuucgaagacucucgcaccugaggaaauuaguacccgguuucgggaaggccuacaccaucuucaacaagacucugauggaggcggaugcacauuauaaaucuguccggacauggaaugagauuaucccguccaagggaugccuccgugugggcggccgcugucacccucacguuaacgggguguuuuucaauggaaucauucuuggucccgacggccauguccugauaccagaaaugcagucaaguuugcuacagcaacacauggagcugcucgaaagcuccgugaucccucugaugcauccccuugccgauccaucuaccguauuuaaagacggggaugaggcugaagacuucguugaggugcaccuucccgauguccauaaacaggugagcggagucgacuugggccucccuucaugggguaaguacgugcugaugaguguuggggccuuaauugcacugaugcuaaugaucuuucucaugacgugcuguagaaaggcuaacggcguggaguccaugcagcacaggcugggagaaaccggccggaagguaagcgucacaucucagucagggcgagugauaaguagcugggaguccuauaaaucuggaggugaaacuaagcuguga

SEQ ID NO: 158952 - RNA, 1575 nt, Artificial Sequence
  derived and/or modified CDS sequence (opt3) from glycoprotein__RABV__EU086158.1
augaucccccaggcccuucucuucgugccucuucuggucuuuagcuugugcuucggcaaguuuccaauuuacaccauaccggacaaauuagggcccugguccccuaucgauauucaccaucugucuuguccaaacaaucuaguuguggaggacgaaggaugcacaaaccucucagguuucaguuauauggagcugaagguaggcuacaucagcgcuauuaaagugaauggguuuacuuguacgggagucgugaccgaagcagagacauauacuaacuucguuggcuacgugaccacaaccuuuaagagaaaacacuucaggcccacuccugaugccugccgggcggcuuauaauuggaagauggccggugacccacgcuacgaagagucccuucauaaccccuauccugauuaccacuggcugcgaacagucaagaccacgaaagagucuuuggugaucauaucgccaucaguaagcgaccucgauccguacgacaagagucugcauucccguguuuuucccucugggaaauguagcggaaucacuguguccucaaccuauugcccuacaaaucacgauuacacuauuuggaugccagaaaaccccagacugggcaccaguugugacaucuucacaaauagcaggggcaagcgggcaucuaaaggguccaagaccugcggauuugucgaugagcgcggucucuauagaucauuaaagggcgccuguaaacugaagcugugcgggguguugggacugaggcuaauggacggcacgugggcugcaauucaaacuagcgaugaagccaaaugguguccuccagaccagcucgugaacauccacgacuuccggagugaugagauagagcaucuggucguugaggaacuugugaagaaacgcgaagagugccuggacgcuuuggaaucuauuaugacaaccaaguccgugagcuuucgaagacucucgcaccugaggaaauuaguacccgguuucgggaaggccuacacuaucuucaauaagacacugauggaggcggaugcacauuauaaaucuguccggaccuggaacgagauuaucccguccaagggaugccuccgugugggcggccgcugucacccucacguuaaugggguguuuuucaacggaaucauucuuggucccgacggccauguccugauaccagaaaugcagucaaguuugcuaagacagcacauggagcugcucgaaagcuccgugaucccucugaugcauccccuugccgauccaucuacgguauuuaaagacggggaugaggcugaagacuucguugaggugcaucugcccgauguccacaaucaaauuagcggaguggacuugggccucccuucaugggguaaguacguccugaugagugugggggccaugaucgcauuaaugcugguuauauuucuaaccacaugcuguaggaaagcuaacggcgccgagacuauucagcaccggcucggagaaaccggccgaaagguguccguaacaagccagucugggcgcgucaugucaaguugggagagcuauaaguccggaggugaaacuaaacuguga

SEQ ID NO: 158953 - RNA, 1575 nt, Artificial Sequence
  derived and/or modified CDS sequence (opt3) from glycoprotein__RABV__EU086159.1
augaucccccaggcccuccuguucgugccucuucuggucuuuagcuugugcuucggcaaguuuccaauuuacaccauaccggacaaauuagggcccugguccccuaucgauauucaccaucugucuuguccaaacaaucuaguuguggaggacgaaggaugcacaaaccucucagguuucaguuauauggagcugaagguaggcuacaucagcgcuauuaaagugaauggguuuacuuguacgggagucgugaccgaagcagagacauauacuaacuucguuggcuacgugaccacaaccuuuaagagaaaacacuucaggcccacuccugaugccugccgggcggcuuauaauuggaagauggccggugacccacgcuacgaagagucccuucauaaccccuauccugauuaccacuggcugcgaacagucaagaccacgaaagagucuuuggugaucauaucgccaucaguaagcgaccucgauccguacgacaagagucugcauucccguguuuuucccucugggaaauguagcggaaucacuguguccucaaccuauugcccuacaaaucacgauuacacuauuuggaugccagaaaaccccagacugggcaccaguugugacaucuucacaaauagcaggggcaagcgggcaucuaaaggguccaagaccugcggauuugucgaugagcgcggucucuauaagucauuaaaaggcgccuguaagcugaaacuuugcgggguguugggacugagacuaauggacggcacgugggcugcaauucaaacuagcgaugaagccaagugguguccuccagaccagcucgugaacauccacgacuucaggagugaugagauagagcaucuggucguugaggaacuugugaaaaagcgggaagagugccuggacgcuuuggaaucuauuaugacaaccaaauccgugagcuuucgccgacucucgcaccugagaaaguuaguacccgguuucgggaaggccuacacuaucuucaauaaaacacugauggaggcggaugcacauuauaagucugucaggaccuggaacgagauuaucccguccaaaggaugccuccgggugggcggccguugucacccucacguuaaugggguguuuuucaacggaaucauucuuggucccgacggccauguccugauaccagaaaugcagucaaguuugcuacagcaacacauggagcugcucgaaagcuccgugaucccucugaugcuuccccuggccgauccaucuacgguauuuaaggacggggaugaggcugaagacuucguugaggugcauuugcccgauguccacaaacaggugagcggagucgaccucggccugccuucaugggguaaguacguguuaaugaguguuggggccaugauugcacugaugcuaaugaucuuucucaccacaugcugucgcaaggcuaauggcgccagaacuaugcagcaugcguccggagagaccggcaggaaagugagcguaacauucccaucugggcgggucauaucaaguugggaaagcuauaaguccggaggugagacuaaacuguga

SEQ ID NO: 158954 - RNA, 1575 nt, Artificial Sequence
  derived and/or modified CDS sequence (opt3) from glycoprotein__RABV__EU086160.1
augaucccccaggcccugcuguucgugccucuucuggucuuuagcuugugcuucggcaaguuuccaauuuacaccauaccggacaaauuagggcccugguccccuaucgauauucaccaucugucuuguccaaacaaucuaguuguggaggacgaaggaugcacaaaccucucagguuucaguuauauggagcugaagguaggcuacaucagcgcuauuaaagugaauggguuuacuuguacgggagucgugaccgaagcagagacauauacuaacuucguuggcuacgugaccacaaccuuuaagagaaaacacuucaggcccacuccugaugccugccgggcggcuuauaauuggaagauggccggugacccacgcuacgaagagucccuucauaaccccuauccugauuaccacuggcugcgaacagucaagaccacgaaagagucuuuggugaucauaucgccaucaguaagcgaccucgauccguacgacaagagucugcauucccguguuuuucccucugggaaauguagcggaaucacuguguccucaaccuauugcccuacaaaucacgauuacacuauuuggaugccagaaaaccccagacugggcaccaguugugacaucuucacaaauagcaggggcaagcgggcaucuaaaggguccaagaccugcggauuugucgaugagcgcggucucuauaagucauuaaaaggcgccuguaagcugaaacuuugcgggguguugggacugagacuaauggacggcacgugggcugcaauucaaacuagcgaugaagccaagugguguccuccagaccagcucgugaacauccacgacuucaggagugaugagauagagcaucuggucguugaggaacuugugaaaaagcgggaagagugccuggacgcuuuggaaucuauuaugacaaccaaauccgugagcuuucgccgacucucgcaccugagaaaguuaguacccgguuucgggaaggccuacacuaucuucaauaaaacacugauggaggcggaugcacauuauaagucugucaggaccuggaacgagauuaucccguccaaaggaugccuccgggugggcggccguugucacccucacguuaaugggguguuuuucaacggaaucauucuuggucccgacggccauguccugauaccagaaaugcagucaaguuugcuacagcaacacauggagcugcucgaaagcuccgugaucccucugaugcauccccuugccgauccaucuacgguauuuaaggacggggaugaggcugaagacuucguugaggugcaccuccccgauguccauaaacaggugagcggagucgacuugggccucccuucaugggguaaguacgugcugaugaguguuggggccaugauugcauuaaugcugaugaucuuucuaaccacaugcugucgcaaggcuaauggcgccgagacuauacagcacagacucggagaaaccggcaggaaaguguccguaacaagccagucugggcgggucauuucaaguugggagagcuauaaguccggaggugaaacuaaacuguga

SEQ ID NO: 158955 - RNA, 1575 nt, Artificial Sequence
  derived and/or modified CDS sequence (opt3) from glycoprotein__RABV__EU126641.1
auggugccccagguccuucucuucguucuucuguugggcuuuagcuuaugcuucgggaaguuuccuaucuacaccauuccagacaaacugggaccguggucccccauagauauccaccaucuaagauguccuaacaaucucgugguagaggacgaagguugcacaaaccugucuggcuucucauauauggagcuuaaggugggguacauuagugccaucaaagucaauggauuuacuuguacgggcgugguuaccgaagcugagacauauacuaacuucguggguuacgucaccacaaccuuuaagaggaaacacuuccggccaacucccgaugcaugccgcgccgcguauaauuggaagauggcuggggacccucgauacgaagagagccugcaaaacccauaucccgauuaccauugguugcguacagugagaaccacgaaggagucccucauuaucauaucuccuucgguaacugaccuggauccauacgacaaaucacugcacagcaggguuuuuccgggaggcaaguguaguggcaucaccguguccucuacauauugcagcacuaaucaugauuacaccauuuggaugcccgaagacccucggccagggacacccugugauaucuucaccaacucccgcggaaaaagagccucaaaugguaacaagacgugcggcuuugucgacgagagggggcucuauaaaaguuuaaagggagcaugucggcugaagcugugcggcguguugggucugcgccuaauggaugggacuuggguggccaugcagacaagcgacgaaaccaaaugguguucuccugaccagcucgucaaucugcacgauuuccgauccaacgagauugagcaccuuguuguggaagaccugguaaagaaaagagaggaaugcuuggauacucucgagucaaucaugacaaccaagagcgugaguuuuaggcggcugucucauuuacguaaacuggucccaggauucggcaaggcuuacacgauauucaauaaaacccucauggaagcagacgugcacuauaaguccguucgcacauggaacgagauuauccccagcaagggcugccuuaaagucgggggaagaugucauccgcacgugaaugguguguuuuucaacggcauuauccuggggccugaugacaggguauugauccccgagaugcagucgucucuacugcggcaacacauggaacuccuggaguccucaguuauuccacuuaugcauccucuggccgaucccaguacuguguuuaaggaaggagacgaggcugaagauuucgucgaggugcacuugccagacgucuacaaaaagauaagcggcguggaucucggucugcccaacugggggaaauauguuuuaaugaccgccggcgcgaugaucggacuggugcuaaucuuuucccucaugacauggugccgacgcgcaaauagaccugagucuaagcagaggagcuucggcgggacuggagguaacguaucagucaccagucaguccggcaaggugauuccaagcugggaaucuuacaaaucagggggagagauacggcuguga

SEQ ID NO: 158956 - RNA, 1575 nt, Artificial Sequence
  derived and/or modified CDS sequence (opt3) from glycoprotein__RABV__EU182346.1
auggugccccaggcccuucucuucgucccucuucugguuuuuccauugugcuucggcaaguuuccgaucuacaccauucccgacaaauuagggccuuggagcccaauagauauccaccaucuguccugucccaacaaucuagugguagaggacgaaggaugcacaaaccucucugguuucucauauauggagcugaaggugggcuacauucuugcuaucaaaaugaauggguuuacuuguacgggagucgugaccgaagcagagacauauacuaacuucguuggcuacgugaccacaaccuuuaagagaaaacacuucaggccuacuccagaugccugccgggcggcuuauaauuggaagauggccggugacccccgcuacgaagagagucugcauaacccuuauccagauuaccgaugguugcguacagucaagaccacgaaagagagccucgugauuaucuccccgucuguagcagaccuggaucccuacgacagaucgcugcacucaaggguuuuuccuagcgggaaguguaguggaguggccgucuccucuacuuauugcagcaccaaucaugauuacacaauauggaugccagaaaacccccggcucggcauguccugugacaucuucacuaauucacgcggcaaaagagcuaguaaggggagcgagaccugcggauuuguggaugaaagggguuuauauaaaucucugaagggcgcauguaagcugaaauugugcggggugcugggacuacggcucauggacggcacaugggucgccaugcaaaccuccaacgagacgaagugguguccuccagaucagcugguuaaucuucacgacuuccgcucagacgagauugaacaccuggugguagaggaauuggugcgaaaaagagaggaaugccucgaugcucuggagagcaucaugacuacaaagagugucucuuuuaggcgguuaucccaucugcguaaacucgugcccgguuucgggaaggccuacaccauuuucaacaaaacucuuauggaggcggacgcacacuauaagagcguucgcacauggaaugaaauccugccgucgaagggaugcuugagagugggcgggaggugucauccucacgucaacggcguguuuuucaauggaauaauucuaggucccgauggcaacguacugaucccagagaugcagucuucccuccugcagcaacacauggaacuucuggagucaaguguuauuccuuuggugcauccccucgccgacccaagcaccgucuuuaaagauggggacgaagcugaggauuucguggagguccaucugcccgacgugcacaaccagguuuccggaguggauuuaggccugccuaauugggguaaguacguacuacucucugccggggcacugacggcucuuauguugaucaucuuucugaugaccugcugucggcgagucaaccgcagcgaaccaacacagcacaaucucagaggcacuggaagggaggugucaguuaccccgcagaguggccggauuauauccagcugggaaucucauaaaucagggggagagacacgccuguga

SEQ ID NO: 158957 - RNA, 1575 nt, Artificial Sequence
  derived and/or modified CDS sequence (opt3) from glycoprotein__RABV__EU182347.1
auggugccccaggcccuucucuucgucccucuucugguuuuuccauugugcuucggcaaguuuccgaucuacaccauucccgacaaauuagggccuuggagcccaauagauauccaccaucuguccugucccaacaaucuagugguagaggacgaaggaugcacaaaccucucugguuucucauauauggagcugaaggugggcuacaaucuugcuauuaaaaugaacggguuuacuuguacgggagucgugaccgaagcagagacauauacuaauuucguuggcuacgugaccacaaccuuuaagagaaaacacuucaggccuacuccagaugccugccgggcggcuuauaacuggaagauggccggugacccccgcuacgaagagagucugcauaauccuuauccagauuaccgaugguugcguacagucaagaccacgaaagagagccucgugaucauuuccccgucuguagcagaccuggaucccuacgacagaucgcugcacucaaggguuuuuccuagcgggaaguguaguggaguggccgucuccucuacuuauugcagcaccaaccaugauuacacaaucuggaugccagaaaauccccggcucggcauguccugugacauauucacuaacucacgcggcaaaagagcuaguaaggggagcgagaccugcggauuuguggaugaaagggguuuauauaaaucucugaagggcgcauguaagcugaaauugugcggggugcugggacuacggcucauggacggcacaugggucgccaugcaaaccuccaaugagacgaagugguguccuccagaucagcugguuaaccuucacgacuuccgcucagacgagaucgaacaccuggugguagaggaauuggugcgaaaaagagaggaaugccucgaugcucuggagagcauuaugacuacaaagagugucucuuuuaggcgguuaucccaucugcguaaacucgugcccgguuucgggaaggccuacaccaucuucaauaaaacucuuauggaggcggacgcacacuauaagagcguucgcacauggaacgaaauucugccgucgaagggaugcuugagagugggcgggaggugucauccucacgucaauggcguguuuuucaacggaaucauacuaggucccgauggcaacguacugauuccagagaugcagucuucccuccugcagcaacacauggaacuucuggagucaaguguuaucccuuuggugcauccccucgccgacccaagcaccgucuuuaaagauggggacgaagcugaggauuucguggagguccaucugcccgacgugcacaaucagguuuccggaguggauuuaggccugccuaacugggguaaguacguacuacucucugccggggcacugacggcucuuauguugauuaucuuucugaugaccugcugucggcgagucaaucgcagcgaaccaacacagcacaacaucagaggcacuggaagggaggugucaguuaccccgcagaguggcaaaauuauauccagcugggaaucucauaagucagggggagagacacggcucuga

SEQ ID NO: 158958 - RNA, 1575 nt, Artificial Sequence
  derived and/or modified CDS sequence (opt3) from glycoprotein__RABV__EU253477.1
augacaccccaggcccugcuguucgugccucuucuggucuuuagcuccugcuucggcaaguuuccaaucuacaccauuccggacaaauuggggcccuggucuccuacugauauacaccauuuaucauguccaaacaaucugguuguggaggacgaaggaugcacgaaccuaagugguuucagcuauauggagcucaagguaggcuacaucuccgcuauuaaagugaauggguuuaccuguacaggagucgugacugaagcagagaccuauacaaacuucguuggcuacgugaccacuacauuuaagagaaaacacuucaggcccaugccugaugccugccgggcggcuuauaauuggaagauggccggugacccacgcuacgaagagucucugcauaaccccuauccugauuaccacuggcuucgaaccgucaagacgacuaaagagucgcuggugaucauuucaccaagcguagcagacuuggauccguacgacaagagucuccauucccguguuuuucccgggggaaaauguucuggcaucaccgugagcuccacaugcuguucaacuaaucacgauuauaccauauggaugccugaaaacccaagacugggcacaaguugcgacaucuucaccaauagcagggggaagcgggccucuaaaggagguaagacguguggcuuugucgaugagcgcgggcuguacaagucccucaaaggagcuugcaaguuaaaacuguguggcgugcuugguuugagacugauggacgggacuuggguggcaauucaaacaucagaugaaaucaaguggugcagccccgaccagcuagucaaccuccacgacuuccauagugaugagauugagcaccugguuguggaggaacuugugaaaaagagggaagagugccuggacgccuuggaaaccaucaugacuacaaaaucuguauccuuucggcgccucagccaucugcgaaaguuagucccuggauucagaaaggcuuauaccauauucaauaaaacgcugauggaggccgaugcgcacuacaagucgauuaggaccuggaacgagaucauuccaucuaaaggcugucuccgggugggcgggcguugccacccccauguuaauggaguguuuuucaacgguaucauccuuggcccggacgggcacguccugauuccugaaaugcaguccucauugcuacaucagcacauggagcugcucgaaaguagcgugauaccccugaugcauccacuugcagauccuuccacaguauuuaaggacggagaugaggccgaagacuucguugaggugcaccuccccgauguccacaaacaaaucucuggcguggacuugggucucccaaauugggggaaguauguccugauuagcgcuggcgccuuaacugcacugaugcuaaccaucuuucucaugacauguugccgcaagacuaacagagcugagucaauacagcauagucccggagaaaccggcaggaaaguguccguuacaagccacaacgggcgggugauuucuucaugggagaguuacaagagcggaggugaaaccaaacuguga

SEQ ID NO: 158959 - RNA, 1575 nt, Artificial Sequence
  derived and/or modified CDS sequence (opt3) from glycoprotein__RABV__EU267742.1
augaucccccaggugcugcuccuugucccucuguugguuuucagcuccugcuuuggcaaguucccaauuuacaccauaccggacaaauuagggcccuggucuccuaucgauauucaccaucugucauguccaaacaaucuagugguagaggacgaaggaugcacaaaccucagugguuuuagcuauauggagcugaaggugggcuacaucuccgccauuaaagucaauggguucacuuguacgggagugguuaccgaagcugagacauauacuaacuuugugggcuacgucaccacaaccuucaagagaaaacacuuuaggcccacuccugaugcaugccgggccgcguauaauuggaagauggcuggugacccacgcuacgaagagucucuucauaaccccuauccugauuaccacugguuccgaacagugaagaccucgaaagagucacugguaaucauaagcccaaguguugccgacuuggauccguacgacaagucccuccauucucguguguuucccgggggaaaauguagcggcaucacggucuccucaacuugcuguaguaccaaucacgauuauacaauuuggaugccugaaaacccaagacugggcacuagcugcgacaucuucaccaauucuagggggaagcgggcauccaaaggagguaagacauguggcuuuguggaugagcgcgggcuguacaagucacucaaaggagccugcaaguuaaaacuguguggcgugcuugguuugagacugauggacgggaccugggucgcuauucaaacgagcgaugaaaucaaguggugcagucccgaccagcuaguuaaccuccacgacuuccauucugaugagauagagcaccuggugguagaggaacuugugaaaaagagggaagagugccuggacgcauuggaaacuauuaugacaaccaaauccgucagcuuucggcgccucucgcaucugcgaaaguuagugccuggauucggcaaggccuauacuaucuucaauaaaacacugauggaggcugaugcccacuacaagucuauuagaaccuggaacgagaucaucccauccaaaggcugucucaggguugggggacggugccacccccaugugaauggugucuuuuauaacggcauuauacuugggccggacggacacgugcugaucccugaaaugcagucaaguuugcuacaucagcacauggagcugcucgaaagcuccguaauuccccugaugcauccacuugcggauccuucuacgguuuucaaggacggcgaugaggcagaagacuuuguggagguccaucugcccgaugugcacaaacaaaucagcggugucgacuuggggcucccaaauuggggcaaguacgugcugguuucagccggagcuuuaaccgcccugaugcuaaugauauuccucaugacauguugccguaagacuaaccgcgcagagaguauucagcacucccccggcgaaaccgggagaaaagugagcguaacaucucacaacggaagggucaucucaaguugggagagcuauaaguccgguggcgaaacuaaacuguga

SEQ ID NO: 158960 - RNA, 1575 nt, Artificial Sequence
  derived and/or modified CDS sequence (opt3) from glycoprotein__RABV__EU267743.1
augaucccccaggugcugcuguucgucccucuucugguuuuuagcuccugcuucggcaaguuuccaauuuacaccacaucugacaaauuggggccguggucacccauagauaugcaccauuuaaguuguccuaacaaucuggugguagaggacgaaggaugcacuaaccuaagcgguuucuccuauauggagcucaaggugggcuacaucucugccauuaaagucaauggguuuacguguaccggagugguuacagaagcugagacuuauaccaacuucgugggcuacgucacaaccacuuuuaagagaaaacacuucaggccaaugcccgaugcaugccgggccgcguauaauuggaagauggcuggugacccucgcuacgaagagucgcugcauaacccauaucccgauuaccacuggcuucgaacagugaagaccacgaaagagucacugguaaucauuagcccuaguguugccgacuuggauccauacgacaagucccuccauucucguguguuucccgggggaaaauguagcggcaucacugucuccucaaccugcuguaguacaaaucacgauuauacuauauggaugccggaaaacccuagacugggcaccagcugcgacaucuucacaaauucuagggggaagcgggcauccaaaggagguaagaccuguggcuuuguggaugagcgcgggcuguacaagucacucaaaggagccugcaaguuaaaacuguguggcgugcuugguuugagacugauggacgggacgugggucgcuauucaaacuagcgaugaaaucaaguggugcaguccagaccagcuaguuaaccuccacgacuuccauucugaugagauugagcaccuggugguagaggaacuugcaaaagaaagggaggaaugccuggacgccuuggaggcuaucaugacaaccaaguccgugagcuuucggcgccucucgcaucugcgaaaauuaguccccggauucggcaaggccuauacuauauucaauaagacacugauggaggcggaugcacacuacaaaucuauuagaaccuggaacgaaaucauuccuuccaagggcugucucaggguugggggacggugccacccacaugugaaugguguguuuuucaacggcaucauccuugggcccgacggacacguccugauuccggagaugcagucaaguuugcuacaucagcacauggaacugcucgagagcuccgugauaccucugaugcauccccuugccgauccaucuacgguauuuaaagacggcgaugaagcugaggacuucguugaggaucaccucccugacgugcacaagcaaaucagcggugucgauuuggggcuccccaauuggggcaaauaugugcugauuucagccggagcauuaaccgcucugaugaguaugaucuuucuaaugacauguugccguaagacuaaccgcgccgaauccauacagcauagcccaggcgagaccgggagaaaggucucugugacaucacacaacggaaggguuauuaguagcugggaauccuacaaaucugguggcgagacuaagcucuga

SEQ ID NO: 158961 - RNA, 1575 nt, Artificial Sequence
  derived and/or modified CDS sequence (opt3) from glycoprotein__RABV__EU267744.1
auggugccccagguccuccuguucguuccucuucugguguuuagcuccugcuucggcaaguuuccaaucuacaccauuccggacaaauuggggcccuggucuccuauagauauccaccauuuaucauguccaaacaaucugguaguggaggacgaaggaugcacaaaccuaagugguuucagcuauauggagcucaaggucggcuacauuuccgccaucaaagugaauggguuuacuuguacgggaguugugaccgaagcugagacauauacuaacuucgucggcuacgugaccacaaccuuuaagagaaaacacuucaggcccaugccugaugcaugccgggccgcguauaauuggaagauggcuggugacccacgcuacgaagagucucugcauaaccccuauccugauuaccacuggcuucgaacuguaaagacaaccaaagagucgcugguuauuaucucaccaagcguggccgacuuggauccguacgacaagagucuccauucccgugucuuucccgggggaaaauguucuggcauaacggugagcuccacuugcuguucaaccaaucacgauuauacaaucuggaugccugaaaacccaagacugggcaccaguugcgacauuuucacuaauagcagggggaagcgggcaucuaaaggagguaagacauguggcuuuguggaugagcgcgggcuguacaagucccucaaaggagccugcaaguuaaaacuguguggcguccccggucuuagauugauggacgggaccuggguugcuauccaaacgucagaugaaauuaaguggugcagcccugaccagcuggugaaccuacacgacuuccauagugaugagaucgagcaccucguaguggaggaacuggucaaaaagagggaagagugccuugacgcacuggaaacuauaauggccacaaaaucuguguccuuucggcgcuugagccaucuccgaaagcugguuccaggauucggcaaggcuuauaccauuuucaauaaaacuuuaauggaggccgaugcgcacuacaagucgaucagaacauggaacgagauuauccccucuaaaggcugucugagggucgggggacggugccacccgcauguguccgguguguuuuucaauggcaucauucucgggccugacggacacguacuuauacccgaaaugcagucaagucuguugcaucagcacauggagcuacuggaaagcuccguuaucccacucaugcauccucuggcagaucccucuaccguguuuaaggacggcgaugaggccgaagacuucgucgaggugcaccuuccagauguccacaaacaaauuagcgguguggaccugggguugcccaacugggagaaguauguucucaucucagcuggcgcccugacggcauuaaugcugaugauauuucuaaugaccuguugccguaaggcuaaucgcgccgaaaguauucagcauaacccuggagagacaggcagaaaaguguccguaacuagccacaacgggagggucaucucuucaugggaaaguuacaagagcggaggugaggcgaaacucuga

SEQ ID NO: 158962 - RNA, 1575 nt, Artificial Sequence
  derived and/or modified CDS sequence (opt3) from glycoprotein__RABV__EU267745.1
auggugccccaggcccuucucuucgucccucuucugguuuuuccauugugcuucggcaaguuuccgaucuacaccauucccgacaaauuagggccuuggagcccaauagauauccaccaucugagaugucccaacaaucuagugguagaggacgaaggaugcacaaaccucuccgguuucucuuauauggagcugaaggugggcuacauucuugcuaucaaaaugaauggguuuacuuguacgggagucgugaccgaagcagagacauauacuaacuucguuggcuacgugaccacaaccuuuaagaggaaacacuuccggccuacuccagaugccugccgcgcggcuuauaauuggaagauggccggugacccccgauacgaagagucacugcauaacccuuauccagauuaccguugguugagaacagucaagaccacgaaagagagucucgugauuaucagcccguccguagcagaccuggaucccuacgacaggucucugcacucgcggguuuuuccuucagggaaguguagcggaguggccgucaguuccacuuauugcucuaccaaucaugauuacacaauauggaugccagaaaacccccgccucggcaugagcugugacaucuucacuaauuccagaggcaaaagggcuucaaaggggagugagaccugcggauuuguggaugaacgggguuuauauaaaagccugaagggcgcauguaagcugaaauugugcggggugcugggacuacgccucauggacggcacaugggucgccaugcaaaccucuaacgagacgaagugguguccuccagaucagcugguuaaucuucacgacuuccgauccgacgagauugaacaccuggugguagaggaauuggugagaaaaagggaggaaugccucgauguccuggagucaaucaugacuacaaagagcgugaguuuucggcguuuaucucaucugcgcaaacucguucccgguuucgggaaggcuuacaccauuuucaacaaaacucuuauggaggccgacgcgcacuauaaguccgugagaacauggaaugaaauccugccgagcaagggaugcuugagggucggcggccggugucauccucacgugucggggguauuuuucaacggaauaauucuaggucccgauggcaauguucugaucccagagaugcagucuucccuccugcagcaacacauggaacuucuggagucaagugugauuccuuugguccauccccucgcagacccaagcaccguguuuaaagauggggacgaagccgaggauuucgucgaggugcaucugcccgacguucacaaccagguguccggaguagauuuaggccugccuaacugggguaaguacguccuacucucugcuggggcccugacggcacuuauguugaucaucuuucugaugaccugcugucgacgcgugaauagaagcgaaccaacacagcacaaccucaggggcacuggacgggagguuucagugaccccgcagaguggcaaaauuauauccagcugggaaucucauaagucagggggagagacacgccuguga

SEQ ID NO: 158963 - RNA, 1575 nt, Artificial Sequence
  derived and/or modified CDS sequence (opt3) from glycoprotein__RABV__EU267746.1
auggugccccaggcccuucucuucgucccucuucuggcuaucccauugugcuuuggcaaguucccgauuuacaccauacccgacaaauuagggccuuggagcccaaucgauauucaccaucuguccugucccaacaaucuaguuguggaggacgaaggaugcacaaaccucucugguuuuucauauauggagcugaagguaggcuacaucagugcaauuaaagugaauggguucacuuguacgggagucgugaccgaagccgagacauauacuaacuuuguuggcuacgugaccacaaccuucaagagaaaacacuuuaggccuacuccagaugcgugccggagcgcuuauaauuggaagauggccggugacccccgcuacgaagagucccuucauaacccuuauccagauuaccacuggcugcgaacagucaagaccacgaaagagucuuucgugaucauaucgccgucaguagcagacuuggaucccuacgacaagagccuccauagucguguuuuuccuagagggaaauguuccggaaucacugugucuagcaccuauugcuccacaaaucacgauuacacuauuuggaugccagaaaaccccaggcugggcaccucaugugacaucuucacaaauagucggggcaagcgcgccagcaaagggucuaagaccugcggauuugucgaugagagaggucuguauaagucccucaaaggcgcuuguaaguuaaaacugugcggggugcuuggauugaggcugauggacggcacguggguggcaauucaaacuucagucgaaacaaagugguguccuccagaucagcuaguuaaccuccacgacuuccauagcgacgagaucgagcaccuggugguagaggaacuugugaaaaagcgggaagagugccuggaugccuuggaaaguauaaugaccacuaaaucugucuccuuucgccgacucagccaucugagaaaguuagugcccgguuucgggaaggcuuacacaauuuucaauaaaacccugauggaggccgacgcgcacuauaagucgguuaggacguggaacgagaucauuccgucuaaaggaugccuccgggugggcggccguugucacccucaugucaaugggguguuuuucaacggaaucauccuuggucccgauggccacguacugauuccagaaaugcaguccucauugcuacagcaacauauggagcugcucgaaaguagcguuauaccucugaugcacccccuugcagacccauccaccguguuuaaggauggggacgaggccgaagauuucgucgaggugcaucugcccgacguccacaaacaggugucuggaguugauuugggccucccuagcugggguaaguacgugcugaugucagcugggaucuuaacagcccugaugcuaaugauuuuucucaugacuugcugucgcagaaccaauagggcagagaguauccagcacucccugggcgaaacaggacggaagguaagcgucacuucucagucaggccgagugauaaguagcugggaguccuauaaaucugggggagaaaccaagcuguga

SEQ ID NO: 158964 - RNA, 1575 nt, Artificial Sequence
  derived and/or modified CDS sequence (opt3) from glycoprotein__RABV__EU267747.1
auggugccccaggcccuccuguucgucccucuucuggcuaucccauugugcuuuggcaaguucccgauuuacaccauacccgacaaauuagggccuuggagcccaaucgauauucaccaucuguccugucccaacaaucuaguuguggaggacgaaggaugcacaaaccucccugguuuuucuuauauggagcugaagguaggcuacaucucagcaauuaaagugaauggguucacuuguacgggagucgugaccgaagccgagacauauacuaacuuuguuggcuacgugaccacaaccuucaagagaaaacacuuuaggccaacucccgaugcgugccggagugcuuauaauuggaagauggccggugacccucgcuacgaagagagcccacauaacccguaucccgauuaccacuggcuucgaacagucaagaccacgaaagaguccuucgugaucauaucuccuucgguagcagaccuggauccauacgacaagucauugcauagccguguuuuucccagagggaaauguaguggaaucacuguguccucuaccuauugcagcacaaaucacgauuacacuauuuggaugccugaaaacccaaggcucggcaccuccugugacaucuucacaaauucacggggcaagcgcgccaguaaagggagcaagaccugcggauuugucgaugagagaggucuguauaagucucugaaaggcgcuuguaagcucaaauuaugcggggugcugggacuuagguugauggacggcacguggguggucauucaaacuuccgaugaaacaaaguggugucccccggaccagcugguuaaccuacacgacuuccauucagaugagaucgagcaccucgugguagaggaacuggugaaaaagcgggaagagugccuugacgcacuggaaagcauaaugaccacuaaaagugucucuuuucgccgauugucccaucucagaaagcuggugccugguuucgggaaggccuacacaauuuucaauaaaaccuuaauggaggcugaugcccacuauaagagcguuaggacguggaacgagaucauucccucgaaaggaugccugcgggugggcggccguugucacccacaugucaaugggguguuuuucaacggaaucauccucgguccugacggccacguacuuauucccgaaaugcagucuucccuguugcagcaacauauggagcuacuggaaucaaguguuauaccacucaugcacccccuggcggauccuagcaccguguuuaaggacggggaugaggcagaagacuucgucgaggugcgccuuccagauguccauaaacagguguccggaguugaccugggcuugccgucuugggguaaguacgugcucaugagcgccgggauccugacagcuuuaaugcugaugauuuuucuaaugacuugcuguagaaggaccaauggcgccgagucaauccagcacagucucggagaaacaggccggaagguauccgucacuagccagucugggcgagugauaucaaguugggagagcuauaaauccggaggugaaaccaagcuguga

SEQ ID NO: 158965 - RNA, 1575 nt, Artificial Sequence
  derived and/or modified CDS sequence (opt3) from glycoprotein__RABV__EU267748.1
augaucccccaggugcugcuguucuuuccucuucuggucuucagcuccugcuuuggcaaguucccaauuuacaccauaccggacaaauuggggcccuggucuccuaucgauauucaccauuuaucauguccaaacaaucugguuguggaggacgaaggaugcacaaaccuaagugguuuuagcuauauggagcucaagguaggcuacaucuccgccauuaaagugaauggguucacuuguacgggagucgugaccgaagcugagacauauacuaacuuuguuggcuacgugaccacaaccuucaagagaaaacacuuuaggcccaugccugaugcaugccgggccgcguauaauuggaagauggcuggugacccacgcuacgaagagucucugcauaaccccuauccugauuaccacuggcuucgaacugucaagacaaccaaagagucgcuggugaucauaucaccaagcguagccgacuuggauccguacgaccguagucuccauuccagaguuuuccccgggggaaaguguucuggcaucacggugagcuccacuugcuguucaaccaaucacgauuauacaauuuggaugccugaaaacccaaggcugcggaccaguugcgacaucuuuacuaauagccgcggcaaaagagcacccaaagggggaaagacaugugguuucgucgaugagaggggccuguacaagucucucaagggggccugcaaauuaaagcuguguggagugcuuggcuugcggcugauggacgguaccuggguggcuauucaaacguccgaugaaaucaaauggugcucaccugaccagcuagucaaccuccacgacuuucauagcgaugagauagagcaccugguuguggaggaacuuguaaagaaacgcgaagagugccuggacgcauuggaaacuauuaugacaaccaagagugugucuuuccgaagacucucccaucugaggaaauuagucccaggguucggaaaggccuauacuaucuuuaauaagacacugauggaggcugaugcccacuacaaaagcauucggaccuggaacgagaucauccccucgaagggcugucuccgugugggcgggcgcugccacccgcauguuaauggaguguucuuuaacgguauuauacuuggcccugacgggcacguccugauccccgaaaugcagucuuccuugcuacaucagcacauggagcugcucgaaucaagugugauuccacugaugcauccucuugcggaucccagcacgguauucaaagacggagaugaggcagaagacuuuguugaggugcaccucccagauguccacaagcaaaucuccggcguggacuugggucuccccaauugggggaaauauguccugauaucugccggcgcuuuaaccgcccugaugagcaugauuuuccuaaugacauguugcagaaagacuaacagggcagagucaauccagcauaguccuggagaaaccggccggaagguguccguuacaagccacaacgggcgagugaucucuucaugggagaguuacaaaagcggaggugaaacuaagcucuga

SEQ ID NO: 158966 - RNA, 1575 nt, Artificial Sequence
  derived and/or modified CDS sequence (opt3) from glycoprotein__RABV__EU267749.1
auggugccccagguccugcuguucguuccucuucugguguuuagcuccugcuucggcaaguuuccaaucuacaccauuccggacaaauuggggcccuggucuccuauagauauccaccauuuaucauguccaaacaaucugguaguggaggacgaaggaugcacaaaccuaagugguuucagcuauauggagcucaaggucggcuacauuuccgccaucaaagugaauggguuuacuuguacgggaguugugaccgaagcugagacauauacuaacuucgucggcuacgugaccacaaccuuuaagagaaaacacuucaggcccaugccugaugcaugccgggccgcguauaauuggaagauggcuggugacccacgcuacgaagagucucugcauaaccccuauccugauuaccacuggcuucgaacuguaaagacaaccaaagagucgcugguuauuaucucaccaagcguggccgacuuggauccguacgacaagagucuccauucccgugucuuucccgggggaaaauguucuggcauaacggugagcuccacuugcuguucaaccaaucacgauuauacaaucuggaugccugaaaacccaagacugggcaccaguugcgacauuuucacuaauagcagggggaagcgggcaucuaaaggagguaagacauguggcuuuguggaugagcgcgggcuguacaagucccucaaaggagccugcaaguuaaaacuguguggcguccuugguuugagacugauggacgggaccuggguugcuauccaaacgucagaugaaauuaaguggugcagccccgaccagcuagugaaccuccacgacuuccauagugaugagaucgagcaccugguaguggaggaacuugucaaaaagagggaagagugccuggacgcauuggaaacuauaaugacaaccaaaucuguguccuuucggcgccucagccaucugcgaaaguuaguuccuggauucggcaaggccuauacuauuuucaauaaaacacugaugggcgcugaugcccacuacaagucgaucagaaccuggaacgagauuaucccaucuaaagggugucucagggugggaggucggugccacccccaugucaauggcguguuuuucaacgggaucauucuuggaccggacggccacgcgcugauaccugagaugcaguccucauugcuacaucagcacauggaacugcucgagaguagcguaaucccccugaugcauccacuugcagauccuuccacgguuuuuaaggacggugaugaagccgaggacuucguggaaguccaccuccccgaugugcacaaacaaauuucuggggucgacuugggccucccaaauuggggaaaguaugugcugaucagcgcuggcgccuuaaccgcacugaugcuaaugauauuucucaugacauguugccguaaggcugaucgcgccgagucaauucagcauaaccccggggagacuggaagaaaaguuagugugaccuccaggaacggucggguaaucagcucuugggaaucauacaagaguggcggggagacaaaacuguga

SEQ ID NO: 158967 - RNA, 1575 nt, Artificial Sequence
  derived and/or modified CDS sequence (opt3) from glycoprotein__RABV__EU267750.1
auggugccccagguccugcuguucguuccucuucugguguuuagcuccugcuucggcaaguuuccaaucuacaccauuccggacaaauuggggcccuggucuccuauagauauccaccauuuaucauguccaaacaaucugguaguggaggacgaaggaugcacaaaccuaagugguuucagcuauauggagcucaaggucggcuacauuuccgccaucaaagugaauggguauacuuguacgggaguugugaccgaagcugagacauacacuaacuuugucggcuaugugaccacaaccuucaagagaaaacacuuuaggcccaugccugaugcaugccgggccgcguacaauuggaagauggcuggugacccacgcuaugaagagucucugcauaaccccuacccugauuaccacuggcuucgaacuguaaagacaaccaaagagucgcugguuauuaucucaccaagcguggccgacuuggauccguaugacaagagucuccauucccgugucuuccccgggggaaaauguucuggcauaacggugagcuccacuugcuguucaaccaaucacgauuacacaaucuggaugccugaaaacccaagacugggcaccaguugcgacauuuuuacuaauagcagggggaagcgggcaucuaaaggagguaagacauguggcuucguggaugagcgcgggcuguauaagucccucaaaggagccugcaaguuaaaacuguguggcguccuugguuugagacugauggacgggaccuggguugcuauccaaacgucagaugaaauuaaguggugcagccccgaccagcuagugaaccuccacgacuuucauagugaugagaucgagcaccugguaguggaggaacuugucaaaaagggagaagagugccuggacgcauuggaaacuauaaugacaaccaaaucuguguccuucaggcggcucagccaucugcgcaaguuaguuccuggcuuuggcaaggccuacacuauuuucaauaaaacacugauggaggcugaugcccacuauaagucgauccgaaccuggaacgagauuaucccaucuaaagggugucucagagugggagguaggugccacccccaugucaauggcguguucuuuaacgggaucauucuuggaccggacggccacguacugauaccugaaaugcaguccucauugcuacaucagcacauggagcugcucgaaaguagcguuaucccccugaugcauccacuugcggauccuuccacgguguucaaggacggugaugaggcagaagacuuugucgaggugcaccuccccgauguccacaaacaaauuucugggguggacuugggccucccaaauuggggacgguacguucugaucagcgccggcgcuuuaaccgcccugaugcuaaugauauuccucaugacauguugccguaaggcaaaccgcgcugagucaauucagcauaaccccgaagagacugggagaaaggugaguguaaccucccacaauggaagggucaucagcucuugggaaucauauaaaagugguggcgagacaaagcuguga

SEQ ID NO: 158968 - RNA, 1575 nt, Artificial Sequence
  derived and/or modified CDS sequence (opt3) from glycoprotein__RABV__EU267751.1
auggugccccagguccugcuguucguuccucuucugguguuuagcuccugcuucggcaaguuuccaaucuacaccauuccggacaaauuggggcccuggucuccuauagauauccaccauuuaggauguccaaacaaucugguaguggaggacgaagguugcacaaaccuaucaggcuucaguuauauggagcucaaggucggguacauuagcgccaucaaagugaauggauuuacuuguacgggcguugugaccgaagcugagacauauacuaacuucgucgguuacgugaccacaaccuuuaagagaaaacacuucaggcccaugccugaugcaugccgggccgcguauaauuggaagauggcuggggacccacgcuacgaagagucccugcauaaccccuauccugauuaccacuggcuucgaacuguaaagacaaccaaagagucucugguuauuaucucgccaucaguggccgacuuggauccguacgacaagagccuccauagucgugucuuucccggaggcaaauguuccggcauaacggugucuagcacuugcuguuccaccaaucacgauuauacaaucuggaugccugaaaacccaagacuggggacuucaugcgacauuuucaccaauaguaggggaaagcgggcaagcaaagguggcaagacauguggguuuguggaugagcgcggacuguacaagucucucaaaggcgccugcaaguuaaaacugugugguguccuuggguugagacugauggacaggaccuggguugcuauccaaacguccgaugaaauuaaguggugcucacccgaccagcuagugaaccuccacgacuuccauagcgaugagaucgagcaccugguaguggaggaacuugucaaaaagcgggaagagugccuggacgcauuggaaacuauaaugacaaccaaaagugugucuuuucgccgacucucccaucugagaaaguuaguuccuggauucggcaaggccuauacuauuuucaauaaaacacugauggaggcugaugcccacuacaagagcaucaggaccuggaacgagauuaucccaucgaaaggcugucuccgggucgggggacguugccacccccaugugaaugguguguuuuucaacggcaucauucuugggccggacggacacguacugauaccugaaaugcagucuuccuugcuacaucagcacauggagcugcucgaaucaaguguuaucccccugaugcauccacuugcggauccuagcacgguguuuaaggacggcgaugaggcagaagacuucgucgaggugcaccuccccgauguccacaaacaaauuuccgguguggacuuggggcucccaaauuggggcaaguauguucugaucucugccggagcuuuaaccgcccugaugcuaaugauacuccugaugacauguugccgcaaggcaaacagagcugagagcauucagcauaaccccggcgaaacugggaggaaagugucaguaaccagucacaauggacgggucaucuccagcugggagucuuacaagucagguggcgaaacaaaacuuuga

SEQ ID NO: 158969 - RNA, 1575 nt, Artificial Sequence
  derived and/or modified CDS sequence (opt3) from glycoprotein__RABV__EU267752.1
augaucccccaggugcuccuguucgucccucuucugguuuuuagcuccugcuucggcaaguuuccaauuuacaccauaccggacaaauuggggcccuggucuccuaucuucauucacccauuacugagacccaacaaucuagugguagaggaugaaggauguacaaaccucucagguuuuaguuauauggagcugaaggugggcuacaucagcgccauuaaagucaauggguucacuugcacgggagugguuaccgaagcugagacauauacuaacuuugugggcuacgucaccacaaccuucaagaggaaacauuuucggccuaugccagacgcaugucgcgccgcguauaauuggaagauggcuggugauccccgauacgaagagucccuucacaacccuuauccagacuaccauuggcugcguacugugaagacaaccaaagagucuuugguaaucauaucgccgucaguugccgaucucgaccccuacgauaagagccugcacaguagaguguucccugggggaaaaugcuccggcaucacggucucuagcacuuguugcuccaccaaucaugacuauacaauuuggaugccagaaaaccccaggcugggcacuucaugugauaucuuuaccaauagucgggggaagcgcgcaagcaaaggagguaagacaugcggcuucguggacgagagagggcucuacaagucuuuaaaaggagccuguaagcugaaacuuugcggcguguugggucugaggcuaauggaugggaccugggucgcuauucaaacguccgacgaaaucaagugguguucaccugaucagcucguuaaccugcacgacuuucacagcgacgagauagagcaucuugugguagaggaacuggugaaaaagcgggaagagugcuuggaugcacucgaaacuauuaugacaaccaaaagugucucuuuccgccgacugucccacuuaagaaagcuggugccaggauucggcaaggccuauacuaucuuuaauaaaacacucauggaggcugacgcccauuacaagagcauuaggaccuggaacgagaucauccccucgaaaggcugccuucggguugggggacguugucacccgcacgugaauggugucuucuuuaacggcauuauacuggggccugauggacauguguugauccccgaaaugcagucuucccuacugcaccagcauauggagcuccuggaaucaaguguaauuccacuuaugcacccucuggcggaccccagcacgguuuucaaggauggcgacgaggcagaagauuuuguggagguccauuugccagacgugcacaaacaaaucuccggugucgaucucgggcugcccaauuggggcaaguauguguuaauaucugccggagcucugaccgcccuaaugcucacaauuuuccugaugacuugcugucgcaagaccaacagagcaggcagcauccagcacucaccuggggagacaggaaggaaaguuagugugacuucccauaacggucggguaaucagcucuugggaaucauacaagaguggcagcgagaccaaacuuuga

SEQ ID NO: 158970 - RNA, 1575 nt, Artificial Sequence
  derived and/or modified CDS sequence (opt3) from glycoprotein__RABV__EU267753.1
augaucccccaggugcuccuguucgucccucuucugguuuuuagcuccugcuucggcaaguuuccaauuuacaccauaccggacaaauuggggcccuggucuccuaucgauauucaccauuuaucauguccaaacaaucuggugguagaggacgaaggaugcacaaaccuaagugguuucagcuauauggagcucaaggugggcuacaucuccgccauuaaagucaauggguuuacuuguacgggagugguuaccgaagcugagacauauacuaacuucgugggcuacgucaccacaaccuuuaagagaaaacacuucaggcccacuccugaugcaugccgggccgcguauaauuggaagauggcuggugacccacgcuacgaagagucucugcauaaccccuauccugauuaccacuggcuucgaacagugaagaccucgaaagagucacugguaaucauaagcccaaguguugccgacuuggauccguacgacaagucccuccauucucguguguuucccgggggaaaauguagcggcaucacggucuccucaacuugcuguaguaccaaucacgauuauacaauuuggaugccugaaaacccaagacugggcacuagcugcgacaucuucaccaauucuagggggaagcgggcauccaaaggagguaagacauguggcuuuguggaugagcgcgggcuguacaagucacucaaaggagccugcaaguuaaaacuguguggcgugcuugguuugagacugauggacgggaccugggucgcuauucaaacgagcgaugaaaucaaguggugcagucccgaccagcuaguuaaccuccacgacuuccauucugaugagauagagcaccuggugguagaggaacuugugaaaaagagggaagagugccuggacgcauuggaaacuauuaugacaaccaaauccgucagcuuucggcgccucucgcaucugcgaaaguuagugccuggauucggcaaggccuauacuaucuucaauaaaacacugauggaggcugaugcccacuacaagucuauuagaaccuggaacgagaucaucccauccaaaggcuguuuuaggguugggggacggugccacccccaugugaauggugucuucuuuucaggcauuauacucgggccggacggacacgugcuuaucccugaaaugcagaguagccuguugcaucagcacauggagcuacuggaauccucuguaauuccccucaugcauccacuggcggauccuagcacgguuuucaaggacggcgaugaggcagaagacuuuguggagguccaccuucccgaugugcacaaacaaaucucaggugucgaccugggguugccaaacuggggcaaguaugugcucguuggagccggcgcucugaccgccuuaaugcugaugauauuccuaaugacauguugccguaagacuaaucgcgcagagaguauucagcauucccccggggaaaccggaagaaaagugagcguaacaucucacaacgguagggucaucucaaguugggagagcuacaaguccggcggggaaacuaaacucuga

SEQ ID NO: 158971 - RNA, 1575 nt, Artificial Sequence
  derived and/or modified CDS sequence (opt3) from glycoprotein__RABV__EU267754.1
augaucccccaggugcuccuguucgucccucuucugguuuuuagcuccugcuucggcaaguuuccaauuuacaccauaccggacagauuggggcccuggucuccuaucgauauucaccauuuaucauguccaaacaauauggugguagaggacgaaggaugcacaaaccugagugguuucagcuauauggagcuaaaagugggcuacaucuccgccauuaaggucaauggguuuacuuguacgggagugguuaccgaagcugagacauauacuaacuucgugggcuacgucaccacaaccuuuaaaaggaagcacuuccggcccaugccugaugcaugccgcgccgcguauaauuggaaaauggcuggugacccacgauacgaagagucucuccauaaccccuauccugauuaccacuggcugcguacugugaagacaaccaaggagucgcuuguaaucauaucaccaagcguugccgaccuggauccguacgacaaaaguuugcauuccagaguguuucccgggggaaaguguucuggcaucacggucagcuccacuugcuguucaaccaaucacgauuauacaauuuggaugccugaaaacccaaggcucggcaccaguugcgacaucuucacuaauagccgggggaaacgcgcaucuaagggagguaaaacauguggcuuuguggaugagagagggcuguacaagucccugaagggagccugcaaacucagguuauguggcgugcugggucuucgguugauggacgggaccugggucgcuauucaaacgucagaugaaaucaaguggugcagccccgaccagcugguuaaccuacacgacuuccauagugaugagauagagcaccucguggcagaggaacuggugaaaaagcgcgaagagugccuugacgcccuggaaacuauuaugacaaccaaaucuguguccuuucgaagauugagccaucucaggaagcuggucccuggauucggcaaggcuuauacuaucuucaauaaaacauuaauggaggccgaugcgcacuacaagucgauucggaccuggaacgagaucaucccaucuaaaggcugucugcguguagggggacgcugccacccccauguuaaugguguguuuuucaacggcauuauacucgggccggacggacacguccuuaucccugaaaugcaguccucacuguugcaucagcacauggagcuacuggaaaguagcgugauuccccucaugcauccacuggcagauccuuccacgguauuuaaggacggcgaugaggccgaagacuucguugaggugcaccuucccgauguccacaaacaaaucucugguguggaccugggguugccaaauuggggcaaguauguccucauaagcgcuggagcccugaccgcauuaaugcugacaauuuuucuaaugacuuguugcagaaaaaccucaagggcugagaguauccagcauucccccggcgaaacagggcggaaggugagcguuacuucucacaacggacgagugaucucaaguugggagagcuacaaguccgguggcgaaaccaaacucuga

SEQ ID NO: 158972 - RNA, 1575 nt, Artificial Sequence
  derived and/or modified CDS sequence (opt3) from glycoprotein__RABV__EU267755.1
augaucccccaggugcuccuguucgucccucuucugguuuuuagcuccugcuucggcaaguuuccaauuuacaccauaccggacaaauuggggcccuggucuccuaucgauauucaccauuuaucauguccaaacaaucuggugguagaggacgaaggaugcacaaaccuaagugguuucagcuauauggagcucaaggugggcuacaucuccgccauuaaagucaauggguuuacuuguacgggagugguuaccgaagcugagacauauacuaacuucgugggcuacgucaccacaaccuuuaagagaaaacacuucaggcccacuccugaugcaugccgggccgcguauaauuggaagauggcuggugacccacgcuacgaagagucucugcauucgcccuauccugauuaccacuggccacgaacagugaagaccucaaaagagagccuuguaaucauaaguccggggguugccgaccuggaucccuacgacaaguccuugcauucucguguguuuccuggaggcaaauguagcggcaucacggucuccucaacuugcuguaguaccaaccacgauuauacaauuuggaugccagaaaaucccagacucgggacuagcugcgacaucuucaccaacucuaggggaaagcgggcauccaaagguggcaagacauguggguuuguggaugagcgcggacuguacaagucacugaaaggcgccugcaagcucaaauuauguggugugcuggggcuuagauugauggacggaaccugggucgcuauucaaacgagcgaugaaaucgaguggugcaguccugaccagcugguuaaucuacacgacuuccauucugaugagauagaacaccucgugguagaggaauuugugaagaaaagggaggaaugccuggacgcacuugagacuauuaugacaaccaaguccgucagcuuccggcgccugucgcauuugcgaaaacucgugccaggcuucggcaaggccuauacuaucuuuaacaagacacugauggaggcugaugcccacuacaaaucuauuagaaccuggaaugaaaucauccccuccaagggguguuuaaggguuggaggucggugccacccgcauguguauggcgucuucuuuaacgggauuauacugggaccugacggccacgugcucauccccgagaugcagucaagucuucugcgucagcauauggaauugcuagagagcuccguaauuccacugaugcacccucucgcggaucccucuacgguuuucaaagacggugaugaagcagaggacuuuguggagguccaucugccagaugugcacaagcaaaucagcggggucgaccccggccuuccuaauuggggaaaauacgugcugguuucagccggcgcuuugaccgcccucaugcugaugauauucuuaacaacuuguugccgcaagaccaacagagcagaaaguauucagcacuccccaggggagacaggaaggaaggugagcguaacuucucauaauggucgggucaucucaaguugggaaagcuauaaauccggcggggagaccaagcuguga

SEQ ID NO: 158973 - RNA, 1575 nt, Artificial Sequence
  derived and/or modified CDS sequence (opt3) from glycoprotein__RABV__EU267756.1
augaucccccaggugcuucucuucgucccucuucugguuuuuagcuugugcuucggcaaguuuccaauuuacaccauaccggacaaauuagggcccugguccccuaucgauauucugcaccuaucuuguccaaacaaucucgugguagaggacgaaggaugcacagaucugucagguuucaguuauauggagcuuaaggugggcuacaucagcgccauuaaagucaacggguuuacuuguacgggagugguuaccgaagcugagacauauacuaauuucgugggcuacgucaccacaaccuuuaagagaaaacauuucaggcccacuccugacgcaugccgggccgcguauaacuggaagauggcuggugauccacgcuacgaagagucccugcacaaucccuauccugacuaccauugguugcgaacagugaagaccucuaaagagucgcucguaaucauaucaccaagcgaugccgaccuggauccguacgacaagagucugcacucccguguuuuucccgggggaaaauguucuggcaucacggugagcuccacuugcuguucaaccaaccaugauuauacaauuuggaugccugaaaauccaagacucggcaccaguugcgacaucuucacuaacagcagggggaagcgggcaucuaaaggagguaagacauguggcuuugucgaugagcgcggguuauacaagucccugaaaggagccugcaagcugaaauuguguggcgugcugggucuaagacucauggacgggaccuggguggcuauucaaacgucagacgaaaucaaguggugcagccccgaucagcuggucaaucuucacgacuuccacagugaugagauagagcaucugguuguggaagaguuggugaaaaagagggaagagugccucgacgcacuggaaacuauuaugacaaccaaaucuguguccuuucggcgcuuaagccaucugcgaaagcucgucccuggauucggcaaggccuauacuaucuucaacaaaacacuuauggaggcugaugcccacuacaagucgauuagaaccuggaaugagaucaucccaucuaaaggcugucugaggguagggggacggugccacccccacguuaacgguguguuuuucaauggcauuauauuggggccggacggacauguccuaaucccugaaaugcaguccucacugcuccaccagcauauggagcugcuugaaaguagcgugauuccccugaugcacccauuggcggauccuuccacgguauuuaaggacggcgaugaggcagaagacuucguugaggugcaucuccccgauguccacaaacaaaucucugguguggaccugggguuaccaaacuggggcaaguauguccuggugagcgccggagcucuaaccgcccucaugcugaugauauuucuuaugacauguugccguaagacuaaucgcgcagagucaauucagcacagucccggcgaaaccgggagaaaaguuuccgugacaagccauaacggaaggguaaucucuucaugggagaguuacaagagcgguggcgaaacuaaauuguga

SEQ ID NO: 158974 - RNA, 1575 nt, Artificial Sequence
  derived and/or modified CDS sequence (opt3) from glycoprotein__RABV__EU267757.1
augaucccccaggugcuucucuucgucccucuucugguuuuuagcuccugcuugggcaaguucccaauuuacaccauaccggacaaauuagggcccuggucuccuaucgauauucaccaucugucauguccaaacaaucuagugguagaggacgaaggaugcacaaaccucagugguuuuagcuauauggagcugaaggugggcuacaucuccgccauuaaagucaauggguucacuuguacgggagugguuaccgaagcugagacauauacuaacuuugugggcuacgucaccacaaccuucaagagaaaacacuuuaggcccacuccugaugcaugccgggccgcguauaauuggaagauggcuggugacccacgcuacgaagagucucuucauaaccccuauccugauuaccacuggcugcgaacagugaagaccucgaaagagucauugguaaucauaagcccaaguguugccgaccucgauccguacgacaagucccugcauucucguguguuccccgggggaaaauguagcggcaucacggucuccucaacuugcuguaguaccaaucacgauuauacaauuuggaugccugaaaacccaagacugggcacuagcugcgacaucuuuaccaauucuagggggaagcgggcauccaaaggagguaagacauguggcuucguggaugagcgcgggcucuacaagucauuaaaaggagccugcaagcugaaacuuuguggcguguugggucugagacuaauggacgggaccugggucgcuauucaaacgagcgaugaaaucaaguggugcagucccgaccagcucguuaaccugcacgacuuucauucugaugagauagagcaccuugugguagaagaacugguggagaaaagggaggaaugcuuggacgcacucggaacuauuaugacaaccaaguccgucagcuucggccggcugucgcauuuacgcaaacuggugccuggcuuugggaaggccuauacuaucuucaauaagacacucauggaggcugaugcccacuacaaaucuauucgaaccuggaacgagaucaucccauccaagggaugucuuagaguuggugggaggugccacccccaugugaauggcgucuucuuuaacggaauuauacugggcccggaccggcacguguugaucccugaaaugcagucaagucuacugcaucagcacauggagcuccuggaaagcuccguaauuccccuuaugcauccacuggcggauccuucuacgguuuucaaagacggugaugaggcagaagacuuuguggagguccacuugcccgaugugcacaagcaaaucagcggggucgaccucggccugccaaauuggggaaaauauguguuaguuucagccggcgcucugaccgcccuaaugcucaugauauuccugaugacauguugccguaagacuaaccgcgcagagaguauucagcauucccccggggaaaccggaagaaaggugagcguaacaucucacaacgguagggucaucucaaguugggagagcuacaaauccggcggggaaacuaagcuguga

SEQ ID NO: 158975 - RNA, 1575 nt, Artificial Sequence
  derived and/or modified CDS sequence (opt3) from glycoprotein__RABV__EU267758.1
augaucccccaggugcuccuguucgucccucuucugguuuuuagcuccugcuucggcaaguuuccaauuuacaccauaccggacaaauuggggcccuggaucccuauugauauccaccauuuaucuuguccaaacaaucuggugguagaggacgaaggaugcacaaaccuaucagguuucaguuauauggagcucaaggugggcuacauuagcgccaucaaagucaauggguuuacuuguacgggagugguuaccgaagcugagacauauacuaacuucgugggcuacgucaccacaaccuuuaagagaaaacacuucaggcccaugccugaugugugccgggcagccuauaauuggaagauggcgggugacccacgcuacgaagagucccugcauaaccccuauccugauuaccacuggcuucgaacuguaaagacaaccaaagagucucugguuauaaucucgccaucaguggcugacuuggauccguacgacaagagccuccauagucgugucuuucccgggggaaaauguuccggcauuacggugucuagcacuugcuguuccaccaaucacgauuauacaaucuggaugccugaaaacccaagacugggcacuucaugcgacauuuucaccaauaguagggggaagcgggccagcaaaggagguaagacauguggcuuuguggaugagcgcgggcuguacaagucucucaaaggagcaugcagauuaaagcuguguggcguccuugguuugaggcugauggacgggaccuggguugccauccaaacguccgaugaaauaaaauggugcucacccgaccagcuagugaaccuccacgacuuccauagcgaugagauugagcaccugguaguggaggaacuugucaagaaacggggagaaugccuggacgcuuuggagacuaucaugacaaccaagagugugucuuuucgccgacucucccaucugagaaaauuaguuccuagguucggcaaggcauauacuauuuucaauaagacacugauggaagccgaugcucacuacaaaagcauccggaccuggaacgagaucauuccaucgaagggcugucuccgugucgggggacgcugcagaccccacgugaaugguguguuuuucaacggcauaauccuugggccggacggacauguacugauuccugagaugcagucuuccuugcuacaccagcauauggaacugcucgagucaaguguuaucccccugaugcacccacuugccgauccuagcacgguguuuaaagacggcgaugaagcggaggacuucgucgaaguguaucugcccgauguccauaagcaaauauccgguguggacuuggggcucccaaauuggggcaaauacguucugauuucugcaggagccuuaaccgcucugaugagcaugaucuuucuaaugacauguugcaggaagacuaaccgggccgagucaauccagcacagucccggcgagaccgggcgaaagguguccguaacaagccacaacggacgcgauauuuucucuugggaaucauauaaaagugguggcgagacuaagcucuga

SEQ ID NO: 158976 - RNA, 1575 nt, Artificial Sequence
  derived and/or modified CDS sequence (opt3) from glycoprotein__RABV__EU267759.1
augaucccccaggugcugcuguucgucccucuucugguuuuuagcuccugcuucggcaaguuuccaauuuacaccauaccggacaaauuggggcccuggucuccuaucgauauucaccauuuaucauguccaaacaaucuggugguagaggacgaaggaugcacaaaccuaagugguuucagcuauauggagcucaaggugggcuacaucuccgccauuaaagucaauggguuuacuuguacgggagugguuaccgaagcugagacauauacuaacuucgugggcuacgucaccacaaccuuuaagagaaaacacuucaggcccacuccugaugcaugccgggccgcguauaauuggaagauggcuggugacccacgcuacgaagagucucugcauaaccccuauccugauuaccacuggcuucgaacaguggagaccucgaaggaaucacugguaaucauaagcccaaguguugccgacuuggauccguacgacaaaucccuccauucucguguguuucccgggggaaaguguagcggcaucacggucuccucaacuugcuguaguaccaaucacgauuauacaauuuggaugccugagaacccaagacugggcacuagcugcgacaucuucaccaauucuagggggaaacgggcauccaagggagguaaaacauguggcuuuguggaugaacgcgggcuguacaagucacucaagggagccugcaaauuaaagcuguguggcgugcuugguuugagacugauggacgggaccugggucgcuauucaaacgagcgaugagaucaaauggugcagucccgaccagcuaguuaaccuccacggauuccauucugacgagauagaacaccuggugguagaggaacuugugaagaaaagggaggaaugccuggaugcauuggagacuauuaugacaaccaaguccgucagcuuucggcgccucucgcaucugcgaaaauuagugccuggcuucggcaaggccuauacuaucuucaauaagacacugauggaggcugacgcccacuacaaaucuauuagaaccuggaacgaaaucaucccauccaaggggugucucaggguuggaggucggugccacccccaugugaauggcgucuuuuucaacgggauuauacuuggaccggauggccacgugcugaucccugagaugcagucaaguuugcuacaucagcacauggaacugcucgagagcuccguaauuccccugaugcauccacuugcggacccuucuacgguuuuuaaagauggugacgaagcagaggauuucguggagguccaccuccccgacgugcacaagcaaaucagcggggucgauuugggccucccaaauuggggaaaauaugugcugguuucagccggcgcuuuaaccgcccugaugcuaaugauauuucucaugacauguugccguaagacuaaccgcgcagaaaguauucagcauucccccggggagaccggaagaaaggugagcguaacaucucacaacgguagggucaucucaaguugggaaagcuacaaauccggcggggagacuaagcuguga

SEQ ID NO: 158977 - RNA, 1575 nt, Artificial Sequence
  derived and/or modified CDS sequence (opt3) from glycoprotein__RABV__EU267760.1
augaucccccaggugcugcuguucgucccucuucugguuuuuagcuccugcuucggcaaguuuccaauuuacaccauaccggacaaauuggggcccuggucuccuaucgauauucaccauuuaucauguccaaacaaucuggugguagaggacgaaggaugcacaaaccuaagugguuucagcuauauggagcucaaggugggcuacaucuccgccauuaaagucaauggguuuacuuguacgggagugguuaccguggcugaaacauauacuaacuucgucggcuacgugaccacaaccuuuaagagaaaacacuucaggcccaugccugaugcaugccgggccgcguauaauuggaagauggcuggugacccacgcuacgaggaaucucugcauaacucguaucccgauuaccacuggcuucgaacuguaaagacaccuaaagagucacugguuaucauaagcccaaguguggccgacuuggauccguacgacaagucccuccauucucgugucuuucccgggggaaaauguagcggcaucaccguguccucaacgugcuguaguacuaaucacgauuauaccauuuggaugccugagaacccaagacugggcacaagcugcgacaucuucacuaauucuagggggaagcgggcauccaaaggagguaagaccuguggcuuuguggaugaacgcgggcuguacaagucacucaaaggagccugcaaguuaaaacuguguggcguccuugguuugagacugauggacgggacauggguugcuauucaaaccagcgaugagaucaaguggugcagucccgaccagcuagugaaccuccacgacuuccauucugaugaaauagagcaccugguaguggaggaacuugucaaaaagagggaggaaugccuggacgcauuggagacgauuaugacuacaaaauccgugagcuuucggcgccucucgcaucugcgaaaguuaguuccuggauucggcaaggccuauaccaucuucaauaaaacucugauggaagcugaugcccacuacaagucuauuagaacauggaacgagaucaucccauccaaaggcugucucagggucgggggacggugccacccccaugugaaugguguguuuuucaacggcauuauacuugggccggacggacacguacugaucccugagaugcagucaaguuugcuacaucagcacauggaacugcucgagagcuccguuauuccccugaugcauccacuugcggauccuucuaccguguuuaaggacggcgaugaagcagaggacuucgucgaagugcaccuccccgauguccacaaacaaaucagcgguguggacuuggggcucccaaauuggggcaaguauguucugauaucagccggagcuuuaacggcccugaugcuaaugauuuuucucaugaccuguugccguaagacaaaccgcgcagagaguauccagcauucccccggcgagacugggagaaaagugagcguaaccucucacaacggaagggucaucucaaguugggaaccuuacaagagcgguggcgagacaaaacuguga

SEQ ID NO: 158978 - RNA, 1575 nt, Artificial Sequence; identical to SEQ ID NO: 158891
  derived and/or modified CDS sequence (opt3) from glycoprotein__RABV__EU267761.1

SEQ ID NO: 158979 - RNA, 1575 nt, Artificial Sequence; identical to SEQ ID NO: 158887
  derived and/or modified CDS sequence (opt3) from glycoprotein__RABV__EU267762.1

SEQ ID NO: 158980 - RNA, 1575 nt, Artificial Sequence
  derived and/or modified CDS sequence (opt3) from glycoprotein__RABV__EU267763.1
augaucccccaggugcuccuguucgucccucuucugguuuuuagcuccugcuucggcaaguuuccaauuuacaccauaccggacaaauuggggcccuggucuccuaucgauauucaccauuuaucauguccaaacaaucuggugguagaggacgaaggaugcacaaaccuaagugguuucagcuauauggagcucaaggugggcuacaucuccgccauuaaagucaauggguuuacuuguacgggagugguuaccgaagcugagacauauacuaacuucgugggcuacgucaccacaacccugaagagaaaacacuuuaggcccaugccugaugcaugccgggccgcguauaauuggaagaucgcuggugacccacgcuacgaagagucucuucauaaccccuauccugauuaccaccgacugcguacugugaagacaaccaaagagucguugguaauaaucucaccaagcguugccgaccucgauccguacgacaagagucugcauuccagaguguuccccgggggaaaauguucuggcauuacggucagcuccacuugcuguucaaccaaucacgauuauacaaucuggaugccugaaaacccaaggcugggcaccaguugcgacauuuuuacuaauagccgggggaagcgcgcaucuaaaggagguaagacauguggcuucguggaugagagagggcucuacaaguccuuaaaaggagccugcaagcugaaacuuuguggcguguugggucugaggcuaauggacgggaccugggucgcuauccaaacgucagaugaaauaaaguggugcagccccgaccagcucguuaaccugcacgacuuucauagugaugagauugagcaccuugugguagaggaacuggugaaaaugcgggaagagugcuuggacgcacucgaaacuaucaugacaaccaagucugucuccuuccgccgacugagccauuuaagaaaacuggugccuggauuuggcaaggccuauacuauuuucaauaagacacucauggaggcugaugcccacuacaaaucgaucaggaccuggaacgagaucauuccaucuaagggcugucuucggguugggggacguugccacccccaugugaauggugucuucuuuaacggcauaauccuggggccggacggacacguguugauuccugaaaugcaguccucacuacugcaucagcacauggagcuccuggaaaguagcguaaucccccuuaugcauccacuggcggauccuuccacgguuuucaaagacggcgaugaggcagaagacuuuguggagguccacuugcccgaugugcacaagcaaauaucuggugucgaccucgggcugccaaauuggggcaaauauguguuaauuagcgccggagcucugaccgcccuaaugucaaugaucuuccucaugacauguugccgcaagacuaacagagcagagaguauccagcauucccccggcgaaaccgggaggaagguuagcgugacaucucacaacggacggguaauuucaaguugggagagcuacaaauccgguggcgaaacuaagcuguga

SEQ ID NO: 158981 - RNA, 1575 nt, Artificial Sequence
  derived and/or modified CDS sequence (opt3) from glycoprotein__RABV__EU267764.1
augaucccccaggugcugcuguucgucccucuucugguuagcuccucuugcuuuggcaaguucccaauuuacaccauaccggacaaauuggggcccuggucaccuaucgauauucaccauuuaaguuguccaaacaaucuggugguagaggacgaaggaugcacaagccuauccgguuuuucuuauauggagcucaaggugggcuacaucucggccauuaaagucaacggguucacuuguacgggagugguuaccgaagcugagacauauacuaauuuugugggcuacgucaccacaaccuucaagagaaaacacuuuaggcccaugccugaugcaugccgggccgcguauaacuggaagauggcuggugacccacgcuacgaagagucacugcauaaucccuauccugauuaccacuggcuucgaacugugaagacaaccaaagagagccugguaaucauaaguccauccguugccgacuuggauccguacgacaagucucuccauagccguguguuccccgggggaaaauguuccggcaucacggucucaaguacuugcuguagcaccaaccacgauuauacaauuuggaugccugaaaauccaagacugggcacuucuugcgacguguuuaccaacuccagggggaagcgggcaucaaaaggagguaagacauguggcuucguggaugagcgcgggcuguacaagagccucaaaggagccugcaaguuaaaacuguguggcguccuugguuugagacugauggacgggaccuggguugcuauccaaacgagugauggaauuaaguggugcucucccgaccagcuagugaaucuccacgacuuucauuccgaugaaaucgagcaccugguaguggaggaacuugucaaaaagagggaggaaugccuggacgcauuggagacuauaaugacaaccaaaagcgugucguuccggcgccucucucaucugcgaaaguuaguuccuggcuuuggcaaggccuauacuauuuucaacaaaacacugauggaagcugaugcccacuacaaguccaucagaaccuggaaugagauuaucccaucaaaagggugucucagggugggaggucggugccacccccaugucaacggcguguucuuuaaugggaucauucuuggaccggacggccacguacugauaccugagaugcagaguagcuugcuacaucagcacauggaacugcucgaguccucuguuaucccccugaugcauccacuugcggauccuagcacgguguucaaggacggugaugaagcagaggacuuugucgaagugcaccuccccgauguccacaaacaaauuucagggguggacuugggccucccaaacuggggaaaguauguucugaucagugccggcgcuuuaaccgcccugauguccaugauauuccuaaugacauguugccguaagacuaaucgcgcagagagcauucagcauucucccggggagaccggaagaaaagugucaguaacaagucacaacgguagggucaucagcuccugggaaucuuacaagucgggcggggagacuaaacucuga

SEQ ID NO: 158982 - RNA, 1575 nt, Artificial Sequence
  derived and/or modified CDS sequence (opt3) from glycoprotein__RABV__EU267765.1
augaucccccaggugcugcuguucgucccucuucugguuuuuagcuccugcuucuggaaguuuccaauuuacaccauaccggacaaauugggccccuggucuccuaucgauauucaccauuuaucauguccaaguaaccuggugguagaggacgaagggugcacaaaucuauucggauuuagcuauauggagcucaagguggguuacaucuccgccauuaaagucaacggcuucacuuguacgggggugguuaccgaagcugagacauauacuaauuuugugggauacgucaccacaaccuucaagagaaaacacuuuaggcccaugccugaugcaugccgggccgcguauaacuggaagauggcuggcgacccacgcuacgaagagucucugcauaaucccuauccugauuaccacuggcuucgaacugugaagacaaccaaagagucgcugguaaucauaucaccaagcguugccgacuuggauccguacgacaagagucuccauucccguguguuccccggugggaaauguucuggaaucacggucagcuccacuugcuguucaaccaaccacgauuauacaauuuggaugccugaaaauccaagacugggcaccaguugcgacaucuuuacuaacagcaggggcaagcgggcaucuaaagggggaaagacaugugguuucguggaugagcgcggccuguacaagucccucaaaggggccugcaaguuaaaacuguguggagugcuuggcuugagacugauggacgguaccugggucgcuauucaaacgucagaugaaaucaaguggugcagccccgaccagcuaguuaaucuccacgacuuucauagugaugagauagagcaccuggugguagaggaacuugugaaaaagagggaagagugccuggacgcauuggaaacuauuaugacaaccaaaucugucuccuuccggcgccucagccaucugcgaaaguuagugccuggguucggaaaggccuauacuaucuuuaacaaaacacugauggaggcugaugcccacuacaagucgauuagaaccuggaaugagaucaucccaucuaaaggcugucucaggguuggcgggcggugccacccccaugugaacggagucuucuuuaaugguauuauacuuggcccggacgggcacgugcugaucccugaaaugcaguccucauugcuacaucagcacauggagcugcucgaaaguagcguaauuccccugaugcauccacuugcggauccuuccacgguuuucaaggacggagaugaggcagaagacuuuguggagguccaccuccccgaugugcacaaacaaaucucuggcgucgacuugggucucccaaacugggggaaguaugugcugauaagcgccggcgcuuuaaccgcccugaugucaaugauuuuccuaaugacauguugccguaagacuauccgcgcagagaguauccagcauucccccggagaaaccggcagaaaaguuagcgugacaucucacaaugggaggguaauuucaaguugggagagcuacaaguccggaggugaaacuaaacucuga

SEQ ID NO: 158983 - RNA, 1575 nt, Artificial Sequence
  derived and/or modified CDS sequence (opt3) from glycoprotein__RABV__EU267766.1
augaucccccaggugcugcuguucgucccucuucugguuuuuagcuccugcuucggcaaguuuccaauuuacaccauaccggacaaauuggggcccuggucuccuaucgauauucaccauuuaucauguccaaacaaucuggugguagaggacgauggaugcacaaaccuaaguggucucagcuauauggaacugaaggugggcuacaucuccgccauuaaagucaauggguucacuuguacgggagugguuaccgaggcugaaacauauacuaacuuugugggcuacgucaccacaaccuucaagagaaaacacuuuaggcccaugccugacgcaugccgggccgcguauaauuggaagaucgcuggugauccacgcuacgaggaaucucuucauaaccccuauccugacuaccacuggcugcgaacugugaagacaaccaaagagucgccaguaauaaucucaccgagcguugccgauuuggaccccuacgauaagagucuccauucccguguguucccugggggaaaauguucuggcauuacggucagcuccacuugcuguucaaccaaucacgacuauacaaucuggaugccagagaaccccagacugggcaccaguugcgauauuuuuacuaauagcagggggaagcgggcaucuaaaggagguaagacauguggcuucguggacgaacgcgggcuguacaagucccucaaaggagccugcaaguuaaaacuguguggcgugcuugguuugaagcugauggaugggaccugggucgcuauccaaacgucagacgagauaaaauggugcagcccugaccagcuaguuaaccuccacgauuuucauagugacgaaauugagcaccuggugguagaggaacuugugaagaaaagagaggaaugccuggaugcauuggagacuaucaugacaaccaagucugucuccuucaggcggcucagccaucugcgcaaguuagugccaggauuuggcaaagccuauacuauuuucaauaagacacugauggaagcugacgcccacuacaaaucgauccgaaccuggaacgagaucauucccucuaagggcugucucagaguugggggaaggugccacccgcaugugaauggugucuucuuuaacggcauaauccuugggccugauggacacgugcugauucccgagaugcaguccucauugcuacaucagcacauggaacugcucgagaguagcguaaucccacugaugcauccucuugcggaccccuccacgguuuucaaagauggcgacgaagcagaggauuuuguggaaguccaccucccagacgugcacaagcaaauaucuggugucgauuuggggcuccccaauuggggcaaguaugugcugauuagcgccggagcuuuaaccgcccugaugucaaugaucuuccuaaugacauguugccggaaaacuaaccgugcagagaguauccagcauuccccuggcgagaccgggcgcaagguuagcgugacaucucacaacggaagaguaauuucaaguugggaaagcuacaaauccgguggcgagacuaagcucuga

SEQ ID NO: 158984 - RNA, 1575 nt, Artificial Sequence
  derived and/or modified CDS sequence (opt3) from glycoprotein__RABV__EU267767.1
augacaccccaggugcugcuguucgucccucuucugguuuuuagcuccugcuucggcagauuuccaaucuacaccauuccggacaaguuggggcccuggucuccuauagauauccaccauuuaucauguccaaacaaucuggugguagaggacgaaggaugcacuaaccuaagugguuucagcuguauggagcucaaagugggcuauauuuccgccaucaaggucaauggguuuacgugcaccggagugguuacagaagcugagacuuacaccaacuucgugggcuaugucacaaccacuuuuaaaaggaagcacuuccggcccaugccugaugcaugucgcgccgcguacaauuggaaaauggcuggugacccacgauaugaagagucucugcauaaccccuacccugauuaucacuggcuucguacagugaagaccacgaaggagucgcugguaauuaucucaccaagcguugccgacuuggauccguacgacaaaagucuccauuccagaguguuucccgggggaaagugcucuggcauaacugucagcuccaccagguguucaacaaaucacgauuacacuaucuggaugccugaaaacccacggcugggcaccaguugcgacauuuucacaaauagccgcgggaaaagagcaucuaagggagguaaaaccuguggcuuuguggaugagagggggcuguauaagucccucaagggagccugcaaauuaaagcuguguggcgugcuugaauugcggcugauggacgguacgugggcugcaauccaaacuucagaugagauuaaauggugcagccccgaccagcuagucaaccuccacgacuuccauagugaugagaucgaccaccugguuguggaggaacuuguaaagaaacgcgaagagugccuggaugccuuggaaacaauaaugaccacuaagucuguguccuuucgaagacucagccaucugaggaaauuagucccuggguucggaaaggcuuacacaauuuucaauaagacccugauggaggccgacgcgcacuauaaaucgauccggacguggaacgagauuaucccaucuaagggcugucuccgugugggcgggcgcugccacccccauguuaauggaguguuuuucaacgguaucauucuuggcccggaugggcacguccugauaccugaaaugcaguccucauugcuacaucagcacauggagcugcucgaaaguagcgugaucccccugaugcauccacuugcaggaccuuccaccguauuuaaagacggcgaugaggccgaagacuucguugaggugcaccuccccgauguccacaagcaaauuucugguguggacuuggggcucccaaauuggggcaaauacguccugaucagcgcuggagccuuaacagcacugaugucaaugauauuucuaaugacuuguugcagaaagaccaacagggcugagaguauucagcauucccccggcgaaacagggcggaaggugagcguuacuucucacaacggacgagugaucucaaguugggagagcuauaaauccgguggcgaaaccaagcucuga

SEQ ID NO: 158985 - RNA, 1575 nt, Artificial Sequence
  derived and/or modified CDS sequence (opt3) from glycoprotein__RABV__EU267768.1
augaucccccaggugcuccuguucgucccucuucugguuuuuagcuccugcuucggcaaguuuccaauuuacaccauaccggacaaauuggggcccuggucuccuaucgauauucaccauuuaucauguccaaacaaucuggugguagaggacgaaggaugcacaaaccuaagugguuucagcuauauggagcucaaggugggcuacaucuccgccauuaaagucucuggguuuacuuguacgggagugguuaccgaagcugagacauauacuaauuucgugggcuacgucaccacaaccuuuaagagaaaacacuucaggcccaugccugaugcaugccgggccgcguauaacuggaagauggcuggugacccacgcuacgaagagucgcugcauaaucccuauccugauuaccacuggcuucgaacugugaagacaaccaaagagucacugguaaucauaagcccaaguguugccgacuuggauccguacgacaagucccuccauucucguguguuucccgggggaaaauguagcggcaucacggucuccucaacuugcuguaguaccaaccacgauuauacaauuuggaugccugaaaauccaagacugggcacuagcugcgacaucuucaccaacucuagggggaagcgggcauccaaaggagguaagacauguggcuuuguggaugagcgcgggcuguacaagucacucaaaggagccugcaaguuaaaacuguguggcgugcuugguuugagacugauggacgggaccugggucgcuauucaaacgagcgaugaaaucaaguggugcagucccgaccagcuaguuaaucuccacgacuuccauucugaugagauagagcaccuggugguagaggaacuugugaaaaagagggaagagugccuggacgcauuggaaacugucaugacaaccaaauccgugagcuuucggcgccucucgcaucugcgaaaguuaguuccuggauucggcaaggccuauacuauuuucaacaaaacacugauggaggcugaugcccacuacaagucuaucagaaccuggaaugagauuaucccauccaaaggcugucucagggucgggggacggugccacccccaugugaacgguguguuuuucgacggcaucauucuugggccggauggacguguacugauaccugaaaugcagucaaguuugcuacaccagcauauggagcugcucgaaagcuccguuaucccccugaugcacccacuugcggacccuucuacgguguuuaaggauggcgacgaggcagaagauuucgucgaggugcaucugcccgacguccacaaauugauuagcgguguggaucucgggcugccaaauuggggcaaguauguuuuaaucucagccggagcucugaccgcccuaaugaguaugauauuucucaugacauguugccgcaagacuaacagagcagaguccauucaacacagccccggcgaaaccgggaggaaagugucuguaacaucacauaauggacgggucaucaguagcugggaguccuacaagucugguggcgaaacuaaacuguga

SEQ ID NO: 158986 - RNA, 1575 nt, Artificial Sequence
  derived and/or modified CDS sequence (opt3) from glycoprotein__RABV__EU267769.1
augaucccccaggugcuccuguucgucccucuucugguuuuuagcuccugcuucggcaaguuuccaauuuacaccauaccggacaaauuggggcccuggucuccuaucgauauucaccauuuaucauguccaaacaauauggugguagaggacgaaggaugcacaaaccugagugguuucagcuauauggagcuaaaggugggcuacaucuccgccauuaaagucaauggguuuacuuguacgggagugguuaccgaagcugagacauauacuaacuucgugggcuacgucaccacaaccuuuaagagaaaacacuucaggcccaugccugaugcaugccgggccgcguauaauuggaagauggcuggugacccacgcuacgaagagucucuccauaaccccuauccugauuaccacuggcugcgaacugugaagacaaccaaagagucgcuuguaaucauaucaccaagcguugccgaccuggauccguacgacaagaguuugcauucccguguguuucccgggggaaaauguucuggcaucacggcaagcuccacuugcuguucaaccaaucacgauuauacaauuuggaugccugaaaacccaagacucggcaccaguugcgacaucuucacuaauagcagggggaagcgggccucuaaaggagguaagacauguggcuuugucgggggacgcggccuguacaagucccugaaaggugcuugcaagcucaaauuauguggggugcugggacuuagauugauggauggcaccuggguggcaauucaaacgucagacggcaucaaguggugcagccccgaucagcuggucaaccuacacgacuuccauagugacgagauagaacaccucguuguggaggagcuggugaaaaagagggaagagugccuugaugcccugguaacuauuaugacaaccaaaucugucuccuuucggcgcuugagccaucuccgaaagcuggugccuggguucggaaaggcuuauacuaucuucaauaaaacauuaauggaagccgacgcgcacuacaagucgauuagaaccuggaacgagaucaucccaucuaaagguugucugaggguuggcgggcggugccacccccaugugaauggagucuuuuucaacggcauuauacucgguccggaugggcacgugcuuaucccugaaaugcaguccucacuguugcaucagcacauggagcuacuggagaguagcguaauuccccucaugcauccacuggcagacccuuccacgguuuuuaaggauggcgacgaagccgaggauuucguggaaguccaccuucccgacgugcacaaacaaaucucuggagucgaucugggcuugccaaauugggggaaguaugugcucauaagcgcuggagcccugaccgcauuaaugcugacaauuuuucuaaugacuuguugccguaagaccucacgcgcugagaguauccagcauucccccggugaaacaggcagaaaaguuagcgugacuucucacaacgggaggguaaucucaaguugggagagcuacaaguccggaggcgagaccaaacucuga

SEQ ID NO: 158987 - RNA, 1575 nt, Artificial Sequence
  derived and/or modified CDS sequence (opt3) from glycoprotein__RABV__EU267770.1
augaucccccaggugcuccuguucgucccucuucugguuuuuagcuccugcuucggcaaguuuccaauuuacaccauaccggacaaauuggggcccuggucuccuaucgauauucaccauuuaucauguccaaacaauauggugguagaggacgaaggaugcacaaaccugagugguuucagcuauauggagcuaaaggugggcuacaucuccgccauuaaagucaauggguuuacuuguacgggagugguuaccgaagcugagacauauacuaacuucgugggcuacgucaccacaaccuuuaagagaaaacacuucaggcccaugccugaugcaugccgggccgcguauaauuggaagauggcuggugacccacgcuacgaagagucucuccauaaccccuauccugauuaccacuggcugcgaacugugaagacaaccaaagagucgcuuguaaucauaucaccaagcguugccgaccuggauccguacgacaagaguuugcauucccguguguuucccgggggaaaauguucuggcaucacggucagcuccacuugcuguucaaccaaucacgauuauacaauuuggaugccugaaaacccaagacucggcaccaguugcgacaucuucacuaauagcagggggaagcgggcaucuaaaggagguaagacauguggcuuuguggaugagcgcgggcuguacaagucccugaaaggagccugcaagcucaaauuauguggcgugcugggucuuagauugauggacgggaccugggucgcuauucaaacgucagaugaaaucaaguggugcagccccgaccagcugguuaaccuacacgacuuccauagugaugagauagagcaccucgugguagaggaacuggugaaaaagagggaagagugccuugacgcacuggaaacuauuaugacaaccaaaucugucuccuuucggcgcuugaaucaucuccgaaagcuggugccuggauucggcaaggccuauacuaucuucaacaaaacauuaauggaggcugaugcccacuacaagagcauuagaaccuggaaugagaucaucccaucgaaaggcugucugaggguugggggacggugccacccccaugugaacggugucuuuuucaauggcauuauacucgggccggacggacacgugcuuaucccugaaaugcagucuucccuguugcaucagcacauggagcuacuggaaucaaguguaauuccccucaugcauccacuggcggauccuagcacgguuuuuaaggacggcgaugaggcagaagacuucguggagguccaccuucccgaugugcacaaacaaaucuccggugucgaccugggguugccaaacuggggcaaguaugugcucauaucugccggagcucugaccgccuuaaugcugacaauuuuucuaaugacuuguugccguaagaccagccgcgcagagucaauccagcauagucccggcgaaacagggagaaaaguuuccgugacuagccacaacggaaggguaaucucuucaugggagaguuacaagagcgguggcgaaaccaaacucuga

SEQ ID NO: 158988 - RNA, 1575 nt, Artificial Sequence
  derived and/or modified CDS sequence (opt3) from glycoprotein__RABV__EU267771.1
augaucccccaggugcuccuguucgucccucuucugguuuuuagcuccugcuucggcaaguuuccaauuuacaccauaccggacaaauuggggcccuggucuccuaucgauauucaccauuuaucauguccaaacaauauggugguagaggacgaaggaugcacaaaccugagugguuucagcuauauggagcuaaaggugggcuacaucuccgccauuaaagucucuggguuuacuuguacgggagugguuaccgaagcugagacauauacuaauuucgugggcuacgucaccacaaccuuuaagagaaaacacuucaggcccaugccugaugcaugccgggccgcguauaacuggaagauggcuggugacccacgcuacgaagagucgcuccauaauccccacccugauuaucauuggcugcgaacugugaagacaaccaaagagucacuuguaaucauaagcccaaguguugccgaccuggauccguacgacaaguccuugcacucucguguguuucccgggggaaaauguagcggcaucacggucuccucaacuugcuguaguaccaaccacgauuacacaauuuggaugccugaaaauccaagacucggcacuagcugcgacaucuucaccaacucuagggggaagcgggcauccaaaggagguaagacauguggcuuuguggaugagcgcgggcuguauaagucacugaaaggagccugcaagcucaaauuauguggcgugcugggucuuagauugauggacgggaccugggucgcuauucaaacgagcgaugaaaucaaguggugcagucccgaccagcugguuaaucuacaugacuuccacucugauggaauagagcaucucgugguagaggaacuggugaaaaagagggaggaaugccuugacgcacuggagacuauuaugacaaccaaauccgucagcuuucggcgcuugucgcaccuccgaaagcuggugccuggcuucggcaaggccuacacuaucuucaacaaaacauuaauggaagcugaugcccacuauaagucuauuagaaccuggaaugagaucaucccauccaaagggugucugaggguuggaggucggugccauccccacgugaacggcgucuuuuucaaugggauuauacucggaccggacggccaugugcuuaucccugagaugcagucaagucuguugcaccagcauauggaacuacuggagagcuccguaauuccccucaugcacccacuggcggauccuucuacgguuuuuaaggacggugaugaagcagaggacuucguggaaguccaccuucccgaugugcauaaacaaaucagcggggucgaccugggcuugccaaacuggggaaaguacgugcucauaucagccggcgcucugaccgccuuaaugcugacaauuuuucuaaugacuuguugccguaagaccagucgcgcagaguccauccagcacagccccggggagacaggaagaaaaguuucugugacuucacauagugguaggguaaucagcuccugggaaucuuauaagucgggcggggagaccaaacucuga

SEQ ID NO: 158989 - RNA, 1575 nt, Artificial Sequence
  derived and/or modified CDS sequence (opt3) from glycoprotein__RABV__EU267772.1
auggugccccaggcccuucucuucgucccucuucugguuuuuccauugugcuucggcaaguuuccgaucuacaccauucccgacaaauuagggccuuggagcccaauagauauccaccaucuguccugucccaacaaucuagugguagaggacgaaggaugcacaaaccucucugguuucucauauauggagcugaaggugggcuacauucuugcuaucaaaaugaauggguuuacuuguacgggagucgugaccgaagcagagacauauacuaacuucguuggcuacgugaccacaaccuuuaagagaaaacacuucaggccuacuccagaugccugccgggcggcuuauaauuggaagauggccggugacccccgcuacgaagagagucugcauaacccuuauccagauuaccgaugguugcguacagucaagaccacgaaagagagccucgugauuaucuccccgucuguagcagaccuggaucccuacgacagaucgcugcacucaaggguuuuuccuagcgggaaguguaguggaguggccgucuccucuacuuauugcagcaccaaucaugauuacacaauauggaugccagaaaacccccggcucggcauguccugugacaucuucacuaauucacgcggcaaaagagcuaguaaggggagcgagaccugcggauuuguggaugaaagggguuuauauaaaucucugaagggcgcauguaagcugaaauugugcggggugcugggacuacggcucauggacggcacaugggucgccaugcaaaccuccaacgagacgaagugguguccuccagaucagcugguuaaucuuuacgacuuccgcucagacgagauugaacaccuggugguagaggaauuggugcgaaaaagagaggaaugccucgaugcucuggagagcaucaugacuacaaagagugucucuuuuaggcgguuaucccaccugaggaaacucgugcccgguuucgggaaggccuauaccauuuucaacaaaacucuuauggaggcggacgcacauuacaagagcguucgcacauggaaugaaauccugccgucgaagggaugcuugagagugggcggccguugucacccucaugucaacgggguguuuuucaauggaauaauucuaggucccgauggcaacguacugaucccagagaugcagucuucccuccugcagcaacacauggaacuucuggagucaaguguuauuccuuuggugcacccccucgccgacccaagcaccgucuuuaaagauggggacgaagcugaggauuucguggagguccaucugcccgacgugcacaaccagguuuccggaguggauuuaggccugccuaauugggguaaguauguacuacucucugccggggcacugacggcucuuauguugaucaucuuucugaugaccugcugucggcgagucaaccgcagcgaaccaacacagcauaaucucagaggcacuggaagggaggugucaguuaccccgcagaguggcaaaauuauauccagcugggaaucucacaagucagggggagagacacggcuguga

SEQ ID NO: 158990 - RNA, 1575 nt, Artificial Sequence
  derived and/or modified CDS sequence (opt3) from glycoprotein__RABV__EU267773.1
augaucccccaggugcugcuguucgucccucuucugguuuuuagcuccugcuucggcaaguuuccaauuuacaccauaccggacaaauuggggcccuggucuccuaucgauauucaccauuuaucauguccaaacaaucuggugguagaggacgaaggaugcacaaaccuaagugguuucagcuauauggagcucaaggugggcuacaucuccgccauuaaagucaauggguuuacuuguacgggagugguuaccgaagcugagacauauacuaacuucgugggcuacgucaccacaaccuuuaagagaaaacacuucaggcccaugccugaugcaugccgggccgcguauaauuggaagauggcuggugacccacgcuacgaagagucucugcauaaccccuauccugauuaccacuggcuucgaacugugaagacaaccaaagagucgcugguaaucauaucaccaagcguugccgacuuggauccguacgacaagagucuccauucccguguguuucccgggggaaaauguucuggcaucgcagucagcuccacgugcuguucaacuaaucacgauuauaccauuuggaugccugaaaacccaagacugggcacaaguugcgacaucuucacuaauagcagggggaagcgggccucuaaaggagguaagaccuguggcuuuguggaugagcgcgggcuguacaagucccucaaaggagcuugcaaguuaaaacuguguggcgugcuugguuugagacugauggacgggacaugggucgcaauucaaaccucagaugaaaucaaguggugcagccccguucagcuagugaaccuccacgacuuccauagugacgagauagagcaccugguaguggaggaacuugucaaaaagagggaagagugccuggauguguuggaaacgauuaugacuacaaaaucuguuuccuuucggcgccucagccaucugcgaaaguuagugccuggauucggcaaggccuauaccaucuucaauaaaacucugauggaggcugacgcccacuacaagucgauuagaacauggaacaaaaucaucccaucuaagggcugucucagggucgggggacggugccacccccaugugaaugguguauuuuucaacggcauuauacuugggccggauggacacguucugaucccugagaugcaguccucauugcuacaucagcacauggaacugcucgagaguagcgugauuccccugaugcauccacuugcggacccuuccaccgucuuuaaagauggcgacgaagcagaggauuucguggaaguccaccuccccgacgugcacaagcaaaucucugguguugauuuggggcucccaaauuggggcaaguaugugcugauaagcgccggagcuuuaacggcccugaugcuaaccauuuuucucaugacauguugccguaaaacuaaccgcgcagagucaauccagcauagucccggcgagaccgggagaaagguauccgucacaagccacaacggaagggugaucucuucaugggaaaguuacaaaagcgguuccgagacuaagcuguga

SEQ ID NO: 158991 - RNA, 1575 nt, Artificial Sequence
  derived and/or modified CDS sequence (opt3) from glycoprotein__RABV__EU267774.1
augaucccccaggugcugcuguucgucccucuucugguuuuuagcuccugcuucggcaaguuuccaauuuacaccauaccggacaaauuggggcccuggucuccuacagauauccaccauuuaucauguccaaacaaucuggugguagaggacgaaggaugcacuaaccuaagugguuucagcuauauggagcucaaggugggcuacauuuccgccaucaaagucaauggguuuacguguaccggagugguuacagaagcugagacuuauaccaacuucgugggcuacgucacaaccacuuuuaagagaaaacacuucaggcccaugccugaugcaugccgggccgcguauaauuggaagauggcuggugacccacgcuacgaagagucucugcauaaccccuauccugauuaccacuggcuucgaacagugaagaccacgaaagagucgcugguaauuaucucaccaagcguugccgacuuggauccguacgacaagagucuccauucccguguguuucccgggggaaaauguucuggcauaacugucagcucaaccugcuguuccacaaaucacgauuauacuaucuggaugccugaaaacccaagacugggcaccaguugcgacauuuucacaaauagcagggggaagcgggcaucuaaaggagguaagaccuguggcuuuguggaugagcgcgggcuguacaagucccucaaaggagccugcaaguuaaaacuguguggcgugcuugguuugagacugauggacgggacgugggucgcuauccaaacuucagaugaaauuaaguggugcagccccgaccagcuaguuaaccuccacgacuuccauagugaugagaucgagcaccuggugguagaggaacuugugaaaaagagggaagagugccuggacgcauuggaaacaauaaugaccacucggucugucuccuuucgccgacucagccaucugagaaaauuagugccuggauucggcaaggccuauacaauuuucaauaagacccugauggaggcugaugcccacuacaaaucgaucaggacguggaacgagauuaucccaucuaagggcugucuccggguugggggacguugccacccccaugugaauggugucuuuuucaacggcaucauucuugggccggacggacacgugcugauaccugaaaugcaguccucauugcuacaucagcacauggagcugcucgaaaguagcguaaucccccugaugcauccacuugcggauccuuccaccguuuuuaaagacggcggugaggcagaagauuucguggagguccaccuccccgacgugcacaagcaaauuucuggggucgauuugggccucccaaauuggggaaaauaugugcugaucagcgccggcgcuuuaacagcccugaugucaaugauauuucuaaugacuuguugccgcaagaccaacagagcagagaguauucagcauucccccggggaaacaggaaggaagguuagcgugacuucucacaacggucggguaaucucaaguugggagagcuacaaauccggcggggaaaccaagcucuga

SEQ ID NO: 158992 - RNA, 1575 nt, Artificial Sequence
  derived and/or modified CDS sequence (opt3) from glycoprotein__RABV__EU267775.1
augaucccccaggugcuucucuucgucccucuucugguuuuuagcuccugcuucagaaaguuuccaauuuacaccauaccggacaaguugggccccuggucuccuaucgauauucaccauuuaucaugucugaacaaucuagugguagaggacgaagggugcacaaaccucaguggauucagcuauauggagcugaagguggguuacaucuccgccauuaaagucaauggcuuuacuuguacgggggugguuaccgaagcugagacauauacuaacuucgugggauacgucaccacaaccuuuaagaggaaacacuuccggccaaugcccgaugcaugccgcgccgcguauaauuggaagauggcuggcgacccucgauacgaagagucucuucauaacccauaucccgauuaccacuggcugcguacugugaagacaaccaaagagucguugguaaucauaucaccuagcguugccgaccucgauccauacgacaagagucugcauuccagaguguuuccgucugguaaauguagcgggaucacggucuccucaacuugcuguaguaccaaucacgauuauacaauuuggaugcccgaaaacccuaggcugggaacuagcugcgacaucuucaccaauucucggggcaagcgcgcauccaaaggcgggaagacauguggauuuguggaugagagaggucucuacaagucauuaaggggcgccugcaaacugaagcugugugggguguugggacugcggcuaauggacggcaccugggucgcuauucaaacgagcgaugaaaucaaauggugcaguccagaccagcucguuaaccugcacgacuuccauucugaugagauagagcaccuugugguagaggaacuggugaagaaacgcgaagagugcuuggacgcacucgaaacuauuaugacaaccaaguccgucagcuuucgaagacugucgcauuuaaggaaacuggugcccgguuucgggaaggccuauacuaucuucaauaagacacucauggaggcugaugcccaccacaaaucuauucggaccuggaacgagaucaucccuuccaagggaugucuucguguuggcggccgcugccauccacacgugaauggggucuuuucaaacggaauuauacugggucccgacggccauguguugaucccggaaaugcagaguagccuacugcaccagcauauggagcuccuggaauccucuguaauuccucuuaugcacccccuggcggauccaagcacgguuuucaaagacucagaugaggcagaagacuuuguggagguccacuugccugaugugcauaagcaaaucaguggggucgaccucggacugcccaauuggggcaaauacguguuaauauccgccggugcucugaccgcccuaaugcucaugauuuuccugaugacauguugcagaaagacuaacagggcagagagcauccagcacucuccaggggaaaccggccggaagguuucagugacaagucauaacggacgaguaaucagcuccugggagucuuauaaaucgggcagcgaaacuaaacuuuga

SEQ ID NO: 158993 - RNA, 1575 nt, Artificial Sequence
  derived and/or modified CDS sequence (opt3) from glycoprotein__RABV__EU267776.1
augaucccccaggugcugcuguucgucccucuucugguuuuuagcuccugcuucggcaaguuuccaauuuacaccauaccggacaaauuggggcccuggucuccuaucgauauucaccauuuaucauguccaaacaaucuggugguagaggacgaaggaugcacaaaccuaagugguuucagcuauauggagcucaaggugggcuacaucuccgccauuaaagucaauggguuuacuuguacgggagugguuaccgaagcugagacauauacuaacuucgugggcuacgucaccacaaccuuuaagagaaaacacuucaggcccaugccugaugcaugccgggccgcguauaauuggaagauggcuggugacccacgcuacgaagagucucugcauaaccccuauccugauuaccacuggcuucgaacugugaagacaaccaaagagucgcugguaaucauaucaccaagcguugccgacuuggauccguacgacaagagucuccauucccguguguuucccucugggaaauguagcggaaucacggucuccucaacuugcuguaguaccaaucacgauuauacaauuuggaugccugaaaacccaagacugggcacuagcugcgacaucuucaccaauucuaggggcaagcgggcauccaaagggggaaagacaugugguuuuguggaugagcgcggccuguacaagucacucagaggggccugcaaauuaaagcuguguggagugcuuggcuugaggcugauggacgguaccugggucgcuauucaaacgagcgaugaaaucaaauggugcagucccgaccagcuaguuaaccuccacgacuuccauucugaugagauagagcaccuggugguagaggaacuugugaagaaacgggaagagugccuggacgcauuggaaacuauuaugacaaccaaguccgucagcuuucgccgacucucgcaucugagaaaauuagugccuggguucggaaaggccuauacuaucuucaauaagacacugauggaggcugaugcccacuacaaaucuauuaggaccuggaacgagaucaucccauccaagggcugucuccggguuggcgggcguugccacccccaugugaauggagucuuuuucaacgguauuauacuuggcccggacgggcacgugcugaucccugaaaugcagucaaguuugcuacaucagcacauggagcugcucgaaagcuccguaauuccccugaugcauccacuugcggauccuucuacgguuuuuaaagacggagaugaggcagaagacuucguggagguccaccuccccgaugugcacaagcaaaucagcggcgucgacuugggucucccaaauugggggaaauaugugcugauaucagccggcgcuuuaaccgcccugaugcuaaugauuuuucucaugacaugucgcagaaagacuaacagggcagagaguauccagcauucccccggagaaaccggccggaagguuagcgugacaucucacaacgggcgaguaaucucaaguugggagagcuacaaauccggaucugaaacuaagcuguga

SEQ ID NO: 158994 - RNA, 1575 nt, Artificial Sequence
  derived and/or modified CDS sequence (opt3) from glycoprotein__RABV__EU275240.1
augaucccccaggcccugcuguucgugccucuucuggucuuuagcuccugcuucggcaaguuuccaauuuacaccauaccggacaaauuggggcccuggucuccuaucgauauucaccauuuaucauguccaaacaaucugguuguggaggacgaaggaugcacaaaccuaagugguuucagcuauauggagcucaagguaggcuacaucuccgcuauuaaagugaauggguuuacuuguacgggagucgugaccgaagcagagacauauacuaacuucguuggcuacgugaccacaaccuuuaagagaaaacacuucaggcccaugccugaugccugccgggcggcuuauaauuggaagauggccggugacccacgcuacgaagagucucugcauaaccccuauccugauuaccacuggcuucgaacugucaagacaaccaaagagucgcuggugaucauaucaccaagcguagcagacuuggauccguacgacaagagucuccauucccguguuuuucccgaugggaaauguucuggaaucacggugagcuccacuugcuguucaaccaaucacgacuauacaauuuggaugccugaaaacccaagacugggcaccaguugcgauaucuucacuaauagcaggggcaagcgggccucuaaagggggaaagacaugugguuuugucgacgagcgcggccuguacaagucccucaaaggggcuugcaaguuaaaacuguguggagugcuuggcuugagacugauggaugguaccuggguggcaauucaaacgucagacgaaaucaaguggugcagccccgaccagcuagucaaccuccacgauuuccauagugacgagauagagcaccugguuguggaggaacuugugaaaaagagggaagagugccuggaugccuuggaaacuauuaugacaaccaaaucuguauccuuucggcgccucagccaucugcgaaaguuagucccuggguucggaaaggcuuauacuaucuucaauaaaacacugauggaggccgacgcgcacuacaagucgauuagaaccuggaacgagaucaucccaucuaaaggcugucucagggugggcgggcggugccacccccauguuaauggaguguuuuucaacgguauuauacuuggcccggaugggcacguccugaucccugaaaugcaguccucauugcuacaucagcacauggagcugcucgaaaguagcgugauuccccugaugcauccacuugcagacccuuccacgguauuuaaggauggagacgaggccgaagauuucguugaggugcaccuccccgacguccacaaacaaaucucuggcguggauuugggucucccaaauugggggaaguauguccugauaagcgcuggcgccuuaaccgcacugaugcuaaugauuuuucucaugacauguugccguaaggcuaaccgcgccgagucaauccagcauaaccccggagaaacuggcagaaaagugaguguuaccucccacaaugggagggugaucagcucuugggagucauacaagaguggaagcgaaacaaaacuguga

SEQ ID NO: 158995 - RNA, 1575 nt, Artificial Sequence
  derived and/or modified CDS sequence (opt3) from glycoprotein__RABV__EU275241.1
augaucccccaggcccugcuguucgugccucuucuggucuuuagcuccagauucggcaaguuuccaauuuacaccauaccggacaaauuggggcccuggucuccuaucgauauucaccauuuaucaugcccaaacuaucugguuguggaggacgaaggauguacaaaucuaagugguuucagcuacauggagcucaagguaggcuauaucuccgcuauuaaagugaacggguuuacuugcacgggagucgugaccgaagcagagacauacacuaauuucguuggcuaugugaccacaaccuuuaagaggaaacacuuccggcccacuccugaugccugucgcgcggcuuacaacuggaagauggccggugacccacgauaugaagagucucugcauaaucccuacccugauuaccacuggcuucguacagucaagaccucgaaagagucacuggugaucauaagcccaaguguagcagacuuggauccguaugacaagccccuccauuccagaguuuuuccugggggaaaaugcucuggcaucacggugagcuccacuuguugcucaaccaaccacgauuacacaauuuggaugccagaaaaucccaggcugcggaccaguugugacaucuucacuaacagccgcggcaagagagccucuaaagggggaaagacaugcgguuuugucgaugagaggggccuguauaagucccucaaaggggcuuguaaguuaaaacugugcggagugcuuggcuugcggcugauggacgguaccuggguggcaauucaaacgucagaugaaaucaagugguguagcccugaccagcuagucaaucuccacgacuuccauagugaugagauagagcaccugguuguggaggaacuugugaaaaagcgcgaagagugccuggacgccuuggaaacuauuaugacaaccaaaucuguauccuuucgaagacucagccaucugaggaaguuagucccaggguucggaaaggcuuacacuaucuucaacaaaacacugauggaggccgaugcgcacuauaagucgauucggaccuggaaugagaucauccccucuaaaggcugccuccgugugggcgggcgcugucacccgcauguuaacggaguguuuuucaaugguauuauacuuggcccugacgggcacguccugauccccgaaaugcaguccucauugcuacaucagcacauggagcugcucgaaaguagcgugauuccacugaugcauccucuugcagaucccuccacgguauuuaaggacggagaugaggccgaagacuucguugaggugcaccucccagauguccacaaacaaaucucuggcguggacuugggucuccccaacugggggaaguacguccuggugagcgcuggcgccuuaaccgcacugaugcuaaugauauuucucaugacaugcuguagaaagacuaauagggcugagucaauucagcauaguccuggagaaaccggccggaaaguuuccgugacaagccacaacgggcgaguaaucucuucaugggagaguuauaagagcggauccgaaacuaaacuguga

SEQ ID NO: 158996 - RNA, 1575 nt, Artificial Sequence
  derived and/or modified CDS sequence (opt3) from glycoprotein__RABV__EU275242.1
augacaccccaggcccugcucuuugugccucuucuggucuuuagcuugugcuucggcaaguuuccaaucuacaccauuccggacaaauuagggcccugguccccuauagauauccaccaucugucuuguccaaacaaucuaguuguggaggacgaaggaugcacuaaccuccccgguuucucauauauggagcugaagguaggcuacauuagugcuaucaaagugaauggguuuacguguaccggagucgugacagaagcagagacuuauaccaacuucguuggcuacgugacaaccacuuuuaagagaaaacacuucaggccuacaccagaugccugccgggcggcuuauaauuggaagauggccggugacccccgcuacgaagagagccuucauaacccuuauccagauuaccacuggcugcgaaccgucaagacgacuaaagaguccuuggugauuaucucuccgucgguaucagaccucgggcccuacgauaagagccugcauagucguguuuuuccuuccggaaaauguucuggcauaaccgugagcuccacauauugcccaacuaaucacgacuacaccaucuggaugcccgaaaacccuagacugggcacaucaugugauauuuucaccaauaguagggggaagcgggcaagcaaaggaucuaagacgugcgguuuugucgacgagcgcggccucuauaaguccuuaaaaggggccuguaagcugaaacuuugcggaguguugggccugagacuaauggaugguacuugggcugcaauccaaacaucagacgaagccaagugguguccacccgaucagcucgugaacauucacgacuucaggagcgacgagaucgagcaucuggucguugaggaacuugugaaaaagcgggaagagugccuggaugcuuuggaaaguauaaugaccacuaaaucuguauccuuucgccgacucagccaccugagaaaguuagugccgggguucggaaaggccuacacaauuuucaauaaaacccugauggaggcggacgcacauuauaagucggucaggacguggaacgagaucauuccuucuaaaggcugccuccgggugggcgggcguugucacccccacgccaauggaguuuucuucaacgguaucauccuuggcccagaugggcaugugcugauuccugaaaugcaguccucauugcuacagcaacacauggagcugcucgaaaguagcgucauaccccugaugcauccacuugcugaccccuccaccguguuuaaggauggagacgaggccgaagauuucguagagguucaucugccugacgugcacaaacaggucucuggcguggauuugggucucccaagcugggggaaguacguccugaugucagugggcgcauuaaucgcucugaugcuaaugauuuuucucgccacaugcugucgcaaggcgaauggagccgagaguauccagcacagacugggcgaaacugggaggaaaguuuccgugaccagccagaacggacggguaauaucuucaugggagaguuauaagagcgguggcgaaacaaaacuuuga

SEQ ID NO: 158997 - RNA, 1575 nt, Artificial Sequence
  derived and/or modified CDS sequence (opt3) from glycoprotein__RABV__EU293111.1
augaucccccaggcccuucucuuccuuccucuguugguguuuagcuuaugcuccggcaaguucccaauuuacaccauaccggacaaacuggggcccuggucuccuaucgauauucaccaucuaucauguccaaacaaucucgucguugaggacgaaggaugcacaaaccugagugguuuuagcuauauggagcuuaaggugggcuacaucuccgcuauuaaaguaaauggguucacuuguacgggaguggucaccgaagcagagacauauacuaacuuugugggcuacguuaccacaaccuucaagagaaaacacuuuaggcccacuccugaugccugccgggcggcuuauaauuggaagauggccggugacccacgcuacgaagagucucugcauaaccccuauccugauuaccacugguugcgaacagugaagaccacgaaagagucgcucgucaucauaucaccaagcgugagugaccuggauccguacgacaagucccugcauucucguguauuccccagcgggaaauguuccggaaucacuguuucaaguaccuauugcccuacaagccacgauuacacuauuuggaugccagaaaaucccagacucggcaccucuugugacaucuuuauuaacuccaggggcaagcgggcaucaaaagggagcaagacaugcggauucguggaugagcgcgguuuauauaagagucugaaaggcgccuguaagcugaaauugugcgggguccugggacuaagacucauggacggcaccuggguggcuauccaaacgucugaugaagcaaagugguguccuccagaccagcuggugaauauacacgacuuucauuccgaugagauugagcaccuugucguugaggaacuggugaaaaagagggaagagugcuuggacgcccucgaaagcaucaugacuacaaaaucgguaucuuuccggcgccugucccauuuacgaaagcuggugcccgguuuugggaaggcuuacaccauuuucaacaaaacucucauggaggccgaugcgcacuauaagucagucagaacauggaaugagaucaucccgaguaaaggaugccuuagggugggcggccggugucacccucauguuaacgggguguucuuuaauggaauuauacugggucccgacggccacgucuugaucccagaaaugcagagcucccuacugcagcaacauauggagcuccuggaaucuagcgugauuccucuuaugcacccccuggcagauccaucaaccguauucaaggacggggaugaggccgaagacuuuguugaggugcauuugcccgauguccacaaacaggugaguggagucgaccucggccugccuaacugggguaaguacguguuaguuuccgugggggcucugaucgcccuaaugcucaugauauuccugaugacgugcugucguaaggcaaauggcguagagagcaugcagcaccgccuuggagaaaccggcagaaaagucucugugacaucacagagugggaggguuauuagcuccugggagucuuauaagucgggaggugaaacuaaauuguga

SEQ ID NO: 158998 - RNA, 1575 nt, Artificial Sequence
  derived and/or modified CDS sequence (opt3) from glycoprotein__RABV__EU293115.1
auggugccccaggcccuucucuucgucccucuucugguuuuuagcuugugcuucggcaaguuuccaaucuacaccauuccggacaaauuagggcccugguccccuauagauauccaccaucugucuuguccaaacaaucuagugguagaggacgaaggaugcacaaaccucucagguuucaguuauauggagcugaaggugggcuacauuagcuccaucaaagucaauggguuuacuuguacgggagugguuaccgaagcugagacauauacuaacuucgugggcuacgucaccacaaccuuuaagagaaaacacuucaggcccacuccugaugcaugccgggccgcguauaauuggaagauggcuggugacccacgcuacgaagagucucuucauaaccccuauccugauuaccacuggcugcgaacagugaagaccacgaaagagucguugguaauuaucucaccaagcguugccgaccucgauccguacgacaagagucugcauucccguguguuucccgggggaaaauguucuggcauaacugucagcuccaccuauugcucaacaaaucacgauuacacuaucuggcugccugaaaacccaagacucggcaccaguugugacauuuucacaaauagcagggggaagcgggcaucuaaaggauccaagaccugcgguuuuguggaugagcgcggcuuauauaagucacugaaaggggccuguaagcugaaauugugcggagugcugggccuaagacucauggacgguacgugggucgcuaugcaaacuagcgaugaaacaaaguggugucccccugaccagcugguuaaccuucacgacuucaggagugaugagaucgagcaucuggugguagaagaguuggugaaaaagcgggaagagugccucgacgcacuggaaucuauuaugaccacuaaauccgucagcuuucgccgauuaucgcaccugagaaagcucgugccaggguucggaaaggccuacacaaucuucaauaaaacccuuauggaggcugaugcccauuauaagucuguuaggacguggaacgagauaauucccuccaaaggcugccugcgggugggcgggcguugucaccaccaugucaauggaguguuuuucaacgguaucauuuugggcccggacgggcacguacuaaucccugaaaugcagucaagucugcuccagcaacauauggagcugcuugaaagcuccguuaucccccugaugcacccauuggcggauccuucuaccguguuuaaggacggagaugaggcagaagacuucgucgaggugcaucuccccgauguccacaaacaggugagcggcguugaccuggguuuaccaaauugggggaaguacgugcugcuaucagccggcgcucucguagcccugaugcuuauuauauuuuugaugacaugcugucgcagagucaacaggcccgagaguacucggcgauccuucggaggcaccgaacgcaaggugagcaucacaccucagucugggaaaguuauuucaaguugggagagcuauaaguccggaucugaaacuagacuguga

SEQ ID NO: 158999 - RNA, 1575 nt, Artificial Sequence
  derived and/or modified CDS sequence (opt3) from glycoprotein__RABV__EU293116.1
augauccugcaggcccuccuuuucgugccccuguugauuagcuccuuaugcuuuggcaaguucccuauauacaccaucccagacaaacuggggccguggucucccauugauauccaccaucuaucauguccuaacaaucucgucguugaggacgaaggaugcacaagucugagcgguuuuuccuauauggagcuuaaggugggcuacauuucugcuaucaaaguaaacggguucacuuguacgggaguggucaccgaagcagagacauauacuaauuuugugggcuacguuaccacaaccuucaagagaaaacacuuuaggccaacucccgaugccugccgggcggcuuauaacuggaagguggccggugacccucgcuacgaagagucgcugcaaaauccauaucccgauuaccauugguugcgaacagucaagaccacgaaagagucacucauaaucauuagcccuaguguggcagaccuggauccauacgacaagucccugcacucucguguauucccgagcgggaaaugucucggaaucacuauuuccucaaccuauugcaguacaaaccaugauuacacuaucuggaugcccgaagaggccagauuaggcaccagcugugacauauuuacaaauucuaagggcaaaaaggcuuccaaagggggaaggaccugcgguuucguugaugaacggggccuguauaaaucacuuaagggggcauguaaauugaagcugugcggagugccuggccuacgccucauggacgguacgugggucacuauucagacaagcgaugagaccaaaugguguccacccgaccagcuggugaaccuucacgacuuucacagugaugagaucgaacaucugguggucgaggaauugguuaagaaaagagaggaaugccucgacgcccuggagucuauuaugacuacaaaguccgugagcuucaggcgguuaucgcaucugcgcaagcucguaccuggguuuggaaaggcuuacaccaucuucaauaagacgcuuauggaggccgaugcgcacuauaaaucugugcgaaccuggaacgaaaucauuccauccaagggcugccugaaagucggcgggagaugucacccccacguggacggaguuuucuuuaaugguauaaucuugggcccggaugggaacgugcuaauuccugagaugcagucaagucugcuccaacagcauauggaacugcuugagagcuccgucaucccccugaugcacccauuggcagacccuucuacaguguucaaggauggagacgaagccgaggauuuuguagagguucaucuccccgacgugcacaagcagauaagcggcgucgaucuggguuuaccaaauugggggaaauaccugcuaaugauugcuggcgcccucgcaggacugauccuuaucauuuucuugauggcuugcuguaggcgggccaagcguacugaaucacgcagaaggggcaguggggaguccgaacggaaagugcccgucccuccacagaacggaaaggugaucagcucuugggagcuguauaaaucagaaggugagaccggccucuga

SEQ ID NO: 159000 - RNA, 1575 nt, Artificial Sequence
  derived and/or modified CDS sequence (opt3) from glycoprotein__RABV__EU293121.1
augaucccccaggcccuucucuucgugccucuucuggucuuuagcuugugcuucggcaaguuuccaauuuacaccauaccggacaaauuagggcccugguccccuaucgauauucaccaucugucuuguccaaacaaucuaguuguggaggacgaaggaugcacaaaccucucagguuucaguuauauggagcugaagguaggcuacaucagcgcuauuaaagugaauggguuuacuuguacgggagucgugaccgaagcagagacauauacuaacuucguuggcuacgugaccacaaccuuuaagagaaaacacuucaggcccacuccugaugccugccgggcggcuuauaauuggaagauggccggugacccacgcuacgaagagucccuucauaaccccuauccugauuaccacuggcugcgaacagucaagaccacgaaagagucuuuggugaucauaucgccaucaguaagcgaccucgauccguacgacaagagucugcauucccguguuuuucccucugggaaauguagcggaaucacuguguccucaaccuauugcccuacaaaucacgauuacacuauuuggaugccagaaaaccccagacugggcaccaguugugacaucuucacaaauagcaggggcaagcgggcaucuaaaggguccaagaccugcggauuugucgaugagcgcggucucuauagaucauuaaagggcgccuguaaacugaagcugugcgggguguugggacugaggcuaauggacggcacgugggcugcaauucaaacuagcgaugaagccaaaugguguccuccagaccagcucgugaacauccacgacuuccggagugaugagauagagcaucuggucguugaggaacuugugaagaaacgcgaagagugccuggacgcuuuggaaucuauuaugacaaccaaguccgugagcuuucgaagacucucgcaccugaggaaauuaguacccgguuucgggaaggccuacacuaucuucaauaagacacugauggaggcggaugcacauuauaaaucuguccggaccuggaacgagauuaucccguccaagggaugccuccgugugggcggccgcugucacccucacguuaaugggguguuuuucaacggaaucauucuuggucccgacggccauguccugauaccagaaaugcagucaaguuugcuaagacagcacauggagcugcucgaaagcuccgugaucccucugaugcauccccuugccgauccaucuacgguauuuaaagacggggaugaggcugaagacuucguugaggugcaucugcccgauguccacgagcaaauuagcggaguggacuugggccucccuucaugggguaaguacguccugaugagugugggggccaugaucgcauuaaugcugguuauauuucuaaccacaugcuguaggaaagcuaauggcgccgaaacuauucagcaccggcucggagagaccggccgaaagguguccguaacaagccagucugggcgcgucaucucaaguugggaaagcuauaaguccggaggugagacuaaacuguga

SEQ ID NO: 159001 - RNA, 1575 nt, Artificial Sequence
  derived and/or modified CDS sequence (opt3) from glycoprotein__RABV__EU352767.1
auggugccccagguccuccuguucguuccucuucugggcuuuagcuugugcuucgggaaguuuccaaucuacaccauuccggacgaguuaggacccugguccccuauagauauccaccaucugucuuguccaaacaaucuagugguagaagacgaggguugcacaaaccucucagaguucaguuauauggagcugaaagugggcuacauuagcgccaucaaggucaauggguuuacuuguacgggagugguuaccgaagcugagacauauacuaacuucgugggcuacgucaccacaaccuuuaaaagaaagcacuucaggcccacuccugaugcaugccgggccgcguauaauuggaaaauggcuggugacccacgcuacgaggaaucccuucauaaccccuauccugauuaccacuggcugcgaacagugcguaccacgaaggagucuuugauuaucauaucgccaucaguaacugaccucgauccguacgacaagagccugcauaguagaguuuuucccgggggaaaauguuccggcaucaccgugucuagcacauauugcuccacuaaucacgauuacaccauuuggaugccugaagacccaaggccccggacaccuuguaacaucuucaccaauucacgcggcaagagagccaguaaagggaacaagacgugcggauuugucgaugagaggggucuguauaaaagccucaagggcgcaugucgguuaaagcugugcggggugcuuggauugcgccugauggacggcacuuggguggccaugcaaacaucugaugagaccaaaugguguccacccgaccagcuagucaaucuccacgacuuccauuccgaugaaauugagcaccugguuguggaagaacuuguaaagaaacgagaagagugccuggacgcuuuggagucaaucaugacuacaaagagcgugaguuuuagaaggcucucucaucugcggaaauuagucccggguuucgggaaggcauacaccauauucaacaaaacgcugauggaagccgaugcucacuauaaguccgugcguaccuggaaugagauuaucccuagcaagggaugccucaaaguuggcggccgcugucacccccaugugaacggggucuuuuucaauggaauuauccuugguccagacggccacgugcugaucccugaaaugcagucgucuuugcuacagcaacauauggagcugcucaaguccucaguaauuccccugaugcacccacuugccgaucccaguacaguuuuuaaagaaggggacgaggcggaggauuucguggaaguccaucugccugacguguacaagagaauaagcggagucgauuugggccucccaaacugggguaaauaugugcugaugacugcaggggccaugaucggcuuaguucugauuuuuagucuaaugaccuggugcaggcgggcuaaccgaccggagucuaagcagcgcagcuucggaggcacagggagaaaugugucaguaacuucccaguccggaaaggucauccccagcugggaaucuuacaaaucagguggcgagauaaggcucuga

SEQ ID NO: 159002 - RNA, 1575 nt, Artificial Sequence
  derived and/or modified CDS sequence (opt3) from glycoprotein__RABV__EU549783.1
augaucccccaggugcugcuguucgucccucuucugguuuuuagcuccugcuucggcaaguuuccaauuuacaccauaccggacaaauuggggcccuggucuccuaucgauauucaccauuuaucauguccaaacaaucuggugguagaggacgaaggaugcacaaaccuaagugguuucagcuauauggagcucaaggugggcuacuccucugccaucaaagucaauggguuuacuuguacgggagugguuaccgaagcugagacauauacuaacuucgugggcuacgucaccacaaccuuuaagagaaaacacuucaggcccaugccugaugcaugccgggccgcguauaauuggaagauggcuggugacccacgcuacgaagagucgcugcauaaccccuauccugauuaccacuggcuucgaacugugaagacaaccaaagagucacugguaauuaucagcccaaguguuacggacuuggauccguacgacaagucccuccauucucguguguuucccgggggaaaauguagcggcauaacugucuccucaaccugcuguaguacaaaucacgauuauacuaucuggaugccugaaaacccaagacugggcaccagcugcgacauuuucacaaauucuagggggaagcgggccuccaaaggagguaagaccuguggcuuuguggaugagcgcgggcuguacaagucacucaaaggagcaugcaaguuaaaacuguguggcgugcuugguuugagacugauggacgggacgugggucgccauccaaacuagcgaugaaauuaaguggugcagucccgaccagcuaguuaaccuccacgacuuccauucugaugagaucgagcaccuggugguagaggaacuugugaaaaagagggaagagugccuggacgcuuuggaaacaauaaugaccacuaaauccgucagcuuucggcgccucucgcaucugcgaaaguuagugccuggauucggcaaggcauauacaauuuucaauaaaacccugauggaggccgaugcucacuacaagucuaucagaacguggaacgagauuaucccauccaaaggcugucucaggguugggggacggugccacccccaugugaauggugucuuuuucaacggcaucauucuugggccggacggacacgugcugauaccugaaaugcagucaaguuugcuacaucagcacauggagcugcucgaaagcuccguaaucccccugaugcauccacuugccgauccuucuaccguuuuuaaggacggcgaugaggcggaagacuucguggagguccaccuccccgaugugcacaaacaaauuagcggugucgacuuggggcucccaaauuggggcaaguaugugcugaucucagcaggagccuuaacagcucugaugcuaacuauauuucucaugaccuguugccguaagacaaaccgcgccggcaguauucagcauucccccgggggaacugguagaaaaguuagcgugaccccucacaacggcaggguaaucuguucuugggagucauacaagagugggagcgaaacaaaacuguga

SEQ ID NO: 159003 - RNA, 1575 nt, Artificial Sequence
  derived and/or modified CDS sequence (opt3) from glycoprotein__RABV__EU643590.1
auggugccccaggcccuucucuucgucccucuucuggcuguuccauugugcuuuggcaaguucccgaucuacaccauucccgacaaauuagggccuuggagcccaauagauauccaccaucuguccugucccaacaaucuagugguagaggacgaaggaugcacaaaccucucugguuuuucauauauggagcugaaggugggcuacauuagugcaaucaaagucaauggguucacuuguacgggagugguuaccgaagccgagacauauacuaacuuugugggcuacgucaccacaaccuucaagagaaaacacuuuaggccuacuccagaugcgugccggagcgcuuauaauuggaagauggccggugacccccgcuacgaagagucccuucauaacccuuauccagauuaccacuggcugcgaacagugaagaccacgaaagagucuuucguaauuaucucgccgucaguugcagacuuggaucccuacgacaagagccuccauagucguguguuuccuagagggaaauguuccggaauaacugucucuagcaccuauugcuccacaaaucacgauuacacuaucuggaugccagaaaaccccaggcugggcaccucaugugacauuuucacaaauagucggggcaagcgcgccagcaaagggucuaagaccugcggauuuguggaugagagaggucuguauaagucccucaaaggcgcuuguaaguuaaaacugugcggggugcuuggauugaggcugauggacggcacgugggucgcaauccaaacuucagaugaaacaaagugguguccuccagaccagcuaguuaaccuccacgacuuccauagcgaugagauugagcaccuggugguagaggaacuugugaaaaagcgggaagagugccuggacgccuuggaaaguaucaugaccacuaaaucugucuccuuucgccgacucagccaucugagaaaguuagugcccgguuucgggaaggcuuacacaauauucaauaaaacccugauggaggccgaugcgcacuauaagucgguuaggacguggaacgagauuaucccgucuaaaggaugccuccgggugggcggccguugucacccucaugucaaugggguguuuuucaacggaauuauccuuggucccgacggccacguacugaucccagaaaugcaguccucauugcuacagcaacauauggagcugcucgaaaguagcguuauuccucugaugcacccccuugcagauccauccaccguguuuaaggacggggaugaggccgaagacuucgucgaggugcaucugcccgauguccacaaacaggugucuggaguugacuugggccucccuagcugggguaaguacgugcugaugucagcugggauauuaacagcccugaugcuaacuaucuuucucaugaccugcugucgcagaacaaauagggcagagaguauucagcacucccugggcgaaacuggacggaagguaagcgucaccucucagucaggccgagugaucaguagcugggaguccuauaaaucugggggagaaacaaagcuguga

SEQ ID NO: 159004 - RNA, 1575 nt, Artificial Sequence
  derived and/or modified CDS sequence (opt3) from glycoprotein__RABV__EU700029.1
augaucccccaggugcugcuguucgucccucuucugguuuuuagcuccugcuucggcaaguuuccaauuuacaccauaccggacaaauuggggcccuggucuccuaucgauauucaccauuuaucauguccaaacaaucuggugguagaggacgaaggaugcacaaaccuaagugguuucagcuauauggagcucaaggugggcuacaucuccgccauuaaagucaauggguuuacuuguacgggagugguuaccgaagcugagacauauacuaacuucgugggcuacgucaccacaaccuuuaagagaaaacacuucaggcccaugccugaugcaugccgggccgcguauaauuggaagauggcuggugacccacgcuacgaagagucucugcauaaccccuauccugauuaccacuggcuucgaacugugaagacaaccaaagagucgcugguaaucauaucaccaagcguugccgacuuggauccguacgacaagagucuccauucccguguguuucccgggggaaaauguucuggcaucacggucagcuccacuugcuguucaaccaaucacgauuauacaauuuggaugccugaaaacccaagacugggcaccaguugcgacaucuucacuaauagcagggggaagcgggcaucuaaaggagguaagacauguggcuuuguggaugagcgcgggcuguacaagucccucaaaggagccugcaaguuaaaacuguguggcgugcuugguuugagacugauggacgggaccugggucgcuauucaaacgucagaugaaaucaaguggugucccccugaccagcuaguuaaccuccacgacuuccauagcgaugagauagagcaccuggugguagaggaacuugugaaaaagagggaagagugccuggacgcauuggaaacuauuaugacaaccaaaagugucucuuuucggcgccucucccaucugcgaaaguuagugccaggauucggcaaggccuauacuaucuucaauaaaacacugauggaggcugaugcccacuacaagagcauuagaaccuggaacgagaucauccccucgaaaggcugccucaggguugggggacggugccacccgcaugugaauggugucuuuuucaacggcauuauacuugggccugacggacacgugcugauccccgaaaugcagucuuccuugcuacaucagcacauggagcugcucgaaucaaguguaauuccacugaugcauccucuugcggaucccagcacgguuuuuaaggacggcgaugaggcagaagacuucguggagguccaccucccagaugugcacaaacaaaucuccggugucgacuuggggcuccccaauuggggcaaguaugugcugauaucugccggagcuuuaaccgcccugaugcuaacaauuuuucucaugacuuguugccguaagaccaaccgcgcaggcagcauccagcauucaccuggggagacaggaagaaaaguuagugugacuucccacaacgguaggguaaucagcucuugggaaucauacaagaguggcagcgagaccaaacuguga

SEQ ID NO: 159005 - RNA, 1575 nt, Artificial Sequence
  derived and/or modified CDS sequence (opt3) from glycoprotein__RABV__EU700030.1
auggugccccuggcccuccuucuggucccuuuguuaguuuucagcuccugcuuuggcaaguucccaaucuacaccauuccggacaaacuggggcccuggucuccuauagauauccaccaucuaucauguccaaacaaucucgugguagaggacgaaggaugcacaaaccugagugguuuuagcuauauggagcuuaaggugggcuacauuuccgcuaucaaagucaauggguucacuuguacgggagugguuaccgaagcagagacauauacuaacuuugugggcuacgucaccacaaccuucaagagaaaacacuuuaggcccaugccugaugccugccgggcggcuuauaauuggaagauggccggugacccacgcuacgaagagucucugcauaaccccuauccugauuaccacugguugcgaacugugaagacaaccaaagagucgcucguaauuaucucaccaagcguugcagaccuggauccguacgacaagagucugcauucccguguguuccccgggggaaaauguucuggcauaacggucagcuccacuugcuguucaaccaaucacgauuauacaaucuggaugccugaaaacccaagacucggcaccaguugcgacauuuuuacuaauagcagggggaagcgggccucuaaaggagguaagacauguggcuucguggaugagcgcggguuauacaagucccugaaaggagcuugcaaacuuaaguuguguggcgugcugggucuaagacucauggacgggaccugggucgcaauccagacgucagaugaaauuaaguggugcagccccgaccaacugguuaaccuucacgacuuucauagugaugagaucgagcaccuggugguagaagaguuggugaaaaagagggaagagugccucgacgcccuggaaacuauaaugacaaccaaaucugucuccuuccggcgcuuaagccaucugcgaaagcucgugccuggauuuggcaaggcuuauacuauuuucaauaaaacacuuauggaggccgaugcgcacuacaagucgaucagaaccuggaacgagauuaucccaucuaaaggcugucugaggguugggggacggugccacccccaugugaauggugucuucuuuaacggcaucauuuuggggccggacggacacgugcuaauaccugaaaugcaguccucacugcuccaucagcacauggagcugcuugaaaguagcguaaucccccugaugcauccauuggcagauccuuccacgguuuucaaggacggcgaugaggccgaagacuuuguggagguccaccuccccgaugugcacaaacagauuucuggugucgaccugggguuaccaaauuggggcaaguaugugcugaucagcgcuggagcccuaaccgcacucaugcugacaauauuccuuaugacuuguugccguaagaccaaccgcgcugagucaauucaacauagucccggcgaaaucgggagaaaaguuuccgugacaagccacaacggaaggguaaucucuucaugggagaguuacaagagcgguuccgaaacuaaauuguga

SEQ ID NO: 159006 - RNA, 1575 nt, Artificial Sequence
  derived and/or modified CDS sequence (opt3) from glycoprotein__RABV__EU827276.1
auggugccccugacccuccuugucgccccucuguugguuuuaagccugugcuccggcaaguucccaaucuacacaauuccggacaaacuagggcccuggucuccuauagauauccaccaucucucauguccaaacaaucuggugguagaggacgaaggaugcacuaaccuuagugguuuuagcuauauggagcugaaggugggcuacauuuccgcuaucaaagucaauggguucacguguaccggagugguuacagaagcagagacuuauaccaacuuugugggcuacgucacaaccacuuucagaaggaagcacuuucggcccacaccugaugccugccgcaccgcguauaauuggaaaauggcuggugacccacgauacgaagagucuuugcauaaccccuauccugauuaccacuggcuccguacggugaagacuaccaaggagucgcugguaauuaucucaccaagcguugccgaccuggauccguacgacagaagucuccauuccaggguguuccccaaugggaaauguucuggaauaacagucagcuccacuuauugcccuaccaaccacgauuacacaaucuggaugccagaaaauccccgguuaggcaccucaugugacauuuuugugaacagucgcggcaagagagcaagcaaagggucuaagacgugcggauucguggaugagaggggucuguauaaaucccuuaagggcgccuguaaguugaaacugugcgggguccuaggacuccggcugauggacggcacuuggguugcuaugcgcacaucagaugaaaccaagugguguccuccagaccagcuugugaauauccacgacuuucauagcgaugagauugagcaccugguaguggaagaguuggucaaaaagcgagaagagugccucgacgcacuggaaaguaucaugacuacaaaaucuguguccuucagaagguuaagccaucugcggaagcucguucccgguuuugggaaagccuacaccauauucaacaagacgcuuauggaggcugaugcccacuauaagucggugcguaccugggacgagauuaucccgucuaaaggaugccugcgcgucggcggcagaugucacccucaugugcacgggguauuuuucaauggaauuaucuugggucccgauggccauguucuaaucccagaaaugcaauccucacugcuccagcagcacauggagcugcuugaaaguagcgugauuccucugaugcaucccuuggcggacccauccacagucuucaaggaugacgaugaggcagaagacuuuguggagguccaccuccccgaugugcacaaacagauaucugggguugaccugggauuaccuaacuggggcaaguacgugcugaugagcgccggugcucuaaucgcccucaugcugcuuauuuucuugaugacuugcuguaggaaaaucaagcggccagagucaacccaacauaguccgcgagggacaggccgcaagguauccgucacuagccagaauggaaaagugauaucuucaugggaaaguuauaagagcggcggggagaccagacuguga

SEQ ID NO: 159007 - RNA, 1575 nt, Artificial Sequence
  derived and/or modified CDS sequence (opt3) from glycoprotein__RABV__EU827277.1
auggugccccugacccuccuugucguuccucuguugguguuaagccugugcuccggcaaguucccaaucuacacaauuccggacaaacuagggcccuggucuccuauagauauccaccaucucucauguccaaacaaucugguaguggaggacgaaggaugcacuaaccuuagugguuuuagcuauauggagcugaaggucggcuacauuuccgccaucaaagugaauggguucacguguaccggaguugugacagaagcugagacuuauaccaacuuugucggcuacgugacaaccacuuucagaaggaagcacuuucggcccacaccugaugcaugccgcaccgccuauaauuggaaaauggcgggugacccacgauacgaagagucuuugcauaaccccuauccugauuaccacuggcuccguacgguaaagacuaccaaggagucgcugauuaucauaucaccaagcguugcugaccuggauccguacgacagaagucuccauuccaggguguuccccaaugggaaauguucuggaaucacagucagcuccacuuauugcccuaccaaccacgauuacacaauuuggaugccagaaaauccccgguuaggcaccucaugugacaucuuugugaacagucgcggcaagagagccagcaaagggucuaagacguccggauucguggaugagaggggucuguauaaaucacuuaagggcgcaugcaaguugaaacugugugggguccuaggacuccggcugauggacggcacuuggguugccaugcgcacaagcgaugaaaccaaguggugcccuccagugcagcuuguaaauauucacgacuuucauagugacgagaucgagcaccugguggucgaagaguuggugaaaaagcgagaagagugucucgaugcucuggaaucuauaaugacuacaaaauccguuagcuucagaagguuaucgcaucugcggaagcucgugcccgguuuugggaaagcauacaccauuuucaacaagacgcuuauggaggccgacgcucacuauaagucuguccguaccugggaugagaucauuccguccaaaggaugccugcgcgugggcggcagaugccacccucauguacacgggguguuuuucaauggaaucaucuugggucccgacggccauguucuaauuccagaaaugcaaucaagucugcuccagcagcacauggagcugcuugaaagcuccgucauaccucugaugcaucccuuggccgauccaucuacaguguucaaggacggggaugaggcggaagacuuugucgaggugcaccuccccgauguucacaaacagaucagcggaguggaccugggcuuaccuaacugggguaaguacguacugaugucagcaggggcccuaauugcucucaugcugaucauauuccuuaugacuuguugcaggaaaauuaagcggccagagaguacccaacauuccccgggcggaacaggccgaaaggucagcgugacuucucagaaugggaaaguuaucucaaguugggaaagcuauaaguccggaggugagacccgcuuguga

SEQ ID NO: 159008 - RNA, 1575 nt, Artificial Sequence; identical to SEQ ID NO: 158906
  derived and/or modified CDS sequence (opt3) from glycoprotein__RABV__EU877067.1

SEQ ID NO: 159009 - RNA, 1575 nt, Artificial Sequence
  derived and/or modified CDS sequence (opt3) from glycoprotein__RABV__FJ418876.1
augaucccccaggcccugcuguucgugccucuucuggucuuuagcuugugcuucggcaaguuuccaauuuacaccauaccggacaaauuagggcccugguccccuaucgauauucaccaucugucuuguccaaacaaucuaguuguggaggacgaaggaugcacaaaccucucagguuucaguuauauggagcugaagguaggcuacaucagcgcuauuaaagugaauggguuuacuuguacgggagucgugaccgaagcagagacauauacuaacuucguuggcuacgugaccacaaccuuuaagagaaaacacuucaggcccacuccugaugccugccgggcggcuuauaauuggaagauggccggugacccacgcuacgaagagucccuucauaaccccuauccugauuaccacuggcugcgaacagucaagaccacgaaagagucuuuggugaucauaucgccaucaguagcagaccucgauccguacgacaagagccugcauagucguguuuuucccuccgggaaauguucuggaaucacugugagcuccaccuauugcucaacaaaucacgauuacacuauuuggaugccugaaaacccaagacugggcaccaguugugacaucuucgucaauagcaggggcaagcgggccucuaaaggguccaagacaugcggauuuguggaugagcgcggucucuauaagucauuaaaaggcgcuuguaagauuaaacugugcggggugcuuggauugagacugauggacggcaccugggucgcaauccaaacgagcgaugaaacuaaguggugucccccugaccagcuaguuaaccuccacgacuucaggagugaugagauagagcaucuggugguagaggaacuugugaaaaagcgggaagagugccuggacgccuuggaaucuauuaugacaaccaaauccgucagcuuucgccgacucucgcaccugagaaaguuagugccagguuucgggaaggcuuacacuaucuucaauaaaacacugauggaggccgaugcgcauuauaagucuguuaggaccuggaacgagauuauccccuccaaaggaugccuccgggugggcggccguugucacccgcacgucaaugggguguuuuucaacggaaucauucuugguccugacggccauguacugauacccgaaaugcagucaaguuugcuacagcaacacauggagcugcucgaaagcuccguuaucccacugaugcauccucuugcagaucccucuacgauuuuuaaggacggggaugaggccgaagacuucguggagguccaccucccagaugugcauaaacaggucagcggaguggacuugggccuccccaauugggguaaguacguucugaugucagcuggggccuuaaucgcacugaugcuaaugauauuucucaugaccugcugucgcaagacagauagaacuggcaguacccaccacuccccuggagagacaggcaggaaagugagcguaacuucucagaacgggcgggucauugcuucaugggaaaguuauaagagcggaggugagacccgacuguga

SEQ ID NO: 159010 - RNA, 1575 nt, Artificial Sequence
  derived and/or modified CDS sequence (opt3) from glycoprotein__RABV__FJ418877.1
auggugccccaggcccuccuguucgucccucuucuggcuaucccauugugcuuuggcaaguucccgauuuacaccauacccgacaaauuagggccuuggagcccaaucgauauucaccaucuguccugucccaacaaucuaguuguggaggacgaaggaugcacaaaccucucugguuuuucauauauggagcugaagguaggcuacaucagugcaauuaaagugaauggguucacuuguacgggagucgugaccgaagccgagacauauacuaacuuuguuggcuacgugaccacaaccuucaagagaaaacacuuuaggccuacuccagaugcgugccggagcgcuuauaauuggaagauggccggugacccccgcuacgaagagucccuucauaacccuuauccagauuaccacuggcugcgaacagucaagaccacgaaagagucuuucgugaucauaucgccgucaguagcagacuuggaucccuacgacaagagccuccauagucguguuuuuccuagagggaaauguuccggaaucacugugucuagcaccuauugcuccacaaaucacgauuacacuauuuggaugccagaaaaccccaggcugggcaccucaugugacaucuucacaaauagucggggcaagcgcgccagcaaagggucuaagaccugcggauuugucgaugagagaggucuguauaagucccucaaaggcgcuuguaagaugaaauuaugcggggugcugggacuuagguugauggacggcacguggguggcaauucaaacuucagaugaaacaaagugguguccuccagaccagcuggucaaccuacacgacuuccauagcgaugagaucgagcaccucguuguggaggaacuggugaaaaagcgggaagagugccuugacgcccuggaaaguauaaugaccacuaaaucuguauccuuucgccgauugagccaucucagaaagcugguccccgguuucgggaaggcuuacacaauuuucaauaaaaccuuaauggaggccgaugcgcacuauaagucggugaggacguggaacgagaucauuccgucuaaaggaugccugcggguuggcggccguugucacccucaugugaauggggucuuuuucaacggaaucauccucggucccgacggccacgugcuuauuccagaaaugcaguccucacuguugcagcaacauauggagcuacuggaaaguagcguaauaccucucaugcacccccuggcagauccauccaccguuuuuaaggacggggaugaggccgaagacuucguggagguccaucuucccgaugugcacaaacaggucucuggaguggaccugggcuugccuagcugggguaaguacguucucaugucagcugggauccugacagccuuaaugcugaugauuuuucuaaugacuugcugucgcagaaccaauagggcagagaguauccagcacucccucggcgaaacaggacggaaggugagcguaacuucucagucaggccgagucauaaguagcugggaguccuauaaaucugggggagaaaccaagcuguga

SEQ ID NO: 159011 - RNA, 1575 nt, Artificial Sequence
  derived and/or modified CDS sequence (opt3) from glycoprotein__RABV__FJ418878.1
augaucccccaggugcuccuguucgucccucuucugguuuuuagcuccugcuucggcaaguuuccaauuuacaccauaccggacaaauuggggcccuggucuccuaucgauauucaccauuuaucauguccaaacaaucuggugguagaggacgaaggaugcacaaaccuaagugguuucagcuauauggagcucaaggugggcuacaucuccgccauuaaagucaauggguuuacuuguacgggagugguuaccgaagcugagacauauacuaacuucgugggcuacgucaccacaaccuuuaagagaaaacacuucaggcccaugccugaugcaugccgggccgcguauaauuggaagauggcuggugacccacgcuacgaagagucucugcauaaccccuauccugauuaccacuggcuucgaacugugaagacaaccaaagagucgcugguaaucauaucaccaagcguugccgacuuggauccguacgacaagagucuccauucccguguguuucccgggggaaaauguucuggcaucacggucagcuccacuugcuguucaaccaaucacgauuauacaauuuggaugccugaaaacccaagacugggcaccaguugcgacaucuucacuaauagcagggggaagcgggcaucuaaaggagguaagacauguggcuuuguggaugagcgcgggcuguacaagucccucaaaggagccugcaagaugaaauuauguggcgugcugggucuuagauugauggacgggaccugggucgcuauucaaacgucagaugaaaucaaguggugcagccccgaccagcugguuaaccuacacgacuuccauagugaugagauagagcaccucgugguagaggaacuggugaaaaagagggaagagugccuugacgcacuggaaacuauuaugacaaccaaaucugucuccuuucggcgcuugagccaucuccgaaagcuggugccuggauucggcaaggccuauacuaucuucaauaaaacauuaauggaggcugaugcccacuacaagucgauuagaaccuggaacgagaucaucccaucuaaaggcugucugaggguugggggacggugccacccccaugugaauggugucuuuuucaacggcauuauacucgggccggacggacacgugcuuaucccugaaaugcaguccucacuguugcaucagcacauggagcuacuggaaaguagcguaauuccccucaugcauccacuggcggauccuuccacgguuuuuaaggacggcgaugaggcagaagacuucguggauguccaccuucccgacgugcacaaacaaaucucuggugucgaucugggguugccaaauuggggcaaguaugugcucauaagcgccggagcucugaccgccuuaaugcugaugauuuuucuaaugacauguugccguaaggcaaaccgcgcugagucaauccagcauaaccccggcgagacugggagaaaaguuagugugaccucccacaauggaaggguaaucagcucuugggaaucauacaagagugguggcgagacaaaacucuga

SEQ ID NO: 159012 - RNA, 1575 nt, Artificial Sequence
  derived and/or modified CDS sequence (opt3) from glycoprotein__RABV__FJ418879.1
augaucccccaggugcuccuguucgucccucuucugguuuuuagcuccugcuugggcaaguucccaauuuacaccauaccggacaaauuagggcccuggucuccuaucgauauucaccaucugucauguccaaacaaucuagugguagaggacgaaggaugcacaaaccucagugguuuuagcuauauggagcugaaggugggcuacaucuccgccauuaaagucaauggguucacuuguacgggagugguuaccgaagcugagacauauacuaacuuugugggcuacgucaccacaaccuucaagagaaaacacuuuaggcccaugcuugaugcaugccgggccgcguauaauuggaagauggcuggugacccucgcuacgaagagucucugcauaacccauaucccgauuaccacugguugcgaacugugaagacaucgaaagagucacucguaaucauaagcccuaguguugccgaccuggauccauacgacaagucccugcauucucguguguuccccgggggaaaauguagcggcaucaccgucuccucaacgugcuguaguacuaaucacgauuauaccauuuggaugccggaaaacccuagacucggcacaagcugcgacaucuuuacuaauucuagggggaagcgggcauccaaaggagguaagaccuguggcuucguggaugagcgcggguuauacaagucacugaaaggagccugcaaggugaaacuuuguggcgucuugggucugagacuaauggacgggacauggguugcuauucaaaccagcgaugaaaucaaguggugcaguccagaccagcucgugaaccugcacgacuuucauucugaugagauagagcaccuuguaguggaggaacuggucaaaaagagggaagagugcuuggacgcacucgaaacgauuaugacuacaaaauccgugagcuuccggcgccugucgcauuuacgaaagcugguucccggauuuggcaaggccuauaccaucuucaauaaaacucucauggaggcugaugcccacuacaagucuauuagaacauggaacgagaucaucccuuccaaaggcugucuuagggucgggggacggugccacccacaugugaaugguguguucuuuaacggcauuauacuggggcccgacggacacguauugaucccggaaaugcagucaagucuacugcaucagcacauggagcuccuggaaagcuccguuauuccucuuaugcauccccuggcggauccaucuaccguguucaaggacggcgaugaggcagaagacuuugucgaggugcacuugccugauguccacaaacaaaucagcgguguggaccucgggcugcccaauuggggcaaguauguuuuaauaucagccggagcucugacggccaguaugcuaaugauuuuccucaugaccuguugccguaagacaaaccgcgcagaguccauccagcauagcccaggcgaaacugggagaaaagugucuguaaccucacacaacggaagggucaucaguagcugggaguccuacaagucugguggcgaaacaaaacuguga

SEQ ID NO: 159013 - RNA, 1575 nt, Artificial Sequence; identical to SEQ ID NO: 159010
  derived and/or modified CDS sequence (opt3) from glycoprotein__RABV__FJ418880.1

SEQ ID NO: 159014 - RNA, 1575 nt, Artificial Sequence
  derived and/or modified CDS sequence (opt3) from glycoprotein__RABV__FJ418881.1
augaucccccaggugcugcuguucgucccucuucugguuuuuagcuccugcuucggcaaguuuccaauuuacaccauaccggacaaauuggggcccuggucuccuaucgauauucaccauuuaucauguccaaacaaucuggugguagaggacgaaggaugcacaaaccuaagugguuucagcuauauggagcucaaggugggcuacaucuccgccauuaaagucaauggguuuacuuguacgggagugguuaccgaagcugagacauauacuaacuucgugggcuacgucaccacaaccuuuaagagaaaacacuucaggcccaugccugaugcaugccgggccgcguauaauuggaagauggcuggugacccacgcuacgaagagucucugcauaaccccuauccugauuaccacuggcuucgaacugugaagacaucgaaagagucacugguaaucauaagcccaaguguugccgacuuggauccguacgacaagucccuccauucucguguguuucccgggggaaaauguagcggcaucaccgucuccucaacgugcuguaguacuaaucacgauuauaccauuuggaugccugaaaacccaagacccggcacaagcugcgacaucuucacuaauucuagggggaagcgggcauccaaaggagguaagaccuguggcuuuguggaugagcgcgggcuguacaagucacugaaaggagccugcaaggugaugcucuguggcgucuuaggucugagacuuauggacgggacauggguugcuauucaaaccagcgaugaaaucaaauggugcaguccugaccaguuggugaaccugcacgacuuccauucugaugagauagagcaccuaguaguggaggaacucgucaagaaaagggaagagugccuggacgcacuugaaacgauuaugacuacaaaguccgugagcuuucggcgccugucgcauuugcgaaaacucguuccaggauucggcaaggccuauaccaucuucaauaagacucugauggaggcugaugcccacuacaaaucuauuagaacauggaacgagaucauccccuccaagggcuguuuaagggucgggggacggugccacccgcaugugaaugguguguuuuucaacggcauuauacuggggccugacggacacguacucauccccgaaaugcagucaagucuucugcaucagcacauggaguugcuagaaagcuccguuauuccacugaugcauccucucgcggaucccucuaccguguuuaaagacggcgaugaggcagaagacuucgucgaggugcaccucccagauguccacaagcaaaucagcgguguggaccuugggcugcccaauuggggcaaauauguuuugauaucagccggagcucucacggcccugauguuaaugauuuuucugaugaccuguugccguaagacaaaccgcgcagagaguauccagcauuccccuggcgaaacugggagaaaggugagcguaaccucucacaacggaagggucaucucaaguugggagagcuacaaauccgguggcgaaacaaagcuauga

SEQ ID NO: 159015 - RNA, 1575 nt, Artificial Sequence
  derived and/or modified CDS sequence (opt3) from glycoprotein__RABV__FJ418883.1
augaucccccaggugcuccuguucgucccucuucugguuuuuagcuccugcuucggcaaguuuccaauuuacaccauaccggacaaauuggggcccuggucuccuaucgauauucaccauuuaucauguccaaacaaucuggugguagaggacgaaggaugcacaaaccuaagugguuucagcuauauggagcucaaggugggcuacaucuccgccauuaaagucaauggguuuacuuguacgggagugguuaccgaagcugagacauauacuaacuucgugggcuacgucaccacaaccuuuaagagaaaacacuucaggcccaugccugaugcaugccgggccgcguauaauuggaagauggcuggugacccacgcuacgaagagucucugcauaaccccuauccugauuaccacuggcuucgaacugugaagacaaccaaagagucgcugguaaucauaucaccaagcguugccgacuuggauccguacgacaagagucuccauucccguguguuucccgggggaaaauguucuggcaucacggucagcuccacuugcuguucaaccaaucacgauuauacaauuuggaugccugaaaacccaagacugggcaccaguugcgacaucuucacuaauagcagggggaagcgggcaucuaaaggagguaagacauguggcuuuguggaugagcgcgggcuguacaagucccucaaaggagccugcaagaugaaauuauguggcgugcugggucuuagauugauggacgggaccugggucgcuauucaaacgucagaugaaaucaaguggugcagccccgaccagcugguuaaccuacacgacuuccauagugaugagauagagcaccucgugguagaggaacuggugaaaaagagggaagagugccuugacgcacuggaaacuauuaugacaaccaaaucugucuccuuucggcgcuugagccaucuccgaaagcuggugccuggauucggcaaggccuauacuaucuucaauaaaacauuaauggaggcugaugcccacuacaagucgauuagaaccuggaacgagaucaucccaucuaaaggcugucugaggguugggggacggugccacccccaugugaauggugucuuuuucaacggcauuauacucgggccggacggacacgugcuuaucccugaaaugcaguccucacuguugcaucagcacauggagcuacuggaaaguagcguaauuccccucaugcauccacuggcggauccuuccacgguuuuuaaggacggcgaugaggcagaagacuucguggagguccaccuucccgaugugcacaaacaaaucucuggugucgaccugggguugccaaauuggggcaaguaugugcucauaagcgccggagcucugaccgccuuaaugcugaagauuuuucuaaugacauguugccguaaaacuaaccgcgcagagucaauccagcauagucccggcgaaaucgggagaaagguuuccgugaccagccacaacggaaggguaauuucuucaugggagaguuacaaaagcgguuccgaaacaaagcucuga

SEQ ID NO: 159016 - RNA, 1575 nt, Artificial Sequence
  derived and/or modified CDS sequence (opt3) from glycoprotein__RABV__FJ418884.1
augaucccccaggugcuccuguucgucccucuucugguuuuuagcuccugcuucggcaaguuuccaauuuacaccauaccggacaaauuggggcccuggucuccuaucgauauucaccauuuaucauguccaaacaaucuggugguagaggacgaaggaugcacaaaccuaagugguuucagcuauauggagcucaaggugggcuacaucuccgccauuaaagucaauggguuuacuuguacgggagugguuaccgaagcugagacauauacuaacuucgugggcuacgucaccacaaccuuuaagagaaaacacuucaggcccaugccugaugcaugccgggccgcguauaauuggaagauggcuggugacccacgcuacgaagagucucugcauaaccccuauccugauuaccacuggcuucgaacugugaagacaaccaaagagucgcugguaaucauaucaccaagcguugccgacuuggauccguacgacaagagucuccauucccguguguuucccgggggaaaauguucuggcaucacggucagcuccacuugcuguucaaccaaucacgauuauacaauuuggaugccugaaaacccaagacugggcaccaguugcgacaucuucacuaauagcagggggaagcgggcaucuaaaggagguaagacauguggcuuuguggaugagcgcgggcuguacaagucccucaaaggagccugcaagaugaaauuauguggcgugcugggucuuagauugauggacgggaccugggucgcuauucaaacgucagaugaaaucaaguggugcagccccgaccagcugguuaaccuacacgacuuccauagugaugagauagagcaccucgugguagaggaacuggugaaaaagagggaagagugccuugacgcacuggaaacuauuaugacaaccaaaucugucuccuuucggcgcuugagccaucuccgaaagcuggugccuggauucggcaaggccuauacuaucuucaauaaaacauuaauggaggcugaugcccacuacaagucgauuagaaccuggaacgagaucaucccaucuaaaggcugucugaggguugggggacggugccacccccaugugaauggugucuuuuucaacggcauuauacucgggccggacggacacgugcuuaucccugaaaugcaguccucacuguugcaucagcacauggagcuacuggaaaguagcguaauuccccucaugcauccacuggcggauccuuccacgguuuuuaaggacggcgaugaggcagaagacuucguggagguccaccuucccgaugugcacaaacaaaucucuggugucgaccugggguugccaaauuggggcaaguaugugcucauaagcgccggagcucugaccgccuuaaugcugacaauuuuucuaaugauguguugccguaagacuaaccgcgcagagucaauccagcauagucccggcgaaaucgggagaaaaguuuccgugaccagccacaacggaaggguaauuucuucaugggagaguuacaagagcgguuccgaaacaaaacucuga

SEQ ID NO: 159017 - RNA, 1575 nt, Artificial Sequence
  derived and/or modified CDS sequence (opt3) from glycoprotein__RABV__FJ418885.1
auggugccccagguccuccuguucguuccucuucugguguuuagcuccugcuucggcaaguuuccaaucuacaccauuccggacaaauuggggcccuggucuccuauagauauccaccauuuaucauguccaaacaaucugguaguggaggacgaaggaugcacaaaccuaagugguuucagcuauauggagcucaaggucggcuacauuuccgccaucaaagugaauggguuuacuuguacgggaguugugaccgaagcugagacauauacuaacuucgucggcuacgugaccacaaccuuuaagagaaaacacuucaggcccaugccugaugcaugccgggccgcguauaauuggaagauggcuggugacccacgcuacgaagagucucugcauaaccccuauccugauuaccacuggcuucgaacuguaaagacaaccaaagagucgcugguuauuaucucaccaagcguggccgacuuggauccguacgacaagagucuccauucccgugucuuucccgggggaaaauguucuggcauaacggugagcuccacuugcuguucaaccaaucacgauuauacaaucuggaugccugaaaacccaagacugggcaccaguugcgacauuuucacuaauagcagggggaagcgggcaucuaaaggagguaagacauguggcuuuguggaugagcgcgggcuguacaagucccucaaaggagccugcaagaugaaauuauguggcguccugggucuuagauugauggacgggaccuggguugcuauccaaacgucagaugaaauuaaguggugcagccccgaccagcuggugaaccuacacgacuuccauagugaugagaucgagcaccucguaguggaggaacuggucaaaaagagggaagagugccuugacgcacuggaaacuauaaugacaaccaaaucuguguccuuucggcgcuugagccaucuccgaaagcugguuccuggauucggcaaggccuauacuauuuucaauaaaacauuaauggaggcugaugcccacuacaagucgaucagaaccuggaacgagauuaucccaucuaaaggcugucugagggucgggggacggugccacccccaugugaaugguguguuuuucaacggcaucauucucgggccggacggacacguacuuauaccugaaaugcaguccucacuguugcaucagcacauggagcuacuggaaaguagcguuaucccccucaugcauccacuggcggauccuuccacgguguuuaaggacggcgaugaggcagaagacuucgucgaggugcaccuucccgauguccacaaacaaauuucugguguggaccugggguugccaaauuggggcaaguauguucucaucagcgccggagcucugaccgccuuaaugcugaugauauuucuaaugacauguugccguaaggcaaaccgcgcugagucaauucagcauaaccccggcgaaacugggagaaaagugaguguaaccucccacaauggaagggucaucagcucuugggagucauacaagagugguggcgaaacaaaacucuga

SEQ ID NO: 159018 - RNA, 1575 nt, Artificial Sequence
  derived and/or modified CDS sequence (opt3) from glycoprotein__RABV__FJ418886.1
augaucccccaggugcuccuguucgucccucuucugguuuuuagcuccugcuucggcaaguuuccaauuuacaccauaccggacaaauuggggcccuggucuccuaucgauauucaccauuuaucauguccaaacaaucuggugguagaggacgaaggaugcacaaaccuaagugguuucagcuauauggagcucaaggugggcuacaucuccgccauuaaagucaauggguuuacuuguacgggagugguuaccgaagcugagacauauacuaacuucgugggcuacgucaccacaaccuuuaagagaaaacacuucaggcccaugccugaugcaugccgggccgcguauaauuggaagauggcuggugacccacgcuacgaagagucucugcauaaccccuauccugauuaccacuggcuucgaacugugaagacaaccaaagagucgcugguaaucauaucaccaagcguugccgacuuggauccguacgacaagagucuccauucccguguguuucccgggggaaaauguucuggcaucacggucagcuccacuugcuguucaaccaaucacgauuauacaauuuggaugccugaaaacccaagacugggcaccaguugcgacaucuucacuaauagcagggggaagcgggcaucuaaaggagguaagacauguggcuuuguggaugagcgcgggcuguacaagucccucaaaggagccugcaagaugaaauuauguggcgugcugggucuuagauugauggacgggaccugggucgcuauucaaacgucagaugaaaucaaguggugcagccccgaccagcugguuaaccuacacgacuuccauagugaugagauagagcaccucgugguagaggaacuggugaaaaagagggaagagugccuugacgcacuggaaacuauuaugacaaccaaaucugucuccuuucggcgcuugagccaucuccgaaagcuggugccuggauucggcaaggccuauacuaucuucaauaaaacauuaauggaggcugaugcccacuacaagucgauuagaaccuggaacgagaucaucccaucuaaaggcugucugaggguugggggacggugccacccccaugugaauggugucuuuuucaacggcauuauacucgggccggacggacacgugcuuaucccugaaaugcaguccucacuguugcaucagcacauggagcuacuggaaaguagcguaauuccccucaugcauccacuggcggauccuuccacgguuuuuaaggacggcgaugaggcagaagacuucguggagguccaccuucccgaugugcacaaacaaaucucuggugucgaccugggguugccaaauuggggcaaguaugugcucauaagcgccggagcucugaccgccuuaaugcugcagauuuuucuaaugacauguugccguaagacuauccgcgcagagucaauccagcauagucccggcgaaaccgggagaaaaguuuccgugacauuccacaacggaaggguaauuagcucuugggagucauacaagagugguagcgaaacuaaacucuga

SEQ ID NO: 159019 - RNA, 1575 nt, Artificial Sequence
  derived and/or modified CDS sequence (opt3) from glycoprotein__RABV__FJ418887.1
auggugccccagguccuccuguucguuccucuucugguguuuagcuccugcuucggcaaguuuccaaucuacaccauuccggacaaauuggggcccuggucuccuauagauauccaccauuuaucauguccaaacaaucugguaguggaggacgaaggaugcacaaaccuaagugguuucagcuauauggagcucaaggucggcuacauuuccgccaucaaagugaauggguuuacuuguacgggaguugugaccgaagcugagacauauacuaacuucgucggcuacgugaccacaaccuuuaagagaaaacacuucaggcccaugccugaugcaugccgggccgcguauaauuggaagauggcuggugacccacgcuacgaagagucucugcauaaccccuauccugauuaccacuggcuucgaacuguaaagacaaccaaagagucgcugguuauuaucucaccaagcguggccgacuuggauccguacgacaagagucuccauucccgugucuuucccgggggaaaauguucuggcauaacggugagcuccacuugcuguucaaccaaucacgauuauacaaucuggaugccugaaaacccaagacugggcaccaguugcgacauuuucacuaauagcagggggaagcgggcaucuaaaggagguaagacauguggcuuuguggaugagcgcgggcuguacaagucccucaaaggagccugcaagaugaaauuauguggcguccugggucuuagauugauggacgggaccuggguugcuauccaaacgucagaugaaauuaaguggugcagccccgaccagcuggugaaccuacacgacuuccauagugaugagaucgagcaccucguaguggaggaacuggucaaaaagagggaagagugccuugacgcacuggaaacuauaaugacaaccaaaucuguguccuuucggcgcuugagccaucuccgaaagcugguuccuggauucggcaaggccuauacuauuuucaauaaaacauuaauggaggcugaugcccacuacaagucgaucagaaccuggaacgagauuaucccaucuaaaggcugucugagggucgggggacggugccacccccaugugaaugguguguuuuucaacggcaucauucucgggccggacggacacguacuuauaccugaaaugcaguccucacuguugcaucagcacauggagcuacuggaaaguagcguuaucccccucaugcauccacuggcggauccuuccacgguguuuaaggacggcgaugaggcagaagacuucgucgaggugcaccuucccgauguccacaaacaaauuucugguguggaccugggguugccaaauuggggcaaguauguucucaucagcgccggagcucugaccgccuuaaugcugaugauauuucuaaugacauguugccgucgcgcaaacagagcugagucaauucagcauaaccccggcgaaacugggaggaaggugaguguaaccucccacaauggacgggucaucagcucuugggagucauacaaaagugguggcgaaacaaagcucuga

SEQ ID NO: 159020 - RNA, 1575 nt, Artificial Sequence
  derived and/or modified CDS sequence (opt3) from glycoprotein__RABV__FJ465384.1
auggugagccagucccuccuguucgucccccuucugggcuuuucuuugugcuucgggaaguuuccuaucuacaccauuccagacaaauuaggaccguggucacccauagauauccaccaucugaguuguccuaacaaucuaguuguggaggacgaagguugcacaaaccucagcggcuucuccuauauggagcugaagguaggguacauuucugccaucaaagugaauggauuuacuuguacgggcgucgugaccgaagcugagacauauacuaacuucguugguuacgugaccacaaccuuuagaaggaagcacuuccggccaacucccgaugcaugccgcgccgcguaucauuggaaaauggcuggggacccucgauacgaagagucgcuucacaauccauaucccgauuaccauuggcugcguacagucaagaccacgaaggagucauuggugauuaucagcccuaguguagccgaccucgauccauacgacaaaucccugcacucuagaguuuuuccgaacggaaaguguagcggccugacuguguccucaaccuauugcaguacaaaucacgauuacacuauguggaugcccgaaaacccuaggcucggcaccagcugugacauauucacaaauucucgggggaaacgcgcauccagaggaaacaagaccugcgguuuugucgaugagaggggcuuauauaaaucacugaagggggccuguaaacuuaaauugugcggagugcugggccuacggcucaucgacgguacguggguggcuaugcaaacuagcgaugaaacaaagugguguccacccgaccagcuggucaaucuucaugacuuccgcagugaugagauugagcaccugguuguggaagaguugguaaagaagcgagaagagugccucgacgcacuggaaucuaucaugaccacuaaauccgugagcuuuagaagguuaucgcaucugcggaagcucgucccuggguucggaaaagccuacacaauuuucaacaagacccuuauggaggcugaugcccacuauaagucuauccguacgugggacgagauagugccauccaaaggcugccugcgcguuggcgggaagugucacccccauauuaauggaguguuuuucaacgguaucauuuugggcucagaugggcacguccuaaucccggaaaugcagaguagccugcuccagcaacauaucgagcugcuugaauccucugugguaccucugaugcaccccuuggcggacccaagcaccguuuuuaaagauggaaaugaggcagaagacuucguggagguccaucucccugaugugcacaagcaggucucagagauugaccugggcuuacccaacugggguaaauacauacuggugagugccggggcucuaaucgcccucaugcugacaauucuuuugaucacuugcuguagaaggguucaccggccagaacccaagcagcaucgacugcgcggcaccgagagaaagguggcaguaacaucccagagcggaaaagcuauaucuucaugggaaaguuauaagaacggcggggagacuaggauguga

SEQ ID NO: 159021 - RNA, 1575 nt, Artificial Sequence
  derived and/or modified CDS sequence (opt3) from glycoprotein__RABV__FJ465385.1
auguucccccaggcccugcucuuugugccucuucugggcuugagcuuaugcuccgggagauucccaaucuacaccauuccggacaagcugggacccuggucuccuauagauauccaccaucuaucauguccaaacaaucucgucguugaggacgaagguugcacaaaccugaguggcuuuagcuauauggagcuuaaagugggguacauuuccucuaucaagguaucgggauucacuuguacgggcguggucaccgaagcugagacauauacuaauuuuguggguuacguuaccacaaccuucaggcggaaacacuuucgccccacuccugaugcaugccgagccgcgcauaacuggaagauggcuggggacccacguuaugaagagucacugcacaaucccuacccugauuaucauugguugagaacagugaaaaccacgaaggagagccucgucauuaucaguccauccguggccgaccuggauccguacgacaagucucugcacagcaggguauuccccaacggaaaauguuccggccucacuguauuuucaaccuacugcaguacaaaucacgaauauacuguguggaugccugagaacccacgguuaggcaccagcugugauauauucacaaauucucgcgggaagagagcauccaaaggaaacaagaccugcgguuuugucgacgaaaggggccuguacaaaucacuuaagggggccuguaaguugaaacugugcggagugcuaggccuccggcugauggaugguacguggguggcuaugcaaacuagcgacgagacaaaguggugucccccugaucagcuugucaaucugcaugacuuccgcagugacgagaucgaacacuugguuguggaggaacucguuaaaaagcgagaggaaugccuggaugcauuagagucuauuaugaccacuaaauccgugagcuuuagaaggcugucgcaucuccggaaacuugucccaggguucggaaaggccuauacaaucuucaacaagacccugauggaggcugacgcccacuacaagucugugcguacguggaaugaaauuauccccuccaaaggcugcuugcgcguuggcgggagaugucacccgcaugugaacggagucuuuuucaaugguauaauucuaggcucagaugggcacgugcugaucccugagaugcagaguagccuccugcagcaacauguagaacuucuggaguccucuguuauucccuugaugcacccacucgcggacccuagcaccguguuuaagggaggcgaugaagcagaggacuucgucgaggugcaucugcccgauguccacaaacaggugucagguguugacuuagggcugccaaacuggggcaaguauauccuagugagugccggagcucucaucgcccugauucuuauaaucuuuuugaugacaugcuguaggcgguuccgacgccccaaaccugcacagcacaaccugggcgggacuggaagaaagguauccgucaccagccagucugguaaggugguuucaaguugggaaagcuacaaaaauggcggggagacaaggcucuga

SEQ ID NO: 159022 - RNA, 1575 nt, Artificial Sequence
  derived and/or modified CDS sequence (opt3) from glycoprotein__RABV__FJ465386.1
auguucagcagaucccugcucuuugugucucuucugggcuuccccuugugcuuugggaaguucccuaucuacaccauuccagacaaauuaggaccguggucacccauagauauccaccaucugaguuguccuaacaaucuagucguugaggacgaagguugcacaaaccucagcggcuuuuccuauauggagcugaaggugggguacauuucugccaucaaaguaaauggauucacuuguacgggcguggucaccgaagcugagacauauacuaacuuuguggguuacguuaccacaaccuucaggcggaagcaccuucgcccaacucccgaugcaugccgaucggccuauaauuggaaaauggcgggggacccucguuacgaagagucacugcauaacccauaucccgauuaccacugguugagaacagugaagaccacgaaggagagccucgucauuaucaguccuuccguggcugaccuggauccauacgacaaaucucugcauagcaggguauuuccgaauggaaaguguuccggccucacuguuucaaguaccuauugcagcacaaaccacgauuacacuauauggaugcccgaaaauccucgguuaggcaccucuugugacaucuucacaaacuccaaagggaagcgcgccucaagaggaaauaaaaccugcgguuuuguggaugagaggggccuguauaagagccuuaagggggcauguaaauugaagcugugcggaguccuaggccuccggcugauugacgguacguggguggccaugcacacaagugaugaaacuaaaugguguccacccgaccagcuugugaaccugcaugacuuccgcucugaugagaucgagcacuuggucguugaggaacucgugaagaaacgagaagagugccuggacgcuuuagaauccauuaugaccacuaagagcguaucguuuagaaggcugucucaucuccggaaacuugugccuggguucggaaaggcauacacaaucuucaauaagacccugauggaggccgaugcucacuauaaauccauacguacgugggacgagauugucccaucaaagggcugcuugcgcgugggcgggagaugucacccccauguuaacggaguguuuuucaaugguaucauucuaggcagugaugggcacguccugaucccggaaaugcaaagcucccuccugcagcagcauguggagcuucuggaaucuagcguaguuccuuugaugcacccccucgccgacccaucaaccguguuuaaagauggaaacgaggcggaagacuucgucgaggugcaucugccugauguccacaaacaggugaguggcguugacuuaggucugcccgauugggggaaguacauccuaguguccgcaggcgcccucauugcucugaugcuuauaaucuuuuugaugacaugcuguaggcggguauaucgacgcgagagcaagcaacacucucugagaggaacugaaaggaaggucucagugaccagucagaacggcaaagccauuagcuccugggagucuuacaagaaugggucggaaacacggauguga

SEQ ID NO: 159023 - RNA, 1575 nt, Artificial Sequence
  derived and/or modified CDS sequence (opt3) from glycoprotein__RABV__FJ465387.1
auguucagcagaucccugcucuuugugucucuucugggcuuccccuugugcuuugggaaguucccuaucuacaccauuccagacaaauuaggaccguggucacccauagauauccaccaucugaguuguccuaacaaucuagucguugaggacgaagguugcacaaaccucagcggcuuuuccuauauggagcugaaggugggguacauuucugccaucaaaguaaauggauucacuuguacgggcguggucaccgaagcugagacauauacuaacuuuguggguuacguuaccacaaccuucaggcggaagcaccuucgcccaacucccgaugcaugccgaucggccuauaauuggaaaauggcgggggacccucguuacgaagagucacugcauaacccauaucccgauuaccacugguugagaacagugaagaccacgaaggagagccucgucauuaucaguccuuccguggcugaccuggauccauacgacaaaucucugcauagcaggguauuuccgaauggaaaguguuccggccucacuguuucaaguaccuauugcagcacaaaccacgauuacacuauauggaugcccgaaaauccucgguuaggcaccucuugugacaucuucacaaacuccaaagggaagcgcgccucaagaggaaauaaaaccugcgguuuuguggaugagaggggccuguauaagagccuuaagggggcauguaaauugaagcugugcggaguccuaggccuccggcugauugacgguacguggguggccaugcacacaagugaugaaacuaaaugguguccacccgaccagcuugugaaccugcaugacuuccgcucugaugagaucgagcacuuggucguugaagaguuggugaagaaacgagaagagugccuggacgcuuuagaauccauuaugaccacuaagagcguaucguuuagaaggcugucucaucuccggaaacuugugccuggguucggaaaggcauacacaaucuucaauaagacccugauggaggccgaugcucacuauaaauccauacguacgugggacgagauuaucccaucaaagggcugcuugcgcgucggcgggagaugucacccccaugugaacggaguguuuuucaaugguauuauccuaggcagugaugggcacguucugaucccggaaaugcaaagcucccuccugcagcagcaugucgagcuucuggaaucuagcgugguaccuuugaugcacccccucgccgacccaucaaccguuuuuaaagauggaaacgaggcggaagacuucguggagguccaucugccugaugugcacaagcaggucaguggcguggacuuaggucugcccgauugggggaaauacauucuaguuuccgcaggcgcccucauagcucugaugcuuaucauuuuucucaugacaugcuguaggcgggugcaccgacgcgagagcaagcaacauucucugagaggaacugaaaggaagguaucagucaccagucagaacggcaaagccaucagcuccugggagucuuauaagaaugggucggaaacacggauguga

SEQ ID NO: 159024 - RNA, 1575 nt, Artificial Sequence
  derived and/or modified CDS sequence (opt3) from glycoprotein__RABV__FJ465388.1
auguucagccagucccugcucuuugugccccuucugggcuucucuuugugcuuugggaaguucccuaucuacaccauuccagacaaauuaggaccguggucacccauagauauccaccaucugaguuguccuaacaaucuagucguugaggacgaagguugcacaaaccucagcggcuuuuccuauauggagcugaaggugggguacauuucugccaucagaguaucgggauucacuuguacgggcguggucaccgaagcugagacauauacuaauuuuguggguuacguuaccacaaccuucaaaaggaagcacuuucggccaacucccgaugcaugccgcgccgcguaucauuggaaaauggcuggggacccucgauacgaagagucacuucacaacccauaucccgauuaccauuggcugcguacagugaagaccacgaaggagagcuuggucauuaucaguccuuccguggccgaccucgauccauacgacaaaucucugcacagcagaguauucccgaauggaaaguguuccggccugacuguuucaaguaccuauugccucacaaaccacgauuacacuauauggaugcccgaaaauccuagguuaggcaccagcugugacaucuuuacaaacucucgggggaaacgcgcauccagaggaaauaagaccugcgguuucguggaugagaggggccuguauaaaucacuuaagggggccuguaaguugaaacugugcggaguccuaggccuccggcugauugacgguacguggguggcuaugcaaacuagcgaugaaacaaagugguguccacccgaccagcuugugaaccugcaugacuuucgcagugaugagaucgagcacuuggucguugaggaacucgugaaaaagcgagaagagugccuggacgcauuagaaucuauuaugaccacuaaauccgugagcuucagaaggcugucgcaucuccggaaacuuguaccuggguucggaaaggccuacacaaucuuuaauaagacccugauggaggcugaugcccacuauaagucuauacguacgugggacgagauugucccauccaaaggcugcuugcgcgugggcgggagaugucacccccauguuaacggaguguucuuuaaugguaucauucuaggcucagaugggcacguccugaucccggaaaugcagaguagccuccugcagcaacauguggagcuucuggaauccucuguaguuccuuugaugcacccccucgcggacccaagcaccguguucaaggauggaaacgaggcagaagacuuugucgaggugcaucugccugauguccacaaacaggugucaggcguugacuuaggucugcccaauugggggaaguacauccuagugagugccggcgcucucauugcccugaugcuuacaauauucuugaugacuugcuguaggcggguacgacgcccagagcccaaacagcacagacugaggggaaccgaaaagaaggucgcagugacaccucaguccggcaaagcuaucagcucuugggagucauauaagaacggggaugaaacucggauguga

SEQ ID NO: 159025 - RNA, 1575 nt, Artificial Sequence
  derived and/or modified CDS sequence (opt3) from glycoprotein__RABV__FJ465389.1
augcugagccagucccuccuucuggugucuuuguuaggcuucccccugugcuuugggaaguucccuaucuacaccauuccagacaaacuaggaccguggucacccauagauauccaccaucucaguuguccuaacaaucuggucguugaggacgaagguugcacaagccuuuccggcuuuucuuauauggagcugaaggugggguacauuucggccaucaaaguaaacggauucacuuguacgggcguggucaccgaagcugagacauauacuaauuuuguggguuacguuaccacaaccuucagaaggaagcacuugcggccaacucccgaugcaugccgcucagccuauaacuggaaaauggcgggggacccucgauacgaagagagccuccauaauccauaucccgauuaccacuggcugcguacagugaagaccacgaaggagagucuggucauuaucuccccuucuguggcugaccucgauccauacgacaagagcuuacauuccagaguauuuccgaacggaaaauguucaggccugacuguuaguagcaccuauugcucuacaaaucacgauuacacuauauggaugcccgaaaacccuaggcuuggcaccuccugugacaucuucacaaauucacgggggaaacgcgccagcagaggaaacaagaccugcgguuuuguggaugagaggggcuuguauaaaagucugaagggggcauguaagcuaaaacucugcggaguccugggccuucggcugauugacgguacguggguggccaugcacacuucugaugaaacaaagugguguccacccgaccaauuggugaaucuccaugacuuccgcuccgaugagaucgagcaccuggucguugaagaguuagugaaaaagcgagaagagugccuggacgcucucgaaagcauuaugaccacuaaaucgguaucuuuuagaaggcuuucccaucugcggaaguuggugccuggguucggaaaagcauacacaaucuuuaacaagacccuaauggaggccgaugcucacuauaagucaauacguacgugggacgagauugucccaaguaaaggcugccugcgcgugggcgggagaugucacccccauguuaauggaguguucuucaacgguaucauucucggcagcgaugggcacguccugaucccggaaaugcaguccucucuucugcagcagcauguggaguugcucgaaagcucaguaguuccucugaugcaccccuuagccgacccaaguaccguguuuaaggauggaaaugaggcggaagacuucgucgaggugcaucugccugauguccacaaacaaguguccggcguugaccuaggucuccccgauugggggaaguacauccuggugagcgcaggcgcccuuauugcuuugaugcugauaaucuuucucaugacaugcuguaggcggguacaccgacgcgagucuaaacagcauucacugagaggaacugaaaggaaggucagugugauuagccagaacggcaagaccaucuccucuugggagucguauaaaaacgggagcgacacacggauguga

SEQ ID NO: 159026 - RNA, 1575 nt, Artificial Sequence
  derived and/or modified CDS sequence (opt3) from glycoprotein__RABV__FJ465390.1
auguucagccagacccugcucuuugugccccuucugggcuuguccuuaugcuucgggaaguuuccuaucuacacaauuccagacaaacugggaccguggucucccauagauauccaccaucuaucauguccuaacaaucucgucguugaggacgaagguugcacuaaccugaguggcuucagcuauauggagcuuaaggugggguacauuuccgccaucaaaguaaauggauuuacguguaccggcguggucacagaagcugagacuuauaccaacuucguggguuacguuacaaccacuuuuagaaggaagcacuuccggccaacacccgaugcaugccgcgccgcguauaauuggaaaauggcuggggacccucgauacgaagagucucugcauaacccauaucccgauuaccacugguugcguaccgugaagacgacuaaggagucgcucgucauuaucucaccuagcguggccgaccuggauccauacgacaaaagucugcauuccagaguauuucucaauggaaaguguucuggcuuaaccguuagcuccacauauugcucaacuaaccacgauuacaccauauggaugccggaagaccccaggcugggcacaaguugugauaucuucauuaauagccgggggaaacgcgcaucuaagggauccaaaaccugcgguuuuguggacgagagaggccuuuauaagucauugaagggggccuguaaacugaagcuaugcggaguccucggccugaggcuuaucgaugguacguggguggcuaugcaaacuagcgaggaaccuaaaugguguccacccgaccagcuggugaacuugcacaauuuccggagugacgagauugaacaucucgucguugaggaacuggugaagaaacgcgaggaaugcuuagaugcacuggagucuaucauaacaaccaaguccguuagcuuucgaagacucucgcaccuuaggaaacuggugccuggguucggaaaggccuacacuauuuucaacaagacauugauggaggcugacgcccauuauaaaucuauccggaccugggaugaaauuaucccauccaagggcugccuacgugucggcgggcgcugucacccccacgugaauggaguauuuuucaacgguaucauucugggcucagacgggcaugugcucauaccggagaugcagaguagccugcuucagcaacacgucgaacuguuggaguccucugugaucccucucaugcauccccuggcggauccaagcacgguauuuaaaggaggcgacgaagcagaggauuucguugagauucacuuaccugacgugcauaagcagaucucaggugucgaucuggggcuacccaauuggggcaaauacauacucgugggagccggcgcucugauugcccuuauguugaucaucuuucugauuaccugcuguagaggguuccacaggccaaagaguacacagcacucccucggagguacuggccggaaggucagcgugacaccccagucugggaaaguuaucucaaguugggaaagcuauaagaaaggauccgagacccgacuguga

SEQ ID NO: 159027 - RNA, 1575 nt, Artificial Sequence
  derived and/or modified CDS sequence (opt3) from glycoprotein__RABV__FJ465391.1
augcccagccagucccuucucuucgugucucuucugggcuuuucauugugcuucgggaaguuuccuaucuacaccauuccagacaaauuaggaccguggagucccauagauauccaccaucugagcuguccuaacaaucuagucguugaggacgaagguugcacaaaccucuccggcuucucuuauauggagcugaaggugggguacauuucggccaucaaaguaaauggauuuacuuguacgggcguggucaccgaagcugagacauauacuaacuucguggguuacguuaccacaaccuuuagaaggaagcacuuccggccaacucccgaugcaugccgcucagccuauaauuggaaaauggcgggggacccucgauacgaagagagccuucauaacccauaucccgauuaccacuggcugcguacagugaagaccacgaaggagaguuuggucauuaucuccccuucuguggcugaccucgauccauacgacaaaagccugcauuccagaguauuuccgaauggaaaguguucaggccugacuguuaguagcaccuauugcucuacaaaccacgauuacacuauauggaugcccgaaaauccuaggcucggcaccuccugugacaucuucacaaacucacgggggaaacgcgccagcagaggaaauaagaccugcgguuuuguggaugagaggggcuuauauaaaagucugaagggggcauguaagcugaaauugugcggaguccugggccuacggcucauugacgguacguggguggccaugcacacuucugaugaaacaaagugguguccacccgaccaacuggugaaccuucaugacuuccgcuccgaugagaucgagcaccuggucguugaagaguuggugaaaaagcgagaagagugccucgacgcucuggaaagcauuaugaccacuaaaucgguaucuuuuagaagguuaucccaucugcggaagcucgugccuggguucggaaaagcauacacaaucuucaauaagacccuuauggaggccgaugcucacuauaagucaauacguacgugggacgagauugucccaaguaaaggcugccugcgcgugggcgggagaugucacccccauguuaacggaguguuuuucaaugguaucauuuugggcagcgaugggcacguccuaaucccggaaaugcaguccucucugcuccagcagcauguggagcugcuugaaagcucaguaguuccucugaugcaccccuuggccgacccaaguaccguguuuaaggauggaaacgaggcggaagacuucgucgaggugcaucucccugauguccacaaacaaguguccggcguugaccuggguuuacccgauugggggagguacauccuggugagcgcaggcgcccuaauuacacucaugcugauaaucuuucuuaugacuugcugucggcgaguacaccgcagagagucuaagcagcauucauugaggggaaccgaacggaaagucagugugacaagccaguccggcaaggcuauuucuucgugggagagcuauaagaacggguccgaaacucgcauguga

SEQ ID NO: 159028 - RNA, 1575 nt, Artificial Sequence
  derived and/or modified CDS sequence (opt3) from glycoprotein__RABV__FJ465392.1
auguucccccagacccugcucuuugugccucuucugggcuugagcuuaugcuucgggaaguuuccaaucuacacaauuccggacaaacugggacccugguccccuauagauauccaccaucuaucuuguccaaacaaucucgucguugaggacgaagguugcacuaaccugucaggcuucaguuauauggagcuuaaggugggguacauuagcgccaucaaaguaaauggauuuacguguaccggcguggucacagaagcugagacuuauaccaacuucguggguuacguuacaaccacuuuuagaaggaagcacuuccggcccacaccugaugcaugccgcgccgcguauaauuggaaaauggcuggggacccacgauacgaagagucccugcauaaccccuauccugauuaccacugguugcguaccgugaagacgacuaaggagucucucgucauuaucucgccaucaguggccgaccuggauccguacgacaaaagccugcauaguagaguauuucucaauggaaaguguuccggcuuaaccguuucuagcacauauugcuccacuaaccacgauuacaccauauggaugcccgaaaauccuaggcugggcacaucaugugacaucuucauuaacagucgggggaaacgcgcaagcaagggaaauaaaaccugcgguuuuguggaugagagaggccuuuauaagucuuugaagggggccuguaaacugaagcuaugcggaguccucggccugaggcuuaucgacgguacguggguggcuaugcaaacuuccgaggaaccaaaauggugucccccugaucagcuggugaacuugcacaauuuccggucagacgagauugaacaucucgucguugaggaacuggugaagaaacgcgaggaaugcuuagacgcacuggagagcaucaugacaaccaagaguguaucuuuucgaagacucucccaccuuaggaaacuggugccaggguucggaaaggccuacacuauauucaacaagacauugauggaggcugaugcccauuauaaaagcauucggaccugggacgaaaucauucccucgaagggcugccuacgugucggcgggcgcugucacccgcacgugaauggaguguuuuucaacgguaucauccugggcucugaugggcauguucucauuccugagaugcaguccucacugcuucagcaacacgucgaacuguuggagaguagcgugauaccccucaugcauccacuggcggacccuuccacgguauuuaaagauggagacgaagcagaggauuucguugagauccacuuacccgacgugcauaagcagauuucuggcgucgaucugggucuaccaaacugggggaaauacauccucgugagcgccggcgcucugauaacccuuauguugacaauuuuucugaucacuugcuguagaggauucaggcggcccaagucaacccagcacagucucggcgggacaggaaugaaggucuccgugacuccucagagcgguaaaguuaucucuucaugggaaaguuauaagaaaggcggggagacccgacuguga

SEQ ID NO: 159029 - RNA, 1575 nt, Artificial Sequence
  derived and/or modified CDS sequence (opt3) from glycoprotein__RABV__FJ465393.1
auguucagccagucccugcucuuugugccccuucugggcuucucuuugugcucagggaaguuuccuaucuacaccauuccagacaaauuaggaccguggagucccauagauauccaccaucugagcuguccuaacaaucuagucguugaggacgaagguugcacaaaccucuccggcuucucuuauauggagcugaaggugggguacauuucggccaucagaguaucaggauuuacuuguacgggcguggucaccgaagcugagacauauacuaauuucguggguuacguuaccacaaccuuuaaaaggaagcacuuccggccaacucccgaugcaugccgcgccgcguaucauuggaaaauggcuggggacccucgauacgaagagagccuucacaacccauaucccgauuaccauuggcugcguacagugaagaccacgaaggagaguuugauuaucauauccccuucugucgccgaccucgauccauacgacaaaagccugcacuccagaguguuuccgaauggaaaguguucaggccugacuguaaguagcaccuauugcucuacaaaccacgauuacacuaucuggaugcccgaaaauccuaggcucggcaccuccugugacauuuucacaaacucacgggggaaacgcgcaagcagaggaaauaagaccugcgguuuuguugaugagaggggcuuauauaaaagucugaagggggccuguaaacuuaaguugugcggagugcugggccuacggcucaucgacgguacgugggucgcuaugcaaacuucugaugaaacaaagugguguccacccgaccagcuggugaaccuucaugacuuccgcuccgaugagauugagcaccugguggucgaagaguugguuaaaaagcgagaagagugccucgacgcacuggaaagcaucaugaccacuaaaucggugucuuuuagaagguuaucccaucugcggaagcucguaccuggguucggaaaagccuacacaauauucaauaagacccuuauggaggcugaugcccacuauaagucaauucguacgugggacgagaucgugccaaguaaaggcugccugcgcgucggcgggagaugucacccccaugugaacggaguguuuuucaaugguauuaucuugggcagcgaugggcacguucuaaucccggaaaugcaguccucucugcuccagcaacaugucgagcugcuugaaagcucagugguaccucugaugcaccccuuggcggacccaaguaccguuuuuaaggauggaaacgaggcagaagacuucguggagguccaucucccugaugugcacaaacaggucuccggcguggaccuggguuuacccaauugggggagguacauucugguuggcgccggagcucuaauagcccucaugcugacaaucuuucuuuugacuugcugucggcgagugcaccagccagagcccaagcagcaucgccugagagaagcagagaggaaaguagcugucaccagccaaucuggcaaggccauuucaaguugggaaagcuauaagaacgggggagagacacggauguga

SEQ ID NO: 159030 - RNA, 1575 nt, Artificial Sequence
  derived and/or modified CDS sequence (opt3) from glycoprotein__RABV__FJ465394.1
auguucagcagaucccugcucuuugugucucuucugggcuuccccuugugcuuugggaaguucccuaucuacaccauuccagacaaauuaggaccguggucacccauagauauccaccaucugaguuguccuaacaaucuagucguugaggacgaagguugcacaaaccucagcggcuuuuccuauauggagcugaaggugggguacauuucugccaucaaaguaaauggauucacuuguacgggcguggucaccgaagcugagacauauacuaacuuuguggguuacguuaccacaaccuucaggcggaagcaccuucgcccaacucccgaugcaugccgaucggccuauaauuggaaaauggcgggggacccucguuacgaagagucacugcauaacccauaucccgauuaccacugguugagaacagugaagaccacgaaggagagccucgucauuaucaguccuuccguggcugaccuggauccauacgacaaaucucugcauagcaggguauuuccgaauggaaaguguuccggccucacuguuucaaguaccuauugcagcacaaaccacgauuacacuauauggaugcccgaaaauccucgguuaggcaccucuugugacaucuucacaaacuccaaagggaagcgcgccucaagaggaaauaaaaccugcgguuuuguggaugagaggggccuguauaagagccuuaagggggcauguaaauugaagcugugcggaguccuaggccuccggcugauugacgguacguggguggccaugcacacaagugaugaaacuaaaugguguccacccgaccagcuugugaaccugcaugacuuccgcucugaugagaucgagcacuuggucguugaggaacucgugaagaaacgagaagagugccuggacgcuuuagaauccauuaugaccacuaagagcguaucguuuagaaggcugucucaucuccggaaacuugugccuggguucggaaaggcauacacaaucuucaauaagacccugauggaggccgaugcucacuauaaauccauacguacgugggacgagauugucccaucaaagggcugcuugcgcgugggcgggagaugucacccccauguuaacggaguguuuuucaaugguaucauucuaggcagugaugggcacguccugaucccggaaaugcaaagcucccuccugcagcagcauguggagcuucuggaaucuagcguaguuccuuugaugcacccccucgccgacccaucaaccguguuuaaagauggaaacgaggcggaagacuucgucgaggugcaucugccugauguccacaaacaggugaguggcguugacuuaggucugcccgauugggggaaguacauccuaguguccgcaggcgcccucauugcucugaugcuuauaaucuuuuugaugacaugcuguaggcggguacaccgacgcgagagcaagcaacauucucugagaggaacugaaaggaaggucucagugaccagucagaacggcaaagccauuagcuccugggagucuuauaagaaugggucggaaacacggauguga

SEQ ID NO: 159031 - RNA, 1575 nt, Artificial Sequence
  derived and/or modified CDS sequence (opt3) from glycoprotein__RABV__FJ465395.1
augagcucccagucucuccuguucgugucacuucugggcuuuaguuugugcuucgggaaguuucccaucuacaccauuccugacaaauuaggaccauggagcccgauagauauccaccaucuguccugucccaacaaucuagucguugaggacgaagguugcacaaaccucucuggcuucucguauauggagcugaaggugggguacauuucagccaucaaaguaaauggauuuacuuguacgggcguggucaccgaagcugagacauauacuaacuucguggguuacguuaccacaaccuuuagaaggaagcacuuccggccuacuccagaugcaugccgcagcgccuauaauuggaaaauggcgggggacccccgauacgaagagagucuucauaacccuuauccagauuaccacuggcugcguacagugaagaccacgaaggaguccuuggucauuaucucucccagcguggcugaccucgauccuuacgacaaaucccugcauucaagaguauuuccaaauggaaaguguaguggccugacuguuuucagcaccuauugcucuacaaaccacgauuacacuauauggaugccggaaaaucccaggcucggcaccuccugugacaucuuuacaaacucacgggggaaacgcgccagcagaggaaauaagaccugcgguuucguggaugagaggggcuuauauaaaagucugaagggggcauguaaacuuaaauugugcggaguccugggccuacggcucauugacgguacgugggugucuaugcacacuuccgaugaaacaaagugguguccuccagaccaacuggugaaccuucaugacuuucgcagcgaugagaucgagcaccuggucguugaagaguuggugaaaaagcgagaagagugccucgacgcccuggaaucgauuaugaccacuaaaucuguauccuucagaagguuaucacaucugcggaagcucgugcccggguucggaaaggcuuacacaaucuuuaauaagacccuuauggaggcagaugcccacuauaagaguauacguacgugggacgagauugucccuagcaaaggcugccugcgcgugggcgggagaugucacccacauguuaacggaguguucuuuaaugguaucauuuugggcuccgaugggcacguccuaauccccgaaaugcagucuagccugcuccagcagcauguggagcugcuugaaucaaguguaguuccgcugaugcacccuuuggcugaccccuccaccguguucaaggauggaaacgaggccgaagacuuugucgaggugcaucucccagauguccacaaacaagugagcggcguugaccuggguuuaccugauugggggagguaccugcuagugucugcgggcgcacucaucacacugaugcuuauuauauucuugaugacuugcugucggcgaguacaccgcagagagucaaagcagcauagucugaggggaaccgaacggaaagucagcgugacaucccagucuggcaaggccaucucgagcugggaguccuauaagaacgggucagaaacucgcauguga

SEQ ID NO: 159032 - RNA, 1575 nt, Artificial Sequence
  derived and/or modified CDS sequence (opt3) from glycoprotein__RABV__FJ465396.1
augcugagccagucccuccuucuggugucuuuguuaggcuucccccugugcuuugggaaguucccuaucuacaccauuccagacaaacuaggaccguggucacccauagauauccaccaucucaguuguccuaacaaucuggucguugaggacgaagguugcacaaaccuuagcggcuuuuccuauauggagcugaaggugggguacauuucugccaucaaaguaaauggauucacuuguacgggcguggucaccgaagcugagacauauacuaacuuuguggguuacguuaccacaaccuucagaaggaagcacuugcggccaacucccgaugcaugccgcucggccuauaauuggaaaauggcgggggacccucgauacgaagagucacuccauaacccauaucccgauuaccacuggcugcguacagugaagaccacgaaggagagccuggucauuaucaguccuuccguggcugaccucgauccauacgacaaaucuuuacauagcagaguauuuccgaauggaaaguguuccggccugacuguuucaaguaccuauugcagcacaaaccacgauuacacuauauggaugcccgaaaauccuaggcuuggcaccucuugugacaucuucacaaacucccgggggaaacgcgccucaagaggaaauaagaccugcgguuuuguggaugagaggggcuuguauaaaagccugaagggggcauguaagcuaaaacucugcggaguccugggccuucggcugauugacgguacguggguggccaugcacacaagugaugaaacuaagugguguccacccgaccaauuggugaaccuccaugacuuccgcucugaugagaucgagcaccuggucguugaagaguuagugaaaaagcgagaagagugccuggacgcucucgaauccauuaugaccacuaaaagcguaucguuuagaaggcuuucucaucugcggaaguuggugccuggguucggaaaagcauacacaaucuuuaauaagacccuaauggaggccgaugcucacuauaaguccauacguacgugggacgagauugucccaucaaaaggcugccugcgcgugggcgggagaugucacccccauguuaacggaguguucuucaaugguaucauucucggcagugaugggcacguccugaucccggaaaugcagagcucccuucugcagcagcauguggaguugcucgaaucuagcguaguuccucugaugcaccccuuagccgacccaucaaccguguuuaaggauggaaacgaggcggaagacuucgucgaggugcaucugccugauguccacaaacaagugaguggcguugaccuaggucuccccgauugggggaaguacauccugguguccgcaggcgcccuuauugcuuugaugcugauaaucuuucucaugacaugcuguaggcggguacaccgacgcgagagcaaacagcauucucugagaggaacugaaaggaaggucucagugauuagucagaacggcaaggccaucagcuccugggagucuuauaaaaaugggucggacacccggauguga

SEQ ID NO: 159033 - RNA, 1575 nt, Artificial Sequence
  derived and/or modified CDS sequence (opt3) from glycoprotein__RABV__FJ465397.1
auggugagccagucccuccuguucgucccccuucugggcuuuucuuugugcuucgggaaguuuccuaucuacaccauuccagacaaauuaggaccguggucacccauagauauccaccaucugaguuguccuaacaaucuaguuguggaggacgaagguugcacaaaccucagcggcuucuccuauauggagcugaagguaggguacauuucugccaucaaagugaauggauuuacuuguacgggcgucgugaccgaagcugagacauauacuaacuucguugguuacgugaccacaaccuuuagaaggaagcacuuccggccaauucccgaugcaugccgcgccgcguaucauuggaaaauggcuggggacccucgauacgaagagucgcuucacaauccauaucccgauuaccauuggcugcguacugucaagacaaccaaggagucauuggugaucauaagcccuaguguagccgaccucgauccauacgacaaaucccugcacucuagaguuuuuccgaacggaaaguguagcggccugacgguguccucaacuuauugcaguaccaaucacgauuacacaaucuggaugcccgaaaacccuaggcucggcacuagcugugacauuuucaccaauucucgggggaaacgcgcauccagaggaaacaagacaugcgguuuugucgaugagaggggcuuauauaaaucacugaagggggccuguaaacuuaaauugugcggagugcugggccuacggcucaucgacgguaccuggguggcuaugcaaacgagcgaugaaacuaagugguguccacccgaccagcuggucaaucuucaugacuuccgcagugaugagauugagcaccugguuguggaagaguugguaaagaagcgagaagagugccucgacgcacuggaaucuaucaugacaaccaaauccgugagcuuuagaagguuaucgcaucugcggaagcucgucccuggguucggaaaagccuacacuauauucaacaagacacuuauggaggcugaugcccacuauaagucuauucguaccugggacgagaucgugccauccaaaggcugccugcgcguuggcgggagaugucacccccauauuaauggaguguuuuucaacgguaucaucuugggcucagaugggcacguccuaauuccggaaaugcagaguagccugcuccagcaacauauggagcugcuugaauccucugugguaccucugaugcaccccuuggcggacccaagcacgguuuuuaaggauggaaaugaggcagaagacuucguggagguccaucucccugaugugcacaaacaggucucagagauagaccugggcuuacccaacugggguaaguacauccuggugagugccggggcucuaauugcccucaugcugaccauccuuuugauaacaugcuguaggaaaguucaccggccaaagcccaagcagcaucgacugcgcggcacugaaagaaaaguggcaguaaccucccagagcggaaaggcuauuucuucaugggagaguuauaaaaacggcggggaaacaaggauguga

SEQ ID NO: 159034 - RNA, 1575 nt, Artificial Sequence
  derived and/or modified CDS sequence (opt3) from glycoprotein__RABV__FJ465398.1
augagcucccagucucuucucuucgugucacuucugggcuuuaguuugugcuucgggaaguuucccaucuacaccauuccugacaaauuaggaccauggagcccgauagauauccaccaucuguccugucccaacaaucuagucguugaggacgaagguugcacaaaccucucuggcuucucguauauggagcugaaggugggguacauuucagccaucaaaguaaauggauuuacuuguacgggcguggucaccgaagcugagacauauacuaacuucguggguuacguuaccacaaccuuuagaaggaagcacuuccggccuacuccagaugcaugccgcagcgccuauaauuggaaaauggcgggggacccccgauacgaagagagucuucauaacccuuauccagauuaccacuggcugcguacagugaagaccacgaaggaguccuuggucauuaucucucccagcguggcugaccucgauccuuacgacaaaucccugcauucaagaguauuuccaaauggaaaguguaguggccugacuguuagcucuaccuauugcuccacaaaccacgauuacacuauauggaugccggaaaaucccaggcucggcaccucaugugacaucuucacaaacagccgggggaaacgcgccaguagaggaaauaagaccugcgguuuuguggaugagaggggcuuauauaaaucucugaagggggcauguaagcugaaauugugcggaguccugggccuacggcucauugacgguacguggguggccaugcacacuuccgaugaaacaaagugguguccuccagaccaacuggugaaccuucaugacuuccgcagcgaugagaucgagcaccuggucguugaagaguuggugaaaaagcgagaagagugccucgacgcucuggaaucgauuaugaccacuaaaucuguauccuuuagaagguuaucacaucugcggaagcucgugcccggguucggaaaagcauacacaaucuucaauaagacccuuauggaggccgaugcucacuauaagaguauacguacgugggacgagauugucccuagcaaaggcugccugcgcgugggcgggagaugucacccacauguuaacggaguguuuuucaaugguaucauuuugggcuccgaugggcacguccuaauccccgaaaugcagucuagccugcuccagcagcauguggagcugcuugaaucaaguguaguuccgcugaugcacccuuuggccgaccccuccaccguguuuaaggauggaaacgaggcggaagacuucgucgaggugcaucucccagauguccacaaacaagugagcggcguugaccuggguuuaccugauugggggagguacauccuggugucugcaggcgcccuaauuacacucaugcugauaaucuuucuuaugacuugcugucggcgaguacacuugcgcgagucaaagagacauagucugaggggaaccgaacggaaagucagcgugacaucccagucuggcaaggcuauuucgagcugggaguccuauaagaacgggucagaaacucgcauguga

SEQ ID NO: 159035 - RNA, 1575 nt, Artificial Sequence
  derived and/or modified CDS sequence (opt3) from glycoprotein__RABV__FJ465399.1
augagcucccagucucuccuguucgugucacuucugggcuuuaguuugugcuucgggaaguuucccaucuacaccauuccugacaaauuaggaccauggagcccgauagauauccaccaucuguccugucccaacaaucuagucguugaggacgaagguugcacaaaccucucuggcuucucguauauggagcugaaggugggguacauuucagccaucaaaguaaauggauuuacuuguacgggcguggucaccgaagcugagacauauacuaacuucguggguuacguuaccacaaccuuuagaaggaagcacuuccggccuacuccagaugcaugccgcagcgccuauaauuggaaaauggcgggggacccccgauacgaagagagucuucauaacccuuauccagauuaccacuggcugcguacagugaagaccacgaaggaguccuuggucauuaucucucccagcguggcugaccucgauccuuacgacaaaucccugcauucaagaguauuuccaaauggaaaguguaguggccugacuguuuucagcaccuauugcucuacaaaccacgauuacacuauauggaugccggaaaaucccaggcucggcaccuccugugacaucuuuacaaacucacgggggaaacgcgccagcagaggaaauaagaccugcgguuucguggaugagaggggcugguauaaaaguuuaaagggggcauguaagcugaaacuuugcggagucuugggccugcggcuaauugacgguacguggguggccaugcacacuucugaugaaacaaagugguguccuccagaccaacucgugaaccugcaugacuuucgcuccgaugagaucgagcaccuugucguugaggaacuggugaaaaagcgagaagagugcuuggacgcucucgaaagcauuaugaccacuaaaucgguaucuuucagaaggcugucccauuuacggaagcuggugcccggguucggaaaagcauacacaaucuuuaauaagacccucauggaggccgaugcucacuauaagucaauacguacgugggacgagauugucccuaguaaaggcugccuucgcgugggcgggagaugucacccacauguuaacggaguguucuuuaaugguaucauucugggcagcgaugggcacgucuugauccccgaaaugcaguccucucuacugcagcagcauguggagcuccuggaaagcucaguaguuccgcuuaugcacccucuggccgaccccagugcgguguucaaggauggaaacgaggcagaagacuuugucgaggugcauuugccagauguccacaaacaaguguccggcguugaccucggucugccugauugggggagguacaucuuagugagcgccggcgcucugauuacccuaaugcucauaaucuuccugaugacaugcugucggcgaguacaccgcagagagucuaagcagcauucacuuaggggaacugaacggaaagucagugugaccagccaguccggcaaggccauuucuucgugggagagcuauaagaacggguccgaaacacgcauguga

SEQ ID NO: 159036 - RNA, 1575 nt, Artificial Sequence
  derived and/or modified CDS sequence (opt3) from glycoprotein__RABV__FJ465400.1
auguucccccagacccugcucuuugugccucuucugggcuugagcuuaugcuucgggaaguuuccaaucuacacaauuccggacaaacugggacccugguccccuauagauauccaccaucuaucuuguccaaacaaucucgucguugaggacgaagguugcacuaaccugucaggcuucaguuauauggagcuuaaggugggguacauuagcgccaucaaaguaaauggauuuacguguaccggcguggucacagaagcugagacuuauaccaacuucguggguuacguuacaaccacuuuuagaaggaagcacuuccggcccacaccugaugcaugccgcgccgcguauaauuggaaaauggcuggggacccacgauacgaagagucccugcauaaccccuauccugauuaccacugguugcguaccgugaagacgacuaaggagucucucgucauuaucucgccaucaguggccgaccuggauccguacgacaaaagccugcauaguagaguauuucucaauggaaaguguuccggcuuaaccguuucuagcacauauugcuccacuaaccacgauuacucaauauggaugcccgaaaauccuaggcugggcaccaguugugacaucuucgugaacagccgggggaaacgcgcaucuaagggaaauaaaacaugcgguuuugucgaugagagaggccuuuauaaguccuugaagggggccuguaaacugaagcuaugcggagugcucggccugaggcuuauugacgguaccuggguggcuaugcaaacgucagaggaaccaaaauggugucccccugaucagcuggucaacuugcacaauuuccggagcgacgagaucgaacaucucguuguggaggaacugguaaagaaacgcgaggaaugcuuagacgcacuggagaguauuaugacuacaaagucuguguccuuucgaagacucagccaccuuaggaaacuggucccaggguucggaaaggccuacaccaucuucaacaagacuuugauggaggcugaugcccauuauaaaucgauacggacaugggacgaaauuauccccucuaagggcugccuacgugugggcgggcgcugucacccgcacguuaauggaguguuuuucaacgguauuauccugggcuccgaugggcauguccucaucccugagaugcagucaagucugcuucagcaacacguggaacuguuggagagcuccguaauuccccucaugcauccacuggcggacccuucuaccgcauuuaaagauggagacgaagccgaggauuucguugagauacacuuacccgacgugcauaagcagaucagcggcgucgaucugggucuaccaaacugggggaaauacauucucgugucagcuggcgcccugaucgcacuuauguugacgauauuucugauuaccugcuguagaggauuccaccagcccaagaguacacagcacucccucggcgggacugaaaggaaggucagcgugaccccucugucuggaaaaguuaucucaaguugggagagcuauaagaaagguggcgaaacacggcuuuga

SEQ ID NO: 159037 - RNA, 1575 nt, Artificial Sequence
  derived and/or modified CDS sequence (opt3) from glycoprotein__RABV__FJ465401.1
augagcucccagucucuucucuucgccucacuucugggcuuuaguuugugcuucgggaaguuucccaucuacaccauuccugacaaauuaggaccauggagcccgauagauauccaccaucuguccugucccaacaaucuaguggucgaggacgaagguugcacaaaccucucuggcuucucguauauggagcugaagguuggguacauuucagcuaucaaagugaauggauuuacuuguacgggcguagugaccgaagcagagacauauacuaacuucgucgguuacgugaccacaaccuuuagaaggaagcacuuccggccuacuccagaugccugccgcagcgcguauaauuggaaaauggcuggggacccccgauacgaagagagucuucauaacccuuauccagauuaccacuggcugcguacaguuaagaccacgaaggaguccuuggugauuaucucucccagcgucgccgaccucgauccuuacgacaaaucccugcauucaagaguguuuccaaauggaaaguguaguggccugacuguaagcucuaccuauugcuccacaaaccacgauuacacuauauggaugccggaaaaucccaggcucggcaccucaugugacaucuucacaaacagccgggggaaacgcgcaaguagaggaaauaagaccugcgguuuuguugaugagaggggcuuauauaaaucucugaagggggccuguaagcugaaauugugcggagugcugggccuacggcucauugacgguacgugggucgcuaugcacacuuccgaugaaacaaagugguguccuccagaccaacuggugaaccuucaugacuuccgcagcgaugagaucgagcaccugguggucgaagaguugguuaaaaagcgagaagagugccucgacgcacuggaaucgauuaugaccacuaaaucuguguccuuuagaagguuaucacaucugcggaagcucguacccggguucggaaaagccuacacaaucuucaauaagacccuuauggaggcugaugcccacuauaagaguauacguacgugggacgagauugugccuagcaaaggcugccugcgcgucggcgggagaugucacccacaugugaacggaguguuuuucaaugguaucauuuugggcuccgaugggcacguucuaauccccgaaaugcagucuagccugcuccagcagcaugucgagcugcuugaaucaagugugguaccgcugaugcacccuuuggcggaccccuccaccguuuuuaaggauggaaacgaggcagaagacuucguggagguccaucucccagaugugcacaaacaagucagcggcguggaccuggguuuaccugauugggggagguaccugcuaguuucugccggcgcucucaucacacugaugcuuauuauauuuuugaugacuugcugucggcgagugcaccgcagagagucaaagcagcauagucugaggggaaccgaacggaaaguaagcgucacaucccagucuggcaaggccaucucgagcugggaguccuauaagaacgggucagaaacucgcauguga

SEQ ID NO: 159038 - RNA, 1575 nt, Artificial Sequence
  derived and/or modified CDS sequence (opt3) from glycoprotein__RABV__FJ465402.1
auguucccccaggcccugcucuuugugccucuucugggcuucagcuugugcuuugggaaguucccaaucuacaccauuccggacaaauuaggacccugguccccuauagauauccaccaucugucuuguccaaacaaucuagucguugaggacgaagguugcacaaaccucucaggcuuuaguuauauggagcugaaggugggguacauuagcgcuaucaaaguaaauggauucacuuguacgggcguggucaccgaagcagagacauauacuaacuuuguggguuacguuaccacaaccuucagaaggaagcacuuucggcccacuuccgaugccugccgcgcggcuuauaauuggaaaauggccggggacccucgauacgaagagucucuucauaacccauaucccgauuaccacuggcugcguacagugaagaccacgaaggagucguuggucauuaucucaccuagcguggcagaccucgauccauacgacaaaagucugcauuccagaguauucccgaauggaagguguucuggccugacuguuagcuccaccuauugcucaacaaaccacgauuacacuauauggaugcccgaaaauccucggcucggcaccaguugugacaucuuuacaaacagccgcgggaagagagccucuaaaggaaauaggaccugcgguuucguggaugagcggggcuuauauaagucccugaaaggggcuuguaagcugaaguugugcggaguccugggccuacgccucauggacgguacguggguggcaaugcaaacuucagaagagacaaaaugguguccacccgaucagcuggugaaccuucacgacuuucgaagcgacgagauugaacaucuggucguugaggaauuggugaagaaaagagaggaaugccucgaugcccuggagaguaucaugaccacuaagucuguauccuucaggcgguuaagccaccuucguaaacucgugccuggguucggaaaggcuuacacaauuuuuaauaaaacccuuauggaggccgacgcgcauuauaagucgauccgcacguggaacgaaauaauuccaucuaagggcugccugagagucggcgggaggugucacccccacgugaauggaguuuucuuuaacgguaucauuuugggcuccgaugggcaugugcuaaucccggagaugcagucaagucugcuccagcaacacgucgaacugcuugagagcuccgugguaccucugaugcaucccuuggcagacccaucuaccguuuucaaagauggaggcgaagccgaggacuuuguggagguccaccucccugaugugcauaagcaggucagcgguguggaccugggguuacccucauggggcaaauacauccugguuggaaguggcgcucuaauugcccucgugcugauaaucuuccuuaugacaugcugucggcgaguaucccgcccagaaagcacucagcacucuuugagagggaccggaaugaaggucucaauuacaagucagagcgguaaagcaauccccuccugggagucuuauaagucgaagaacgaaacuaaaauguga

SEQ ID NO: 159039 - RNA, 1575 nt, Artificial Sequence
  derived and/or modified CDS sequence (opt3) from glycoprotein__RABV__FJ465403.1
auguucccccagacccugcucuuugugccucuucugggcuugagcuuaugcuucgggaaguuuccaaucuacacaauuccggacaaacugggacccugguccccuauagauauccaccaucuaucuuguccaaacaaucucgucguugaggacgaagguugcacuaaccugucaggcuucaguuauauggagcuuaaggugggguacauuagcgccaucaaaguaaauggauuuacguguaccggcguggucacagaagcugagacuuauaccaacuucguggguuacguuacaaccacuuuuagaaggaagcacuuccggcccacaccugaugcaugccgcgccgcguauaauuggaaaguggcuggggacccacgauacgaagagucccugcauaaccccuauccugauuaccacugguugcguaccgucaagacgacuaaggagucucucgugauuaucucgccaucaguagccgaccuggauccguacgacaaaagccugcauaguagaguuuuucucaauggaaaguguuccggcuuaaccgugucuagcacauauugcuccacuaaccacgauuacaccauauggaugcccgaaaauccuaggcugggcacaucaugugacauccuuaguaacagccgggggaaacgcgcaucuaagggaaauaaaaccugcgguuucgucgaugagagaggcuuguauaagucccugaagggggccuguaaacuaaagcucugcggagugcugggccuuaggcugauugacgguacguggguggcuaugcaaacuucagaggaaccaaaauggugucccccugaucaguuggucaaccuccacaauuuucggagcgacgagaucgaacaucugguuguggaggaauuaguaaagaaacgcgaggaaugccuggacgcacucgagaguauuaugacaaccaagucuguguccuuccgaagacuuagccaccugaggaaauuggucccaggguuuggaaaggccuacacuaucuucaacaagacacuaauggaggcugaugcccauuauaaaucgauacggaccugggacgaaauuauccccucuaagggcugccugcgugugggcgggcgcugucacccgcacguuaauggaguguucuuuaacgguauuauccucggcuccgaugggcauguccugaucccugagaugcagucaagucuucugcagcaacacguggaauugcucgagagcuccguaauuccccugaugcauccauuagcggacccuucuacgguuuucaaagauggagacgaagcagaggauuuuguggagauacaucugcccgacguccacaagcagaucagcggcguggaucuaggucucccaaacugggggaaauacauucugaugucagccggcgcucuuaucaccuugaugcugacaauauuccucauuacuugcuguagaggauuuaggcggcccaagaguacccagcacucccugggcgggacaggaaugaaggucagcgugacuccucagucugguaaaguuaucucaaguugggaaagcuauaagaaaggcggggagacccgacuuuga

SEQ ID NO: 159040 - RNA, 1575 nt, Artificial Sequence
  derived and/or modified CDS sequence (opt3) from glycoprotein__RABV__FJ465404.1
auguucccccaggcccugcucuuugugccucuucugggcuucagcuugugcuuugggaaguucccaaucuacaccauuccggacaaauuaggacccugguccccuauagauauccaccaucugucuuguccaaacaaucuagucguugaggacgaagguugcacaaaccucucaggcuuuaguuauauggagcugaaggugggguacauuagcgcuaucaaaguaaauggauucacuuguacgggcguggucaccgaagcagagacauauacuaacuuuguggguuacguuaccacaaccuucagaaggaagcacuuucggcccacuuccgaugccugccgcgcggcuuauaauuggaaaauggccggggacccucgauacgaagagucucuucauaacccauaucccgauuaccacuggcugcguacagugaagaccacgaaggagucguuggucauuaucucaccuagcguggcagaccucgauccauacgacaaaagucugcauuccagaguauucccgaauggaagguguucuggccugacuguuagcuccaccuuuugcucaacaaaccacgauuauacuauauggaugcccgaaaauccucggcucggcaccaguugugacaucuucacaaacagccgcgggaagagagccucuaaaggaaauaggaccugcgguuuuguggaugagcggggcuuauacaagucccugaaaggggcuuguaagcugaaguugugcggaguccugggccuacgccucauggacgguacguggguggcaaugcaaacuucagaagagacaaaaugguguccacccgaucagcuggugaaccuucacgacuuccgaagcgacgagauugaacaucuggucguugaggaauuggugaagaaaagagaggaaugccucgaugcccuggagaguaucaugaccacuaagucuguauccuucaggcgguuaagccaccuucguaaacucgugccuggguuuggaaaggcuuauacaauuuucaauaaaacccuuauggaggccgacgcgcauuacaagucgauccgcacguggaacgaaauaauuccaucuaagggcugccugagagucggcgggaggugucacccccacgugaauggaguguuuuucaacgguaucauuuugggcuccgaugggcauguucuaaucccggagaugcagucaagucugcuccagcaacacgucgaacugcuugagagcuccgugguaccucugaugcaucccuuggcagacccaucuaccguuuuuaaaaacggaggcgaagccgaggauuucguggagguccaccucccugacgugcauaagcaggucagcgguguggaucugggguuacccucauggggcaaauauauccugguuaguuccggagcucuaauugcccucgugcugguaauauuucuuaugacaugcugucggaaggucaaucgaccagaaagcacucagcacucuuugcgcggcaccgggaugaaagugucaaucacaagucagagcggaaaggcaauucccuccugggagucuuacaagucggaaaacgagacuaaaauguga

SEQ ID NO: 159041 - RNA, 1575 nt, Artificial Sequence
  derived and/or modified CDS sequence (opt3) from glycoprotein__RABV__FJ465405.1
auguucagccagucccugcuccuugugucucuguugggcuuucccuuaucauucgggaaguuuccuaucuacaccauuccagacaaacugggaccguggagucccauagauauccaccaucuaagcugcccuaacaaucucgucguugaggacgaagguuguacaaaccuguccggcuucucuuauauggagcuuaaggugggguacauuucggccaucaaaguaaauggauuuacuugcacgggcguggucaccgaagcugagacauauacuaacuucguggguuacguuaccacaaccuuuagaaggaagcaucugcggccaacucccgaugcaugucgcucagccuauaauuggaaaguggcgggggacccucgauacgaagagagcuugcacaacccauaucccgauuaccacuggcuccguacagucaagaccacgaaggagagucuggugauuaucuccccuucuguagcugaccuggauccauacgacaaaagccuccauuccagaguuuucccgaauggaaagugcucaggcuuaacugugaguagcaccuauuguucuacaaaccacgauuacacuauauggaugcccgaaaauccuaggcugggcaccuccugcgacaucuuuacaaacucacgggggaaacgcgccagcaagggaaauaaaaccugugguuucgucgaugagagaggccuuuauaagaguuugaagggggcaugcaaacugaagcuauguggagugcucggccugaggcuuauugacgguacguggguggccaugcacacuucugaugaaacaaaauggugcccacccgaccaacuggucaacuugcaugacuuucgguccgaugagaucgagcaccucguuguggaggaacugguaaagaaacgcgaagaguguuuagacgcucuggaaagcauuaugaccacuaagucggugucuuuccgaagacucucccaucuuaggaaacuggucccuggguuuggaaaggcauacacaaucuucaauaagaccuugauggaggccgaugcucacuauaaaucaauacggacgugggacgagauuaucccaaguaagggcugccuacgugugggcgggcgcugccacccccauguuaacggaguguucuuuaaugguauuauccugggcagcgaugggcacguccucaucccggaaaugcaguccucucugcuucagcagcauauugagcuguuggaaagcucagugguaccucucaugcacccccuggccgacccaaguaccguuuucaaagauggagacgaggcggaagauuuuguggagguccauuuaccugacgugcacaagcaagucuccggcguggaucugggucuacccgacugggggaaauacauacucguuagcgcaggcgcccugaucgcucuuauguugauuaucuuccugaugacauguugcagaagggugcaccggcgagagucuaagcagcauucauuucgcggaacugaaagaaagguaagugucaccagccagaacggcaaagccauauccucuugggagucguauaagaacgggagcgacacaaggauguga

SEQ ID NO: 159042 - RNA, 1575 nt, Artificial Sequence
  derived and/or modified CDS sequence (opt3) from glycoprotein__RABV__FJ465406.1
auguucagccagucccugcuccuugugucucuguugggcuuucccuuaugcuucgggaaguuuccuaucuacaccauuccagacaaacugggaccguggucacccauagauauccaccaucuaaguuguccuaacaaucucgucguugaggacgaagguugcacaaaccugagcggcuucuccuauauggagcuuaaggugggguacauuucugccaucaaaguaaauggauuuacuuguacgggcguggucaccgaagcugagacauauacuaacuucguggguuacguuaccacaaccuuuagaaggaagcaucugcggccaacucccgaugcaugccgcucggccuauaauuggaaaauggcgggggacccucgauacgaagagucauugcacaacccauaucccgauuaccacuggcuccguacagugaagaccacgaaggagagccuggucauuaucaguccuuccguggcugaccuggauccauacgacaaaucucuccauagcagaguauucccgaauggaaaguguuccggcuuaacuguuucaaguaccuauugcagcacaaaccacgauuacacuauauggaugcccgaaaauccuaggcugggcaccucuugugacaucuuuacaaacucccgggggaaacgcgccucaagaggaaauaagaccugcgguuucguggaugagaggggccuuuauaaaaguuugaagggggcauguaagcugaaacuaugcggaguccucggccugcggcuuauugacgguacguggguggccaugcacacuagcgaugaaacaaagugguguccacccgaccaacuggugaacuugcaugacuuucgcucugaugagaucgagcaccucgucguugaggaacuggugaaaaagcgagaagagugcuuagacgcucuggaauccauuaugaccacuaaaagcguaucguucagaaggcucucucaucuucggaagcuggugccuggguuuggaaaagcauacacaaucuucaauaagaccuugauggaggccgaugcucacuauaaguccauacguacgugggacgagauugucccaucaaaaggcugccuacgcgugggcgggagaugucacccccauguuaacggaguguucuuuaaugguaucauucugggcagugaugggcacguccucaucccggaaaugcagagcucccugcuucagcagcauguggagcuguuggaaucuagcguaguuccucucaugcacccccuggccgacccaucaaccguguucaaggagggaaacgaagcggaggauuuugucgaggugcauuuaccugacguccacaaacaagugaguggcguugaucugggucuacccgacugggggaaguacauccucguguccgcaggcgcccugauugcucuuauguugauaauccugcucaugacaugcuguaggcggguacaccgacgcgaaagcaaacagcauucucugagaggaacugagaggaaggucucagugaccagucagaacggcaaggccauuagcuccugggaaucuuauaaaaaucggucggauacacgcauguga

SEQ ID NO: 159043 - RNA, 1575 nt, Artificial Sequence
  derived and/or modified CDS sequence (opt3) from glycoprotein__RABV__FJ465407.1
auguucccccaggcccugcucuuugugccucuucugggcuucagcuugugcuuugggaaguucccaaucuacaccauuccggacaaauuaggacccugguccccuauagauauccaccaucugucuuguccaaacaaucuagucguugaggacgaagguugcacaaaccucucaggcuuuaguuauauggagcugaaggugggguacauuagcgcuaucaaaguaaauggauucacuuguacgggcguggucaccgaagcagagacauauacuaacuuuguggguuacguuaccacaaccuucagaaggaagcacuuucggcccacuuccgaugccugccgcgcggcuuauaauuggaaaauggccggggacccucgauacgaagagucucuucauaacccauaucccgauuaccacuggcugcguacagugaagaccacgaaggagucguuggucauuaucucaccuagcguggcagaccucgauccauacgacaaaagucugcauuccagaguauucccgaauggaagguguucuggccugacuguuagcuccaccuuuugcucaacaaaccacgauuauacuauauggaugcccgaaaauccucggcucggcaccaguugugacaucuucacaaacagccgcgggaagagagccucuaaaggaaauaggaccugcgguuuuguggaugagcggggcuuauacaagucccugaaaggggcuuguaagcugaaguugugcggaguccugggccuacgccucauggacgguacguggguggcaaugcaaacuucagaagagacaaaaugguguccacccgaucagcuggugaaccuucacgacuuccgaagcgacgagauugaacaucuggucguugaggaauuggugaagaaaagagaggaaugccucgaugcccuggagaguaucaugaccacuaagucuguauccuucaggcgguuaagccaccuucguaaacucgugccuggguuuggaaaggcuuauacaauuuucaauaaaacccuuauggaggccgacgcgcauuacaagucgauccgcacguggaacgaaauaauuccaucuaagggcugccugagagucggcgggaggugucacccccacgugaauggaguguuuuucaacgguaucauuuugggcuccgaugggcauguucuaaucccggagaugcagucaagucugcuccagcaacacgucgaacugcuugagagcuccgugguaccucugaugcaucccuuggcagacccaucuaccguuuuuaaagauggaggcgaagccgaggacuucguggagguccaccucccugaugugcauaagcaggucagcgguguggaccugggguuacccucauggggcaaauauauccugguuggaaguggcgcucuaauugcccucgugcugguaauauuucuuaugacaugcugucggaaggucaaccgaccagaauccacucagcacagcuugcgcgggaccggaaugaaagugucuaucacaucacagagugguaaggcaauucccagcugggaguccuacaagucugaaaaugagacuaaaauguga

SEQ ID NO: 159044 - RNA, 1575 nt, Artificial Sequence
  derived and/or modified CDS sequence (opt3) from glycoprotein__RABV__FJ465409.1
auguucccccagacccugcucuuugugccucuucugggcuugagcuuaugcuucgggaaguuuccaaucuacacaauuccggacaaacugggacccugguccccuauagauauccaccaucuaucuuguccaaacaaucucgucguugaggacgaagguugcacuaaccugucaggcuucaguuauauggagcuuaaggugggguacauuagcgccaucaaaguaaauggauuuacguguaccggcguggucacagaagcugagacuuauaccaacuucguggguuacguuacaaccacuuuuagaaggaagcacuuccggcccacaccugaugcaugccgcgccgcguauaauuggaaaauggcuggggacccacgauacgaagagucccugcauaaccccuauccugauuaccacugguugcguaccgugaagacgacuaaggagucucucgucauuaucucgccaucaguggccgaccuggauccguacgacaaaagccugcauaguagaguauuucucaauggaaaguguuccggcuuaaccguuucuagcacauauugcuccacuaaccacgauuacucaauauggaugcccgaaaauccuaggcugggcaccaguugugacaucuucgugacaagccgggggaaacgcgcaucuaagggauccaaaaccugcgguuuugucgaugagagaggccuuuauaagucauugaagggggccuguaaacugaagcuaugcggagugcucggccugaggcuuauugacgguacguggguggcuaugcaaacuagcgaggaaccaaaauggugucccccugaucagcuggucaacuugcacaauuuccggagugacgagaucgaacaucucguuguggaggaacugguaaagaaacgcgaggaaugcuuagacgcacuggagucuauuaugacaaccaaguccgugagcuuucgaagacucucgcaccuuaggaaacuggucccaggguucggaaaggccuacacuaucuucaacaagacauugauggaggcugaugcccauuauaaaucuauacggaccugggacgaaauuauccccuccaagggcugccuacgugugggcgggcgcugucacccgcacguuaauggaguguuuuucaacgguauuauccugggcucagaugggcauguccucaucccugagaugcagaguagccugcuucagcaacacguggaacuguuggaguccucuguaauuccccucaugcauccacuggcggacccuagcacggcauuuaaagauggagacgaagccgaggauuucguugagauacacuuacccgacgugcauaagcagaucucaggcgucgaucugggucuaccaaauugggggaaauacauucucgugagugcuggcgcccugaucgcacuuauguugaccauauuucugauuacaugcuguagaggauuccaccagcccaaguccacucagcacagccucggcgggaccggaaggaaggucucugugacaccucugucagguaaaguuaucaguagcugggaauccuauaagaaaggcggggagacucggcuuuga

SEQ ID NO: 159045 - RNA, 1575 nt, Artificial Sequence
  derived and/or modified CDS sequence (opt3) from glycoprotein__RABV__FJ602447.1
augaucccccagguguuccuguuugucccucuccuuguuuucagcuccugcuuuggcaaguucccaauuuacaccauaccggacaaacuggggcccuggucuccuaucgauauucaccauuugucauguccaaacaauuuagugguagaggacgaaggaugcacaaaccugagugguuuuagcuauauggagcuaaaggugggcuacaucuccgccauuaaagucaauggguucacuuguacgggagugguuaccgaagcugagacauauacuaacuuugugggcuacgucaccacaaccuucaagagaaaacacuuuaggcccaugccugaugcaugccgggccgcguauaauuggaagauggcuggugacccacgcuacgaagagucucuccauaaccccuauccugauuaccacuggcugcgaacugugaagacaaccaaagagucgcuuguaaucauaucaccaagcguugccgaccuggauccguacgacaagaguuugcauucccguguguuccccgggggaaaauguucuggcaucacggucagcuccacuugcuguucaaccaaucacgauuauacaauuuggaugccugaaaacccaagacucggcaccaguugcgacaucuuuacuaauagcagggggaagcgggcaucuaaaggagguaagacauguggcuucguggaugagcgcgggcuguacaagucccugaaaggagccugcaagcucaaauuauguggcgugcugggucuuagauugauggacgggaccugggucgcuauucaaacgucagaugaaaucaaguggugcagccccgaccagcugguuaaccuacacgacuuucauagugaugagauagagcaccucgugguagaggaacuggugaaaaagagggaagagugccuugacgcacuggaaacuauuaugacaaccaaaucugucuccuuccggcgcuugagccaucuccgaaagcuggugccuggauucggcaaggccuauacuaucuuuaauaaaacauuaauggaggcugaugcccacuacaagucgauuagaaccuggaacgagaucaucccaucuaaaggcugucugaggguugggggacggugccacccccaugugaauggugucuucuuuaacggcauuauacucgggccggacggacacgugcuuaucccugaaaugcaguccucacuguugcaucagcacauggagcuacuggaaaguagcguaauuccccucaugcauccacuggcggauccuuccacgguuuucaaggacggcgaugaggcagaagacuuuguggagguccaccuucccgaugugcacaaacaaaucucuggugucgaccugggguugccaaauuggggcaaguaugugcucauaagcgccggagcucugaccgccuuaaugcugacaauuuuccuaaugacuuguugccguaagaccaaccgcgcagagucaauccagcauagucccggcgaaacagggagaaaaguuuccgugacuagccacaacggaaggguaaucucuucaugggagaguuacaagagcgguuccgaaaccaaacucuga

SEQ ID NO: 159046 - RNA, 1575 nt, Artificial Sequence; identical to SEQ ID NO: 158893
  derived and/or modified CDS sequence (opt3) from glycoprotein__RABV__FJ602448.1

SEQ ID NO: 159047 - RNA, 1575 nt, Artificial Sequence
  derived and/or modified CDS sequence (opt3) from glycoprotein__RABV__FJ602449.1
augaucccccaggugcugcuguucgucccucuucugguuuuuagcuccugcuucggcaaguuuccaauuuacaccauaccggacaaauuggggcccuggucuccuaucgauauucaccauuuaucauguccaaacaaucuggugguagaggacgaaggaugcacaaaccuaagugguuucagcuauauggagcucaaggugggcuacaucuccgccauuaaagucaauggguuuacuuguacgggagugguuaccgaagcugagacauauacuaacuucgugggcuacgucaccacaaccuuuaagagaaaacacuucaggcccaugccugaugcaugccgggccgcguauaauuggaagauggcuggugacccacgcuacgaagagucucugcauaaccccuauccugauuaccacuggcuucgaacugugaagacaaccaaagagucgcugguaaucauaucaccaagcguugccgacuuggauccguacgacaagagucuccauucccguguguuucccgggggaaaauguucuggcaucacggucagcuccacuugcuguucaaccaaucacgauuauacaauuuggaugccugaaaacccaagacugggcaccaguugcgacaucuucacuaauagcagggggaagcgggcaucuaaaggagguaagacauguggcuuuguggaugagcgcgggcuguacaagucccucaaaggagccugcaaguuaaaacuguguggcgugcuugguuugagacugauggacgggaccugggucgcuauucaaacgucagaugaaaucaaguggugcagccccgaccagcuaguuaaccuccacgacuuccauagugaugagauagagcaccuggugguagaggaacuugugaaaaagagggaagagugccuggacgcauuggaaacuauuaugacaaccaaaucugucuccuuucggcgccucagccaucugcgaaaguuagugccuggauucggcaaggccuauacuaucuucaauaaaacacugauggaggcugaugcccacuacaagucgauuagaaccuggaacgagaucaucccaucuaaaggcugucucaggguugggggacggugccacccccaugugaauggugucuuuuucaacggcauuauacuugggccggacggacacgugcugaucccugaaaugcaguccucauugcuacaucagcacauggagcugcucgaaaguagcguaauuccccugaugcauccacuugcggauccuuccacgguuuuuaaggacggcgaugacgcagaggauuucguggaaguccaccuccccgacgugcacaaacaaaucucuggugucgauuuggggcucccaaauuggggcaaguaugugaugauaagcgccggagcucugaccgccuuaaugcugaugauuuuucuaaugacauguugccguaagacuaaccgcgcagagucaauccagcauagucccggcgagaccgggagaaaaguuuccgugacaagccacaacggaaggguaaucucuucaugggaaaguuacaagagcgguggcgagacuaaacucuga

SEQ ID NO: 159048 - RNA, 1575 nt, Artificial Sequence
  derived and/or modified CDS sequence (opt3) from glycoprotein__RABV__FJ602450.1
augaucccccaggugcuccuguucgucccucuucugauuuuuagcuccugcuugggcaaguucccaauauacaccaucccggacaaauuagggcccuggucuccuauugauauccaccaucugucauguccaaacaaucuaguuguggaggacgaaggaugcacaaaccucagugguuuuagcuauauggagcugaagguaggcuacauuuccgccaucaaagugaauggguucacuuguacgggagucgugaccgaagcugagacauauacuaacuuuguuggcuacgugaccacaaccuucaagagaaaacacuuuaggcccaugccugaugcaugccgggccgcguauaauuggaagauggcuggugacccacgcuacgaagagucucuucauaaccccuauccugauuaccacuggcugcgaacugucaagacaucgaaagagucauuggugauaaucagcccaaguguagccgaccucgauccguacgacaagucccugcauucucguguuuuccccgggggaaaauguagcggcauuaccguguccucaacgugcuguaguacuaaucacgauuauaccaucuggaugccugaaaacccaagacugggcacaagcugcgacauuuuuacuaauucuagggggaagcgggcauccaaaggagguaagaccuguggcuucgucgaugagcgcgggcucuacaagucauuaaaaggagccugcaagcugaaacuuuguggcguguugggucugagacuaauggacgggacauggguggcuauccaaaccagcgaugaaauaaaguggugcagucccgaccagcucgucaaccugcacgacuuucauucugaugagauugagcaccuuguuguggaggaacuggugaaaaagagggaagagugcuuggacgcacucgaaacgaucaugacuacaaaauccgugagcuuccggcgccugucgcauuuacgaaagcuggucccuggauuuggcaaggccuauaccauuuucaauaaaacucucauggaggcugaugcccacuacaagucuaucagaacauggaacgagaucauuccauccaaaggcugucuuaggguagggggacggugccacccccauguuaaugguguguucuuuaacggcauaauccuggggccggacggacacgucuugauuccugaaaugcagucaagucuacugcaucagcacauggagcuccuggaaagcuccgugaucccccuuaugcauccacuggcggauccuucuaccguauucaaggacggcgaugaggcagaagacuuuguugaggugcacuugcccgauguccacaaacaaauaagcgguguggaccucgggcugccaaauuggggcaaguaugucuuaauuucagccggagcucugacggccaguaugcuaaugaucuuccucaugaccuguugccguaagacaaaccgcgcagaguccauccagcauagccccggcgaaacugggagaaaagugucuguuaccucacacaacggaagggugauuaguagcugggaguccuacaagucugguggcgaaacaaaacuguga

SEQ ID NO: 159049 - RNA, 1575 nt, Artificial Sequence; identical to SEQ ID NO: 158891
  derived and/or modified CDS sequence (opt3) from glycoprotein__RABV__FJ602451.1

SEQ ID NO: 159050 - RNA, 1575 nt, Artificial Sequence; identical to SEQ ID NO: 158575
  derived and/or modified CDS sequence (opt3) from glycoprotein__RABV__FJ602452.1

SEQ ID NO: 159051 - RNA, 1575 nt, Artificial Sequence; identical to SEQ ID NO: 158875
  derived and/or modified CDS sequence (opt3) from glycoprotein__RABV__FJ602453.1

SEQ ID NO: 159052 - RNA, 1575 nt, Artificial Sequence; identical to SEQ ID NO: 158891
  derived and/or modified CDS sequence (opt3) from glycoprotein__RABV__FJ602454.1

SEQ ID NO: 159053 - RNA, 1575 nt, Artificial Sequence; identical to SEQ ID NO: 158891
  derived and/or modified CDS sequence (opt3) from glycoprotein__RABV__FJ602455.1

SEQ ID NO: 159054 - RNA, 1575 nt, Artificial Sequence; identical to SEQ ID NO: 158891
  derived and/or modified CDS sequence (opt3) from glycoprotein__RABV__FJ602456.1

SEQ ID NO: 159055 - RNA, 1575 nt, Artificial Sequence; identical to SEQ ID NO: 158893
  derived and/or modified CDS sequence (opt3) from glycoprotein__RABV__FJ602457.1

SEQ ID NO: 159056 - RNA, 1575 nt, Artificial Sequence; identical to SEQ ID NO: 158893
  derived and/or modified CDS sequence (opt3) from glycoprotein__RABV__FJ602458.1

SEQ ID NO: 159057 - RNA, 1575 nt, Artificial Sequence
  derived and/or modified CDS sequence (opt3) from glycoprotein__RABV__FJ602459.1
augaucccccaggugcuucucuucgucccucuucugguuuuuagcuccugcuugggcaaguucccaauuuacaccauaccggacaaauuagggcccuggucuccuaucgauauucaccaucugucauguccaaacaaucuagugguagaggacgaaggaugcacaaaccucagugguuuuagcuauauggagcugaaggugggcuacaucuccgccauuaaagucaauggguucacuuguacgggagugguuaccgaagcugagacauauacuaacuuugugggcuacgucaccacaaccuucaagagaaaacacuuuaggcccaugcuugaugcaugccgggccgcguauaauuggaagauggcuggugacccucgcuacgaagagucucugcauaacccauaucccgauuaccacugguugcgaacugugaagacaucgaaagagucacucguaaucauaagcccuaguguugccgaccuggauccauacgacaagucccugcauucucguguguuccccgggggaaaauguagcggcaucaccgucuccucaacgugcuguaguacuaaucacgauuauaccauuuggaugccggaaaacccuagacucggcacaagcugcgacaucuuuacuaauucuagggggaagcgggcauccaaaggagguaagaccuguggcuucguggaugagcgcggguuauacaagucacugaaaggagccugcaagcugaaauuguguggcgugcugggucuaagacucauggacgggacaugggucgcuauucaaaccagcgaugaaaucaaguggugcaguccagaccagcugguuaaccuucacgacuuucauucugaugagauagagcaccuggugguagaagaguuggugaaaaagagggaagagugccucgacgcacuggaaacgauuaugacuacaaaauccgucagcuuccggcgcuuaucgcaucugcgaaagcucgugcccggauuuggcaaggccuauaccaucuucaauaaaacucuuauggaggcugaugcccacuacaagucuauuagaacauggaacgagaucaucccuuccaaaggcugucugaggguugggggacggugccacccacaugugaauggugucuucuuuaacggcauuauauuggggcccgacggacacgugcuaaucccggaaaugcagucaagucugcuccaucagcacauggagcugcuugaaagcuccguaauuccucugaugcaucccuuggcggauccaucuaccguuuucaaggacggcgaugaggcagaagacuuuguggagguccaccucccugaugugcacaaacaaaucagcggugucgaccugggguuacccaauuggggcaaguaugugcugauaucagccggagcucuaacggccaguaugcucaugauuuuccugaugaccuguugccguaagacaaaccgcgcagaguccauccagcauagcccaggcgaaacugggagaaaaguuucugugaccucacacaacggaaggguaaucaguagcugggaguccuacaagucugguggcgaaacaaaacuuuga

SEQ ID NO: 159058 - RNA, 1575 nt, Artificial Sequence
  derived and/or modified CDS sequence (opt3) from glycoprotein__RABV__FJ712193.1
augaucccccaggugcugcuguucgucccucuucugguuuuuagcuccugcuucggcaaguuuccaauuuacaccauaccggacaaauuggggcccuggucuccuaucgauauucaccauuuaucauguccaaacaaucuggugguagaggacgaaggaugcacaaaccuaagugguuucagcuauauggagcucaaggugggcuacaucuccgccauuaaagucaauggguuuacuuguacgggagugguuaccgaagcugagacauauacuaacuucgugggcuacgucaccacaaccuuuaagagaaaacacuucaggcccaugccugaugcaugccgggccgcguauaauuggaagauggcuggugacccacgcuacgaagagucucugcauaaccccuauccugauuaccacuggcuucgaacugugaagacaaccaaagagucgcugguaaucauaucaccaagcguugccgacuuggauccguacgacaagagucuccauucccguguguuucccgggggaaaauguucuggcaucacggucagcuccacuugcuguucaaccaaucacgauuauacaauuuggaugccugaaaacccaagacugggcaccaguugcgacaucuucacuaauagcagggggaagcgggcaucuaaaggagguaagacauguggcuuuguggaugagcgcgggcuguacaagucccucaaaggagccugcaaguuaaaacuguguggcgugcuugguuugagacugauggacgggaccugggucgcuauucaaacgucagaugaaaucaaguggugcagccccgaccagcuaguuaaccuccacgacuuccauagugaugagauagagcaccuggugguagaggaacuugugaaaaagagggaagagugccuggacgcauuggaaacuauuaugacaaccaaaucugucuccuuucggcgccucagccaucugcgaaaguuagugccuggauucggcaaggccuauacuaucuucaauaaaacacugauggaggcugaugcccacuacaagucgauuagaaccuggaacgagaucaucccaucuaaaggcugucucaggguugggggacggugccacccccaugugaauggugucuuuuucaacggcauuauacuugggccggacggacacgugcugaucccugaaaugcaguccucauugcuacaucagcacauggagcugcucgaaaguagcguaauuccccugaugcauccacuugcggauccuuccacgguuuuuaaggacggcgaugaggcagaagacuucguggagguccaccuccccgaugugcacaaacaaaucucugguauagacuuggggcucccaaauuggggcaaguauguccugauuagcgccggagcuuuaaccgcccugaugcuaacaaucuuucucaugacuuguugccguaagaccaaccgcgcagagucaauccagcauagucccggcgaaacagggagaaaaguguccguuacuagccacaacggaagggugauuucuucaugggagaguuacaagagcgguuccgaaaccaaacuguga

SEQ ID NO: 159059 - RNA, 1575 nt, Artificial Sequence; identical to SEQ ID NO: 158893
  derived and/or modified CDS sequence (opt3) from glycoprotein__RABV__FJ712194.1

SEQ ID NO: 159060 - RNA, 1575 nt, Artificial Sequence
  derived and/or modified CDS sequence (opt3) from glycoprotein__RABV__FJ712195.1
augaucccccaggcccuucucuucgugccucuucuggucguuccauugugcuuuggcaaguucccgauuuacaccauacccgacaaauuagggccuuggagcccaaucgauauucaccaucuguccugucccaacaaucuagugguagaggacgaaggaugcacaaaccucucugguuuuucauauauggagcugaaggugggcuacaucagugcuauuaaagucaauggguucacuuguacgggagugguuaccgaagcagagacauauacuaacuuugugggcuacgucaccacaaccuucaagagaaaacacuuuaggccuacuccagaugccugccggagcgcguauaauuggaagauggcuggugacccccgcuacgaagagucccuucauaacccuuauccagauuaccacuggcugcgaacagugaagaccacgaaagagucuuucguaaucauaucgccgucaguugccgacuuggaucccuacgacaagagccuccauagucguguguuuccuagagggaaauguuccggaaucacugucucuagcaccuauugcuccacaaaucacgauuacacuauuuggaugccagaaaaccccaggcugggcaccucaugugacaucuucacaaauagucggggcaagcgcgcauuuaaagggagcaagaccugcggauucguggaugagagaggucuguauaagucucucaaaggcgccuguaaguuaaaacugugcggggugcuuggauugaggcugauggacggcacgugggucgcuauucaaacuuccgaugaaacaaagugguguccuccagaccagcuaguuaaccuccacgacuuucauucagaugagaucgagcaccuggugguagaggaacuugugaaaaagcgggaagagugccuggacgcauuggaaagcauaaugaccacuaaaagugucucuuuccgccgacucucccaucugagaaaguuagugcccgguuucgggaaggccuacacaauuuuuaauaaaacccugauggaggcugaugcccacuauaagagcguuaggacguggaacgagaucauuccgucgaaaggaugccuccgggugggcggccguugucacccucaugucaaugggguguucuuuaacggaaucauccuuggucccgacggccacguacugauuccagaaaugcagucuuccuugcuacagcaacauauggagcugcucgaaucaaguguuauaccucugaugcacccccuugcggauccaagcaccguguucaagaauggggacgaggcagaagauuuugucgaggugcaucugcccgacguccacaaacagguguccggaguugauuugggccucccuucuugggguaaguacgugcugaugagcgccgggaucuuaacagcucugaugcuaaugauuuuccucaugacuugcugucgcagaaccaacaggccagagucaauccagcacagucugggcgaaacaggacggaagguauccgucacuagccagucuggccgagugauaucaaguugggagagcuauaaauccgggggagaaaccaagcuguga

SEQ ID NO: 159061 - RNA, 1575 nt, Artificial Sequence
  derived and/or modified CDS sequence (opt3) from glycoprotein__RABV__FJ712196.1
augaucccccaggcccuucucuucgugccucuucuggucguuccauugugcuuuggcaaguucccgauuuacaccauacccgacaaauuagggccuuggagcccaaucgauauucaccaucuguccugucccaacaaucuagugguagaggacgaaggaugcacaaaccucucugguuuuucauauauggagcugaaggugggcuacaucagugcuauuaaagucaauggguucacuuguacgggagugguuaccgaagcagagacauauacuaacuuugugggcuacgucaccacaaccuucaagagaaaacacuuuaggccuacuccagaugccugccggagcgcguauaauuggaagauggcuggugacccccgcuacgaagagucccuucauaacccuuauccagauuaccacuggcugcgaacagugaagaccacgaaagagucuuucguaaucauaucgccgucaguugccgacuuggaucccuacgacaagagccuccauagucguguguuuccuagagggaaauguuccggaaucacugucucuagcaccuauugcuccacaaaucacgauuacacuauuuggaugccagaaaaccccaggcugggcaccucaugugacaucuucacaaauagucggggcaagcgcgcauuuaaagggagcaagaccugcggauucguggaugagagaggucuguauaagucucucaaaggcgccuguaaguuaaaacugugcggggugcuuggauugaggcugauggacggcacgugggucgcuauucaaacuucccgggaaacaaaguggcgcccuccagaucagcuaguuaaccuccacgacuuucauucagacgagaucgagcaccuggugguagaggaacuugugaaaaagcgagaagagugucuggaugcauuggaaagcauaaugaccacuaaaagugucucuuucagaaggcucucccaucugcggaaguuagugcccgguuucgggaaggccuacacaauuuuuaauaaaacccugauggaggcugacgcccacuauaagagcguucguacguggaacgagaucauuccgucgaaaggaugccuccgcgugggcggcagaugccacccucaugucaaugggguguucuuuaacggaaucauccuuggucccgauggccacguacugauuccagaaaugcagucuuccuugcuacagcaacauauggagcugcucgaaucaaguguuauaccucugaugcacccccuugcggacccaagcaccguguucaagaauggggaugaggcagaagacuuugucgaggugcaucugcccgauguccacaaacagguguccggaguugacuugggccucccuucuugggguaaguacgugcugaugagcgccgggaucuuaacagcucugaugcuaaugauuuuccucaugacuuguugcaggcggaccaaccgaccagagucaauccagcacagucugggcgaaacaggacgcaagguauccgucacuagccagucuggcagagugauaucaaguugggagagcuauaaauccgggggagaaaccaagcuguga

SEQ ID NO: 159062 - RNA, 1575 nt, Artificial Sequence
  derived and/or modified CDS sequence (opt3) from glycoprotein__RABV__FJ719749.1
augaucccccaggcccuccuguucgugccucuucuggucguuccauugugcuuuggcaaguucccgauuuacaccauacccgacaaauuagggccuuggagcuccaucgauauucaccaucugucuuguccaaacaaucuagugguagaggacgaaggaugcacaaaccucucagguuuuaguuauauggagcugaaggugggcuacaucagcgcuauuaaagucaauggguucacuuguacgggagugguuaccgaagcagagacauauacuaacuuugugggcuacgucaccacaaccuucaagagaaaacacuuuaggcccacuccugaugccugccgguccgcguauaauuggaagauggcuggugacccacgcuacgaagagucucuucauaaccccuauccugauuaccacuggcugcgaacagugaagaccacgaaagagucguucguaaucauaucaccaagcguugccgacuuggauccguacgacaagagucuccauucccguguguuucccagagggaaauguucuggaaucacugucagcuccaccuauugcccuacaaaucacgauuacacuauuuggaugccagaaaaccccaggcugggcaccucaugugacaucuucacaaauagucggggcaagcgcgcacugaaagggagcaagaccugcggauuuguggaugagagaggucucuauaagucuuuaaaaggcgccuguaagcugaaacuuugcggggugccuggauugaggcugauggacggcacgugggucgcuauucaaacuuccgaugaaacaaagugguguccacccgaccagcuaguuaaccuccacgacuuccauucagaugagaucgagcaccuggugguagaggaacuugugaaaaagcgggaagagugccuggacgcauuggaaagcauaaugaccacuaaaagugucucuuuucgccgacucucccaucugagaaaguuagugccggguuucgggaaggccuacacaauuuucaauaaaacccugauggaggcugaugcccacuauaagagcguuaggacguggaacgagaucauuccuucgaaaggaugccuccgggugggcggccguugucacccccaugucaaugggguguuuuucaacggaaucauccuugguccagacggccacguacugauuccugaaaugcagucuuccuugcuacagcaacauauggagcugcucgaaucaaguguuauaccccugaugcacccacuugcggaucccagcaccguguuuaagaauggggacgaggucgaagauuucguggagguccaucugccugacgugcacaaacagguuuccggaguggauuuuggcuugccaucuugggguaaguacguacucaugagcgcagggauccugacagccuuaaugcuggucauuuuccuaaugacuugcugucgcagaaccaacaggucagagaguauccagcacucccucggcgaaacaggacggaaggugagcguuacuucucagucaggccgagugauaaguagcugggaguccuauaaaucugggggagaaaccaagcuguga

SEQ ID NO: 159063 - RNA, 1575 nt, Artificial Sequence
  derived and/or modified CDS sequence (opt3) from glycoprotein__RABV__FJ719752.1
augaucccccaggcccuucucuucgugccucuucuggucguuccauugugcuuuggcaaguucccgauuuacaccauacccgacaaauuagggccuuggagcccaaucgauauucaccaucuguccugucccaacaaucuagugguagaggacgaaggaugcacaaaccucucugguuuuucauauauggagcugaaggugggcuacaucagugcuauuaaagucaauggguucacuuguacgggagugguuaccgaagcagagacauauacuaacuuugugggcuacgucaccacaaccuucaagagaaaacacuuuaggccuacuccagaugccugccggagcgcguauaauuggaagauggcuggugacccccgcuacgaagagucccuucauaacccuuauccagauuaccacuggcugcgaacagugaagaccacgaaagagucuuucguaaucauaucgccgucaguugccgacuuggaucccuacgacaagagccuccauagucguguguuuccuagagggaaauguuccggaaucacugucucuagcaccuauugcccaacaaaucacgauuacacuauuuggaugcccgaaaacccuaggcugggcaccuccugugacaucuucacaaauucacggggcaagcgcgcauuuaaagggaguaagaccugcggauucguggaugagagaggucuguauaagagccucaaaggcgccuguaaguuaaaacugugcggggugcuuggauugaggcugauggacggcacgugggucgcuauucaaacuucugaugaaacaaagugguguccacccgaccagcuaguuaaccuccacgacuuucauuccgaugagaucgagcaccuggugguagaggaacuugugaaaaagcgggaagagugccuggacgcauuggaaucaauaaugaccacuaaaagcgucaguuuccgccgacucucucaucugagaaaguuagugccggguuucgggaaggccuacacaauuuuuaauaaaacccugauggaggcugaugcccacuauaaguccguuaggacguggaacgagaucauuccuagcaaaggaugccuccgggugggcggccguugucacccccaugucaaugggguguucuuuaacggaaucauccuugguccagacggccacguacugauuccugaaaugcagucgucuuugcuacagcaacauauggagcugcucgaauccucaguuauaccccugaugcacccacuugcggaucccaguaccguguucaagaauggggacgaggcagaagauuuugucgaggugcaucugccugacguccacaaacaggugagcggaguugauuugggccucccauccugggguaaguacgugcugaugucugccgggaucuuaacagcucugaugcuaaugauuuuccucaugacuugcugucgcagaaccaacaggccggagagcauccagcacucacugggcgaaacaggacggaagguaagugucacuucccagagcggccgagugauaucuucaugggagaguuauaaaagcgggggagaaaccaagcuguga

SEQ ID NO: 159064 - RNA, 1575 nt, Artificial Sequence; identical to SEQ ID NO: 159060
  derived and/or modified CDS sequence (opt3) from glycoprotein__RABV__FJ719756.1

SEQ ID NO: 159065 - RNA, 1575 nt, Artificial Sequence
  derived and/or modified CDS sequence (opt3) from glycoprotein__RABV__FJ825129.1
augaucccccaggugcugcuguucgucccucuucugguuuuuagcuccugcuucggcaaguuuccaauuuacaccauaccggacaaauuggggcccuggucuccuaucgauauucaccauuuaucauguccaaacaaucuggugguagaggacgaaggaugcacaaaccuaagugguuucagcuauauggagcucaaggugggcuacaucuccgccauuaaagucaauggguuuacuuguacgggagugguuaccgaagcugagacauauacuaacuucgugggcuacgucaccacaaccuuuaagagaaaacacuucaggcccaugccugaugcaugccgggccgcguauaauuggaagauggcuggugacccacgcuacgaagagucucugcauaaccccuauccugauuaccacuggcuucgaacugugaagacaaccaaagagucgcugguaaucauaucaccaagcguugccgacuuggauccguacgacaagagucuccauucccguguguuucccgggggaaaauguucuagaaucacggucagcuccacuugcuguucaaccaaucacgauuauacaauuuggaugccugaaaacccaaggcugcggaccaguugcgacaucuucacuaauagccgcggcaagagagcaucuaaaaggggcaagacauguggguuuguggaugagcggggacuguacaagucccucaaaggugccugcaaguuaaaacuguguggcgugcuuggguugcgccugauggacggaaccugggucgcuauucaaacgucagaugaaaucaaguggugcagccccgaccagcuaguuaaccuccacgacuuccauagugaugagauagagcaccuggugguagaggaacuugugaaaaagcgagaagagugccuggacgcauuggaaacuauuaugacaaccaaaucugucuccuuuagaaggcucagccaucugcggaaguuagugccuggcuucgguaaggccuauacuaucuucaauaaaacacugauggaggcugaugcccacuacaagucgauucguaccuggaacgagaucaucccaucuaaagggugucuccgcguuggaggcagaugccacccccaugugaauggcgucuuuuucaacgggauuauacuuggaccggacggucacgugcugaucccugaaaugcaguccucauugcuacaucagcacauggagcugcucgaaaguagcguaauuccccugaugcauccacuugcggauccuuccacgguuuuuaaggacggcgaugaggcagaagacuucguggagguccaccuccccgaugugcacaaacaaaucucugggauagacuugggacucccaaauuggggcaaguauguccugauuagcgccggugcuuuaaccgcccugaugcuaacaaucuuucucaugacuuguugcaggaagaccaaccgggcagagucaauccagcauagucccggggaaacaggccgaaaaguguccguuacuagccacaacggacgcgugauuucuucaugggagaguuacaagagcggcuccgaaaccaaacuguga

SEQ ID NO: 159066 - RNA, 1575 nt, Artificial Sequence; identical to SEQ ID NO: 158893
  derived and/or modified CDS sequence (opt3) from glycoprotein__RABV__FJ825130.1

SEQ ID NO: 159067 - RNA, 1575 nt, Artificial Sequence
  derived and/or modified CDS sequence (opt3) from glycoprotein__RABV__FJ825131.1
augaucccccaggugcugcuguucgucccucuucugguuuuuagcuccugcuucggcaaguuuccaauuuacaccauaccggacaaauuggggcccuggucuccuaucgauauucaccauuuaucauguccaaacaaucuggugguagaggacgaaggaugcacaaaccuaagugguuucagcuauauggagcucaaggugggcuacaucuccgccauuaaagucaauggguuuacuuguacgggagugguuaccgaagcugagacauauacuaacuucgugggcuacgucaccacaaccuuuaagagaaaacacuucaggcccaugccugaugcaugccgggccgcguauaauuggaagauggcuggugacccacgcuacgaagagucucugcauaaccccuauccugauuaccacuggcuucgaacugugaagacaaccaaagagucgcugguaaucauaucaccaagcguugccgacuuggauccguacgacaagagucuccauucccguguguuucccgggggaaaauguucuggcaucacggucagcuccacuugcuguucaaccaaucacgauuauacaauuuggaugccugaaaacccaagacugggcaccaguugcgacaucuucacuaauagcagggggaagcgggcaucuaaaggagguaagacauguggcuuugugcacgagcgcgggcuguacaagucccucaaaggagccugcaaguuaaaacuguguggcgugcuugguuugagacugauggaugggaccugggucgcuauucaaacgucagacgaaaucaaguggugcagccccgaucagcuaguuaaccuccaugacuuccacagugacgagauagagcaucuggugguagaggaacuugugaaaaagagggaagagugccuggaugcauuggaaacuauuaugacaaccaaaucugucuccuuucggcgccucagccaccuccgaaaguuagugccuggauucggcaaggccuauacuaucuucaauaaaacacugauggaggcugacgcccacuacaagucgauuagaaccuggaacgagaucaucccaucuaaaggcugucucaggguugggggacggugccauccccacgugaauggugucuuuuucaacggcauuauacuugggccggauggacaugugcugaucccugaaaugcaguccucauugcuacaccagcauauggagcugcucgaaaguagcguaauuccccugaugcacccacuugcggacccuuccacgguuuuuaaggauggcgacgaggcagaagauuucguggagguccaucugcccgacgugcacaaacaaaucucuggugucgauuuggggcucccaaauuggggcaaguaugugcugauaagcgccggagcuuuaaccgcccugaugcuaacaauuuuucucaugacuuguugccguaagaccaaccgcgcagagucaauccagcacagucccggcgaaacagggagaaaaguuuccgugacuagccauaacggaaggguaaucucuucaugggagaguuacaagagcgguuccgaaaccaaacuguga

SEQ ID NO: 159068 - RNA, 1575 nt, Artificial Sequence
  derived and/or modified CDS sequence (opt3) from glycoprotein__RABV__FJ825132.1
augaucccccaggugcugcuguucgucccucuucugguuuuuagcuccugcuucggcaaguuuccaauuuacaccauaccggacaaauuggggcccuggucuccuaucgauauucaccauuuaucauguccaaacaaucuggugguagaggacgaaggaugcacaaaccuaagugguuucagcuauauggagcucaaggugggcuacaucuccgccauuaaagucaauggguuuacuuguacgggagugguuaccgaagcugagacauauacuaacuucgugggcuacgucaccacaaccuuuaagagaaaacacuucaggcccaugccugaugcaugccgggccgcguauaauuggaagauggcuggugacccacgcuacgaagagucucugcauaaccccuauccugauuaccacuggcuucgaacugugaagacaaccaaagagucgcugguaaucauaucaccaagcguugccgacuuggauccguacgacaagagucuccauucccguguguuucccgggggaaaauguucuggcaucacggucagcuccacuugcuguucaaccaaucacgauuauacaauuuggaugccugaaaacccaagacugggcaccaguugcgacaucuucacuaauagcagggggaagcgggcaucuaaaggagguaagacauguggcuuuguggaugagcgcgggcuguacaagucccucagaggagccugcaaauuaaagcuguguggcgugcuugguuugaggcugauggacgggaccugggucgcuauucaaacgucagaugaaaucaaauggugcagccccgaccagcuaguuaaccuccacgacuuccauagugaugagauagagcaccuggugguagaggaacuugugaagaaacgggaagagugccuggacgcauuggaaacuauuaugacaaccaagucugucuccuuucgccgacucagccaucugagaaaauuagugccuggauucggcaaggccuauacuaucuucaauaagacacugauggaggcugaugcccacuacaaaucgauuaggaccuggaacgagaucaucccaucuaagggcugucuccggguugggggacguugccacccccaugugaauggugucuuuuucaacggcauuauacuugggccggacggacacgugcugaucccugaaaugcaguccucauugcuacaucagcacauggagcugcucgaaaguagcguaauuccccugaugcauccacuugcggauccuuccacgguuuuuaaagacggcgaugaggcagaagacuucguggagguccaccuccccgaugugcacaagcaaaucucuggugucgacuuggggcucccaaauuggggcaaauaugugcugauaagcgccggagcuuuaaccgcccugaugcuaaugauuuuucucaugacauguugccgcaagacuaacagagcagagucaauccagcauagucccggcgaaaccggguggaagguuuccgugacaagccacaacggaaggguaaucucuucaugggagaguuacaaaagcgguuccgaaacuaagcuguga

SEQ ID NO: 159069 - RNA, 1575 nt, Artificial Sequence
  derived and/or modified CDS sequence (opt3) from glycoprotein__RABV__FJ825133.1
augaucccccaggugcugcuguucgucccucuucugguuuuuagcuccugcuucggcaaguuuccaauuuacaccauaccggacaaauuggggcccuggucuccuaucgauauucaccauuuaucauguccaaacaaucuggugguagaggacgaaggaugcacaaaccuaagugguuucagcuauauggagcucaaggugggcuacaucuccgccauuaaagucaauggguuuacuuguacgggagugguuaccgaagcugagacauauacuaacuucgugggcuacgucaccacaaccuuuaagagaaaacacuucaggcccaugccugaugcaugccgggccgcguauaauuggaagauggcuggugacccacgcuacgaagagucucugcauaaccccuauccugauuaccacuggcuucgaacugugaagacaaccaaagagucgcugguaaucauaucaccaagcguugccgacuuggauccguacgacaagagucuccauucccguguguuucccgggggaaaauguucuagaaucacggucagcuccacuugcuguucaaccaaucacgauuauacaauuuggaugccugaaaacccaaggcugggcaccaguugcgacaucuucacuaauagccggggcaagcgcgcaucuaaagggggaaagacaugugguuuuguggaugagagaggccuguacaagucccucaggggagccugcaaauuaaagcuguguggggugcuuggcuugcggcugauggacgguaccugggucgcuauucaaacgucagaugaaaucaaauggugcagccccgaccagcuaguuaaccuccacgacuuccauagugaugagauagagcaccuggugguagaggaacuugugaagaaacgcgaagagugccuggacgcauuggaaacuauuaugacaaccaagucugucuccuuucgaagacucagccaucugaggaaauuagugccuggguucggaaaggccuauacuaucuucaauaagacacugauggaggcugaugcccacuacaaaucgauucggaccuggaacgagaucaucccaucuaagggcugucuccguguuggcgggcgcugccacccccaugugaauggagucuuuuucaacgguauuauacuuggcccggacgggcacgugcugaucccugaaaugcaguccucauugcuacaucagcacauggagcugcucgaaaguagcguaauuccccugaugcauccacuugcggauccuuccacgguuuuuaaagacggagaugaggcagaagacuucguggagguccaccuccccgaugugcacaagcaaaucucuggcgucgacuugggucucccaaauugggggaaauaugugcugauaagcgccggcgcuuuaaccgcccugaugcuaaugauuuuucucaugacauguugcagaaagacuaacagggcagagucaauccagcauagucccggagaaaccggccggaagguuuccgugacaagccacaacgggcgaguaaucucuucaugggagaguuacaaaagcggauccgaaacuaagcuguga

SEQ ID NO: 159070 - RNA, 1575 nt, Artificial Sequence; identical to SEQ ID NO: 159060
  derived and/or modified CDS sequence (opt3) from glycoprotein__RABV__FJ825134.1

SEQ ID NO: 159071 - RNA, 1575 nt, Artificial Sequence
  derived and/or modified CDS sequence (opt3) from glycoprotein__RABV__FJ866832.1
augaucccccaggugcugcuguucgucccucuucugguuuuuagcuccugcuucggcaaguuuccaauuuacaccauaccggacaaauuggggcccuggucuccuaucgauauucaccauuuaucauguccaaacaaucuggugguagaggacgaaggaugcacaaaccuaagugguuucagcuauauggagcucaaggugggcuacaucuccgccauuaaagucaauggguuuacuuguacgggagugguuaccgaagcugagacauauacuaacuucgugggcuacgucaccacaaccuuuaagagaaaacacuucaggcccaugccugaugcaugccgggccgcguauaauuggaagauggcuggugacccacgcuacgaagagucucugcauaaccccuauccugauuaccacuggcuucgaacugugaagacaaccaaagagucgcugguaaucauaucaccaagcguugccgacuuggauccguacgacaagagucuccauucccguguguuucccgggggaaaauguucuggcaucacggucagcuccacuugcuguucaaccaaucacgauuauacaauuuggaugccugaaaacccaagacugggcaccaguugcgacaucuucgcaaauagcagggggaagcgggccucuaaaggagguaagacuuguggcuuuguggaugagcgcgggcuguacaagucccucaaaggagcuugcaaguuaaaacuguguggcgugcuugguuugagacugauggacgggacaugggucgcaauucaaaccucagaugaaaucaaguggugcagccccgaccagcuaguuaaccuccacgacuuccauagugaugagauagagcaccuggugguagaggaacuugugaaaaagagggaagagugccuggacgccuuggaaacgauuaugacuacaaaaucugucuccuuucggcgccucagccaucugcgaaaguuagugccuggauucggcaaggcuuauaccaucuucaauaaaacucugauggaggccgaugcgcacuacaagucgauuagaacauggaacgagaucaucccaucuaaaggcugucucaggguugggggacggugccacccccaugugaauggugucuuuuucaacggcauuauacuugggccggacggacacgugcugaucccugaaaugcaguccucauugcuacaucagcacauggagcugcucgaaaguagcguaauuccccugaugcauccacuugcagauccuuccaccguuuuuaaggacggcgaugaggccgaagacuucguggagguccaccuccccgaugugcacaaacaaaucucuggugucgacuuggggcucccaaauuggggcaaguaugugcugauaagcgcuggagccuuaacggcacugaugcuaaccauuuuucucaugacauguugccguaagacuaaccgcgcugagucaauccagcauagucccggcgaaaccgggagaaaaguuuccgugacaagccacaacggaaggguaaucucuucaugggagaguuacaagagcgguuccgaaacuaaacuguga

SEQ ID NO: 159072 - RNA, 1575 nt, Artificial Sequence
  derived and/or modified CDS sequence (opt3) from glycoprotein__RABV__FJ866834.1
augaucccccaggugcugcuguucgucccucuucugguuuuuagcuccugcuucggcaaguuuccaauuuacaccauaccggacaaauuggggcccuggucuccuaucgauauucaccauuuaucauguccaaacaaucuggugguagaggacgaaggaugcacaaaccuaagugguuucagcuauauggagcucaaggugggcuacaucuccgccauuaaagucaauggguuuacuuguacgggagugguuaccgaagcugagacauauacuaacuucgugggcuacgucgcaaccacauuuaagagaaaacacuucaggcccaugccugaugccugccgggcggcuuauaauuggaagauggccggugacccacgcuacgaagagucucugcauaaccccuauccugauuaccacuggcuucgaaccgugaagacuacaaaagagucgcugguaaucauaucaccaagcguugcagacuuggauccguacgacaagagucuccauucccguguguuucccgggggaaaauguucuggcaucaccgucagcuccacgugcuguucaacuaaucacgauuauaccauuuggaugccugaaaacccaagacugggcacaaguugcgacaucuucacuaauagcagggggaagcgggccucuaaaggagguaagaccuguggcuuuguggaugagcgcgggcuguacaagucccucaaaggagcuugcaaguuaaaacuguguggcgugcuugguuugagacugauggacgggacaugggucgcaauucaaaccucagaugaaaucaaguggugcagccccgaccagcuaguuaaccuccacgacuuccauagugaugagauagagcaccuggugguagaggaacuugugaaaaagagggaagagugccuggacgccuuggaaacgauuaugacuacaaaaucugucuccuuucggcgccucagccaucugcgaaaguuagugccuggauucggcaaggcuuguaccaucuucaauaaaacucugauggaggccgaugcgcacuauaagucgauuagaacauggaacgagaucaucccaucuaaaggcugccucaggguugggggacggugucacccccaugugaauggugucuuuuucaacggcauuauacuugggccggacggacacgugcugaucccugaaaugcaguccucauugcuacaucagcacauggagcugcucgaaaguagcguaauuccccugaugcauccacuugcagauccuuccaccguuuuuaaggacggcgaugaggccgaagacuucguggagguccaccuccccgaugugcacaaacaaaucucuggugucgacuuggggcucccaaauuggggcaaguacgugcugauaagcgcuggagccuuaacggcacugaugcuaaccauuuuucucaugacaugcugucguaagacuaaccgcgcugagucaauccagcauagucccggcgaaaccgggagaaaaguuuccgugacaagccacaacggaaggguaaucucuucaugggagaguuauaagagcgguuccgaaacuaaacuguga

SEQ ID NO: 159073 - RNA, 1575 nt, Artificial Sequence
  derived and/or modified CDS sequence (opt3) from glycoprotein__RABV__FJ866835.1
augaucccccaggugcugcuguucgucccucuucugguuuuuagcuccugcuucggcaaguuuccaauuuacaccauaccggacaaauuggggcccuggucuccuaucgauauucaccauuuaucauguccaaacaaucuggugguagaggacgaaggaugcacaaaccuaagugguuucagcuauauggagcucaaggugggcuacaucuccgccauuaaagucaauggguuuacuuguacgggagugguuaccgaagcugagacauauacuaacuucgugggcuacgucaccacaaccuuuaagagaaaacacuucaggcccaugccugaugcaugccgggccgcguauaauuggaagauggcuggugacccacgcuacgaagagucucugcauaaccccuauccugauuaccacuggcuucgaacugugaagacaaccaaagagucgcugguaaucauaucaccaagcguugccgacuuggauccguacgacaagagucuccauucccguguguuucccgggggaaaauguucuggcaucacggucagcuccacuugcuguucaaccaaucacgauuauacaauuuggaugccugaaaacccaagacugggcaccaguugcgacaucuucacuaauagcagggggaagggagcaucuaaagguggcaagacauguggguuuguggaugagcggggacuguacaagucccucaaaggcgccugcaaguuaaaacuguguggugugcuuggguugcgccugauggacggaaccugggucgcuauucaaacgucagcagaaaucaaguggugcagccccgaucagcuaguuaaccuccacgacuuccauagugacgagauagagcaccuggugguagaggaacuugugaaaaagagagaagagugccuggaugccuuggaaacuauuaugacaaccaaaucugucuccuuuaggcggcucagccaucugcgcaaguuagugccuggcuucggcaaggcuuauacuaucuucaauaaaacacugauggaggccgacgcgcacuacaagucgauucgaaccuggaacgagaucaucccaucuaaagggugucucagaguuggagguaggugccacccccaugugaauggcgucuuuuucaacgggauuauacuuggaccggauggccacgugcugaucccugaaaugcaguccucauugcuacaucagcacauggagcugcucgaaaguagcguaauuccccugaugcauccacuugcagacccuuccacgguuuuuaaggauggugacgaggccgaagauuucguggagguccaccuccccgacgugcacaaacaaaucucuggggucgauuugggccucccaaauuggggaaaguaugugcugauaagcgcuggcgccuuaaccgcacugaugcuaacaauuuuucucaugacuuguugccggaagaccaaccgugcugagucaauccagcauagucccggggaaacaggacgcaaaguuuccgugacuagccacaacgguagaguaaucucuucaugggagaguuacaagagcggcuccgaaaccaaacuguga

SEQ ID NO: 159074 - RNA, 1575 nt, Artificial Sequence
  derived and/or modified CDS sequence (opt3) from glycoprotein__RABV__FJ959397.1
augaucccccaggcccuucucuucgugccucuucuggucuuuccauugugcuucggcaaguuuccgauuuacaccauacccgacaaauuagggccuuggagcccaaucgauauucaccaucuguccugucccaacaaucuaguuguggaggacgaaggaugcacaaaccucucugguuucucauauauggagcugaagguaggcuacaucagugcuauuaaagugaauggguuuacuuguacgggagucgugaccgaagcagagacauauacuaacuucguuggcuacgugaccacaaccuuuaagagaaaacacuucaggccuacuccagaugccugccggagcgcguauaauuggaagauggcuggugacccccgcuacgaagagucccuucauaacccuuauccagauuaccacuggcugcgaacagucaagaccacgaaagagucugugguaaucauaucgccgucaguugccgacuuggaucccuacgacaagagccuccauagucguguguuuccuagagggaaauguuccggaaucacugucucuagcgcauauugcuccaccaaucacgauuacacaauuuggaugccagaaaaccccaggcugggcacuucaugugacaucuucaccaauagucggggcaagcgcgccagcaaagggucuaagacaugcggauuuguggaugagagaggucuguauaagucccucaaaggcgcuuguaaguuaaaacugugcggggugcuuggauugaggcugauggacggcaccugggucgcaauucaaacgucaaacgaaacuaagugguguccuccagaucagcuaguuaaucuccacgacuuccauagcgacgagaucgagcaccuggugguagaggaacuugugaaaaagcgggaagagugccuggaugccuuggaaaguauaaugacaaccaaaucugucuccuuucgccgacucagccaucugagaaaguuagugcccgguuucgggaaggcuuacacuauuuucaacaaaacacugauggaggccgacgcgcacuauaagucgguuaggaccuggaaugagaucauuccgucuaaaggaugccuccgggugggcggccguugucacccucaugucaacgggguguuuuucaauggaaucauccuuggucccgauggccacguacugauuccagaaaugcaguccucauugcuacagcaacauauggagcugcucgaaaguagcguuauaccucugaugcacccccuugcagacccauccacgguguuuaaggauggggacgaggucgaagauuucguggagguccaucugcccgacgugcacaaacagguuucuggaguggauuugggccucccuaacugggguaaggacguacugaugggggccggcgucuuaaccgcucugaugcuaaugaucuuucucaugacaugcugucgcagaacuaacagggccgagagcauucagcacucacugggagaaaccggccggaaggugaguguuacaucccagagcgggcgagugaucucuucaugggagaguuacaaaagcggaggugaaacuaagcuguga

SEQ ID NO: 159075 - RNA, 1575 nt, Artificial Sequence
  derived and/or modified CDS sequence (opt3) from glycoprotein__RABV__FJ979833.1
auggugccccaggcccuccuguucgucccucuucugggcuuuagcuugugcuucgggaaguuuccaaucuacaccauuccggacgaguuaggacccugguccccuauagauauccaccaucugucuuguccaaacaaucuaguuguggaagacgaggguugcacaaaccucucagaguucaguuauauggagcugaaaguaggcuacauuagcgcuaucaaggugaauggguuuacuuguacgggagucgugaccgaagcagaggccuauacaaacuucguuggcuacgugacuaccacauuuaaaagaaagcacuucaggcccaccccugaugcgugccgggcugccuauaauuggaaaauggccggugacccacgcuacgaggaaucccuucauaaccccuauccugauuaccacuggcugcgaacuguccguacaaccaaggagucuuugauuaucauaucgccaucagugacggaccucgauccguacgacaagagccugcauaguagaguauuucccgggggaaaauguuccggcaucacuguuucuagcaccuauugcuccacaaaucacgauuacacuauuuggaugccugaagacccaaggccccggaccccuugugauaucuucacaaacucacgcggcaagagagcaaguaaagggaauaagaccugcggauuuguggacgagaggggucuguauaaaagccucaagggcgcuugucgguuaaagcugugcgggguccuuggauugcgccugauggauggcacguggguggcaaugcaaacuucugacgagacaaaaugguguccacccgaccagcuagugaaccuccacgauuuccaguccgacgaaauugagcaucuggucguugaagaacuugugaagaaacgagaagguugccuggaugccuuggagucaaucaugaccacuaagagcguaaguuuuagaagguucucucaccuccggaaacuggugccgggguucggaaaggcuuacacaauauuuaauaaaaccuuaauggaggccgacgcgcauuauaaguccguccguacguggaacgaaauuaucccuagcaagggcugccugaaagugggcgggcgcugucacccccacguuaauggaguguucuuuaacgguauuauccucggcccagaugggcauguccuuaucccugagaugcagucgucucuguugcaacagcacauggaacuacugaaguccucagugauuccccucaugcauccacuggcagaccccaguaccguauucaaagagggagaugaagccgaggacuuuguugaggugcaccuuccugaugucuacaagagaauaagcggcguggaccuggguuugccaaauugggggaaauauguccucaugacagcuggcgccaugaucggacugguguuaauuuucucccugaugacuuggugcaggcgggcaaaccgaccggaaucuaagcagcgcagcuuuggcgggaccggaagaaacguuucagugacaagucaguccgguaagguaauccccagcugggagucuuacaaaucaggcggggaaacuggacuauga

SEQ ID NO: 159076 - RNA, 1575 nt, Artificial Sequence
  derived and/or modified CDS sequence (opt3) from glycoprotein__RABV__GQ303557.1
augaucccccaggcccuccuguucgugccucuucuggucuuuagcuccugcuucggcaaguuuccaauuuacaccauaccggacaaauuggggcccuggucuccuaucgauauucaccauuuaucauguccaaacaaucugguuguggaggacgaaggaugcacaaaccuaagugguuucagcuauauggagcucaagguaggcuacaucuccgcuauuaaagugaauggguuuacuuguacgggagucgugaccgaagcagagacauauacuaacuucguuggcuacgugaccacaaccuuuaagagaaaacacuucaggcccacuccugaugccugccgggcggcuuauaauuggaagauggccggugacccacgcuacgaagagucucugcauaaccccuauccugauuaccacuggcuucgaacagucaagaccacgaaagagucgcuggugaucauaucaccaagcguaagugacuuggauccguacgacaagucccuccauucucguguuuuucccagcgggaaauguuccggaaucacugugucaaguaccuauugcccuacaaaucacgauuacacuauuuggaugccagaaaaccccagacugggcaccagcugugacaucuucacaaauucuaggggcaagcgggcauccaaagggggaaagaccugcgguuuugucgaugagcgcggccuguauaagucacucaaaggggccuguaaguuaaaacugugcggagugcuuggcuugagacugauggacgguacguggguggcuauucaaacuagcgaugaagcaaagugguguccuccagaccagcuagucaacauccacgacuucaggagugaugagauagagcaucucguuguggaggaacugguaaagaaacgggaagagugccuugacgcccuggaaucuauuaugacaaccaaauccgugagcuuucgccgauugucgcaccucagaaagcugguccccggguucggaaaggcuuacacuaucuucaauaaaacauuaauggaggccgaugcgcauuauaagucugugaggaccuggaacgagauuaucccguccaaaggcugccugcggguuggcgggcguugucacccucacgugaauggagucuuuuucaacgguaucauucucggccccgacgggcaugugcuuauaccagaaaugcagucaagucuguugcagcaacacauggagcuacuggaaagcuccguaaucccucucaugcauccccuggcagauccaucuacgguuuuuaaggacggagaugaggccgaagacuucguggagguccaccuucccgaugugcauaaacaggucagcggcguggaccuggguuugccuucaugggggaaguacguucucaugagugugggcgcuaugauugcccugauguuaaugaucuuucugaugaccugcugucgcaaggcaaauggagcugagacaauacagcacagacuaggcgaaacugggaggaaaguauccgucaccagccagucuggacgggugauuucaaguugggagagcuauaaguccgguggcgaaacaaaacucuga

SEQ ID NO: 159077 - RNA, 1575 nt, Artificial Sequence; identical to SEQ ID NO: 158905
  derived and/or modified CDS sequence (opt3) from glycoprotein__RABV__GQ406342.1

SEQ ID NO: 159078 - RNA, 1575 nt, Artificial Sequence
  derived and/or modified CDS sequence (opt3) from glycoprotein__RABV__GQ412744.1
auggugccccaggcccugcuccuugucccucuguugggcuucagcuuaugcuuugggaaguucccaaucuacaccauuccggacacacugggacccugguccccuauagauauccaccaccuaucuuguccaaacaaucucguuguggaggacgaagguugcacuaaccugucaggcuuuaguuauauggagcuuaaaguagggcacauuagcgcuaucaaggugaauggauucacguguaccggcgucgugacagaagcagagacuuacaccaacuuuguugguuaugugacaaccacuuucaaaagaaagcauuuuaggcccacaccugaugccugccgggcggcuuacaauuggaaaauggccggggacccacgcuaugaagagucccugcacucucccuacccugauuaucauugguugcgaaccgucaagacgacuaaggagucgcucgugauuaucucaccaagcguagcaaaccuggacccguacgauaauagucugcacucccguguuuuccccucuggaaaauguagcggcauaaccgugccuuccgucuacugcucaacaaaccacgacuauacuguguggaugccagaaauccucagauuaggcaccaguugugauauuuuuacaaauagcagggggaagcgggccucuaaaggauccaagaccugcgguuucguggacgagcgcggccuguacaaaucacuuaagggggcuuguaaguugaaacugugcggaguccccggccuaagacucauggaugguacguggguugcaaugcaaacuagcaacgaaacaaagugguguccuccagggcagcuggugaaucuucaugaccugcacagugaugagaucgagcauuugguaguggaggaacucgucaaaaagagggaagagugccuggacgccuuagaaucuauuaucaccacuaaauccgugagcuuucggcgccugucgcaccuccgaaaacuuguucccggauucggcaaggcuuauacaauauuuaacaagacccugauggaggccgaggcgcacuacaagucugugagaacguggaaugaaauuaucccguccaaaggcugcuugagggucgggggacggugucauccucacgugaacgguguauucuucaauggcauuauccuagggcccgacggacauguucugaucccagagaugcagucaagucuccugcagcaacacauugaacuucuggagagcuccgugauaccuuugaugcauccccucgcagauccauuuaccgucuucaaggacggcgaugaaaucgaggacuuuguggagguccaucugcccgaugugcacgaacagguuucugguguggacuuagggcugccuaacuggggcgaguauguacuacucagcgccggaacacugauugcucuuauguugaucauauuccugauuacuugcuguaaacgugucgaucgcccagaaucaacccagagaagucucaggggcacagggcggaacguguccguuacuagccagucuggaaaguuuaucccgucaugggagaguuacaaaagcgguggcgaaaccgggcuguga

SEQ ID NO: 159079 - RNA, 1575 nt, Artificial Sequence
  derived and/or modified CDS sequence (opt3) from glycoprotein__RABV__GQ472535.1
auggugccccaggcccuucucuucgucccucuucuggcuguuccauugugcuuuggcaaguucccgaucuacaccauucccgacaaauuagggccuuggagcccaauagauauccaccaucuguccugucccaacaaucuagugguagaggacgaaggaugcacaaaccucucugguuuuucauauauggagcugaaggugggcuacauuagugcaaucaaagucaauggguucacuuguacgggagugguuaccgaagccgagacauauacuaacuuugugggcuacgucaccacaaccuucaagagaaaacacuuuaggccuacuccagaugcgugccggagcacauauaauuggaagauggcuggugacccccgccaugaagagucccuucacaacccuuacccagauuaucauuggcugcgaaccgugaagacgacuaaagagucuuucguaauuaucucgccgucaguugccgacuuggaucccuacgacaagagccuccacagucguguguuuccuagagggaaauguuccggaauaaccgucucuagcacauacugcuccacuaaucacgauuauaccaucuggaugccagaaaaccccaggcugggcacaucaugugacauuuucaccaauagucggggcaagcgcgcaagcaaagggucuaagacgugcggauuuguggaugagagaggucuguacaagucccucaaaggcgccuguaaguuaaaacugugcggggugcuuggauugaggcugauggacggcacuugggucgcuauccaaacaucagaugaaaccaagugguguccuccagaccagcuaguuaaccuccaugacuuccacagcgaugagauugagcaucuggugguagaggaacuugugaaaaagcgggaagagugccuggacgcauuggaaaguaucaugacuacaaaaucugucuccuuucgccgacucagccaccugagaaaguuagugcccgguuucgggaaggccuauaccauauucaauaaaacgcugauggaggcugaugcccacuacaagucgguuaggaccuggaacgagauuaucccgucuaaaggaugccuccgggugggcggccguugucauccucacgucaaugggguguuuuucaacggaauuauccuuggucccgacggccauguacugaucccagaaaugcaguccucauugcuacagcaacacauggagcugcucgaaaguagcguuauuccucugaugcauccccuugcggauccauccacaguguuuaaggacggggaugaggcagaagacuucgucgaggugcaucugcccgauguccacaaacaggugucuggaguugacuugggccucccuagcugggguaaguaugcccugaugucagcugggauauuaacugcccugaugcuaaugaucuuucucaugaccugcugucgcagaacaaauagggcagagaguauucagcacucccugggcgaaacuggacggaaggugagcguaaccucucagaacggccgagucaucucaaguugggagagcuacaaauccgggggagaaacaaagcuguga

SEQ ID NO: 159080 - RNA, 1575 nt, Artificial Sequence
  derived and/or modified CDS sequence (opt3) from glycoprotein__RABV__GQ472536.1
auggugccccaggcccuccuguucgucccucuucuggcuaucccauugugcuuuggcaaguucccgauuuacaccauacccgacaaauuagggccuuggagcccaaucgauauucaccaucuguccugucccaacaaucuaguuguggaggacgaaggaugcacaaaccucucugguuuuucauauauggagcugaagguaggcuacaucagugcaauuaaagugaauggguucacuuguacgggagucgugaccgaagccgagacauauacuaacuuuguuggcuacgugaccacaaccuucaagagaaaacacuuuaggccuacuccagaugcgugccggagcgcuuauaauuggaagauggccggugacccccgcuacgaagagucccuucauaacccuuauccagauuaccacuggcugcgaacagucaagaccacgaaagagucuuucgugaucauaucgccgucaguagcagacuuggaucccuacgacaagagccuccugagucguguuuuuccuagagggaaauguuccggaaucacugugucuagcaccuauugcuccacaaaucaugauuacacuauuuggaugccagaaaaccccaggcugggcaccucaugugacaucuucacaaauagucggggcaagcgcgccagcaaagggucuaagaccugcggauuugucgaugagagaggucucuauaaguccuuaaaaggcgcuuguaagcugaaacuuugcgggguguugggacugaggcuaauggacggcacguggguggcaauucaaacuucagaugaaacaaagugguguccuccagaccagcucgucaaccugcacgacuuccacagcgaugagaucgagcaucuuguuguggaggaacuggugaaaaagcgggaagagugcuuggacgcccucgaaaguauaaugaccacuaaaucuguauccuuucgccgacugagccacuuaagaaagcugguccccgguuucgggaaggcuuacacaauuuucaauaaaacccucauggaggccgaugcgcauuauaagucggugaggacguggaacgagaucauuccgucuaaaggaugccuucggguuggcggccguugucacccucacgugaauggggucuuuuucaacggaaucauccugggucccgacggccauguguugauuccagaaaugcaguccucacuacugcagcaacacauggagcuccuggaaaguagcguaauaccucuuaugcauccccuggcagauccauccaccguuuuuaaggacggggaugaggccgaagacuucguggagguccacuugcccgaugugcauaaacaggucucuggaguggaccucggccugccuagcugggguaaguacguuuuaaugucagcugggauccugacagcccuaaugcucaugauuuuucugaugacuugcugucgcagaaccaauagggcagagaguauccagcacucccuuggcgaaacaggacggaaggugagcguaacuucucagucaggccgagucauaaguagcugggaguccuauaaaucugggggagaaaccaaguuguga

SEQ ID NO: 159081 - RNA, 1575 nt, Artificial Sequence; identical to SEQ ID NO: 158575
  derived and/or modified CDS sequence (opt3) from glycoprotein__RABV__GQ472537.1

SEQ ID NO: 159082 - RNA, 1575 nt, Artificial Sequence
  derived and/or modified CDS sequence (opt3) from glycoprotein__RABV__GQ472539.1
augaucccccaggugcuccuguucgucccucuucugguuuuuagcuccugcuucggcaaguuuccaauuuacaccauaccggacaaauuggggcccuggucuccuaucgauauucaccauuuaucauguccaaacaaucuggugguagaggacgaaggaugcacaaaccuaagugguuucagcuauauggagcucaaggugggcuacaucuccgccauuaaagucaauggguuuacuuguacgggagugguuaccgaagcugagacauauacuaacuucgugggcuacgucaccacaaccuuuaagagaaaacacuucaggcccaugccugaugcaugccgggccgcguauaauuggaagauggcuggugacccacgcuacgaagagucucugcauaaccccuauccugauuaccacuggcuucgaacugugaagacaaccaaagagucgcugguaaucauaucaccaagcguugccgacuuggauccguacgacaagagucuccauucccguguguuucccgggggaaaauguucuggcaucacggucagcuccacuugcuguucaaccaaucacgauuauacaauuuggaugccugaaaacccaagacugggcaccaguugcgacaucuucacuaauagcagggggaagcgggcaucuaaaggagguaagacauguggcuuuguggaugagcgcgggcuguacaagucccucaaaggagccugcaaguuaaaacuguguggcgugcuugguuugagacugauggacgggaccugggucgcuauucaaacgucagaugaaaucaaguggugcagccccgaccagcuaguuaaccuccacgacuuccauagugaugagauagagcaccuggugguagaggaacuugugaaaaagagggaagagugccuggacgcauuggaaacuauuaugacaaccaaaucugucuccuuucggcgccucagccaucugcgaaaguuagugccuggauucggcaaggccuauacuaucuucaauaaaacacugauggaggcugaugcccacuacaagucgauuagaaccuggaacgagaucaucccaucuaaaggcugucucaggguugggggacggugccacccccaugugaauggugucuuuuucaacggcauuauacuugggcuggacggacacguguugaucccggaaaugcaguccucacuacugcaucagcacauggagcuccuggaaaguagcguaauuccucuuaugcauccccuggcggauccauccacgguuuuuaaggacggcgaugaggcagaagacuucguggagguccacuugccugaugugcacaaacaaaucucuggugucgaccucgggcugcccaauuggggcaaguauguguuaaccagcgccggagcucugacagcccuaaugcucaugauauuucugaugacuuguugccguaagaccaaccgcgcagagucaauucagagaaguccaggcgaaacagagaggaaaguuuccgugacuagccauaacgggcggguaaucucuucaugggaaaguuacaagagcggaggugagaccaaacuuuga

SEQ ID NO: 159083 - RNA, 1575 nt, Artificial Sequence
  derived and/or modified CDS sequence (opt3) from glycoprotein__RABV__GQ472540.1
auggugccccaggcccuucucuucgucccucuucuggcuguuccauugugcuuuggcaaguucccgaucuacaccauucccgacaaauuagggccuuggagcccaauagauauccaccaucuguccugucccaacaaucuagugguagaggacgaaggaugcacaaaccucucugguuuuucauauauggagcugaaggugggcuacauuagugcaaucaaagucaauggguucacuuguacgggagugguuaccgaagccgagacauauacuaacuuugugggcuacgucaccacaaccuucaagagaaaacacuuuaggccuacuccagaugcgugccggagcgcuuauaauuggaagauggccggugacccccgcuacgaagagucccuucauaacccuuauccagauuaccacuggcugcgaacagugaagaccacgaaagagucuuucguaauuaucucgccgucaguugcagacuuggaucccuacgacaagagccuccauagucguguguuuccuagagggaaauguuccggaauaacugucucuagcaccuauugcuccacaaaucacgauuacacuaucuggaugccagaaaaccccaggcugggcaccucaugugacauuuucacaaauagucggggcaagcgcgccagcaaagggucuaagaccugcggauuuguggaugaggguggccuguauaagucccucaaaggggcuuguaaguuaaaacugugcggagugcuuggcuugagacugauggacgguacgugggucgcaauccaaacuucagaugaaacaaagugguguccuccagaccagcuaguuaaccuccacgacuuccauagcgaugagauugagcaccuggugguagaggaacuugugaaaaagagggaagagugccuggacgccuuggaaaguaucaugaccacuaaaucugucuccuuucggcgccucagccaucugcgaaaguuagugcccggguucggaaaggcuuacacaauauucaauaaaacccugauggaggccgaugcgcacuauaagucgguuagaacguggaacgagauuaucccgucuaaaggcugccucagggugggcgggcggugucacccucaugucaauggaguguuuuucaacgguauuauccuuggccccgacgggcacguacugaucccagaaaugcaguccucauugcuacagcaacauauggagcugcucgaaaguagcguuauuccucugaugcacccccuugcagauccauccaccguguuuaaggacggagaugaggccgaagacuucgucgaggugcaucugcccgauguccacaaacaggugucuggcguugacuugggucucccuagcugggggaaguacgugcugaugucagcuggcauauuaacagcccugaugcuaacuaucuuucucaugaccugcugucgucgcacaaauagagcagagaguauucagcacucccugggagaaacuggcaggaagguaagcgucaccucucagucagggcgggugaucaguagcugggaguccuauaaaucuggaggugaaacaaagcuguga

SEQ ID NO: 159084 - RNA, 1575 nt, Artificial Sequence
  derived and/or modified CDS sequence (opt3) from glycoprotein__RABV__GQ472541.1
auggugccccaggcccuccuguucgucccucuucuggcuaucccauugugcuuuggcaaguucccgauuuacaccauacccgacaaauuagggccuuggagcccaaucgauauucaccaucuguccugucccaacaaucuaguuguggaggacgaaggaugcacaaaccucucugguuuuucauauauggagcugaagguaggcuacaucagugcaauuaaagugaauggguucacuuguacgggagucgugaccgaagccgagacauauacuaacuuuguuggcuacgugaccacaaccuucaagagaaaacacuuuaggccuacuccagaugcgugccggagcgcuuauaauuggaagauggccggugacccccgcuacgaagagucccuucauaacccuuauccagauuaccacuggcugcgaacagucaagaccacgaaagagucuuucgugaucauaucgccgucaguagcagacuuggaucccuacgacaagagccuccauagucguguuuuuccuagagggaaauguuccggaaucacugugucuagcaccuauugcuccacaaaucacgauuacacuauuuggaugccagaaaaccccaggcugggcaccucaugugacaucuucacaaauagucggggcaagcgcgccagcaaagggucuaagaccugcggauuugucgaugagagaggucuguauaagucccucaaaggcgcuuguaaguuaaaacugugcggggugcuuggauugaggcugauggacggcacguggguggcaauucaaacuucagaugaaacaaagugguguccuccagaccagcuagucaaccuccacgacuuccauagcgaugagaucgagcaccugguuguggaggaacuuguaaagaagcgggaagagugccuggacgccuuggaaaguauaaugaccacuaaaucuguguccuuucgccgacucagccaucugagaaaguuaguccccgguuucgggaaggcuuacacaauuuucaauaaaacccugauggaggccgaugcgcacuauaagucggugaggacguggaacgagaucauuccgucuaaaggaugccuccggguuggcggccguugucacccucaugugaauggggucuuuuucaacggaaucauccuuggucccgacggccacgugcugauuccagaaaugcaguccucauugcuacagcaacauauggagcugcucgaaaguagcguaauaccucugaugcacccccuugcagauccauccaccguuuuuaaggacggggaugaggccgaagacuucgaugaggugcaucugcccgacguccacaaacaggugucuggagucgauuugggccucccuagcugggguaaguacgugcugaugucagcugggaucuuaacagcccugaugcuaaugauuuuucucaugacuugcugucgcagaaccaauagggcagagaguauccagcacucccugggcgaaacaggacggaagguuagcgugacuucucagucaggccgaguaauaaguagcugggaguccuauaaaucugggggagaaaccaaacuuuga

SEQ ID NO: 159085 - RNA, 1575 nt, Artificial Sequence
  derived and/or modified CDS sequence (opt3) from glycoprotein__RABV__GQ472542.1
augaucccccaggugcugcuguucgucccucuucugguuuuuagcuccugcuucggcaaguuuccaauuuacaccauaccggacaaauuggggcccuggucuccuaucgauauucaccauuuaucauguccaaacaaucuggugguagaggacgaaggaugcacaaaccuaagugguuucagcuauauggagcucaaggugggcuacaucuccgccauuaaagucaauggguuuacuuguacgggagugguuaccgaagcugagacauauacuaacuucgugggcuacgucaccacaaccuuuaagagaaaacacuucaggcccaugccugaugcaugccgggccgcguauaauuggaagauggcuggugacccacgcuacgaagagucucugcauaaccccuauccugauuaccacuggcuucgaacugugaagacaaccaaagagucgcugguaaucauaucaccaagcguugccgacuuggauccguacgacaagagucuccauucccguguguuucccgggggaaaauguucuggcaucacggucagcuccacuugcuguucaaccaaucacgauuauacaauuuggaugccugaaaacccaagacugggcaccaguugcgacaucuucacuaauagcagggggaagcgggcaucuaaaggagguaagacauguggcuuuguggaugagcgcgggcuguacaagucccucaaaggagccugcaaguuaaaacuguguggcgugcuugguuugagacugauggacgggaccugggucgcuauucaaacgucagaugaaaucaaguggugcagccccgaccagcuaguuaaccuccacgacuuccauagugaugagauagagcaccuggugguagaggaacuugugaaaaagggagaagagugccuggacgcauuggaaacuauuaugacaaccaaaucugucuccuuuaggcggcucagccaucugcgcaaguuagugccuggcuucggcaaggccuauacuaucuucaauaaaacacugauggaggcugaugcccacuacaagucgauucgaaccuggaacgagaucaucccaucuaaagggugucucagaguuggagguaggugccacccccaugugaauggcgucuuuuucaacgggauuauacuuggaccggacggccacgugcugaucccugaaaugcaguccucauugcuacaucagcacauggagcugcucgaaaguagcguaauuccccugaugcauccacuugcggauccuuccacgguuuuuaaggacggugaugaggcagaagacuucguggagguccaccuccccgaugugcacaaacaaaucucuggggucgacuugggccucccaaauuggggaaaguaugugcugauaagcgccggcgcuuuaaccgccucaaugcugaugauuuuucuaaugacauguugccggaaggcaaaccgugcugagaguauccagcauaaccccggggaaacuggacgcaaaguuuccgugaccagccacaaugguagaguaaucucuucaugggagaguuacaagagcggcggggaaacaaaacucuga

SEQ ID NO: 159086 - RNA, 1575 nt, Artificial Sequence; identical to SEQ ID NO: 158575
  derived and/or modified CDS sequence (opt3) from glycoprotein__RABV__GQ472543.1

SEQ ID NO: 159087 - RNA, 1575 nt, Artificial Sequence
  derived and/or modified CDS sequence (opt3) from glycoprotein__RABV__GQ472544.1
augaucccccaggugcugcuguucgucccucuucugguuuuuagcuccugcuucggcaaguuuccaauuuacaccauaccggacaaauuggggcccuggucuccuaucgauauucaccauuuaucauguccaaacaaucuggugguagaggacgaaggaugcacaaaccuaagugguuucagcuauauggagcucaaggugggcuacaucuccgccauuaaagucaauggguuuacuuguacgggagugguuaccgaagcugagacauauacuaacuucgugggcuacgucaccacaaccuuuaagagaaaacacuucaggcccaugccugaugcaugccgggccgcguauaauuggaagauggcuggugacccacgcuacgaagagucucugcauaaccccuauccugauuaccacuggcuucgaacugugaagacaaccaaagagucgcugguaaucauaucaccaagcguugccgacuuggauccguacgacaagagucuccauucccguguguuucccgggggaaaauguucuggcaucacggucagcuccacuugcuguucaaccaaucacgauuauacaauuuggaugccugaaaacccaagacugggcaccaguugcgacaucuucacuaauagcagggggaagcgggcaucuaaaggagguaagacauguggcuuuguggaugagcgcgggcuguacaagucccucaaaggagccugcaaguuaaaacuguguggcgugcuugguuugagacugauggacgggaccugggucgcuauucaaacgucagaugaaaucaaguggugcagccccgaccagcuaguuaaccuccacgacuuccauagugaugagauagagcaccuggugguagaggaacuugugaaaaagagggaagagugccuggacgcauuggaaacuauuaugacaaccaaaucugucuccuuucggcgccucagccaucugcgaaaguuagugccuggauucggcaaggccuauacuaucuucaauaaaacacugauggaggcugaugcccacuacaagucgauuagaaccuggaacgagaucaucccaucuaaaggcugucucaggguugggggacggugccacccccaugugaauggugucuuuuucaacggcauuauacuugggccggacggacacgugcugaucccugaaaugcaguccucauugcuacaucagcacauggagcugcucggcaguagcguaauuccccugaugcauccacuugcggauccuuccacgguuuuuaaggacggugaugaagcagaggacuucguggaaguccaccuccccgaugugcacaaacaaaucucuggggucgacuugggccucccaaauuggggaaaguaugugcugauaagcgccggcgcuuuaaccgccucaaugcugaugauuuuucuaaugacauguugccguaaggcaaaccgcgcugagaguauccagcauaaccccggggagacuggaagaaaaguuuccgugaccagccacaaugguaggguaaucucuucaugggaaaguuacaagagcggcggggagacaaaacucuga

SEQ ID NO: 159088 - RNA, 1575 nt, Artificial Sequence
  derived and/or modified CDS sequence (opt3) from glycoprotein__RABV__GQ472545.1
auggugccccagguccuccuguucguuccucuucugguguuuagcuccugcuucggcaaguuuccaaucuacaccauuccggacaaauuggggcccuggucuccuauagauauccaccauuuaucauguccaaacaaucugguaguggaggacgaaggaugcacaaaccuaagugguuucagcuauauggagcucaaggucggcuacauuuccgccaucaaagugaauggguuuacuuguacgggaguugugaccgaagcugagacauauacuaacuucgucggcuacgugaccacaaccuuuaagagaaaacacuucaggcccaugccugaugcaugccgggccgcguauaauuggaagauggcuggugacccacgcuacgaagagucucugcauaaccccuauccugauuaccacuggcuucgaacuguaaagacaaccaaagagucgcugguuauuaucucaccaagcguggccgacuuggauccguacgacaagagucuccauucccgugucuuucccgggggaaaauguucuggcauaacggugagcuccacuugcuguucaaccaaucacgauuauacaaucuggaugccugaaaacccaagacugggcaccaguugcgacauuuucacuaauagcagggggaagcgggcaucuaaaggagguaagacauguggcuuuguggaugagcgcgggcuguacaagucccucaaaggagccugcaaguuaaaacuguguggcguccuugguuugagacugauggacgggaccuggguugcuauccaaacgucagaugaaauuaaguggugcagccccgaccagcuagugaaccuccacgacuuccauagugaugagaucgagcacuuuguaguggaggaacuggucaaaaagagggaagagugccuugacgcacuggaaacuauaaugacaaccaaaucuguguccuuccggcgcuugagccaucuccgaaagcugguuccuggauucggcaaggccuauacuauuuuuaauaaaacauuaauggaggcugaugcccacuacaagucgaucagaaccuggaacgagauuaucccaucuaaaggcugucugagggucgggggacggugccacccccaugugaaugguguguucuuuaacggcaucauucucgggccggacggacacguacuuauaccugaaaugcaguccucacuguugcaucagcacauggagcuacuggaaaguagcguuaucccccucaugcauccacuggcggauccuuccacgguguucaaggacggcgaugaggcagaagacuuugucgaggugcaccuucccgauguccacaaacaaauuucugguguggaccugggguugccaaauuggggcaaguauguucucaucagcgccggagcucugaccgccuuaaugcugaugauauuccuaaugacauguugccguaaggcaaaccgcgcugagucaauucagcauaaccccggcgaaacugggagaaaagugaguguaaccucccacaauggaagggucaucagcucuugggagucauacaagagugguggcgaaacaaaacucuga

SEQ ID NO: 159089 - RNA, 1575 nt, Artificial Sequence; identical to SEQ ID NO: 158575
  derived and/or modified CDS sequence (opt3) from glycoprotein__RABV__GQ472546.1

SEQ ID NO: 159090 - RNA, 1575 nt, Artificial Sequence
  derived and/or modified CDS sequence (opt3) from glycoprotein__RABV__GQ472547.1
auggugccccaggcccuccuguucgucccucuucuggcuaucccauugugcuuuggcaaguucccgauuuacaccauacccgacaaauuagggccuuggagcccaaucgauauucaccaucuguccugucccaacaaucuaguuguggaggacgaaggaugcacaaaccucucugguuuuucauauauggagcugaagguaggcuacaucagugcaauuaaagugaauggguucacuuguacgggagucgugaccgaagccgagacauauacuaacuuuguuggcuacgugaccacaaccuucaagagaaaacacuuuaggccuacuccagaugcgugccggagcgcuuauaauuggaagauggccggugacccccgcuacgaagagucccuucauaacccuuauccagauuaccacuggcugcgaacagucaagaccacgaaagagucuuucgugaucauaucgccgucaguagcagacuuggaucccuacgacaagagccuccauagucguguuuuuccuagagggaaauguuccggaaucacugugucuagcaccuauugcuccacaaaucacgauuacacuauuuggaugccagaaaaccccaggcugggcaccucaugugacaucuucacaaauagucggggcaagcgcgccagcaaagggucuaagaccugcggauuugucgaugagagaggucuguauaagucccucaaaggcgcuuguaaguuaaaacugugcggggugcuuggauugaggcugauggacggcacguggguggcaauucaaacuucagaugaaacaaagugguguccuccagaccagcuagucaaccuccacgacuuccauagcgaugagaucgagcaccugguuguggaggaacuuguaaagaagcgggaagagugccuggacgccuuggaaaguauaaugaccacuaaaucuguguccuuucgccgacucagccaucugagaaaguuaguccccgguuucgggaaggcuuacacaauuuucaauaaaacccugauggaggccgaugcgcacuauaagucggugaggacguggaacgagaucauuccgucuaaaggaugccuccggguuggcggccguugucacccucaugugaauggggucuuuuucaacggaaucauccuuggucccgacggccacgugcugauuccagaaaugcaguccucauugcuacagcaacauauggagcugcucgaaaguagcguaauaccucugaugcacccccuugcagauccauccaccguuuuuaaggacggggaugaggccgaagacuucguggagguccaucugcccgaugugcacaaacaggucucuggaguggacuugggccucccuagcugggguaaguacguucugaugucagcugggaucuuaacagcccugaugcuaaugauuuuucucaugacuugcugucgcagaaccaauagggcagagaguauccagcacucccugggcgaaacaggacggaaggugagcguaacuucucagucaggccgagucauaaguagcugggaguccuauaaaucugaaggggagaccaaacuuuga

SEQ ID NO: 159091 - RNA, 1575 nt, Artificial Sequence
  derived and/or modified CDS sequence (opt3) from glycoprotein__RABV__GQ472548.1
augaucccccaggugcugcuguucgucccucuucugguuuuuagcuccugcuucggcaaguuuccaauuuacaccauaccggacaaauuggggcccuggucuccuaucgauauucaccauuuaucauguccaaacaaucuggugguagaggacgaaggaugcacaaaccuaagugguuucagcuauauggagcucaaggugggcuacaucuccgccauuaaagucaauggguuuacuuguacgggagugguuaccgaagcugagacauauacuaacuucgugggcuacgucaccacaaccuuuaagagaaaacacuucaggcccaugccugaugcaugccgggccgcguauaauuggaagauggcuggugacccacgcuacgaagagucucugcauaaccccuauccugauuaccacuggcuucgaacugugaagacaaccaaagagucgcugguaaucauaucaccaagcguugccgacuuggauccguacgacaagagucuccauucccguguguuucccgggggaaaauguucuggcaucacggucagcuccacuugcuguucaaccaaucacgauuauacaauuuggaugccugaaaacccaagacugggcaccaguugcgacaucuucacuaauagcagggggaagcgggcaucuaaaggagguaagacauguggcuuuguggaugagcgcgggcuguacaagucccucaaaggagccugcaaguuaaaacuguguggcgugcuugguuugagacugauggacgggaccugggucgcuauucaaacgucagaugaaaucaaguggugcagccccgaccagcuaguuaaccuccacgacuuccauagugaugagauagagcaccuggugguagaggaacuugugaaaaagagggaagagugccuggacgcauuggaaacuauuaugacaaccaaaucugucuccuuucggcgccucagccaucugcgaaaguuagugccuggauucggcaaggccuauacuaucuucaauaaaacacugauggaggcugaugcccacuacaagucgauuagaaccuggaacgagaucaucccaucuaaaggcugucucaggguugggggacggugccacccccaugugaauggugucuuuuucaacggcauuauacuugggccggacggacacgugcugaucccugaaaugcaguccucauugcuacaucagcacauggagcugcucgaaaguagcguaauuccccugaugcauccacuugcggauccuuccacgguuuuuaaggacggcgaugaggcagaagacuucguggagguccaccuccccgaugugcacaaacaaaucucuggugucgacuuggggcucccaaauuggggcaaguaugugcugaccagcgccggagcuuuaacagcccugaugcuaaugauauuucucaugacuuguugccgugagaccaaccgcgcagaaucaauucagagaagucccggcgagacagaaaggaagguuuccgugacuagccauaacgggcggguaaucucuucaugggagaguuacaaaagcggaggugaaaccaagcuguga

SEQ ID NO: 159092 - RNA, 1575 nt, Artificial Sequence
  derived and/or modified CDS sequence (opt3) from glycoprotein__RABV__GQ472549.1
auggugccccaggcccuccuguucgucccucuucuggcuguuccauugugcuuaggcaaguuuccgaucuacaccauucccgacaaacuggggccuuggagcccaauagauauccaccaucuauccugucccaacaaucucgugguagaggacgaaggaugcacaaaccugucugguuucucauauauggagcuuaaggugggcuacauuagugcaaucaaagucaauggguuuacuuguacgggagugguuaccgaagccgagacauauacuaacuucgugggcuacgucaccacaaccuuuaagagaaaacacuucaggccuacuccagaugcgugccggagcgcuuauaauuggaagauggccggugacccccgcuacgaagagucccugcauaacccuuauccagauuaccacugguugcgaacagugaagaccacgaaagagucuuuuguaauuaucucgccgucaguugcagaccucgaucccuacgacaagagccugcauagucguguguucccuagagggaaauguuccggaauaacugucucuagcaccuauugcuccacaaaucacgauuacacuaucuggaugccagaaaaccccaggcugggcaccucaugugacauuuuuacaaauagucggggcaagcgcgccagcaaagggucuaagaccugcggauucguggaugagagaggucucuauaaguccuuaaaaggcgcuuguaagcugaaacuuugcgggguguugggacugaggcuaauggacggcacgugggucgcaauccaaacuucagaugaaacaaagugguguccuccagaccagcucguuaaccugcacgacuuucauagcgaugagauugagcaccuugugguagaggaacuggugaaaaagcgggaagagugcuuggacgcccucgaaaguaucaugaccacuaaaucugucuccuuccgccgacugagccauuuaagaaagcuggugcccgguuuugggaaggcuuacacaauauucaauaaaacccucauggaggccgaugcgcacuauaagucgguuaggacguggaacgagauuaucccgucuaaaggaugccuucgggugggcggccguugucacccucaugucaaugggguguucuuuaacggaauuauccugggucccgacggccacguauugaucccagaaaugcaguccucacuacugcagcaacauauggagcuccuggaaaguagcguuauuccucuuaugcacccccuggcagauccauccaccguguucaaggacggggaugaggccgaagacuuugucgaggugcauuugcccgauguccacaaacacgugucuggaguugaccucggccugccuagcugggguaaguacguguuaguaucagcugggauacugacagcccuaaugcucacuaucuuccugaugaccugcugucgcagaacaaauagggcagagaguauucagcauucccuuggcgaaacuggacggaaggucagcgugaccucucagucaggccgaguuaucaguagcugggaguccuauaaaucugggggagaaacaaaguuguga

SEQ ID NO: 159093 - RNA, 1575 nt, Artificial Sequence
  derived and/or modified CDS sequence (opt3) from glycoprotein__RABV__GQ472550.1
auggugccccaggcccuccuguucgucccucuucuggcuaucccauugugcuuuggcaaguucccgauuuacaccauacccgacaaauuagggccuuggagcccaaucgauauucaccaucuguccugucccaacaaucuaguuguggaggacgaaggaugcacaaaccucucugguuuuucauauauggagcugaagguaggcuacaucagugcaauuaaagugaauggguucacuuguacgggagucgugaccgaagccgagacauauacuaacuuuguuggcuacgugaccacaaccuucaagagaaaacacuuuaggccuacuccagaugcgugccggagcgcuuauaauuggaagauggccggugacccccgcuacgaagagucccuucauaacccuuauccagauuaccacuggcugcgaacagucaagaccacgaaagagucuuucgugaucauaucgccgucaguagcagacuuggaucccuacgacaagagccuccauagucguguuuuuccuagagggaaauguuccggaaucacugugucuagcaccuauugcuccacaaaucacgauuacacuauuuggaugccagaaaaccccaggcugggcaccucaugugacaucuucacaaauagucggggcaagcgcgccagcaaagggucuaagaccugcggauuugucgaugagagaggucuguauaagucccucaaaggcgcuuguaaguuaaaacugugcggggugcuuggauugaggcugauggacggcacguggguggcaauucaaacuucagaugaaacaaagugguguccuccagaccagcuagucaaccuccacgacuuccauagcgaugagaucgagcaccugguuguggaggaacuuguaaagaagcggggugaaugccuggacgccuuggagaguauaaugaccacuaaaucuguguccuuucgccgacucagccaucugagaaaguuaguccccggguucggaaaggcuuacacaauuuucaauaaaacccugauggaagccgaugcgcacuauaagucggugaggacguggaacgagaucauuccgucuaaaggcugccuccggguuggcgggcguugucacccucaugugaauggagucuuuuucaacgguaucauccuuggccccgacgggcacgugcugauuccagagaugcaguccucauugcuacagcaacauauggaacugcucgagaguagcguaauaccucugaugcacccccuugcagauccauccaccguuuuuaaggacggagaugaagccgaggacuucguggaaguccaucugcccgaugugcacaaacaggucucuggcguggacuugggucucccuagcugggggaaguacguucugaugucagcuggcaucuuaacagcccugaugcuaaugauuuuucucaugacuugcugucgcagaaccaauagggcagagaguauccagcacucccugggagagacaggccggaaggugagcguaacuucucagucagggcgagucauaaguagcugggaauccuauaaaucuggaggugagaccaaacuuuga

SEQ ID NO: 159094 - RNA, 1575 nt, Artificial Sequence
  derived and/or modified CDS sequence (opt3) from glycoprotein__RABV__GQ472551.1
auggugccccagguccugcuguucguuccucuucugguguuuagcuccugcuucggcaaguuuccaaucuacaccauuccggacaaauuggggcccuggucuccuauagauauccaccauuuaucauguccaaacaaucugguaguggaggacgaaggaugcacaaaccuaagugguuucagcuauauggagcucaaggucggcuacauuuccgccaucaaagugaauggguuuacuuguacgggaguugugaccgaagcugagacauauacuaacuucgucggcuacgugaccacaaccuuuaagagaaaacacuucaggcccaugccugaugcaugccgggccgcguauaauuggaagauggcuggugacccacgcuacgaagagucucugcauaaccccuauccugauuaccacuggcuucgaacuguaaagacaaccaaagagucgcugguuauuaucucaccaagcguggccgacuuggauccguacgacaagagucuccauucccgugucuuucccgggggaaaauguucuggcauaacggugagcuccacuugcuguucaaccaaucacgauuauacaaucuggaugccugaaaacccaagacugggcaccaguugcgacauuuucacuaauagcagggggaagcgggcaucuaaaggagguaagacauguggcuuuguggaugagcgcgggcuguacaagucccucaaaggagccugcaaguuaaaacuguguggcguccuugguuugagacugauggacgggaccuggguugcuauccaaacgucagaugaaauuaaguggugcagccccgaccagcuagugaaccuccacgacuuccauagugaugagaucgagcaccugguaguggaggaacuugucaaaaagagggaagagugccuggacgcauuggaaacuauaaugacaaccaaaucuguguccuuucggcgccucagccaucugcgaaaguuaguuccuggauucggcaaggccuauacuauuuucaauaaaacacugauggaggcugaugcccacuacaagucgaucagaaccuggaacgagauuaucccaucuaaaggcugucucagggucgggggacggugccacccccaugugaaugguguguuuuucaacggcaucauucuugggccggacggacacguacugauaccugaaaugcaguccucauugcuacaucagcacauggagcugcucgaaaguagcguuaucccccugaugcauccacuugcggauccuuccacgguguuuaaggacggcgaugaggcagaagacuucgucgaggugcaccuccccgauguccacaaacaaauuucugguguggacuuggggcucccaaauuggggcaaguauguucugaucagcgccggagcuuuaaccgcccugaugcuaaugauauuucucaugacauguugccguaaggcaaaccgcgcugagucaaugcagcauaaccccggcgaaacugggagaaaagugaguguaaccucccacaauggaagggucauuagcucuugggagucauacaagagugguggcgaaacaaaacuguga

SEQ ID NO: 159095 - RNA, 1575 nt, Artificial Sequence
  derived and/or modified CDS sequence (opt3) from glycoprotein__RABV__GQ472552.1
augaucccccaggcccugcuguucgugccucuucuggucuuuagcuugugcuucggcaaguuuccaauuuacaccauaccggacaaauuagggcccugguccccuaucgauauucaccaucugucuuguccaaacaaucuaguuguggaggacgaaggaugcacaaaccucucagguuucaguuauauggagcugaagguaggcuacaucagcgcuauuaaagugaauggguuuacuuguacgggagucgugaccgaagcagagacauauacuaacuucguuggcuacgugaccacaaccuuuaagagaaaacacuucaggcccacuccugaugccugccgggcggcuuauaauuggaagauggccggugacccacgcuacgaagagucccuucauaaccccuauccugauuaccacuggcugcgaacagucaagaccacgaaagagucuuuggugaucauaucgccaucaguaagcgaccucgauccguacgacaagagucugcauucccguguuuuucccucugggaaauguagcggaaucacuguguccucaaccuauugcccuacaaaucacgauuacacuauuuggaugccagaaaaccccagacugggcaccaguugugacaucuucacaaauagcaggggcaagcgggcaucuaaaggguccaagaccugcggauuugucgaugagcgcggucucuauaagucauuaaaaggcgccuguaagcugaaacuuugcgggguguugggacugagacuaauggacggcacgugggcugcaauucaagccagcgaugaagcuaagugguguccuccagaccagcucgugaacauccacgacuucaggagugaugagauagagcaucuggucguugaggaacuugugaaaaagcgggaagagugccuggacgccuuggaaucuauuaugacuacaaaauccgugagcuuucgccgacucucgcaccugagaaaguuaguacccgguuucgggaaggcguacaccaucuucaauaaaacucugauggaggcagaugcccauuauaagucugucaggacauggaacgagauuaucccguccaaaggaugccuccgggugggcggccguugucacccucacguuaaugggguguuuuucaacggaaucauucuuggucccgacggccauguccugauaccagaaaugcagucaaguuugcuacagcaacacauggagcugcucgaaagcuccgugaucccucugaugcauccccuugcugauccaucuaccguauuuaaggacggggaugaggccgaagacuucguugaggugcaccuccccgauguccauaaacaggugagcggagucgacuugggccucccuucaugggguaaguacgugcugaugaguguuggggcaaugauugcuuuaaugcugaugaucuuucuaacgaccugcugucgcaaggccaauggcgcggaguccauacagcacagacucggagaaacaggcaggaaagugagcguaacuucucagucagggcgggucauuaguagcugggaguccuauaagucuggaggugaaaccaaacuguga

SEQ ID NO: 159096 - RNA, 1575 nt, Artificial Sequence; identical to SEQ ID NO: 159091
  derived and/or modified CDS sequence (opt3) from glycoprotein__RABV__GQ472553.1

SEQ ID NO: 159097 - RNA, 1575 nt, Artificial Sequence; identical to SEQ ID NO: 158575
  derived and/or modified CDS sequence (opt3) from glycoprotein__RABV__GQ472554.1

SEQ ID NO: 159098 - RNA, 1575 nt, Artificial Sequence
  derived and/or modified CDS sequence (opt3) from glycoprotein__RABV__GQ472555.1
auggugccccagguccuccuguucguuccucuucugguguuuagcuccugcuucggcaaguuuccaaucuacaccauuccggacaaauuggggcccuggucuccuauagauauccaccauuuaucauguccaaacaaucugguaguggaggacgaaggaugcacaaaccuaagugguuucagcuauauggagcucaaggucggcuacauuuccgccaucaaagugaauggguuuacuuguacgggaguugugaccgaagcugagacauauacuaacuucgucggcuacgugaccacaaccuuuaagagaaaacacuucaggcccaugccugaugcaugccgggccgcguauaauuggaagauggcuggugacccacgcuacgaagagucucugcauaaccccuauccugauuaccacuggcuucgaacuguaaagacaaccaaagagucgcugguuauuaucucaccaagcguggccgacuuggauccguacgacaagagucuccauucccgugucuuucccgggggaaaauguucuggcauaacggugagcuccacuugcuguucaaccaaucacgauuauacacuguggaugccugaaaacccaagacugggcaccaguugcgacaucuucacuaauagcagggggaagcgggcaucuaaaggagguaagacauguggcuuuguggaugagcgcgggcucuacaaguccuuaaaaggagccugcaagcugaaacuuuguggcgucuugggucugagacuaauggacgggaccuggguugcuauucaaacgucagaugaaaucaaguggugucccccugaccagcucgugaaccugcacgacuuccauagcgaugagauugagcaccuuguaguggaggaacuggucaaaaagagggaagagugcuuggacgcacucgaaacuaucaugacaaccaaaagugugucuuuucggcgccugucccauuuacgaaagcugguuccaggauucggcaaggccuauacuauauucaauaaaacacucauggaggcugaugcccacuacaagagcauuagaaccuggaacgagaucauucccucgaaaggcugccuuagggucgggggacggugccacccgcaugugaaugguguguuuuucaacggcaucauccuggggccugacggacacguauugauucccgaaaugcagucuucccuacugcaucagcacauggagcuccuggaaucaaguguuauaccacuuaugcauccucuggcggaucccagcacgguguuuaaggacggcgaugaggcagaagacuucgucgaggugcacuugccagaugagcacaaacaaaucuccggugucgaccucgggcugcccaauuggcguaaguauguguuaauuucugccggcgcucugaccgcccuaaugcucaugaucuuucugaugacauguugccgcaaggcaaacagagcugaaagcauacagcauaacccuggagagacuggcaggaaaguuucagugaccaguccaaaugggcggguaauuuccagcugggaaucuuacaagucaggaggugagacaaaacuuuga

SEQ ID NO: 159099 - RNA, 1575 nt, Artificial Sequence
  derived and/or modified CDS sequence (opt3) from glycoprotein__RABV__GQ472556.1
auggugccccagguccuccuguucguuccucuucugguguuuagcuccugcuucggcaaguuuccaaucuacaccauuccggacaaauuggggcccuggucuccuauagauauccaccauuuaucauguccaaacaaucugguaguggaggacgaaggaugcacaaaccuaagugguuucagcuauauggagcucaaggucggcuacauuuccgccaucaaagugaauggguuuacuuguacgggaguugugaccgaagcugagacauauacuaacuucgucggcuacgugaccacaaccuuuaagagaaaacacuucaggcccaugccugaugcaugccggacugccuauaauuggaagauggcgggugacccacgcuacgaagagucucugcauaaccccuauccugauuaccacuggcuucgaacaguaaagaccacgaaagagucgcugguuauuaucucaccaagcguggcugacuuggauccguacgacaagagucuccauucccgugucuuucccgggggaaaauguucuggcauaacugugagcucaaccugcuguuccacaaaucacgauuauacuaucuggaugccugaaaacccaagacugggcaccaguugcgacauuuucacaaauagcagggggaagcgggccucuaaaggagguaagaccuguggcuuuguggaugagcgcggguccuacaagucacugaaaggagcaugcaagcucaaauuauguggcguccugggucuuagauugauggacgggacguggguugccauccaaacuagcgaugaaauuaaguggugcagucccgaccagcuggugaaccuacacgacuuccauucugaugagaucgagcaccucguaguggaggaacuggucaaaaagagggaagagugccuugacgcucuggaaacaauaaugaccacuaaauccgugagcuuucggcgcuugucgcaucuccgaaagcugguuccuggauucggcaaggcauauacaauuuucaauaaaaccuuaauggaggccgaugcucacuacaagucuaucagaacguggaacgagauuaucccauccaaaggcugucugagggucgggggacggugccacccccaugugaaugguguguuuuucaacggcaucauucucgggccggacggacacguacuuauaccugaaaugcagucaagucuguugcaucagcacauggagcuacuggaaagcuccguuaucccccucaugcauccacuggccgauccuucuaccguguuuaaggacggcgaugaggcggaagacuucgucgaggugcaccuucccgauguccacaaacaaauuagcgguguggaccugggguugccaaauuggggcaagcauguucucaucucagcaggagcccugacagcuuuaaugcugaugauauuucuaaugacuuguugccguaaggccaaccgcgcagagaguauucagcacaaccccggcgaaaccgggagaaaaguguccguaacaagccauaauggaagggucaucucuucaugggagaguuauaagagcgguggcgaaacuaaacucuga

SEQ ID NO: 159100 - RNA, 1575 nt, Artificial Sequence; identical to SEQ ID NO: 158575
  derived and/or modified CDS sequence (opt3) from glycoprotein__RABV__GQ472557.1

SEQ ID NO: 159101 - RNA, 1575 nt, Artificial Sequence
  derived and/or modified CDS sequence (opt3) from glycoprotein__RABV__GQ472558.1
auggcaccccaggcucuccuguucgugccucuucuggcagucccauugugcuuaggcaaguuuccgaucuacaccauucccgacaaacuggggccuuggagcccaauagauauccaccaucuauccugucccaacaaucucguuguggaggacgaaggaugcacaaaccugucugguuucucauauauggagcuuaagguaggcuacauuagugccaucaaagugaauggguuuacuuguacgggagucgugaccgaagcggagacauauacuaacuucguuggcuacgugaccacaaccuuuaagagaaaacacuucaggccuacuccagaugcuugccggagcgccuauaauuggaagauggccggugacccccgcuacgaagagucccugcauaacccuuauccagauuaccacugguugcgaacagucaagaccacgaaagagucuuuugugauuaucucgccgucaguagccgaccucgaucccuacgacaagagccugcauagucguguuuucccuagagggaaauguuccggaauaacugugucuagcaccuauugcuccacaaaucacgauuacacuaucuggaugccagaaaaccccaggcugggcaccucaugugacauuuuuacaaauagucggggcaagcgcgcuagcaaagggucuaagaccugcggauucgucgaugagagaggucucuauaaguccuuaaaaggcgcauguaagcugaaacuuugcgggguguugggacugaggcuaauggacggcacguggguggccauccaaacuucagaugaaacaaagugguguccuccagaccagcucgucaaccugcacgacuuucauagcgaugagauugagcaccuuguuguggaggaacuggugaaaaagcgggaagagugcuuggacgcucucgaaaguaucaugaccacuaaaucuguauccuuccgccgacugagccauuuaagaaagcugguccccgguuuugggaaggccuacacaauauucaauaaaacccucauggaggcggaugcacacuauaagucggugaggacguggaacgagauuaucccgucuaaaggaugccuucggguuggcggccguugucacccucaugugaauggggucuucuuuaacggaauuauccugggucccgacggccacguguugaucccagaaaugcaguccucacuacugcagcaacauauggagcuccuggaaaguagcguaauuccucuuaugcacccccuggccgauccauccaccguuuucaaggacggggaugaggcugaagacuuuguggagguccauuugcccgaugugcacaaacaggucucuggaguggaccucggccugccuagcugggguaaguacguuuuaaugucagccgggauacugacagcacuaaugcucacuaucuuccugaugaccugcugucgcagaacaaauagggcugagaguauucagcacucccuuggcgaaacuggacggaaggugagcguaaccucucagucaggccgagucaucaguagcugggaguccuauaaaucugggggagaaacaaaguuguga

SEQ ID NO: 159102 - RNA, 1575 nt, Artificial Sequence
  derived and/or modified CDS sequence (opt3) from glycoprotein__RABV__GQ472559.1
auggccagccaggcucuccuguucgugccccuucuggcaaucccuuugugcuuuggcaaguucccaauuuacaccauaccggacaaauuagggcccugguccccuaucgauauucaccaucugucuuguccaaacaaucuagucguugaggacgaaggaugcacaaaccucucagguuuuaguuauauggagcugaaggugggcuacaucagcgccauuaaaguaaauggguucacuuguacgggaguggucaccgaagcggagacauauacuaacuuugugggcuacguuaccacaaccuucaagagaaaacacuuuaggcccacuccugaugcuugccgguccgccuauaauuggaagauggccggugacccacgcuacgaagagucucuucauaaccccuauccugauuaccacuggcugcgaacagugaagaccacgaaagagucguuggucaucauaucaccaagcguggcagaccucgauccguacgacaagagucugcauucccguguauuccccagagggaaauguucuggaaucacuguuagcuccaccuauugcucaacaaaucacgauuacacuauuuggaugccugaaaacccaaggcugggcaccaguugugacaucuuuacaaauagccggggcaagcgcgcuucuaaaggguccaagaccugcggauucguggaugagagaggucucuauaagucauuaaaaggcgcauguaagcugaaacuuugcggggucuugggacugaggcuaauggacggcacguggguggccauucaaacuagcgaugaaacaaaguggugucccccugaccagcucgugaaccugcacgacuuucauagugaugagaucgagcaccuugucguugaggaacuggugaaaaagcgggaagagugcuuggacgcucucgaaucuauaaugaccacuaaauccguaucguuccgccgacugucgcauuuaagaaagcuggugccagguuuugggaaggccuacacaauuuucaauaaaacccucauggaggcggaugcacacuauaagucugucaggacguggaacgagaucauucccuccaaaggaugccuucgggugggcggccguugucacccgcauguuaaugggguguucuuuaacggaaucauccuggguccugacggccacgucuugauucccgaaaugcagucaagucuacugcagcaacauauggagcuccuggaaagcuccgugauaccacuuaugcacccucuggccgaucccucuaccguauucaaggacggggaugaggcugaagacuuuguugaggugcauuugccagauguccacaaacaggugagcggagucgaccucggccugcccucaugggguaaguacguguuaaugagugccgggauccugacagcacuaaugcucaugauuuuccugaugacuugcugucgcagaaccaauagggcugaguccauccagcacagccuuggcgaaacaggacggaagguuucugugacuucacagaguggccgaguaauaagcuccugggagucuuauaaaagcgggggagaaaccaaguuguga

SEQ ID NO: 159103 - RNA, 1575 nt, Artificial Sequence
  derived and/or modified CDS sequence (opt3) from glycoprotein__RABV__GQ472560.1
auggugccccagguccugcuguucguuccucuucugguguuuagcuccugcuucggcaaguuuccaaucuacaccauuccggacaaauuggggcccuggucuccuauagauauccaccauuuaucauguccaaacaaucugguaguggaggacgaaggaugcacaaaccuaagugguuucagcuauauggagcucaaggucggcuacauuuccgccaucaaagugaauggguuuacuuguacgggaguugugaccgaagcugagacauauacuaacuucgucggcuacgugaccacaaccuuuaagagaaaacacuucaggcccacuccugaugcaugccgggccgcguauaauuggaagauggcuggugacccacgcuacgaagagucucugcauaaccccuauccugauuaccacuggcuucgaacaguaaagaccacgaaagagucgcugguuauuaucucaccaagcguggccgacuuggauccguacgacaagagucuccauuccggggucuuucccggaggcaaauguucuggcauaacugugagcucaaccugcuguuccacaaaucacgauuauacuaucuggaugccugaaaacccacgucuggggaccaguugcgacauuuucacaaauagcagaggaaagagggcaucuaaagguggcaagaccuguggguuuguggaugagcggggacuguacaagucccucaaaggcgccugcaaguuaaaacugugugguguccuuggguugcgccugauggacggaacguggguugcuauccaaacuucagaugaaauuaaguggugcagccccgaccagcuagugaaccuccacgacuuccauagugaugagaucgagcaccugguaguggaggaacuugucaaaaagagaaaagaaugccuggacgcauuggagacaauaaugaccacuaagucuguguccuuuaggcggcucagccaucugcgcaaguuaguuccuggcuucggcaaagccuauacaauuuucaauaagacccugauggaagcugaugcccacuacaaaucgauccgaacguggaacgagauuaucccaucuaaggggugucucagagugggagguaggugccacccccaugucaauggcguguuuuucaacgggaucauucuuggaccggacggccacguacugauaccugagaugcaguccucauugcuacaucagcacauggaacugcucgagaguagcguuaucccccugaugcauccacuugcggauccuuccaccguguuuaaagacggugaugaagcagaggacuucgucgaagugcaccuccccgauguccacaagcaaauuucugggguggacuugggccucccaaauuggggaaaguauguucugaucagcgccggcgcuuuaacagcccugaugcuaaugauauuucucaugacuuucugucggaaagcaaaccgugcugagucaauucagcauaaccccggggagaccggacgcaaggugaguguaacaucccacaaugguagagucaucagcucuugggaaucauacaaaaguggcggggagacuaagcuguga

SEQ ID NO: 159104 - RNA, 1575 nt, Artificial Sequence; identical to SEQ ID NO: 158875
  derived and/or modified CDS sequence (opt3) from glycoprotein__RABV__GQ857450.1

SEQ ID NO: 159105 - RNA, 1575 nt, Artificial Sequence
  derived and/or modified CDS sequence (opt3) from glycoprotein__RABV__GQ857451.1
augaucccccaggugcugcuguucgucccucuucugguuuuuagcuccugcuucggcaaguuuccaauuuacaccauaccggacaaauuggggcccuggucuccuaucgauauucaccauuuaucauguccaaacaaucuggugguagaggacgaaggaugcacaaaccuaagugguuucagcuauauggagcucaaggugggcuacaucuccgccauuaaagucaauggguuuacuuguacgggagugguuaccgaagcugagacauauacuaacuucgugggcuacgucaccacaaccuuuaagagaaaacacuucaggcccacuccugaugcaugccgggccgcguauaauuggaagauggcuggugacccacgcuacgaagagucucugcauaaccccuauccugauuaccacuggcuucgaacagugaagaccucgaaagagucacugguaaucauaagcccaaguguugccgacuuggauccguacgacaagucccuccauucucguguguuucccgggggaaaauguagcggcaucacggucuccucaacuugcuguaguaccaaucacgauuauacaauuuggaugccugaaaacccaagacugaggacuagcugcgacaucuucaccaauucucggggcaagcgcgcauccaaagggggaaagacaugugguuuuguggaugagagaggccuguacaagucacucaaaggggccugcaaguuaaaacuguguggagugcuuggcuugaggcugauggacgguaccugggucgcuauucaaacgagcgaugaaaucaaguggugcagucccgaccagcuaguuaaccuccacgacuuccauucugaugagauagagcaccuggugguagaggaacuugugaaaaagcgggaagagugccuggacgcauuggaaacuauuaugacaaccaaauccgucagcuuucgccgacucucgcaucugagaaaguuagugccuggguucggaaaggccuauacuaucuucaauaaaacacugauggaggcugaugcccacuacaagucuauuaggaccuggaacgagaucaucccauccaaaggcugucuccggguuggcgggcguugccacccccaugugaauggagucuuuuucaacgguauuauacuuggcccggacgggcacgugcugaucccugaaaugcagucaaguuugcuacaucagcacauggagcugcucgaaagcuccguaauuccccugaugcauccacuugcggauccuucuacgguuuuuaaggacggagaugaggcagaagacuucguggagguccaccuccccgaugugcacaaacaaaucagcggcgucgacuugggucucccaaauugggggaaguaugugcugguuucagccggcgcuuuaaccgcccugaugcuaaugauauuucucaugacauguugccgcaagacuaacagagcagagaguauucagcauucccccggagaaaccggcaggaaagugagcguaacaucucacaacgggcgggucaucucaaguugggagagcuacaagucccgaggagaaacuaaacuguga

SEQ ID NO: 159106 - RNA, 1575 nt, Artificial Sequence; identical to SEQ ID NO: 158875
  derived and/or modified CDS sequence (opt3) from glycoprotein__RABV__GQ857452.1

SEQ ID NO: 159107 - RNA, 1575 nt, Artificial Sequence
  derived and/or modified CDS sequence (opt3) from glycoprotein__RABV__GQ857453.1
augaucccccaggugcugcuguucgucccucuucugguuuuuagcuccugcuucggcaaguuuccaauuuacaccauaccggacaaauuggggcccuggucuccuaucgauauucaccauuuaucauguccaaacaaucuggugguagaggacgaaggaugcacaaaccuaagugguuucagcuauauggagcucaaggugggcuacaucuccgccauuaaagucaauggguuuacuuguacgggagugguuaccgaagcugagacauauacuaacuucgugggcuacgucaccacaaccuuuaagagaaaacacuucaggcccacuccugaugcaugccgggccgcguauaauuggaagauggcuggugacccacgcuacgaagagucucugcauaaccccuauccugauuaccacuggcuucgaacagugaagaccucgaaagagucacugguaaucauaagcccaaguguugccgacuuggauccguacgacaagucccuccauucucguguguuucccgggggaaaauguagcggcaucacggucuccucaacuugcuguaguaccaaucacgauuauacaauuuggaugccugaaaacccaagacugggcacuagcugcgacaucuucaccaauucuagggggaagcgggcauccaaaggagguaagacauguggcuuuguggaugagcgcgggcuguacaagucacucaaaggagccugcaaguuaaaacuguguggcgugcuugguuugagacugauggacgggaccugggucgcuauucaaacgagcgaugaaaucaaguggugcagucccgaccagcuaguuaaccuccacgacuuccauucugaugagauagagcaccuggugguagaggaacuugugaaaaagagggaagagugccuggacgcauuggaaacuauuaugacaaccaaauccgucagcuuucggcgccucucgcaucugcgaaaguuagugccuggauucggcaaggccuauacuaucuucaauaaaacacugauggaggcugaugcccacuacaagucuauuagaaccuggaacgagaucaucccauccaaaggcugucucaggguugggggacggugccacccccaugugaauggugucuuuuucaacggcauuauacuugggccggacggacacgugcugaucccugaaaugcagucaaguuugcuacaucagcacauggagcugcucgaaagcuccguaauuccccugaugcauccacuugcggauccuucuacgguuuuuaaggacggcgaugaggcagaagacuucguggagguccaccuccccgaugugcacaaacaaaucagcggugucgacuuggggcucccaaauuggggcaaguaugugcugguuucagccggagcuuuaaccgcccugaugcuaaugauauuucucaugacauguugccguaagacuaaccgcguggagaguauucagcauucccccggcgaaaccgggagaaaaguaagcgucacaucucacaacggaagggugaucucaaguugggagagcuacaaguccgguggcgaaacuaaacuguga

SEQ ID NO: 159108 - RNA, 1575 nt, Artificial Sequence; identical to SEQ ID NO: 158875
  derived and/or modified CDS sequence (opt3) from glycoprotein__RABV__GQ857454.1

SEQ ID NO: 159109 - RNA, 1575 nt, Artificial Sequence
  derived and/or modified CDS sequence (opt3) from glycoprotein__RABV__GQ857455.1
augaucccccaggugcugcuguucgucccucuucugguuuuuagcuccugcuucggcaaguuuccaauuuacaccauaccggacaaauuggggcccuggucuccuaucgauauucaccauuuaucauguccaaacaaucuggugguagaggacgaaggaugcacaaaccuaagugguuucagcuauauggagcucaaggugggcuacaucuccgccauuaaagucaauggguuuacuuguacgggagugguuaccgaagcugagacauauacuaacuucgugggcuacgucaccacaaccuuuaagagaaaacacuucaggcccacuccugaugcaugccgggccgcguauaauuggaagauggcuggugacccacgcuacgaagagucucugcauaaccccuauccugauuaccacuggcuucgaacagugaagaccucgaaagagucacugguaaucauaagcccaaguguugccgacuuggauccguacgacaagucccuccauucucguguguuucccgggggaaaauguagcggcaucacggucuccucaacuugcuguaguaccaaucacgauuauacaauuuggaugccugaaaacccaagacugggcacuagcugcgacaucuucaccaauucuagggggaagcgggcauccaaaggagguaagacauguggcuuuguggaugagcgcgggcuguacaagucacucaaaggagccugcaaguuaaaacuguguggcgugcuugguuugagacugauggacgggaccugggucgcuauucaaacgagcgaugaaaucaaguggugcagucccgaccagcuaguuaaccuccacgacuuccauucugaugagauagagcaccuggugguagaggaacuugugaaaaagagggaagagugccuggacgcauuggaaacuauuaugacaaccaaauccgucagcuuucggcgccucucgcaucugcgaaaguuagugccuggauucggcaaggccuauacuaucuucaauaaaacacugauggaggcugaugcccacuacaagucuauuagaaccuggaacgagaucaucccauccaaaggcugucucaggguugggggacggugccacccccaugugaauggugucuuuuucaacggcauuauacuugggccggacggacacgugcugaucccugaaaugcagucaaguuugcuacaucagcacauggagcugcucgaaagcuccguaauuccccugaugcauccacuugcggauccuucuacgguuuuuaaggacggcgaugaggcagaagacuucguggagguccaccuccccgaugugcacaaacaaaucagcggugucgacuuggggcucccaaauuggggcaaguaugugcugguuucagccggagcuuuaaccgcccuggugcuaaugauauuucucaugacauguugccguaagacuaaccgcgcagagaguauucagcauucccccggcgaaaccgggagaaaaguaagcgucacaucucacaacggaagggugaucucaaguugggagagcuacaaguccgguggcgaaacuaaacuguga

SEQ ID NO: 159110 - RNA, 1575 nt, Artificial Sequence; identical to SEQ ID NO: 158875
  derived and/or modified CDS sequence (opt3) from glycoprotein__RABV__GQ857459.1

SEQ ID NO: 159111 - RNA, 1575 nt, Artificial Sequence; identical to SEQ ID NO: 158875
  derived and/or modified CDS sequence (opt3) from glycoprotein__RABV__GQ857460.1

SEQ ID NO: 159112 - RNA, 1575 nt, Artificial Sequence
  derived and/or modified CDS sequence (opt3) from glycoprotein__RABV__GQ857461.1
augaucccccaggugcugcuguucgucccucuucugguuuuuagcuccugcuucggcaaguuuccaauuuacaccauaccggacaaauuggggcccuggucuccuaucgauauucaccauuuaucauguccaaacaaucuggugguagaggacgaaggaugcacaaaccuaagugguuucagcuauauggagcucaaggugggcuacaucuccgccauuaaagucaauggguuuacuuguacgggagugguuaccgaagcugagacauauacuaacuucgugggcuacgucaccacaaccuuuaagagaaaacacuucaggcccacuccugaugcaugccgggccgcguauaauuggaagauggcuggugacccacgcuacgaagagucucugcauaaccccuauccugauuaccacuggcuucgaacagugaagaccucgaaagagucacugguaaucauaagcccaaguguugccgacuuggauccguacgacaagucccuccauucucguguguuucccgggggaaaauguagcggcaucacggucuccucaacuugcuguaguaccaaucacgauuauacaauuuggaugccugaaaacccaagacugggcacuagcugcgacaucuucaccaauucuagggggaagcgggcauccaaaggagguaagacauguggcuuuguggaugagcgcgggcuguacaagucacucaaaggagccugcaaguuaaaacuguguggcgugcuugguuugagacugauggacgggaccugggucgcuauucaaacgagcgaugaaaucaaguggugcagucccgaccagcuaguuaaccuccacgacuuccauucugaugagauagagcaccuggugguagaggaacuugugaaaaagagggaagagugccuggacgcauuggaagccauuaugacuacaaaauccgucagcuuucggcgccucucgcaucugcgaaaguuagugccuggauucggcaaggcuuauaccaucuucaauaaaacucugauggaggccgaugcgcacuacaagucuauuagaacauggaacgagaucaucccauccaaaggcugucucaggguugggggacggugccacccccaugugaauggugucuuuuucaacggcauuauacuugggccggacggacacgugcugaucccugaaaugcagucaaguuugcuacaucagcacauggagcugcucgaaagcuccguaauuccccugaugcauccacuugcagauccuucuaccguuuuuaaggacggcgaugaggccgaagacuucguggagguccaccuccccgaugugcacaaacaaaucagcggugucgacuuggggcucccaaauuggggcaaguaugugcugguuucagcuggagccuuaacggcacugaugcuaaugauauuucucaugaccuguugccguaagacaaaccgcgcugagaguauucagcauucccccggcgaaacugggagaaaagugagcguaaccucucacaacggaagggucaucucaaguugggagagcuacaaguccgguggcgaaacaaaacuguga

SEQ ID NO: 159113 - RNA, 1575 nt, Artificial Sequence; identical to SEQ ID NO: 158875
  derived and/or modified CDS sequence (opt3) from glycoprotein__RABV__GQ857463.1

SEQ ID NO: 159114 - RNA, 1575 nt, Artificial Sequence; identical to SEQ ID NO: 158875
  derived and/or modified CDS sequence (opt3) from glycoprotein__RABV__GQ857464.1

SEQ ID NO: 159115 - RNA, 1575 nt, Artificial Sequence
  derived and/or modified CDS sequence (opt3) from glycoprotein__RABV__GQ857465.1
augaucccccaggugcugcuguucgucccucuucugguuuuuagcuccugcuucggcaaguuuccaauuuacaccauaccggacaaauuggggcccuggucuccuaucgauauucaccauuuaucauguccaaacaaucuggugguagaggacgaaggaugcacaaaccuaagugguuucagcuauauggagcucaaggugggcuacaucuccgccauuaaagucaauggguuuacuuguacgggagugguuaccgaagcugagacauauacuaacuucgugggcuacgucaccacaaccuuuaagagaaaacacuucaggcccaugccugaugcaugccgggccgcguauaauuggaagauggcuggugacccacgcuacgaagagucucugcauaaccccuauccugauuaccacuggcuucgaacugugaagacaaccaaagagucgcugguaaucauaucaccaagcguugccgacuuggauccguacgacaagagucuccauucccguguguuucccgggggaaaauguucuggcaucacggucagcuccacuugcuguucaaccaaucacgauuauacaauuuggaugccugaaaacccaagacugggcaccaguugcgacaucuucacuaauagcagggggaagcgggcaucuaaaggagguaagacauguggcuuuguggaugagcgcgggcuguacaagucccucagaggagccugcaaauuaaagcuguguggcgugcuugguuugaggcugauggacgggaccugggucgcuauucaaacgucagaugaaaucaaauggugcagccccgaccagcuaguuaaccuccacgacuuccauagugaugagauagagcaccuggugguagaggaacuugugaagaaacgggaagagugccuggacgcauuggaaacuauuaugacaaccaagucugucuccuuucgccgacucagccaucugagaaaauuagugccuggauucggcaaggccuauacuaucuucaauaagacacugauggaggcugaugcccacuacaaaucgauuaggaccuggaacgagaucaucccaucuaagggcugucuccggguugggggacguugccacccccaugugaauggugucuuuuucaacggcauuauacuugggccggacggacacgugcugaucccugaaaugcaguccucauugcuacaucagcacauggagcugcucgaaaguagcguaauuccccugaugcauccacuugcggauccuuccacgguuuuuaaagacggcgaugaggcagaagacuucguggagguccaccuccccgaugugcacaagcaaaucucuggugucgacuuggggcucccaaauuggggcaaauaugugcugauaagcgccggagcuuuaaccgcccugaugcuaacaauuuuucucaugacuuguugccgcaagaccaacagagcagagucaauccagcauagucccggcgaaacagggaggaagguuuccgugacuagccacaacggacggguaaucucuucaugggagaguuacaaaagcgguuccgaaaccaagcuguga

SEQ ID NO: 159116 - RNA, 1575 nt, Artificial Sequence
  derived and/or modified CDS sequence (opt3) from glycoprotein__RABV__GQ857466.1
augaucccccaggugcugcuguucgucccucuucugguuuuuagcuccugcuucggcaaguuuccaauuuacaccauaccggacaaauuggggcccuggucuccuaucgauauucaccauuuaucauguccaaacaaucuggugguagaggacgaaggaugcacaaaccuaagugguuucagcuauauggagcucaaggugggcuacaucuccgccauuaaagucaauggguuuacuuguacgggagugguuaccgaagcugagacauauacuaacuucgugggcuacgucaccacaaccuuuaagagaaaacacuucaggcccaugccugaugcaugccgggccgcguauaauuggaagauggcuggugacccacgcuacgaagagucucugcauaaccccuauccugauuaccacuggcuucgaacugugaagacaaccaaagagucgcugguaaucauaucaccaagcguugccgacuuggauccguacgacaagagucuccauucccguguguuucccgggggaaaauguucuggcaucacggucagcuccacuugcuguucaaccaaucacgauuauacaauuuggaugccugaaaacccaagacugggcaccaguugcgacaucuucacuaauagcagggggaagcgggcaucuaacggagguaaaacauguggcuuuguggaugagcgcgggcuguacaagucccucaagggagccugcaaauuaaagcuguguggcgugcuugguuugagacugauggacgggaccugggucgcuauucaaacgucagaugaaaucaaauggugcagccccgaccagcuaguuaaucuccacgacuuccauagugaugagauagagcaccuggugguagaggaacuugugaagaaaagggaagagugccuggacgcauuggaaacuauuaugacaaccaagucugucuccuuucggcgccucagccaucugcgaaaauuagugccuggauucggcaaggccuauacuaucuucaacaagacacugauggaggcugaugcccacuacaaaucgauuagaaccuggaaugagaucaucccaucuaagggcugucucaggguugggggacggugccacccccaugugaacggugucuuuuucaauggcauuauacuugggccggacggacacgugcugaucccugaaaugcaguccucauugcuacaucagcacauggagcugcucgaaaguagcguaauuccccugaugcauccacuugcggauccuuccacgguuuuuaaagacggcgaugaggcagaagacuucguggagguccaccuccccgaugugcacaagcaaaucucugguauagacuuggggcucccaaacuggggcaaauauguccugauuagcgccggagcuuuaaccgcccugaugcuaacaaucuuucucaugacuuguugccguaagaccaaccgcgcagagucaauccagcauagucccggcgaaacagggagaaagguguccguuacuagccacaauggaagggugauuucuucaugggagaguuacaaaagcgguuccgaaaccaagcuguga

SEQ ID NO: 159117 - RNA, 1575 nt, Artificial Sequence
  derived and/or modified CDS sequence (opt3) from glycoprotein__RABV__GQ857467.1
augaucccccaggugcugcuguucgucccucuucugguuuuuagcuccugcuucggcaaguuuccaauuuacaccauaccggacaaauuggggcccuggucuccuaucgauauucaccauuuaucauguccaaacaaucuggugguagaggacgaaggaugcacaaaccuaagugguuucagcuauauggagcucaaggugggcuacaucuccgccauuaaagucaauggguuuacuuguacgggagugguuaccgaagcugagacauauacuaacuucgugggcuacgucaccacaaccuuuaagagaaaacacuucaggcccaugccugaugcaugccgggccgcguauaauuggaagauggcuggugacccacgcuacgaagagucucugcauaaccccuauccugauuaccacuggcuucgaacugugaagacaaccaaagagucgcugguaaucauaucaccaagcguugccgacuuggauccguacgacaagagucuccauucccguguguuucccgggggaaaauguucuggcaucacggucagcuccacuugcuguucaaccaaucacgauuauacaauuuggaugccugaaaacccaagacugggcaccaguugcgacaucuucacuaauagcagggggaagcgggcaucuaaauggggaaagacaugugguuuuguggaugagcgcggccuguacaagucccucaaaggggccugcaaguuaaaacuguguggagugcuuggcuugagacugauggacgguaccugggucgcuauucaaacgucagaugaaaucaaguggugcagccccgaccagcuaguuaaccuccacgacuuccauagugaugagauagagcaccuggugguagaggaacuugugaaaaagagggaagagugccuggacgcauuggaaacuauuaugacaaccaaaucugucuccuuucggcgccucagccaucugcgaaaguuagugccuggguucggaaaggccuauacuaucuucaauaaaacacugauggaggcugaugcccacuacaagucgauuagaaccuggaacgagaucaucccaucuaaaggcugucucaggguuggcgggcggugccacccccaugugaauggagucuuuuucaacgguauuauacuuggcccggacgggcacgugcugaucccugaaaugcaguccucauugcuacaucagcacauggagcugcucgaaaguagcguaauuccccugaugcauccacuugcggauccuuccacgguuuuuaaggacggagaugaggcagaagacuucguggagguccaccuccccgaugugcacaaacaaaucucuggcgucgacuugggucucccaaauugggggaaguaugugcugauaagcgccggcgcuuuaaccgcccugaugcuaacaauuuuucucaugacuuguugccguaagaccaaccgcgcagagucaauccagcauagucccggagaaacaggcagaaaaguuuccgugacuagccacaacgggaggguaaucucuucaugggagaguuacaagagcggauccgaaaccaaacuguga

SEQ ID NO: 159118 - RNA, 1575 nt, Artificial Sequence
  derived and/or modified CDS sequence (opt3) from glycoprotein__RABV__GQ857470.1
augaucccccaggugcuccuguucgucccucuucugguuuuuagcuccugcuucggcaaguuuccaauuuacaccauaccggacaaauuggggcccuggucuccuaucgauauucaccauuuaucauguccaaacaaucuggugguagaggacgaaggaugcacaaaccuaagugguuucagcuauauggagcucaaggugggcuacaucuccgccauuaaagucaauggguuuacuuguacgggagugguuaccgaagcugagacauauacuaacuucgugggcuacgucaccacaaccuuuaagagaaaacacuucaggcccaugccugaugcaugccgggccgcguauaauuggaagauggcuggugacccacgcuacgaagagucucugcauaaccccuauccugauuaccacuggcuucgaacugugaagacaaccaaagagucgcugguaaucauaucaccaagcguugccgacuuggauccguacgacaagagucuccauucccguguguuucccgggggaaaauguucuggcaucacggucagcuccacuugcuguucaaccaaucacgauuauacaauuuggaugccugaaaacccaagacugggcaccaguugcgacaucuucacuaauagcagggggaagcgggcaucuaaaggagguaagacauguggcuuuguggaugagcgcgggcuguacaagucccucaaaggagccugcaagaugaaauuauguggcgugcugggucuuagauugauggacgggaccugggucgcuauucaaacgucagaugaaaucaaguggugcagccccgaccagcugguuaaccuacacgacuuccauagugaugagauagagcaccucgugguagaggaacuggugaaaaagagggaagagugccuugacgcacuggaaacuauuaugacaaccaaaucugucuccuuucggcgcuugagccaucuccgaaagcuggugccuggauucggcaaggccuauacuaucuucaauaaaacauuaauggaggcugaugcccacuacaagucgauuagaaccuggaacgagaucaucccaucuaaaggcugucugaggguugggggacggugccacccccaugugaauggugucuuuuucaacggcauuauacucgggccggacggacacgugcuuaucccugaaaugcaguccucacuguugcaucagcacauggagcuacuggaaaguagcguaauuccccucaugcauccacuggcggauccuuccacgguuuuuaaggacggcgaugaggcagaagacuucguggagguccaccuucccgaugugcacaaacaaaucucuggugucgaccugggguugccaaauuggggcaaguaugugcucauaagcgccggagcucugaccgccuuaaugcugacaauuuuucuaaugacuuguugccguaagaccaacaaagcagagucaauccagcauagucccggcgaaacagggcgcaagguuuccgugacuagccacaacggaagaguaaucucuucaugggagaguuacaaaagcgguuccgaaaccaagcucuga

SEQ ID NO: 159119 - RNA, 1575 nt, Artificial Sequence
  derived and/or modified CDS sequence (opt3) from glycoprotein__RABV__GQ857471.1
augaucccccaggugcugcuguucgucccucuucugguuuuuagcuccugcuucggcaaguuuccaauuuacaccauaccggacaaauuggggcccuggucuccuaucgauauucaccauuuaucauguccaaacaaucuggugguagaggacgaaggaugcacaaaccuaagugguuucagcuauauggagcucaaggugggcuacaucuccgccauuaaagucaauggguuuacuuguacgggagugguuaccgaagcugagacauauacuaacuucgugggcuacgucaccacaaccuuuaagagaaaacacuucaggcccaugccugaugcaugccgggccgcguauaauuggaagauggcuggugacccacgcuacgaagagucucugcauaaccccuauccugauuaccacuggcuucgaacugugaagacaucgaaagagucacugguaaucauaagcccaaguguugccgacuuggauccguacgacaagucccuccauucucguguguuucccgggggaaaauguagcggcaucaccgucuccucaacgugcuguaguacuaaucacgauuauaccauuuggaugccugaaaacccaagacugggcacaagcugcgacaucuucacuaauucuagggggaagcgggcauccaaaggagguaagaccuguggcuuuguggaugagcgcgggcuguacaagucacucaaaggagccugcaaguuaaaacuguguggcgugcuugguuugagacugauggacgggacaugggucgcuauucaaaccagcgaugaaaucaaguggugcagucccgaccagcuaguuaaccuccacgacuuccauucugaugagauagagcaccuggugguagaggaacuugugaaaaagagggaagagugccuggacgcauuggaaacgauuaugacuacaaaauccgucagcuuucggcgccucucgcaucugcgaaaguuagugccuggauucggcaaggccuauaccaucuucaauaaaacucugauggaggcugaugcccacuacaagucuauuagaacauggaacgagaucaucccauccaaaggcugucucaggguugggggacggugccacccccaugugaauggugucuuuuucaacggcauuauacuugggccggacggacacgugcugaucccugaaaugcagucaaguuugcuacaucagcacauggagcugcucgaaagcuccguaauuccccugaugcauccacuugcggauccuucuaccguuuuuaaggacggcgaugaggcagaagacuucguggagguccaccuccccgaugugcacaaacaaaucagcggugucgacuuggggcucccaaauuggggcaaguaugugcugauaucagccggagcuuuaacggcccugaugcuaaugauuuuucucaugaccuguugccguaagacaaaccgcgcagagaguauccagcauucccccggcgaaacugggagaaaaguuagcgugaccucucacucaggaaggguaaucaguagcugggaguccuacaagucugguggcgaaacaaaacuguga

SEQ ID NO: 159120 - RNA, 1575 nt, Artificial Sequence
  derived and/or modified CDS sequence (opt3) from glycoprotein__RABV__GQ857472.1
augaucccccaggugcuccuguucgucccucuucugguuuuuagcuccugcuucggcaaguuuccaauuuacaccauaccggacaaauuggggcccuggucuccuaucgauauucaccauuuaucauguccaaacaaucuggugguagaggacgaaggaugcacaaaccuaagugguuucagcuauauggagcucaaggugggcuacaucuccgccauuaaagucaauggguuuacuuguacgggagugguuaccgaagcugagacauauacuaacuucgugggcuacgucaccacaaccuuuaagagaaaacacuucaggcccaugccugaugcaugccgggccgcguauaauuggaagauggcuggugacccacgcuacgaagagucucugcauaaccccuauccugauuaccacuggcuucgaacugugaagacaucgaaagagucacugguaaucauaagcccaaguguugccgacuuggauccguacgacaagucccuccauucucguguguuucccgggggaaaauguagcggcaucaccgucuccucaacgugcuguaguacuaaucacgauuauaccauuuggaugccugaaaacccaagacugggcacaagcugcgacaucuucacuaauucuagggggaagcgggcauccaaaggagguaagaccuguggcuuuguggaugagcgcgggcuguacaagucacucaaaggagccugcaagaugaaauuauguggcgugcugggucuuagauugauggacgggacaugggucgcuauucaaaccagcgaugaaaucaaguggugcagucccgaccagcugguuaaccuacacgacuuccauucugaugagauagagcaccucgugguagaggaacuggugaaaaagagggaagagugccuugacgcacuggaaacgauuaugacuacaaaauccgucagcuuucggcgcuugucgcaucuccgaaagcuggugccuggauucggcaaggccuauaccaucuucaauaaaacuuuaauggaggcugaugcccacuacaagucuauuagaacauggaacgagaucaucccauccaaaggcugucugaggguugggggacggugccacccccaugugaauggugucuuuuucaacggcauuauacucgggccggacggacacgugcuuaucccugaaaugcagucaagucuguugcaucagcacauggagcuacuggaaagcuccguaauuccccucaugcauccacuggcggauccuucuaccguuuuuaaggacggcgaugaggcagaagacuucguggagguccaccuucccgaugugcacaaacaaaucagcggugucgaccugggguugccaaauuggggcaaguaugugcucauaucagccggagcucugacggccuuaaugcugaugauuuuucuaaugaccuguugccguaagacaaaccgcgcagagaguauccagcauucccccggcgaaacugggagaaaaguuagcgugaccucucacaacggaaggguaaucucaaguugggagagcuacaaguccgguggcgaaacaaaacucuga

SEQ ID NO: 159121 - RNA, 1575 nt, Artificial Sequence
  derived and/or modified CDS sequence (opt3) from glycoprotein__RABV__GQ918139.1
auggugccccagguccuccuguucguucuucuguugggcuuuagcuuaugcuucgggaaguuuccuaucuacaccauuccagacgagcugggaccguggucccccauagauauccaccaucuaucuuguccuaacaaucucgugguagaagacgaggguugcacaaaccugucagaguucaguuauauggaacuuaaagugggcuacauuagcgccaucaaggucaauggguuuacuuguacgggagugguuaccgaagcugagacauauacuaacuucgugggcuacgucaccacaaccuuuaaaagaaagcacuucaggccaacucccgaugcaugccgggccgcguauaauuggaaaauggcuggugacccucgcuacgaggaaucccugcauaacccauaucccgauuaccacugguugcgaacagugcguaccacgaaggagucucucauuaucauaucgccuucaguaacugaccuggauccauacgacaagagccugcauaguagaguuuuucccgggggaaaauguuccggcaucaccgugucuagcacauauugcuccacuaaucacgauuacaccauuuggaugccggaaaacccuaggccacggacacccugugacaucuucaccaauucacgcggcaagagagccaguaacgggaauaaaacgugcggauuugucgaugagaggggucucuauaagagcuuaaaaggcgcaugucggcugaaacuuugcgggguguugggacugcgccuaauggacggcacuuggguggccaugcaaacaucugaugagaccaagugguguccuccagaccagcucgucaaccugcacgacuuccgauccgaugaaauugagcaucuuguuguggaggaacugguaaagaagagagaagagugcuuggacgcucucgagucaaucaugacuacaaaaagcgugaguuuuaggcggcugucucacuuacguaagcugguccccgguuucgggaaagcauacaccauauucaauaagacgcucauggaagccgaugcucauuauaaauccgugcgcaccuggaacgagauuaucccgagcaagggaugccuuaagguuggcggcagaugucacccucacgugaauggggucuuuuucaacggaauuauccugggucccgacgaucauguguugaucccagaaaugcagucgucucuacugcagcaacacauggagcuccugaaauccucaguaauuccucuuaugcauccccuggccgacccaaguacaguuuuuaaggaaggcgaugaggcggaggacuucguggaaguccacuugcccgauguguacaaacagauaagcggggucgaccucggacugccuaacuggggcaaguauguguuaaugacugccggugcaaugaucgggcugguucuaauuuuuagucucaugaccuggugcaggcgggcuaaucgaccagagucuaaacagcgcagcuucggcggaacaggcgggaacgugucaguaacuucccaguccggaaaggucaucccgagcugggaaucuuacagaucagguggcgagauaaggcuguga

SEQ ID NO: 159122 - RNA, 1575 nt, Artificial Sequence
  derived and/or modified CDS sequence (opt3) from glycoprotein__RABV__GU186379.1
auggugccccaggcccuccuguucgucccucuucuggcuguuccauugugcuuuggcaaguucccgaucuacaccauucccgacaaauuagggccuuggagcccaauagauauccaccaucuguccugucccaacaaucuagugguagaggacgaaggaugcacaaaccucucugguuuuucauauauggagcugaaggugggcuacauuagugcaaucaaagucaauggguucacuuguacgggagugguuaccgaagccgagacauauacuaacuuugugggcuacgucaccacaaccuucaagagaaaacacuuuaggccuacuccagaugcgugccggagcgcuuauaauuggaagauggccggugggccccgcuacgaagagucccuucauaacccuuauccagacuaccacuggcugcgaacagugaagaccacgaaagagucuuucguaauuaucucgccgucaauggcagauuuggaccccuacgauaagagccuccauagucguguuuuuccuagaggaaaauguuccggcauaacugugucuagcaccuauugcuccacaaaucacgacuacacuaucuggaugcuggaaaacccaaggcugggcaccucaugugauauuuucacaaauagucgggggaagcgcgccagcaaaggaucuaagaccugcgguuuugucgacgagagaggccucuauaaguccuuaaaaggggcuuguaagcugaaacuuugcggaguguugggccugaggcuaauggaugguacguggguggcaauccaaacuucagacgaaacaaaguggugucccccugaucagcucgucaaccugcacgacuuccauagcgacgagauugagcaccuuguuguggaggaacuggugaaaaagcgggaagagugcuugggggcccucgaaaguaucaugaccacuaaaucuguauccuuucgccgacugagccauuuaagaaagcuggucccaggauucggcaaggcuuacacaauauucaauaaaacccucauggaggccgaugcgcacuauaagucggugaggacguggaacgagauuauccccucuaaaggcugccuucggguugggggacguugucacccgcaugugaauggugucuuuuucaacggcauuauccuggggccugacggacacguguugauccccgaaaugcaguccucacuacugcagcaacauauggagcuccuggaaaguagcguaauuccacuuaugcacccucuggcagaucccuccaccguuuuuaaggacggcgaugaggccgaagacuucguggagguccauuugccagaugugcacaaacaggucucugguguggaccucgggcugcccagcuggggcaaguacguuuuaaugucagcuggaauacugacagcccuaaugcucaugaucuuucugaugacuugcugucgcagaaccaauagggcagagaguauucagcacucccuuggcgaaacagggcggaaggugagcguaacuucucagaacggacgagucaucucaaguugggagagcuauaaauccgguggcgaaaccaaguuguga

SEQ ID NO: 159123 - RNA, 1575 nt, Artificial Sequence
  derived and/or modified CDS sequence (opt3) from glycoprotein__RABV__GU186380.1
auggugccccaggcccuucucuucgucccucuucuggcuguuccauugugcuuuggcaaguucccgaucuacaccauucccgacaaauuagggccuuggagcccaauagauauccaccaucuguccugucccaacaaucuagugguagaggacgaaggaugcacaaaccucucugguuuuucauauauggagcugaaggugggcuacauuagugcaaucaaagucaauggguucacuuguacgggagugguuaccgaagccgagacauauacuaacuuugugggcuacgucaccacaaccuucaagagaaaacacuuuaggccuacuccagaugcgugccggagcgcuuauaauuggaagauggccggugacccccgcuacgaagagucccuucauaacccuuauccagauuaccacuggcugcgaacagugaagaccacgaaagagucuuucguaauuaucucgccgucaguugcagacuuggaucccuacgacgaaagccuccauagucguguguuuccuagagggaaguguuccggaauaacugucucuagcaccuauugcuccacaaaucacgauuacacuaucuggaugccagagaaccccaggcugggcaccucaugugacauuuucacaaauagucggggcaaacgcgccagcaaggggucuaaaaccugcggauuuguggaugaaagaggucuguauaagucccucaagggcgcuuguaaauuaaagcugugcggggugcuuggauugaggcugauggacggcacgugggucgcaauccaaacuucagaugagacaaaaugguguccuccagaccagcuagccaaccuccacgacuuccauagcgaugagauugaacaccugguuguggaggaacuuguacggaagcgcgaggaaugccuggacgcuuuggagaguaucaugaccacuaaaucuguguccuuucgaagacucagccaucugaggaaguuaguccccgguuucgggaaagccuacacaauauucaauaagacccugauggaggcggaugcacacuauaagucggugcggacguggaacgaaauuaucccgucuaaaggaugccuccguguuggcggccgcugucacccucaugugaauggggucuuuuucaacggaauuauccuuggucccgacggccacgugcugaucccagagaugcaguccucauugcuacagcaacauauggaacugcucgagaguagcguaauuccucugaugcacccccuugccgauccauccaccguuuuuaaggacggggaugaagcugaggacuucguggagguccaucugcccgaugugcacaaacaggucucuggaguggacuugggccucccuagcugggguagauacguucugaugucagccgggauauuaacagcacugaugcuaaugaucuuucucaugacuugcuguaggcggaccaaucgagcuaagaguauucagcacucccugggcgaaacaggacgcaaagugagcguaacuucucagaacggcagagucaucucaaguugggagagcuauaaguccgggggagaaaccaagcuguga

SEQ ID NO: 159124 - RNA, 1575 nt, Artificial Sequence; identical to SEQ ID NO: 158887
  derived and/or modified CDS sequence (opt3) from glycoprotein__RABV__GU186381.1

SEQ ID NO: 159125 - RNA, 1575 nt, Artificial Sequence
  derived and/or modified CDS sequence (opt3) from glycoprotein__RABV__GU186382.1
augaucccccaggugcugcuguucgucccucuucugguuuuuagcuccugcuucggcaaguuuccaauuuacaccauaccggacaaauuggggcccuggucuccuaucgauauucaccauuuaucauguccaaacaaucuggugguagaggacgaaggaugcacaaaccuaagugguuucagcuauauggagcucaaggugggcuacaucuccgccauuaaagucaauggguuuacuuguacgggagugguuaccgaagcugagacauauacuaacuucgugggcuacgucaccacaaccuuuaagagaaaacacuucaggcccaugccugaugcaugccgggccgcguauaauuggaagauggcuggugacccacgcuacgaagagucucugcauaaccccuauccugauuaccacuggcuucgaacugugaagacaaccaaagagucgcugguaaucauaucaccaagcguugccgacuuggauccguacgacaagagucuccauucccguguguuucccgggggaaaauguucuggcaucacggucagcuccacuugcuguucaaccaaucacgauuauacaauuuggaugccugaaaacccaagacugggcaccaguugcgacaucagcacuaauucuagggggaagcgggcauccaaaggagguaagacauguggcuucguggaugagcgcgggcuguacaagucacucaaaggagccugcaaguuaaaacuguguggcgugcuugguuugagacugauggacgggaccugggucgcuauucaaacgagcgaugaaaucaaguggugcagucccgaccagcuaguuaaccuccacgacuuucauucugaugagauagagcaccuggugguagaggaacuugugaaaaagagggaagagugccuggacgcauuggaaacuauuaugacaaccaaauccgucagcuuccggcgccucucgcaucugcgaaaguuagugccuggauuuggcaaggccuauacuaucuucaauaaaacacugauggaggcugaugcccacuacaagucuauuagaaccuggaacgagaucaucccauccaaaggcugucucaggguugggggacggugccacccccaugugaauggugucuucuuuaacggcauuauacuugggccggacggacacgugcugaucccugaaaugcagucaaguuugcuacaucagcacauggagcugcucgaaagcuccguaauuccccugaugcauccacuugcggauccuucuacgguuuucaaggacggcgaugaggcagaagacuuuguggagguccaccuccccgaugugcacaaacaaaucagcggugucgacuuggggccacccaauuggggcaaguaugugcucauaucagccggagcucugaccgccuuaaugaguaugauuuuccugaugacauguugccguaagacuaaccgcgcagaguccauccagcauagcccuggcgaaaccgggagaaaaguuucugugacaucacacaacggaaggguaaucaguagcugggaguccuacaagucugguggcgaaacuaaacuauga

SEQ ID NO: 159126 - RNA, 1575 nt, Artificial Sequence
  derived and/or modified CDS sequence (opt3) from glycoprotein__RABV__GU186383.1
augaucccccaggugcugcuguucgucccucuucugguuuuuagcuccugcuucggcaaguuuccaauuuacaccauaccggacaaauuggggcccuggucuccuaucgauauucaccauuuaucauguccaaacaaucuggugguagaggacgaaggaugcacaaaccuaagugguuucagcuauauggagcucaaggugggcuacaucuccgccauuaaagucaauggguuuacuuguacgggagugguuaccgaagcugagacauauacuaacuucgugggcuacgucaccacaaccuuuaagagaaaacacuucaggcccaugccugaugcaugccgggccgcguauaauuggaagauggcuggugacccacgcuacgaagagucucugcauaaccccuauccugauuaccacuggcuucgaacugugaagacaaccaaagagucgcugguaaucauaucaccaagcguugccgacuuggauccguacgacaagagucuccauucccguguguuucccgggggaaaauguucuggcaucacggucagcuccacuugcuguucaaccaaucacgauuauacaauuuggaugccugaaaacccaagacugggcaccaguugcgacaucuucacuaauagcagggggaagcgggcaucuaaaggagguaagacauguggcuuuguggaugagcgcgggcuguacaagucccucaaaggagccugcaaguuaaaacuguguggcgugcuugguuugagacugauggacgggaccugggucgcuauucaaacgucagaugaaaucaaguggugcagccccgaccagcuaguuaaccuccacgacuuccauagugaugagauagagcaccuggugguagaggaacuugugaaaaagagggaagagugccuggacgcauuggaaacuauuaugacaaccaaaucugucuccuuucggcgccucagccaucugcgagaguuagugccuggauucggcaaggccuauacuaucuucaauaagacacugauggaggcugaugcccacuacaaaucgauuagaaccuggaacgaaaucaucccaucuaagggcugucucaggguugggggacggugccacccccaugugaauggugucuuuuucaacggcauuauacuugggccggacggacacgugcugaucccugagaugcaguccucauugcuacaucagcacauggaacugcucgagaguagcguaauuccccugaugcauccacuugcggauccuuccacgguuuuuaaagacggcgaugaagcagaggacuucguggagguccaccuccccgaugugcacaagcaaaucucuggugucgacuuggggcucccaaauuggggcaaauaugugcugauaagcgccggagcuuuaaccgcccugauuucaaugaucuuucuaaugacauguugccguaagacuaaccgcgcagaaaguauccagcauucccccggcgagaccgggagaaagguuagcgugacaucucacaacggaaggguaauuucaaguugggaaagcuacaaauccgguggcgagacuaagcucuga

SEQ ID NO: 159127 - RNA, 1575 nt, Artificial Sequence
  derived and/or modified CDS sequence (opt3) from glycoprotein__RABV__GU186384.1
augaucccccaggugcugcuguucgucccucuucugguuuuuagcuccugcuucggcaaguuuccaauuuacaccauaccggacaaauuggggcccuggucuccuaucgauauucaccauuuaucauguccaaacaaucuggugguagaggacgaaggaugcacaaaccuaagugguuucagcuauauggagcucaaggugggcuacaucuccgccauuaaagucaauggguuuacuuguacgggagugguuaccgaagcugagacauauacuaacuucgugggcuacgucaccacaaccuuuaagagaaaacacuucaggcccaugccugaugcaugccgggccgcguauaauuggaagauggcuggugacccacgcuacgaagagucucugcauaaccccuauccugauuaccacuggcuucgaacugugaagacaaccaaagagucgcugguaaucauaucaccaagcguugccgacuuggauccguacgacaagagucuccauucccguguguuucccgggggaaaauguucuggcaucacggucagcuccacuugcuguucaaccaaucacgauuauacaauuuggaugccugaaaacccaagacugggcaccaguugcgacaucuucacuaauagcagggggaagcgggcaucuaaaggagguaagacauguggcuuuguggaugagcgcgggcuguacaagucccucaaaggagccugcaaguuaaaacuguguggcgugcuugguuugagacugauggacgggaccugggucgcuauucaaacgucagaugaaaucaaguggugcagccccgaccagcuaguuaaccuccacgacuuccauagugaugagauagagcaccuggugguagaggaacuugugaaaaagagggaagagugccuggacgcauuggaaacuauuaugacaaccaaaucugucuccuuucggcgccucagccaucugcgaaaguuagugccuggauucggcaaggccuauacuaucuucaauaaaacacugauggaggcugaugcccacuacaagucgauuagaaccuggaacgagaucaucccaucuaaaggcugucucaggguugggggacggugccacccccaugugaauggugucuuuuucaacggcauuauacuugggccggacggacacgugcugaucccugaaaugcaguccucauugcuacaucagcacauggagcugcucgaaaguagcguaauuccccugaugcauccacuugcggauccuuccacgguuuuuaaggacggcgaugaggcagaagacuucguggauguccaccuccccgacgugcacaaacaaaucucuggugucgauuuggggcucccaaauuggggcaaguaugugcugauaagcgccggagcuuuaaccgcccugaugcuaaugauuuuucucaugacauguugccguaaggcaaaccgcgcugagucaauccagcauaaccccggcgggacuggaagaaaaguuagugugaccucccacaaugguaggguaaucagcucuugggagucauacaagaguggcggggaaacaaaacuguga

SEQ ID NO: 159128 - RNA, 1575 nt, Artificial Sequence
  derived and/or modified CDS sequence (opt3) from glycoprotein__RABV__GU186385.1
augaucccccaggugcuccuguucgucccucuucugguuuuuagcuccugcuucggcaaguuuccaauuuacaccauaccggacaaauuggggcccuggucuccuaucgauauucaccauuuaucauguccaaacaauauggugguagaggacgaaggaugcacaaaccugagugguuucagcuauauggagcuaaaggugggcuacaucuccgccauuaaagucaauggguuuacuuguacgggagugguuaccgaagcugagacauauacuaacuucgugggcuacgucaccacaaccuuuaagagaaaacacuucaggcccaugccugaugcaugccgggccgcguauaauuggaagauggcuggugacccacgcuacgaagagucucuccauaaccccuauccugauuaccacuggcugcgaacugugaagacaaccaaagagucgcuuguaaucauaucaccaagcguugccgaccuggauccguacgacaagaguuugcauucccguguguuucccgggggaaaauguucuggcaucacggucagcuccacuugcuguucaaccaaucacgauuauacaauuuggaugccugaaaacccaagacucggcaccaguugcgacaucuucacuaauagcagggggaagcgggcaucuaaaggagguaagacauguggcuuuguggaugagcgcgggcuguacaagucccugaaaggagccugcaagcucaaauuauguggcgugcugggucuuagauugauggacgggaccugggucgcuauucaaacgucagaugaaaucaaguggugcagccccgaccagcugguuaaccuacacgacuuccauagugaugagauagagcaccucgugguagaggaacuggugaaaaagagggaagagugccuugacgcacuggaaacuauuaugacaaccaaaucugucuccuuucggcgcuugagccaucuccgaaagcuggugccuggauucggcaaggccuauacuaucuucaauaaaacauuaauggaggcugaugcccacuacaagucgauuagaaccuggaacgagaucaucccaucuaaaggcugucugaggguugggggacggugccacccccaugugaauggugucuuuuucaacggcauuauacucgggccggacggacacgugcuuaucccugaaaugcaguccucacuguugcaucagcacauggagcuacuggaaaguagcguaauuccccucaugcauccacuggcggauccuuccacgguuuuuaaggacggcgaugaggcagaagacuucguggagguccaccuucccgaugugcacaaacaaaucucuggugucgaccugggguugccaaauuggggcaaguaugugcucauaagcgccggagcucugaccgccuuaaugcugacaauuuuucuaaugacuuguugccguaagaccucacgcgcagagaguauccagcauucccccggcgaaacagggagaaaaguuagcgugacuucucacaacggaaggguaaucucaaguugggagagcuacaaguccgguggcgaaaccaaacucuga

SEQ ID NO: 159129 - RNA, 1575 nt, Artificial Sequence
  derived and/or modified CDS sequence (opt3) from glycoprotein__RABV__GU186386.1
auggugccccaggcccuucucuucgucccucuucuggcuguuccauugugcuuuggcaaguucccgaucuacaccauucccgacaaauuagggccuuggagcccaauagauauccaccaucuguccugucccaacaaucuagugguagaggacgaaggaugcacaaaccucucugguuuuucauauauggagcugaaggugggcuacauuagugcaaucaaagucaauggguucacuuguacgggagugguuaccgaagccgagacauauacuaacuuugugggcuacgucaccacaaccuucaagagaaaacacuuuaggccuacuccagaugcgugccggagcgcuuauaauuggaagauggccggugacccccgcuacgaagagucccuucauaacccuuauccagauuaccacuggcugcgaacagugaagaccacgaaagagucuuucguaauuaucucgccgucaguugcagacuuggaucccuacgacaagagccuccauagucguguguuuccuagagggaaauguuccggaauaacugucucuagcaccuauugcuccacaaaucacgauuacacuaucuggaugccagaaaaccccaggcugggcaccucaugugacauuuucacaaauagucggggcaagcgcgccagcaaagggucuaagaccugcggauuuguggaugagagaggucuguauaagucccucaaaggcgcuuguaaguuaaaacugugcggggugcuuggauugaggcugauggacggcacgugggucgcaauccaaacuucagaugaaacaaagugguguccuccagaccagcuaguuaaccuccacgacuuccauagcgaugagauugagcaccuggugguagaggaacuugugaaaaagcgggaagagugccuggacgccuuggaaaguaucaugaccacuaaaucugucuccuuucgccgacucagccaucugagaaaguuagugcccgguuucgggaaggcuuacacaauauucaauaaaacccugauggaggccgaugcgcacuauaagucgguuaggacguggaacgagauuaucccgucuaaaggaugccuccgggugggcggccguugucacccucaugucaaugggguguuuuucaacggaauuauccuuggucccgacggccacguacugaucccagaaaugcaguccucauugcuacagcaacauauggagcugcucgaaaguagcguuauuccucugaugcacccccuugcagauccauccaccguguuuaaggacggggaugaggccgaagacuucgucgaggugcaucugcccgauguccacaaacaggugucuggaguugacuugggccucccuagcugggguaaguacgugcugaugucagcugggauauuaacagcccugaugcuaaugaucuuucucacuaccugcugucgcagaacaaauagggcagagaguauucagcacucccugggcgaaacuggacggaagguaagcgucaccucucagaacggccgagugaucucaaguugggagagcuauaaauccgggggagaaacaaagcuguga

SEQ ID NO: 159130 - RNA, 1575 nt, Artificial Sequence
  derived and/or modified CDS sequence (opt3) from glycoprotein__RABV__GU186387.1
augaucccccaggcccuccuguucgugccucuucuggucuuuagcuugugcuucggcaaguuuccaguuuacgcuauuccggacaaauuagggcccugguccccuauagauauccaccaucugucuuguccaaacaaucuagugguagaggacgaaggaugcaccaaccucucagguuucaguuauauggagcugaaggugggcuacauuagcgcaaucaaagucaauggguuuacauguacuggagugguuacggaagccgagaccuauacaaacuucauuggcuacgugacuaccacauuuaagagaaaacacuucaggcccaccccugaugcgugccgggcugccuauaauuggaagauggccggugacccacgcuacgaagagucccuucauaaccccuauccugauuaccacuggcugcgaacugucaagacaaccaaagagucuuuggugguaaucucgccaucaguugcagaccucgauccguacgacaagagccugcauagucguguguuucccuccgggaaauguucuggaauaacggucagcuccacuugcuguucaaccaaucacgauuauacaaucuggaugccugaaaacccaagacugggcaccaguugcgacauuuucgugaauagcaggggcaagcgggcuucuaaaggguccaagacuuguggauuuguggaugagcgcggucucuacaagucauuaaaaggcgcaugcaagcugaaacuuuguggggucuugggacugagacuaauggacggcacauggguugccauccaaaccagcgaugaaacgaaguggugucccccugaccagcucgugaaccugcacgacuucaggagugaugagauugagcaucuuguaguggaggaacuggucaaaaagcgggaagagugcuuggacgcucucgaaucuaucaugacuacaaaauccgugagcuuucgccgacugucgcacuuaagaaagcugguuccagguuucgggaaggccuauaccauauucaauaaaacucucauggaggcggaugcacauuacaagucugugaggacauggaacgagauuauccccuccaaaggaugccuucgggucggcggccguugccacccgcacgugaaugggguauuuuucaacggaauuauccuggguccugacggccauguuuugauccccgaaaugcagucaagucuacugcagcaacacauggagcuccuggaaagcuccgugauuccacuuaugcauccucuggccgaucccucuaccauauuuaagaauggggacgaggcugaagauuucgucgaggugcacuugccagacguccauaaacaggugagcggaguugaucucggccugcccaacugggguaaguauguguuaaugucagccggggcacugaucgcucuaaugcucaugauuuuucugaugacguguugccgcaagaccgacagaacaggcaguacucaccacuccccuggagagaccggcaggaaaguaagcgucacaucucagaacgggcgggugaucgccucaugggaaaguuacaagagcggaggugagacuaaacuuuga

SEQ ID NO: 159131 - RNA, 1575 nt, Artificial Sequence; identical to SEQ ID NO: 158887
  derived and/or modified CDS sequence (opt3) from glycoprotein__RABV__GU186388.1

SEQ ID NO: 159132 - RNA, 1575 nt, Artificial Sequence
  derived and/or modified CDS sequence (opt3) from glycoprotein__RABV__GU186389.1
augaucccccaggugcugcuguucgucccucuucugguuuuuagcuccugcuucggcaaguuuccaauuuacaccauaccggacaaauuggggcccuggucuccuaucgauauucaccauuuaucauguccaaacaaucuggugguagaggacgaaggaugcacaaaccuaagugguuucagcuauauggagcucaaggugggcuacaucuccgccauuaaagucaauggguuuacuuguacgggagugguuaccgaagcugagacauauacuaacuucgugggcuacgucaccacaaccuuuaagagaaaacacuucaggcccaugccugaugcaugccgggccgcguauaauuggaagauggcuggugacccacgcuacgaagagucucugcauaaccccuauccugauuaccacuggcuucgaacugugaagacaaccaaagagucgcugguaaucauaucaccaagcguugccgacuuggauccguacgacaagagucuccauucccguguguuucccgggggaaaauguucuggcaucacggucagcuccacuugcuguucaaccaaucacgauuauacaauuuggaugccugaaaacccaagacugggcaccaguugcgacaucuucacuaauagcagggggaagcgggcaucuaaaggagguaagacauguggcuuuguggaugagcgcgggcuguacaagucccucagaggagccugcaaauuaaagcuguguggcgugcuugguuugaggcugauggacgggaccugggucgcuauucaaacgucagaugaaaucaaauggugcagccccgaccagcuaguuaaccuccacgacuuccauagugaugagauagagcaccuggugguagaggaacuugugaagaaacgggaagagugccuggacgcauuggaaacuauuaugacaaccaagucugucuccuuucgccgacucagccaucugagaaaauuagugccuggauucggcaaggccuauacuaucuucaauaagacacugauggaggcugaugcccacuacaaaucgauuaggaccuggaacgagaucaucccaucuaagggcugucuccggguugggggacguugccacccccaugugaauggugucuuuuucaacggcauuauacuugggccggacggacacgugcugaucccugaaaugcaguccucauugcuacaucagcacauggagcugcucgaaaguagcguaauuccccugaugcauccacuugcggauccuuccacgguuuuuaaagacggcgaugaggcagaagacuucguggagguccaccuccccgaugugcacaagcaaaucucuggugucgacuuggggcucccaaauuggggcaaauaugugcugauaagcgccggagcuuuaaccgcccugaugcuaaugauuuuucucaugacauguugccgcaagacuaacagagcagagucaauccagcauagucccggcgaaaccgggaggaagguuuccgugacaagccacaacggacggguaaucucuucaugggagaguuacaaaagcgguuccgaaacuaagcuguga

SEQ ID NO: 159133 - RNA, 1575 nt, Artificial Sequence; identical to SEQ ID NO: 158875
  derived and/or modified CDS sequence (opt3) from glycoprotein__RABV__GU186390.1

SEQ ID NO: 159134 - RNA, 1575 nt, Artificial Sequence
  derived and/or modified CDS sequence (opt3) from glycoprotein__RABV__GU186392.1
augaucccccaggugcugcuguucgucccucuucugguuuuuagcuccugcuucggcaaguuuccaauuuacaccauaccggacaaauuggggcccuggucuccuaucgauauucaccauuuaucauguccaaacaaucuggugguagaggacgaaggaugcacaaaccuaagugguuucagcuauauggagcucaaggugggcuacaucuccgccauuaaagucaauggguuuacuuguacgggagugguuaccgaagcugagacauauacuaacuucgugggcuacgucaccacaaccuuuaagagaaaacacuucaggcccacuccugaugcaugccgggccgcguauaauuggaagauggcuggugacccacgcuacgaagagucucugcauaaccccuauccugauuaccacuggcuucgaacagugaagaccucgaaagagucacugguaaucauaagcccaaguguugccgacuuggauccguacgacaagucccuccauucucguguguuucccgggggaaaauguagcggcaucacggucuccucaacuugcuguaguaccaaucacgauuauacaauuuggaugccugaaaacccaagacugggcacuagcugcgacaucuucaccaauucuagggggaagcgggcauccaaaggagguaagacauguggcuuuguggaugagcgcgggcuguacaagucacucaaaggagccugcaaguuaaaacuguguggcgugcuugguuugagacugauggacgggaccugggucgcuauucaaacgagcgaugaaaucaaguggugcagucccgaccagcuaguuaaccuccacgacuuccauucugaugagauagagcaccuggugguagaggaacuugugaaaaagagggaagagugccuggacgcauuggaaacuauuaugacaaccaaauccgucagcuuucggcgccucucgcaucugcgaaaguuagugccuggauucggcaaggccuauacuaucuucaauaaaacacugauggaggcugaugcccacuacaagucuauuagaaccuggaacgagaucaucccauccaaaggcugucucaggguugggggacggugccacccccaugugaauggugucuuuuucaacggcauuauacuugggccggacggacacgugcugaucccugaaaugcagucaaguuugcuacaucagcacauggagcugcucgaaagcuccguaauuccccugaugcauccacuugcggauccuucuacgguuuuuaaggacggcgaugaggcagaagacuucguggagguccaccuccccgaugugcacaaacaaaucagcgaggucgacuugggucucccaaauugggggaaguaugugcugguuucagccggcgcuuuaaccgcccugaugcuaaugauauuucucaugacauguugccguaagacuaaccgcgcagaaaguauucagcauucccccggagagaccggcagaaaagugagcguaacaucucacaacgggagggucaucucaaguugggaaagcuacaaguccggaggugagacuaaacuguga

SEQ ID NO: 159135 - RNA, 1575 nt, Artificial Sequence
  derived and/or modified CDS sequence (opt3) from glycoprotein__RABV__GU186396.1
augaucccccaggcccuucucuucgugccucuucuggucuuuagcuugugcuucggcaaguuuccaauuuacaccauaccggacaaauuagggcccugguccccuaucgauauucaccaucugucuuguccaaacaaucuaguuguggaggacgaaggaugcacaaaccucucagguuucaguuauauggagcugaagguaggcuacaucagcgcuauuaaagugaauggguuuacuuguacgggagucgugaccgaagcagagacauauacuaacuucguuggcuacgugaccacaaccuuuaagagaaaacacuucaggcccacuccugaugccugccgggcggcuuauaauuggaagauggccggugacccacgcuacgaagagucccuuaacaaucccuauccugauuaccauuggcugcgaacagucaagaccacgaaagagucuuuggugguaaucucgccaucaguugcagaccucgauccguacgacgaaagccugcacagucguguguuucccuccgggaaguguucuggaauaacugucagcucaaccugcuguuccacaaaccaugauuauacuaucuggaugccugagaauccaagacugggcaccaguugcgacauuuucgugaacagcaggggcaaacgggccucuaagggguccaaaacauguggauuuguggaugaacgcggucucuacaagucauuaaagggcgcuugcaaacugaagcuguguggggucuugggacugagacuaauggacggcaccuggguugcaauccaaacgagcgaugagacuaaauggugucccccugaccagcucgugaaucugcacgacuucaggagugaugagauugaacaccuuguaguggaggaacuggucaagaaacgggaggaaugcuuggacgcccucgagucuaucaugacaaccaaguccgugagcuuucgccgacugucgcauuuaagaaaacugguuccagguuucgggaaggcuuauacuauauucaacaagacacucauggaggccgaugcgcacuacaaaucugugaggaccuggaaugaaauuauccccuccaagggaugccuucgggucggcggccguugccauccgcacgugaacgggguauuuuucaauggaauuauccuggguccugacggccacguuuugauccccgagaugcagucaagucuacugcagcaacauauggaacuccuggagagcuccgugauuccacuuaugcacccucuggcagaucccucuacgauauuuaaagacggggaugaagccgaggacuucgucgaggugcauuugccagauguccacaaacaggugagcggaguugaccucggccugcccaacugggguaaguauguguuaaugucagcuggggcccugaucgcacuaaugcucaugauuuuuaguaugaccuguugccgcaagacagauagaaucggcuccacucaucacggaccuggcgaaaccgggaggaagguaagcgucacaucucagaacggacgggugauagcuucaugggagaguuacaaaagcgguggcgaaacuaagcuguga

SEQ ID NO: 159136 - RNA, 1575 nt, Artificial Sequence
  derived and/or modified CDS sequence (opt3) from glycoprotein__RABV__GU186397.1
augaucccccaggcccuccuguucgugccucuucuggucuuuagcuugugcuucggcaaguuuccaauuuacaccauaccggacaaauuagggcccugguccccuaucgauauucaccaucugucuuguccaaacaaucuaguuguggaggacgaaggaugcacaaaccucucagguuucaguuauauggagcugaagguaggcuacaucagcgcuauuaaagcaaauggguuuacuuguacgggaguggucaccgaagccgagacauauacuaacuucgugggcuacguuaccacaaccuuuaagagaaaacacuucaggcccacuccugaugcgugccgggcugcccauaauuggaagauggccggugaaccacgcuaugaggagucccuucacaaccccuacccugacuaucauuggcugcgaacagugaagaccacgaaagaaucuuuggucaucauaucgccaucaguggcagaucucgacccguacgauaagagccugcacagucguguauuucccuccgggaaauguucuggaaucacuguuagcuccaccuacugcucaacaaaucacgacuauacuauuagaaugccugagaacccaaggcugggcaccaguugugauaucuucgugaauagccggggcaagcgcgcuucuaaaggguccaagacaugcggauuugucgacgaaagaggucucuacaagucauuaaaaggcgcauguaagcugaaacuuugcgggguguugggacugaggcuaauggauggcaccuggguggccauucaaacgagcgacgagacuaaguggugucccccugaucagcucgucaaccugcaugacuuccggagugacgagaucgaacaccuuguuguggaggaacugguaaagaagcgcgaggaaugcuuggaugcucucgagucuauaaugacaaccaaauccgugagcuuucgaagacugucgcauuuaaggaagcuggucccagguuucgggaaggccuauacuauuuucaauaaaacacucauggaggcggacgcacacuacaagucugugcggaccuggaacgaaaucauucccuccaaaggaugccuucguguuggcggccgcugucacccgcaugugaauggggucuuuuucaacggaaucauccuggguccugauggccacguguugauucccgagaugcagucaagucuacugcagcaacauauggaacuccuggagagcuccguaauaccacuuaugcacccucuggccgaccccucuacgaucuuuaaggauggggacgaagcugaggauuucguugaggugcauuugccagacguccacagacaggugagcggagucgaucucggccugcccaauugggguaaauauguguuaaugucagccggggcacugguugcucuaaugcucaugauuuuucugaugaccugcugugugaagacagacaggacuggcaguacccaccauuccccuggagaaacaggccggaagguaagcgucacuucucagaacgggcgagugaucgccucaugggagaguuacaaaagcggaggugaaaccaaacuuuga

SEQ ID NO: 159137 - RNA, 1575 nt, Artificial Sequence; identical to SEQ ID NO: 158575
  derived and/or modified CDS sequence (opt3) from glycoprotein__RABV__GU186398.1

SEQ ID NO: 159138 - RNA, 1575 nt, Artificial Sequence
  derived and/or modified CDS sequence (opt3) from glycoprotein__RABV__GU186400.1
auggugccccaggcccuccuguucgucccucuucuggcuguuccauugugcuuuggcaaguucccgaucuacaccauucccgacaaauuagggccuuggucgccaauagauauccaccaucuguccugucccaacaaucuagugguagaggacgaaggaugcacaaaccucucugguuuuucauauauggagcugaaggugggcuacauuagugcaaucaaagucaauggguucacuuguacgggagugguuaccgaagccgagacauauacuaacuuugugggcuacgucaccacaaccuucaagagaaaacacuuuaggccuacuagcgaugcgugccgguccgcuuauaauuggaagauggccggugacccacgcuacgaagagucucuucauaaccccuauccugauuaccacuggcugcgaacagugaagaccacgaaagagucguucguaauuaucucaccaagcguugcagacuuggauccguacgacaagaguccccauucccguguguuuccuagagggaaauguucuggaauaacugucagcuccaccuauugcucaacaaaucacgauuacacuaucuggaugccagaaaaccccaggcucggcaccaguugugacauuuucacaaauagccggggcaagcgcgccucuaaaggguccaagaccugcggauuuguggaugagagaggucuguauaagucacugaaaggcgcuuguaagcucaaauuaugcggggugcugggacuuagguugauggacggcacgugggucgcaauccaaacuagcgaugaaacaaagugguguccuccagaccagcugguuaaccuacacgacuuccauagugaugagauugagcaccucgugguagaggaacuggugaaaaagcgggaagagugccuugacgcccuggaaucuaucaugaccacuaaauccgucagcuuucgccgauugucgcaucucagaaagcuggugcccgguuucgggaaggcuuacacaauauucaauaaaaccuuaauggaggccgaugcgcacuauaagucuguuaggacguggaacgagauuaucccguccaaaggaugccugcgggugggcggccguugucacccucaugucaaugggguguuuuucaacggaauuauccucggucccgacggccacguacuuaucccagaaaugcagucaagucuguugcagcaacauauggagcuacuggaaagcuccguuauuccucucaugcacccccuggcagauccaucuaccguguuuaaggacggggaugaggccgaagacuucgucgaggugcaucuucccgauguccacaaacaggugagcggaguugaccugggcuugccuucaugggguaaguacgugcucaugagugcugggauacugacagccuuaaugcugacuaucuuucuaaugaccugcugucgcagaacaaauagggcaaaguccauucagcacagccucggcgagacuggacggaaaguaucugucaccucacagaguggccgagugaucagcuccugggaaucuuauaagagcgggggagagacaaaacuguga

SEQ ID NO: 159139 - RNA, 1575 nt, Artificial Sequence
  derived and/or modified CDS sequence (opt3) from glycoprotein__RABV__GU186401.1
auggugccccaggcccuccuguucgucccucuucuggcuguuccauugugcuuuggcaaguucccgaucuacaccauucccgacaaauuagggccuuggagcccaauagauauccaccaucuguccugucccaacaaucuagugguagaggacgaaggaugcacaaaccucucugguuuuucauauauggagcugaaggugggcuacacuucggcaauuaaagucaauggguucacguguaccggagugguuacagaagccgagacuuauaccaacuuugugggcuacgucacaaccacuuucaagagaaaacacuuuaggccuacaagcgaugcgugccgguccgcuuauaauuggaagauggccggugacccacgcuacgaagagucucuucauaaccccuauccugauuaccacuggcugcgaaccgugaagacgacuaaagagucguucguaaucauuucaccaagcguugcagacuuggauccguacgacaagagucuccauucccguguguuucccagagggaaauguucuggaaucaccgucagcuccacauauugcucaacuaaucacgauuacaccauauggaugccugaaaacccaaggcugggcacaaguugugacaucuucaccaauagccggggcaagcgcgccucuaaaggguccaagacgugcggauuuguggaugagagaggucuguauaagucacucaaaggcgcuuguaaguuaaaacugugcggggugcuuggauugaggcugauggacggcacuugggucgcaauucaaacaagcgaugaaaccaaguggugucccccugaccagcuaguuaaccuccacgacuuccauagugaugagaucgagcaccuggugguagaggaacuugugaaaaagcgggaagagugccuggacgccuuggaaucuauuaugacuacaaaauccgucagcuuucgccgacucucgcaucugagaaaguuagugccagguuucgggaaggcuuacaccaucuucaauaaaacgcugauggaggccgaugcgcacuauaagucuguuaggaccuggaacgagauaauucccuccaaaggaugccuccgggugggcggccguugucacccgcaugucaaugggguguuuuucaacggaaucauucuugguccugacggccacguacugauccccgaaaugcagucaaguuugcuacagcaacauauggagcugcucgaaagcuccguuaucccacugaugcacccucuugcagaucccucuacaguguuuaaggacggggaugaggccgaagacuucgucgaggugcaucugccagauguccacaaacaggugagcggaguugacuugggccuccccucaugggguaaguacgugcugaugagugcugggauuuuaacugcccugaugcuaaccauauuucucaugacaugcugucgcagaacuaauagggcaaaguccauccagcacagccugggcgagaccggacggaaaguaucugucacaucacagaguggccgagugauuagcuccugggaaucuuauaagagugggggagagaccaaacuuuga

SEQ ID NO: 159140 - RNA, 1575 nt, Artificial Sequence
  derived and/or modified CDS sequence (opt3) from glycoprotein__RABV__GU186402.1
auggcaccccaggcucuccuguucgugccucuucuggcagucccauugugcuuaggcaaguuuccgaucuacaccauucccgacaaacuggggccuuggagcccaauagauauccaccaucuauccugucccaacaaucucguuguggaggacgaaggaugcacaaaccugucugguuucucauauauggagcuuaagguaggcuacauuagugccaucaaagugaauggguuuacuuguacgggagucgugaccgaagcggagacauauacuaacuucguuggcuacgugaccacaaccuuuaagagaaaacacuucaggccuacuccagaugcuugccggagcgccuauaauuggaagauggccggugacccccgcuacgaagagucccugcauaacccuuauccagauuaccacugguugcgaacagucaagaccacgaaagagucuuuugugauuaucucgccgucaguagccgaccucgaucccuacgacaagagccugcauagucguguuuucccuagagggaaauguuccggaauaacugugucuagcaccuauugcuccacaaaucacgauuacacuaucuggaugccagaaaaccccaggcugggcaccucaugugacauuuuuacaaauagucggggcaagcgcgcuagcaaagggucuaagaccugcggauucgucgaugagagaggucucuauaaguccuuaaaaggcgcauguaagcugaaacuuugcgggguguugggacugaggcuaauggacggcacguggguggccauccaaacuucagaugaaacaaagugguguccuccagaccagcucgucaaccugcacgacuuucauagcgaugagauugagcaccuuguuguggaggaacuggugaaaaagcgggaagagugcuuggacgcucucgaaaguaucaugaccacuaaaucuguauccuuccgccgacugagccauuuaagaaagcugguccccgguuuugggaaggccuacacaauauucaauaaaacccucauggaggcggaugcacacuauaagucggugaggacguggaacgagauuaucccgucuaaaggaugccuucggguuggcggccguugucacccucaugugaauggggucuucuuuaacggaauuauccugggucccgacggccacguguugaucccagaaaugcaguccucacuacugcagcaacauauggagcuccuggaaaguagcguaauuccucuuaugcacccccuggccgauccauccaccguuuucaaggacggggaugaggcugaagacuuuguggagguccauuugcccgaugugcacaaacacgucucuggaguggaccucggccugccuagcugggguaaguacguuuuagugucagccgggauacugacagcacuaaugcucacuaucuuccugaugaccugcugucgcagaacaaauagggcugagaguauucagcauucccuuggcgaaacuggacggaagguaagcgucaccucucagucaggccgagugaucaguagcugggaguccuauaaaucugggggagaaacaaaguuguga

SEQ ID NO: 159141 - RNA, 1575 nt, Artificial Sequence
  derived and/or modified CDS sequence (opt3) from glycoprotein__RABV__GU186403.1
augaucccccaggugcugcuguucgucccucuucugguuuuuagcuccugcuucggcaaguuuccaauuuacaccauaccggacaaauuggggcccuggucuccuaucgauauucaccauuuaucauguccaaacaaucuggugguagaggacgaaggaugcacaaaccuaagugguuucagcuauauggagcucaaggugggcuacaucuccgccauuaaagucaauggguuuacuuguacgggagugguuaccgaagcugagacauauacuaacuucgugggcuacgucaccacaaccuuuaagagaaaacacuucaggcccaugccugaugcaugccgggccgcguauaauuggaagauggcuggugacccacgcuacgaagagucucugcauaaccccuauccugauuaccacuggcuucgaacugugaagacaaccaaagagucgcugguaguuaucucaccaagcguggccgacuuggauccguacgacaagagucuccauucccgugucuuucccgggggaaaauguucuggcauaacggugagcuccacuugcuguucaaccaaucacgauuauacaaucuggaugccugaaaacccaagacugggcaccaguugcgacauuuucacuaauagcagggggaagcgggcaucuaaaggagguaagacauguggcuuuguggaugagcgcgggcuguacaagucccucaaaggagccugcaaguuaaaacuguguggcguccuugguuugagacugauggacgggaccuggguugcuauccaaacgucagaugaaauuaaguggugcagccccgaccagcuagugaaccuccacgacuuccauagugaugagaucgagcaccugguaguggaggaacuugucaaaaagagggaagagugccuggacgcauuggaaacuauaaugacaaccaaaucuguguccuuucggcgccucagccaucugcgaaaguuaguuccuggauucggcaaggccuauacuauuuucaauaaaacacugauggaggcugaugcccacuacaagucgaucagaaccuggaacgagauuaucccaucuaaaggcugucucagggucgggggacggugccacccccaugugaaugguguguuuuucaacggcaucauucuugggccggacggacacguacugauaccugaaaugcaguccucauugcuacaucagcacauggagcugcucgaaaguagcguuaucccccugaugcauccacuugcggauccuuccacgguguuuaaggacggcgaugaggcagaagacuucgucgaggugcaccuccccgauguccacaaacaaauuucugguguggacuuggggcucccaaauuggggcaaguauguucugaucagcgccggagcuuuaaccgcccugaugcuaacaauauuucucaugacuuguugccguaagaccaaccgcgcaggcucaauucagcauagucccggggagacaggaagaaaaguguccguaacuagccacaacgguagggucaucucuucaugggaaaguuacaagagcggcuccgagaccaaacuguga

SEQ ID NO: 159142 - RNA, 1575 nt, Artificial Sequence; identical to SEQ ID NO: 158893
  derived and/or modified CDS sequence (opt3) from glycoprotein__RABV__GU186404.1

SEQ ID NO: 159143 - RNA, 1575 nt, Artificial Sequence
  derived and/or modified CDS sequence (opt3) from glycoprotein__RABV__GU186406.1
augaucccccaggugcuccuguucgucccuccacuuguuuuuagcuccugcuucggcaaguuuccgauuuacaccauacccgacaaacuggggccuuggucuccaaucgauauucaccauuugucaugucccaacaauuuagugguagaggacgaaggaugcacaaaccugagugguuucagcuauauggagcuaaaggugggcuacaucuccgccauuaaagucaauggguuuacuuguacgggagugguuaccgaagcugagacauauacuaacuucgugggcuacgucaccacaaccuuuaagagaaaacacuucaggccuaugccagaugcaugccgggccgcguauaauuggaagauggcuggugacccccgcuacgaagagucucuccauaacccuuauccagauuaccacuggcugcgaacugugaagacaaccaaagagucgcuuguaaucauaucaccgagcguugccgaccuggaucccuacgacaagaguuugcauucccguguguuuccugggggaaaauguucuggcaucacggucagcuccacuugcuguucaaccaaucacgauuauacaauuuggaugccagaaaaccccagacucggcaccaguugcgacaucuucacuaauagcagggggaagcgggcaucuaaaggagguaagacauguggcuuuguggaugagcgcgggcuguacaagucccugaaaggagccugcaagcucaaauuauguggcgugcugggucuuagauugauggacgggaccugggucgcuauucaaacgucagaugaaaucaaguggugcagcccugaccagcugguuaaccuacacgacuuccauagugaugagauagagcaccucgugguagaggaacuggugaaaaagagggaagagugccuugacgcacuggaaacuauuaugacaaccaaaucugucuccuuucggcgcuugagccaucuccgaaagcuggugccaggauucggcaaggccuauacuaucuucaauaaaacauuaauggaggcugaugcccacuacaagucgauuagaaccuggaacgagaucauccccucuaaaggcugucugaggguugggggacggugccacccgcaugugaauggugucuuuuucaacggcauuauacucgggccugacggacacgugcuuauccccgaaaugcaguccucacuguugcaucagcacauggagcuacuggaaaguagcguaauuccacucaugcauccucuggcggaucccuccacgguuuuuaaggacggcgaugaggcagaagacuucguggagguccaccuuccagaugugcacaaacaaaucucuggugucgaccugggguugcccaauuggggcaaguaugugcucauaagcgccggagcucugaccgccuuaaugcugaugacauuucuaaugacuuguugccguaagaccaaccgcgcagagucaauucagcauaguccuggcgaaacagggagaaaaguuuccgugacuagccacaacggaaggguaaucucuucaugggagaguuacaagagcgguggcgaaaccaaacucuga

SEQ ID NO: 159144 - RNA, 1575 nt, Artificial Sequence
  derived and/or modified CDS sequence (opt3) from glycoprotein__RABV__GU186407.1
augaucccccaggugcugcuguucgucccucuucugguuuuuagcuccugcuucggcaaguuuccaauuuacaccauaccggacaaauuggggcccuggucuccuaucgauauucaccauuuaucauguccaaacaaucuggugguagaggacgaaggaugcacaaaccuaagugguuucagcuauauggagcucaaggugggcuacaucuccgccauuaaagucaauggguuuacuuguacgggagugguuaccgaagcugagacauauacuaacuucgugggcuacgucaccacaaccuuuaagagaaaacacuucaggcccaugccugaugcaugccgggccgcguauaauuggaagauggcuggugacccacgcuacgaagagucucugcauaaccccuauccugauuaccacuggcuucgaacugugaagacaaccaaagagucgcugguaaucauaucaccaagcguugccgacuuggauccguacgacaagagucuccauucccguguguuucccgggggaaaauguucuggcaucacggucagcuccacuugcuguucaaccaaucacgauuauacaauuuggaugccugaaaacccaagacugggcaccaguugcgacaucuucacuaauagcagggggaagcgggcaucuaaaggagguaagacauguggcuuuguggaugagcgcgggcuguacaagucccucaaaggagccugcaaguuaaaacuguguggcgugcuugguuugagacugauggacgggaccugggucgcuauucaaacgucagaugaaaucaaguggugcagccccgaccagcuaguuaaccuccacgacuuccauagugaugagauagagcaccuggugguagaggaacuugugaaaaagagggaagagugccuggacgcauuggaaacuauuaugacaaccaaaucugucuccuuucggcgccucagccaucugcgaaaguuagugccuggauucggcaaggccuauacuaucuucaauaaaacacugauggaggcugaugcccacuacaagucgauuagaaccuggaacgagaucaucccaucuaaaggcugucucaggguugggggacggugccacccccaugugaauggugucuuuuucaacggcauuauacuugggccggacggacacgugcugaucccugaaaugcaguccucauugcuacaucagcacauggagcugcucgaaaguagcguaauuccccugaugcauccacuugcggauccuuccacgguuuuuaaggacggcgaugaggcagaagacuucguggagguccaccuccccgaugugcacaaacaaaucucuggugucgacuuggggcucccaaauuggggcaaguaugugcugauaagcgccggagcuuuaaccgcccugaugcuaaugacauuucucaugacuuguugccguaagaccaaccgcgcagagucaauucagcauagucccggcgaaacagggagaaaaguuuccgugacuagccacaacggaaggguaaucucuucaugggagaguuacaagagcgguggcgaaaccaaacuguga

SEQ ID NO: 159145 - RNA, 1575 nt, Artificial Sequence; identical to SEQ ID NO: 159144
  derived and/or modified CDS sequence (opt3) from glycoprotein__RABV__GU186408.1

SEQ ID NO: 159146 - RNA, 1575 nt, Artificial Sequence
  derived and/or modified CDS sequence (opt3) from glycoprotein__RABV__GU186409.1
augaucccccaggugcugcuguucgucccucuucugguuuuuagcuccugcuucggcaaguuuccaauuuacaccauaccggacaaauuggggcccuggucuccuaucgauauucaccauuuaucauguccaaacaaucuggugguagaggacgaaggaugcacaaaccuaagugguuucagcuauauggagcucaaggugggcuacaucuccgccauuaaagucaauggguuuacuuguacgggagcugugaccgaagcagagacauauacuaacuucguuggcuacgugaccacaaccuuuaagagaaaacacuucaggcccaugccugaugccugccgggcggcuuauaauuggaagauggccggugacccacgcuacgaagagucucugcauaaccccuauccugauuaccacuggcuucgaacugucaagacaaccaaagagucgcuggugaucauaucaccaagcguagcagacuuggauccguacgacaagagucuccauucccguguuuuucccgggggaaaauguucuggcaucacggugagcuccacuugcuguucaaccaaucacgauuauacaauuuggaugccugaaaacccaagacugggcaccaguugcgacaucuucacuaauagcagggggaagcgggccucuaaaggagguaagacauguggcuuugucgaugagcgcgggcuguacaagucccucaaaggagcuugcaaguuaaaacuguguggcgugcuugguuugagacugauggacgggaccuggguggcaauucaaacgucagaugaaaucaaguggugucccccugaccagcuagucaaccuccacgacuuccauagcgaugagauagagcaccugguuguggaggaacuugugaaaaagagggaagagugccuggacgccuuggaaacuauuaugacaaccaaaagugugucuuuucggcgccucucccaucugcgaaaguuagucccaggauucggcaaggcuuauacuaucuucaauaaaacacugauggaggccgaugcgcacuacaagagcauuagaaccuggaacgagaucauccccucgaaaggcugccucaggguagggggacggugccacccgcauguuaaugguguguuuuucaacggcauuauacuugggccugacggacacguccugauccccgaaaugcagucuuccuugcuacaucagcacauggagcugcucgaaucaagugugauuccacugaugcauccucuugcagaucccagcacgguauuuaaggacggcgaugaggccgaagacuucguugaggugcaccucccagauguccacaaacaaaucuccgguguggacuuggggcuccccaauuggggcaaguauguccugauaucugcuggagccuuaaccgcacugaugcuaacaauuuuucucaugacuuguugccguaagaccaaccgcgcuggcagcauccagcauucaccuggggagacaggaagaaaagugaguguuacuucccacaacgguagggugaucagcucuugggaaucauacaagaguggcagcgagaccaaacuguga

SEQ ID NO: 159147 - RNA, 1575 nt, Artificial Sequence
  derived and/or modified CDS sequence (opt3) from glycoprotein__RABV__GU186410.1
augaucccccaggugcugcuguucgucccucuucugguuuuuagcuccggcuucgggaaguuuccaauuuacaccauaccggacaaauugggacccuggucuccuaucgauauucaccauuuaucaugcccaaacaaucuggugguagaggacgaagguuguacaaaccuaaguggcuucagcuauauggagcucaaggugggguacaucuccgccauuaaagucaauggauuuacuugcacgggcgugguuaccgaagcugagacauauacuaacuucguggguuacgucaccacaaccuuuaagagaaaacacuucaggcccaugccugaugcaugucgggccgcguauaauuggaagauggcuggggacccacgcuacgaagagucucugcauaaccccuauccugauuaccacuggcuucgaacugugaagacaaccaaagagucgcugguaaucauaucaccaagcguugccgacuuggauccguacgacaagagucuccauucccguguguuucccggaggcaaaugcucuggcaucacggucagcuccacuuguugcucaaccaaucacgauuauacaauuuggaugccugaaaacccaagacuggggaccaguugugacaucuucacuaauagcaggggaaagcgggcaucuaaagguggcaagacaugcggguuuguggaugagcgcggacuguacaagucccucaaaggcgccuguaaguuaaaacugugcggugugcuuggguugagacugauggacggaaccugggucgcuauucaaacgucagaugaaaucaagugguguagccccgaccagcuaguuaaccuccacgacuuccauagugaugagauagagcaccuggugguagaggaacuugugaaaaagagggaagagugccuggacgcauuggaaacuauuaugacaaccaaaucugucuccuuucggcgccucagccaucugcgaaaguuagugccuggcuucggcaaggccuauacuaucuucaauaaaacacugauggaggcugaugcccacuacaagucgauuagaaccuggaacgagaucaucccaucuaaagggugccucaggguuggaggucggugucacccccaugugaauggcgucuuuuucaacgggauuauacuuggaccggacggccacgugcugaucccugaaaugcaguccucauugcuacaucagcacauggagcugcucgaaaguagcguaauuccccugaugcauccacuugcggauccuuccacgguuuuuaaggacggugaugaggcagaagacuucguggagguccaccuccccgaugugcacaaacaaaucucuggggucgacuugggccucccaaauuggggaaaguaugugcugauaagcgccggcgcuuuaaccgcccugaugcuaacaauuuuucucaugacuugcugucguaagaccaaccgcgcagggucaauccagcauagucccggagagacagguagaaaaguuuccgugacuagccacaacggcaggguaaucucuucaugggaaaguuacaagagcggguccgagaccaaacuguga

SEQ ID NO: 159148 - RNA, 1575 nt, Artificial Sequence; identical to SEQ ID NO: 158900
  derived and/or modified CDS sequence (opt3) from glycoprotein__RABV__GU345746.1

SEQ ID NO: 159149 - RNA, 1575 nt, Artificial Sequence
  derived and/or modified CDS sequence (opt3) from glycoprotein__RABV__GU345747.1
augaucccccaggcccuccuguucgugccucuucuggucuuuagcuugugcuucggcaaguuuccaauuuacaccauaccggacaaauuagggcccugguccccuaucgauauucaccaucugucuuguccaaacaaucuaguuguggaggacgaaggaugcacaaaccucucagguuucaguuauauggagcugaagguaggcuacaucagcgcuauuaaagugaauggguuuacuuguacgggagucgugaccgaagcagagacauauacuaacuucguuggcuacgugaccacaaccuuuaagagaaaacacuucaggcccacuccugaugccugccgggcggcuuauaauuggaagauggccggugacccacgcuacgaagagucccuucauaaccccuauccugauuaccacuggcugcgaacagucaagaccacgaaagagucuuuggugaucauaucgccaucaguagcagaccucgauccguacgacaagagccugcauagucguguuuuucccuccgggaaauguucuggaaucacugugagcuccaccuauugcucaacaaaucacgauuacacuauuuggaugccugaaaacccaagacugggcaccaguugugacaucuucgucaauagcaggggcaagcgggccucuaaaggguccaagacaugcggauuuguggaugagcgcggucucuauaagucauuaaaaggcgcuuguaagcugaaacuuugcgggguguugggacugagacuaauggacggcaccugggucgcaauucaaacgagcgaugaaacuaaguggugucccccugaccagcucguuaaccugcacgacuucaggagugaugagaucgagcaucuugugguagaggaacuggugaaaaagcgggaagagugcuuggacgcccucgaaucuauaaugacaaccaaauccgucagcuuucgccgacugucgcacuuaagaaagcuggugccagguuucgggaaggcuuacacuauuuucaauaaaacacucauggaggccgaugcgcauuauaagucuguuaggaccuggaacgagaucauucccuccaaaggaugccuucgggugggcggccguugucacccgcacgucaaugggguguuuuucaacggaaucauccuggguccugacggccauguauugauucccgaaaugcagucaagucuacugcagcaacacauggagcuccuggaaagcuccguuauaccacuuaugcauccucuggcagaucccucuacgaucuuuaaggacggggaugaggccgaagacuucguggagguccacuugccagaugugcauaaacaggucagcggaguggaccucggccugcccaauugggguaaguacguuuuaaugucagcuggggcccugauugcacuaaugcucaugaucuuucugaugaccugcugucgcaagacagauagaacuggcaguacccaccacuccccuggagagacaggcaggaaagugagcguaacuucucagaacgggcgggucauagcuucaugggaaaguuauaagagcggaggugagacccgacuuuga

SEQ ID NO: 159150 - RNA, 1575 nt, Artificial Sequence
  derived and/or modified CDS sequence (opt3) from glycoprotein__RABV__GU565703.1
auggugccccagguccuccuguucguuccucuucugggcuuuagcuugugcuucgggaaguuuccaaucuacaccauuccggacaaauuaggacccugguccccuauagauauccaccaucugucuuguccaaacaaucuagugguagaggacgaagguugcacaaaccucucagaguucaguuauauggaacugaaggugggcuacauuagcgccaucaaagucaauggguuuacuuguacgggagugguuaccgaggcugaaacauauacuaacuucgugggcuacgucaccacaaccuuuaagagaaaacacuucaggcccacuccugaugcaugccgggccgcguauaauuggaagauggcuggugacccacgcuacgaggagucccuucauaaccccuauccugauuaccacuggcugcgaacagugaagaccacgaaagaaucuuugguaauuaucucgccaucaguuacugaccucgauccguacgacaagagccugcauagucguguguuucccgggggaaauuguuccggcauaaccgucucuagcacauauugcuccacuaaccacgauuacaccaucuggaugccugagaaucugagacucggcacaucaugugacauuuucaccaacaguagggggaaacgggccagcaagggagguaaaacgugcggcuuuguggaugaacgcggguuauauaagucucugaagggagcauguaaacuuaaguugugcggcgugcugggucuaagacucauggacgggacuugggucgccaugcaaacauccgaugagaccaaaugguguccacccggacagcugguuaaucuucacgacuucaggucagacgagaucgaacaucuggugguagaggaauuggugaagaaacgggaggaaugccucgaugcucuggagagcauuaugacuacaaagagugucucuuuucgccgauuaucccaccugagaaaacucgugccuggcuucggcaaggcauacaccaucuucaacaagacgcuuauggaggccgacgcucauuauaaaagcguuaggaccuggaaugaaauaauuccaucgaaggggugccugcgggugggaggucguugucacccccacgucaacggcguguuuuucaaugggaucauuuugggaucugauggccauguacuaaucccggagaugcaguccucacugcuccagcaacacauggaacugcuugagaguagcguuaucccucugaugcaucccuuggccgacccauccacaguguuuaaagauggugacgaagucgaggauuucguggagguccaccucccugacgugcaugaacagguuucugggguggagcugggcuuacccaacuggggaaaguacguacugaugauugcgggcgcacuaauagcccucaugcugaucauuuuucuuaugacuugcugucgcagagucaacaggccagaaagcacccagucaaguuugggggagacaggacggaauguguccguuacuagccagucugguaaagugaucucaaguugggaaagcuauaaguccggcggggagacccgacuguga

SEQ ID NO: 159151 - RNA, 1575 nt, Artificial Sequence
  derived and/or modified CDS sequence (opt3) from glycoprotein__RABV__GU565704.1
auggugccccagguccuccuguucgccccucuucugguuuuuagcuugugcuucggcaaguuuccaaucuacaccauuccggacaaauuagggcccugguccccuauagaucugcaccaucuaucuuguccaaacaaucucgugguagaggacgaaggaugcacaaaccugucagguuucaguuauauggagcuuaaggugggcuacaucagcgcuauuaaagucaauggguuuacuuguacgggagugguuaccgaagcagagacauauacuaacuucgugggcuacgucaccacaaccuuuaagagaaaacacuucaggcccacuccugaugccugccgggcggcuuauaauuggaagauggccggugacccacgcuacgaagagucccugcauaaccccuauccugauuaccacugguugcgaacagugaagaccacgaaagagucucucguaaucauuucgccaucaguuacugaccuggauccguacgacaagagccugcauagucguguguuucccgggggaaauuguuccggcaucaccgucucuagcacauauugcuccacuaaccacgauuacaccauauggaugccugaaaaucucagauuaggcacaucaugugacaucuucacccacaguagggggaaacgggcaagcaagggagauaaaacgugcgguuuuguggacgagcgcggccuguauaagucucuuaagggggccuguaaauugaagcugugcggagugcuaggccucagacugauggaugguacuugggucgcuaugcaaacauccgacgaaaccaaaugguguccacccgggcagcuuguuaaccugcaugacuucaggucagaugagauugagcacuuggugguagaggaacucgugaagaaacgggaagagugccuggacgcauuagaaagcaucaugacuacaaagagugucucuuuucgccgacugucccaucucagaaaacuugugccuggauucggcaaggccuacaccauuuucaauaagacgcugauggaggcugaugcccacuauaaaagcguucagaccuggaacgagaucauaccaucgaagggcugcuugagggugggggaacggugucacccccaugucaauggaguguuuuucaacgguauuauccuaggcucugacgggcacguacugauuccggagaugcaguccucacuccugcaacagcauauggaacuucuggagaguagcguuaucccuuugaugcacccccucgcggauccauccacaguguuuaaagacggagaugaagucgaggacuucguggagguccaucugccugaugugcacaagcagguuucuggcguggacuuaggucugcccaaaugggggaaguacguacuaaugaucgcaggcgcccucauugcucugaugcuuauaaucuuuuugaugacuugcugucgucgcgucaauagaccagaaagcacccagucaaaccugggaggcacagggaggaacgugaguguuacuucccaaagcggaaaggugauuucuucaugggagaguuauaaaagcgguggcgaaacccggcucuga

SEQ ID NO: 159152 - RNA, 1575 nt, Artificial Sequence; identical to SEQ ID NO: 159132
  derived and/or modified CDS sequence (opt3) from glycoprotein__RABV__GU591789.1

SEQ ID NO: 159153 - RNA, 1575 nt, Artificial Sequence; identical to SEQ ID NO: 159132
  derived and/or modified CDS sequence (opt3) from glycoprotein__RABV__GU591791.1

SEQ ID NO: 159154 - RNA, 1575 nt, Artificial Sequence
  derived and/or modified CDS sequence (opt3) from glycoprotein__RABV__GU647092.1
augaucccccaggcccuccuguucgugccucuucuggucguuccauugugcuuuggcaaguucccgauuuacaccauacccgacaaauuagggccuuggagcccaaucgauauucaccaucuguccugucccaacaaucuagugauggaggacgaaggaugcacaaaccucucugguuuuucauauauggagcugaagguaggcuacaucagugcuauuaaagugaauggguucacuuguacgggagucgugaccgaagcagagacauauacuaacuuuguuggcuacgugaccacaaccuucaagagaaaacacuuuaggccuacuccagaugccugccggagcgcguauaauuggaagauggcuggugacccccgcuacgaagagucccuucauaacccuuauccagauuaccacuggcugcgaacagucaagaccacgaaagagccguucgugaucauaucucccucgguagccgacuuggauccuuacgacaagucacuccauagccguguuuuuccaagagggaaauguaguggaaucacuguguccucuaccuauugccccacaaaucacgauuacacuauuuggaugccugaaaacccaaggagcggcaccuccugugacaucuucacaaauucacggggcaagcgcgcauuuaaagggaguaagaccugcggauucgucgaugagagaggucuguauaagagccugaaaggcgccuguaagcucaaauuaugcggggugcugggacuuagguugauggacggcacguggguggcuauucaaacuucugaugaaacaaaguggugucccccggaccagcuggucaaccuacacgacuuucauuccgaugagaucgagcaccucguuguggaggaacuggugaaaaagcgggaagagugccuugacgcacuggaaucaauaaugaccacuaaaagcguaaguuuccgccgauugucucaucucagaaagcuggucccugguuucgggaaggccuacacaauuuuuaauaaaaccuuaauggaggcugaugcccacuauaaguccgugaggacguggaacgagaucauucccagcaaaggaugccugcggguuggcggccguugucacccacaugugaauggggucuucuuuaacggaaucauccucgguccugacggccacgugcuuauucccgaaaugcagucgucucuguugcagcaacauauggagcuacuggaauccucaguaauaccacucaugcacccccuggcggauccuaguaccguuuucaagaauggggacgaggcagaagauuuuguggagguccaucuuccagacgugcacaaacaggucagcggaguggaucugggcuugccguccugggguaaguacguucucaugucugccgggauccugacagcuuuaaugcugaugauuuuccuaaugacuugcugucgcagaaccaacaggcccgagagcauccagcacucacucggcgaaacaggacggaaggugaguguaacuucccagagcggccgagucauaucuucaugggagaguuauaaaagcgggggagaaaccaagcuguga

SEQ ID NO: 159155 - RNA, 1575 nt, Artificial Sequence
  derived and/or modified CDS sequence (opt3) from glycoprotein__RABV__GU937024.1
auggugccccaggcccuccuguucgucccucuucugguuuuuagcaugugcuucggcaaguuuccaaucuacaccauuccggacaaauuggggcccugguccccuauagauauccaccauuuaucuuguccaaacaaucuggugguagaggacgaaggaugcacaaaccuaucagguuucaguuauauggagcucaaggugggcuacauuagcgcuaucaaagucaauggguuuacuuguacgggagugguuaccgaagcagagacauauacuaacuucgugggcuacgucaccacaaccuuuaagagaaaacacuucaggcccacuccugaugccugccgggcggcuuauaauuggaagauggccggugacccacgcuacgaagagucccugcauaaccccuauccugauuaccacuggcuucgaacagugaagaccacgaaagagucucugguaauuaucucgccaucaguugcagacuuggauccguacgacaagagccuccauagucguguguuucccaaugggaaauguuccggaauaacuaucucuagcaccuauugcccuacaaaccacgauuacacuauuuggcugccagaaaaucccagacugggcaccuccugugacaucuucacaaacucaaggggcaagcgggccaguaaagggagcaagaccugcggauuugucgaugagcgcggucucuauaagucuuuaaaaggcgcuuguaagcugaaacuuugcgggguguugggacugagacuaauggacggcacguggguggcaaugcaagccuccgaugaaacuaagugguguccuccagaccagcucgucaaucugcacgacuucaggucagaugagauugagcaucuuguuguggaggaacuggugaaaaagcgggaagagugcuuggacgcucucgaaagcaucaugacaaccaaaaguguaucuuuucgccgacugucccacuuaagaaagcugguccccgguuucgggaaggccuacacuauauucaacaaaacacucauggaggcggaugcacauuauaagagcgugaggaccuggaaugagauuaucccgucgaaaggaugccuucggguuggcggccguugucacccucacgugaacggggucuuuuucaauggaauuauccugggucccgacggccauguguugaucccagaaaugcagucuucccuacugcagcaacacauggagcuccuggaaucaaguguaauuccucuuaugcauccccuggccgauccaagcacgguuuuuaaggacggggaugaggcugaaaacuucguggagguccacuugcccgacgugcauaaacagauauccggagucgaucucggccugccuaacugggguaaguacguguuaguuucugccggggugcugaucgcacuaaugcucauuaucuuucugaugaccugcuguggccgcguaaauagaccaaagagcacacagcacaaccuuggaggcacugggagggaggucucagugaccccgcagaguggaaaaguuauauccagcugggaaucuuauaagucagguggcgagacacgguuguga

SEQ ID NO: 159156 - RNA, 1575 nt, Artificial Sequence
  derived and/or modified CDS sequence (opt3) from glycoprotein__RABV__GU937025.1
auggugccccaggcccugcuguucgucccucuucugguuuuuagcaugugcuucggcaaguuuccaaucuacaccauuccggacaaauuggggcccugguccccuauagauauccaccauuuaucuuguccaaacaaucuggugguagaggacgaaggaugcacaaaccuaucagguuucaguuauauggagcucaaggugggcuacauuagcgcuaucaaagucaauggguuuacuuguacgggagugguuaccgaagcagagacauauacuaacuucgugggcuacgucaccacaaccuuuaagagaaaacacuucaggcccacuccugaugccugccgggcggcuuauaauuggaagauggccggugacccacgcuacgaagagucccugcauaaccccuauccugauuaccacuggcuucgaacagugaagaccacgaaagagucucugguaauuaucucgccaucaguugcagacuuggauccguacgacaagagccuccauagucguguguuucccaaugggaaauguuccggaauaacuaucucuagcaccuauugcccuacaaaccacuacuauacuauuuggcugccagaaaaucccagacaagagaccuccugugauaucuucacaaacucaaggggcaagcgggccaguaaaggcagcaagaccugcggguuugucgacgaacgcggacuguacaagucucucaaaggugcuuguaaguuaaaacugugcggcgugcuuggguugagacugauggauggaacguggguggcaaugcaggccuccgacgagacuaagugguguccuccagaucagcuagucaaucuccacgacuucaggucagacgagauugaacaucugguuguggaggaacuugugaaaaagcgggaggaaugccuggaugcuuuggagagcaucaugacaaccaaaaguguaggcuuucgccgacucucucaccugagaaaguuaguccccgguuucaggaaggccuauacuauauucaacaaaacacugauggaggcggacgcacauuacaaguccgugcggaccuggaaugaaauuaucccgagcaaagggugccuccguguuggaggccgcugucacccucacgugaacggcgucuuuuucaaugggauuauccuuggacccgauggucaugugcugaucccagagaugcagucgucuuugcuacaacagcacaugggccugcucgaauccucaguaauuccucugaugcauccccuugccgacccaaguacgguuuuuaaggauggggacgaggcugaaaacuucguggagguccaccuccccgaugugcauaaacagauaagcggagucgacuugggccucccuaacugggguaaguaugugcugguuuccgccgggguguuaaucgcacugaugcuaauuaucuuucucaugaccugcuguggcagaguaaauaggccaaagucuacacagcacaaccugggaggcacugggcgggaggucagcgugaccccgcaaucaggaaaaguuauaaguuccugggaaagcuacaagucugguggcgagacacgacuuuga

SEQ ID NO: 159157 - RNA, 1575 nt, Artificial Sequence
  derived and/or modified CDS sequence (opt3) from glycoprotein__RABV__GU937026.1
auggugccccaggcccuccuguucgucccucuucugguuuuuagcaugugcuucggcaaguuuccaaucuacaccauuccggacaaauuggggcccugguccccuauagauauccaccauuuaucuuguccaaacaaucuggugguagaggacgaaggaugcacaaaccuaucagguuucaguuauauggagcucaaggugggcuacauuagcgcuaucaaagucaauggguuuacuuguacgggagugguuaccgaagcagagacauauacuaacuucgugggcuacgucaccacaaccuuuaagagaaaacacuucaggcccacuccugaugccugccgggcggcuuauaauuggaagauggccggugacccacgcuacgaagagucccugcauaaccccuauccugauuaccacuggcuucgaacagugaagaccacgaaagagucucugguaauuaucucgccaucaguugcagacuuggauccguacgacaagagccuccauagucguguguuucccaaugggaaauguuccggaauaacuaucucuagcaccuauugcccuacaaaccacgauuacacuauuuggcugccagaaaaucccagacugggcaccuccugugacaucuucacaaacucaaggggcaagcgggccaguaaagggagcaagaccugcggauuugucgaugagcgcggucucuauaagucuuuaaaaggcgcuuguaagcugaaacuuugcgggguguugggacugagacuaauggacggcacguggguggcaaugcaagccuccgaugaaacuaagugguguccuccagaccagcucgucaaucugcacgacuucaggucagaugagauugagcaucuuguuguggaggaacuggugaaaaagcgggaagagugcuuggacgcucucgaaagcaucaugacaaccaaaaguguaucuuuucgccgacugucccacuuaagaaagcugguccccgguuucgggaaggccuacacuauauucaacaaaacacucauggaggcggaugcacauuauaagagcgugaggaccuggaaugagauuaucccgucgaaaggaugccuucggguuggcggccguugucacccucacgugaacggggucuuuuucaauggaauuauccugggucccgacggccauguguugaucccagaaaugcagucuucccuacugcagcaacacauggagcuccuggaaucaaguguaguuccucuuaugcauccccuggccgauccaagcacgguguugaaggacggggaugaggcugaaaacuuugucgaggugcaccuccccgacguccauaaacagauuuccggaguggaucugggcuuaccuaacugggguaaguacguucuggugucugccgggguacuaauagcacucaugcugaucauuuuccuuaugaccugcuguggccgcgucaauagaccaaagagcacacagcacaacuugggaggcacugggaggaaagugucaguuaccccgcagaguggaaaggugaucuccagcugggagucuuauaaaucagguggcgaaacacggcuguga

SEQ ID NO: 159158 - RNA, 1575 nt, Artificial Sequence
  derived and/or modified CDS sequence (opt3) from glycoprotein__RABV__GU937027.1
auggugccccaggcccuccuguucgucccucuucugguuuuuagcaugugcuucggcaaguuuccaaucuacaccauuccggacaaauuggggcccugguccccuauagauauccaccauuuaucuuguccaaacaaucuggugguagaggacgaaggaugcacaaaccuaucagguuucaguuauauggagcucaaggugggcuacauuagcgcuaucaaagucaauggguuuacuuguacgggagugguuaccgaagcagagacauauacuaacuucgugggcuacgucaccacaaccuuuaagagaaaacacuucaggcccacuccugaugccugccgggcggcuuauaauuggaagauggccggugacccacgcuacgaagagucccugcauaaccccuauccugauuaccacuggcuucgaacagugaagaccacgaaagagucucugguaauuaucucgccaucaguugcagacuuggauccguacgacaagagccuccauagucguguguuucccaaugggaaauguuccggaauaacuaucucuagcaccuauugcccuacaaaccacuacuauacuauuuggcugccagaaaaucccagacugggcaccuccugugauaucuucacaaacucaaggggcaagcgggccaguaaagggagcaagaccugcggauuugucgacgagcgcggucucuacaagucuuuaaaaggcgcuuguaagcugaaacuuugcgggguguugggacugagacuaauggauggcacguggguggcaaugcaagccuccgacgaaacuaagugguguccuccagaucagcucgucaaucugcacgacuucaggucagacgagauugagcaucuuguuguggaggaacuggugaaaaagcgggaagagugcuuggaugcucucgaaagcaucaugacaaccaaaaguguaucuuuucgccgacugucccacuuaagaaagcugguccccgguuucgggaaggccuauacuauauucaacaaaacacucauggaggcggacgcacauuacaagagcgugaggaccuggaaugagauuaucccgucgaaaggaugccuucggguuggcggccguugucacccucacgugaacggggucuuuuucaauggaauuauccugggucccgauggccgcguguugaucccagaaaugcagucuucccuacugcagcaacauauggagcuccuggaaucaaguguaauuccucuuaugcacccccuggccgacccaagcacgguuuuuaaggauggggacgaggcugaaaacuucguggagguccauuugcccgaugugcacaaacagauauccggagucgaccucggccugccuaacugggguaaguauguguuaguuucugccggggugcugaucgcacuaaugcucauuaucuuucugaugaccugcuguggcagaguaaauaggccaaagagcacacagcauaaccuuggaggcacugggcgggaggucucagugaccccgcagaguggaaaaguuauauccagcugggaaucuuacaagucagguggcgagacacgauuguga

SEQ ID NO: 159159 - RNA, 1575 nt, Artificial Sequence
  derived and/or modified CDS sequence (opt3) from glycoprotein__RABV__GU937028.1
auggugccccaggcccuccuguucgucccucuucugguuuuuagcaugugcuucggcaaguuuccaaucuacaccauuccggacaaauuggggcccugguccccuauagauauccaccauuuaucuuguccaaacaaucuggugguagaggacgaaggaugcacaaaccuaucagguuucaguuauauggagcucaaggugggcuacauuagcgcuaucaaagucaauggguuuacuuguacgggagugguuaccgaagcagagacauauacuaaccuggugggcuacgucaccacaaccuucaagagaaaacacuuuaggcccacuccugaugccugccgggcggcuuauaauuggaagauggccggugacccacgcuacgaagagucccuucauaaccccuauccugauuaccacuggcugcgaacagugaagaccacgaaagagucuuugguaauuaucucgccaucaguugcagaccucgauccguacgacaagagccugcauagucguguguuccccaaugggaaauguuccggaauaacuaucucuagcaccuauugcccuacaaaccacgauuacacuauuuggcugccagaaaaucccagacucggcaccuccugugacaucuuuacaaacucaaggggcaagcgggccaguaaagggagcaagaccugcggauucgucgaugagcgcgguuuauauaagucucugaaaggcgcuuguaaacuuaaauugugcggggugcugggacuaagacucauggacggcacguggguggcaaugcaagccuccgaugaaacuaagugguguccuccagaccagcuggucaaucuucacgacuuuaggucagaugagauugagcaucugguuguggaagaguugguaaagaagcgggaagagugccucgacgcucuggaaagcaucaugacaaccaaaagugugucuuuccgccgauuaucccaccugagaaagcucguccccgguuuugggaaggccuacacuauauucaacaaaacacuuauggaggcggaugcacauuauaagagcgugaggaccuggaaugagauuaucccgucgaaaggaugccugcggguuggcggccguugucacccucacgugaacggggucuucuuuaauggaauuaucuugggucccgacggccaugugcuaaucccagaaaugcagucuucccugcuccagcaacacauggagcugcuugaaucaaguguaauuccucugaugcaucccuuggccgauccaagcacgguuuucaaggacggggaugaggcugaaaacuuuguggagguccaccuccccgacgugcauaaacagauauccggagucgaucugggcuuaccuaacugggguaaguacgugcugguuucugccggggugcuaaucgcacucaugcugauuaucuuccuuaugaccugcuguggccgcguaaauagaccaaagagcacacagcacaacuugggaggcacugggagggaggucucagugaccccgcagaguggaaaaguuauauccagccgggaaucuuauaagucagguggcgagacacgacuguga

SEQ ID NO: 159160 - RNA, 1575 nt, Artificial Sequence
  derived and/or modified CDS sequence (opt3) from glycoprotein__RABV__GU937029.1
auggugccccaggcccuccuguucgucccucuucugguuuuuagcaugugcuucggcaaguuuccaaucuacaccauuccggacaaauuggggcccugguccccuauagauauccaccauuuaucuuguccaaacaaucuggugguagaggacgaaggaugcacaaaccuaucagguuucaguuauauggagcucaaggugggcuacauuagcgcuaucaaagucaauggguuuacuuguacgggagugguuaccgaagcagagacauauacuaaccuggugggcuacgucaccacaaccuucaagagaaaacacuuuaggcccacuccugaugccugccgggcggcuuauaauuggaagauggccggugacccacgcuacgaagagucccuucauaaccccuauccugauuaccacuggcugcgaacagugaagaccacgaaagagucuuugguaauuaucucgccaucaguugcagaccucgauccguacgacaagagccugcauagucguguguuccccaaugggaaauguuccggaauaacuaucucuagcaccuauugcccuacaaaccacgauuacacuauuuggcugccagaaaaucccagacucggcaccuccugugacaucuuuacaaacucaaggggcaagcgggccaguaaagggagcaagaccugcggauucgucgaugagcgcgguuuauauaagucucugaaaggcgcuuguaaacuuaaauugugcggggugcugggacuaagacucauggacggcacguggguggcaaugcaagccuccgaugaaacuaagugguguccuccagaccagcuggucaaucuucacgacuuuaggucagaugagauugagcaucugguuguggaagaguugguaaagaagcgggaagagugccucgacgcucuggaaagcaucaugacaaccaaaagugugucuuuccgccgauuaucccaccugagaaagcucguccccgguuuugggaaggccuacacuauauucaacaaaacacuuauggaggcggaugcacauuauaagagcgugaggaccugggacgagauuaucccgucgaaaggaugccugcggguuggcggccguugucacccucacgugaauggggucuucuuuaacggaauuaucuugggucccgauggccaugugcuaaucccagaaaugcagucuucccugcuccagcaacacauggagcugcuugaaucaaguguaauuccucugaugcaucccuuggccgacccaagcacgguuuucaaggauggggacgaggcugaaaauuuuguggagguccaccuccccgaugugcauaaacagauauccggagucgaccugggcuuaccuaacugggguaaguacgugcugguuucugccggggugcuaaucgcacucaugcugauuauccuuuugaugaccugcuguggccgcguaaacagaccaaagagcacacagcacaaucugggaggcacugggagggaggucucagugaccccgcagaguggaaaaguuauauccagcugggaaucuuauaagucagguggcgagacacggcucuga

SEQ ID NO: 159161 - RNA, 1575 nt, Artificial Sequence
  derived and/or modified CDS sequence (opt3) from glycoprotein__RABV__GU937030.1
auggugccccaggcccugcuguucgucccucuucugguuuuuagcaugugcuucggcaaguuuccaaucuacaccauuccggacaaauuggggcccugguccccuauagauauccaccauuuaucuuguccaaacaaucuggugguagaggacgaaggaugcacaaaccuaucagguuucaguuauauggagcucaaggugggcuacauuagcgcuaucaaagucaauggguuuacuuguacgggagugguuaccgaagcagagacauauacuaacuucgugggcuacgucaccacaaccuuuaagagaaaacacuucaggcccacuccugaugccugccgggcggcuuauaauuggaagauggccggugacccacgcuacgaagagucccugcauaaccccuauccugauuaccacuggcuucgaacagugaagaccacgaaagagucucugguaauuaucucgccaucaguugcagacuuggauccguacgacaagagccuccauagucguguguuucccaaugggaaauguuccggaauaacuaucucuagcaccuauugcccuacaaaccacgauuacacuauuuggcugccagaaaaucccagacugggcaccuccugugacaucuucacaaacucaaggggcaagcgggccaguaaagggagcaagaccugcggauuugucgaugagcgcggucucuauaagucuuuaaaaggcgcuuguaagcugaaacuuugcgggguguugggacugagacuaauggacggcacguggguggcaaugcaagccuccgaugaaacuaagugguguccuccagaccagcucgucaaucugcacgacuucaggucagaugagauugagcaucuuguuguggaggaacuggugaaaaagcgggaagagugcuuggacgcucucgaaagcaucaugacaaccaaaaguguaucuuuucgccgacugucccacuuaagaaagcccgucccggguuucgggaaggccuacacuauauucaacaaaacacugauggaggcggaugcacauuauaagagcgugaggaccuggaaugagauuaucccuucgaaaggaugccuccggguuggcggccguugucacccccacgugaacggggucuuuuucaauggaauuauccuugguccagacggccaugugcugaucccugaaaugcagucuuccuugcuacagcaacacauggagcugcucgaaucaaguguaauuccccugaugcauccacuugccgaucccagcacgguuuuuaaggacggggaugaggcugaaaacuucguggagguccaccucccugacgugcauaaacagauauccggagucgauuugggccucccaaacuggggugaguacgugcugguuucugccgggguguuaaucgcacugaugcuaauuaucuuucucaugaccugcuguggccgcguaaauagacccaagagcacacagcacaaccugggaggcacugggagggaagucucagugaccccgcagaguggaaagguuauauccagcugggagucuuauaaaucagguggcgaaacacggcuuuga

SEQ ID NO: 159162 - RNA, 1575 nt, Artificial Sequence
  derived and/or modified CDS sequence (opt3) from glycoprotein__RABV__GU937031.1
auggugccccaggcccuucucuucgucccucuucugguuuuuagcaugugcuucggcaaguuuccaaucuacaccauuccggacaaauuggggcccugguccccuauagauauccaccauuuaucuuguccaaacaaucuggugguagaggacgaaggaugcacaaaccuaucagguuucaguuauauggagcucaaggugggcuacauuagcgcuaucaaagucaauggguuuacuuguacgggagugguuaccgaagcagagacauauacuaacuucgugggcuacgucaccacaaccuuuaagagaaaacacuucaggcccacuccugaugccugccgggcggcuuauaauuggaagauggccggugacccacgcuacgaagagucccugcauaaccccuauccugauuaccacuggcuucgaacagugaagaccacgaaagagucucugguaauuaucucgccaucaguugcagacuuggauccguacgacaagagccuccauagucguguguuucccaaugggagauguuccggaauaacuaucucuagcaccuauugcccuacaaaccacgauuacacuauuuggcugccagaaaaucccaggcugggcaccuccugugacaucuucacaaacucacggggcaaacgcgccaguaaggggagcaaaaccugcggauuugucgaugagagaggucucuauaagucuuuaaagggcgcuuguaaacugaagcugugcgggguguugggacugaggcuaauggacggcacguggguggcaaugcaagccuccgaugaaacuaaaugguguccuccagaccagcucgucaaucugcacgacuuccggucagaugagauugagcaucuuguuguggaggaacugguaaagaaacgcgaagagugcuuggacgcucucgaaagcaucaugacaaccaagagugugucuuuucgaagacugucccacuuaaggaaacugguccccgguuucgggaaggccuacacuauauucaacaagacacucauggaggcggaugcacauuauaaaagcgugcggaccuggaaugagauuaucccgucgaagggaugccuucguguuggcggccgcugucacccucacgugaacggggucuuuuucaauggaauuauccugggucccgacggccauguguugaucccagaaaugcagucuucccuacugcagcaacacauggagcuccuggaaucaaguguaauuccucuuaugcauccccuggccgauccaagcacgguuuuuaaagacggggaugaggcugaaaacuucguggagguccacuugcccgacgugcauaagcagauauccggagucgaucucggccugccuaacugggguaaauacguguuaguuucugccggggugcugaucgcacuaaugcucauuaucuuucugaugaccugcuguggcagaguaaauaggccaaagagcacacagcacaaccuuggaggcacugggcgggaggucucagugaccccgcagaguggaaagguuauauccagcugggaaucuuauaaaucagguggcgagacacgauuguga

SEQ ID NO: 159163 - RNA, 1575 nt, Artificial Sequence
  derived and/or modified CDS sequence (opt3) from glycoprotein__RABV__GU937032.1
auggugccccaggcccuccuguucgucccucuucuggcuuuuagcaugugcuucggcaaguuuccaaucuacaccauuccggacaaauuggggcccugguccccuauagauauccaccauuuaucuuguccaaacaaucugguuguggaggacgaaggaugcacaaaccuaucagguuucaguuauauggagcucaagguaggcuacauuagcgcaaucaaagugaauggguuuacuuguacgggagucgugaccgaagccgagacauauacuaacuucguuggcuacgugaccacaaccuuuaagagaaaacacuucaggcccacuccugaugcgugccgggcugccuauaauuggaagauggcuggugacccacgcuacgaagagucccugcauaaccccuauccugauuaccacuggcuucgaacagucaagaccacgaaagagucucuggugauuaucucgccaucaguagccgacuuggauccguacgacaagagccuccauagucguguuuuucccaaugggaaauguuccggaauaacuaucucuagcaccuauugcccuacaaaccacgauuacacuauuuggcugccagaaaaucccagacugggcaccuccugugacaucuucacaaacucaaggggcaagcgggcuaguaaagggagcaagaccugcggauuuguggaugagcgcggucucuauaagucuuuaaaaggcgcauguaagcugaaacuuugcggggucuugggacugagacuaauggacgaaacguggguggccaugcaagcauccgaugagacuaagugguguccuccagaccagcucgugaaucugcacgacuucaggucagaugagauugaacaucuugucguugaggaacuggugaaaaagcgggaggaaugcuuggacgcccucgagagcaucaugacaaccaaaaguguaucuuuucgccgacugucccacuuaagaaagcuggugcccggcuucgguaaggcguacacuauauucaacaaaacacucauggaggcagaugcccauuauaagagcgucaggaccuggaaugaaauuaucccgucgaaagggugccuucgggugggaggccguugucacccucacguuaacggcguguuuuucaaugggauuauccugggacccgacggucaugucuugaucccagagaugcagucuucccuacugcagcaacacauggaacuccuggagucaagugugauuccucuuaugcauccccuggcugauccaagcacgguauuuaaggacggcgaugaagccgagaacuucguugaggugcacuugcccgacguccauaaacagauauccgggguggaucucggacugccuaacuggggcaaguacgucuuagugucugcugguguucugaucgcacuaaugcucauuaucuuucugaugaccugcugugggcgcgugaauagaccaaagagcacacagcacaaccuuggcggaacuggcagggaaguaucagucaccccgcagagugggaaagugauauccagcugggagucuuauaagucaggaggugaaacacgguuguga

SEQ ID NO: 159164 - RNA, 1575 nt, Artificial Sequence
  derived and/or modified CDS sequence (opt3) from glycoprotein__RABV__GU937033.1
auggugccccaggcccuccuguucgucccucuucugguuuuuagcaugugcuucggcaaguuuccaaucuacaccauuccggacaaauuggggcccugguccccuauagauauccaccauuuaucuuguccaaacaaucuggugguagaggacgaaggaugcacaaaccuaucagguuucaguuauauggagcucaaggugggcuacauuagcgcuaucaaagucaauggguuuacuuguacgggagugguuaccgaagcagagacauauacuaacuucgugggcuacgucaccacaaccuuuaagagaaaacacuucaggcccacuccugaugccugccgggcggcuuauaauuggaagauggccggugacccacgcuacgaagagucccugcauaaccccuauccugauuaccacuggcuucgaacagugaagaccacgaaagagucucugguaauuaucucgccaucaguugcagacuuggauccguacgacaagagccuccauagucguguguuucccaaugggaaauguuccggaauaacuaucucuagcaccuauugcccuacaaaccacgauuacacuauuuggcugccagaaaaucccagacugggcaccuccugugacaucuucacaaacucaaggggcaagcgggccaguaaagggagcaagaccugcggauuugucgaugagcgcggucucuauaagucuuuaaaaggcgcuuguaagcugaaacuuugcgggguguugggacugagacuaauggacggcacguggguggcaaugcaagccuccgaugaaacuaagugguguccuccagaccagcucgucaaucugcacgacuucaggucagaugagauugagcaucuuguuguggaggaacuggugaaaaagcgggaagagugcuuggacgcucucgaaagcaucaugacaaccaaaaguguaucuuuucgccgacugucccacuuaagaaagcugguccccgguuucgggaaggccuacacuauauucaacaaaacacucauggaggcggaugcacaucacaagagcgugaggaccuggaaugagauuaucccgucgaaaggaugccuucggguuggcggccguugucacccucaugugaacggggucuuuuucaauggaauuauccugggucccgacggccacguguugaucccagaaaugcagucuucccuacugcagcaacauauggagcuccuggaaucaaguguaguuccucuuaugcacccccuggccgauccaagcacgguguugaaggacggggaugaggcugaaaacuuugucgaggugcaucuccccgacguccacaaacagauuuccggaguggaucugggcuuaccuaacugggguaaguauguucuggugucugccgggguacuaauagcacucaugcugaucauuuuccuuaugaccugcuguggccgcgucaauagaccaaagagcacacagcacaacuugggaggcacugggaggaaagugucaguuaccccgcagaguggaaaggugaucuccagcugggagucuuacaaaucagguggcgaaacacggcuguga

SEQ ID NO: 159165 - RNA, 1575 nt, Artificial Sequence
  derived and/or modified CDS sequence (opt3) from glycoprotein__RABV__GU937034.1
auggugccccaggcccuccuguucgucccucuucugguuuuuagcaugugcuucggcaaguuuccaaucuacaccauuccggacaaauuggggcccugguccccuauagauauccaccauuuaucuuguccaaacaaucuggugguagaggacgaaggaugcacaaaccuaucagguuucaguuauauggagcucaaggugggcuacauuagcgcuaucaaagucaauggguuuacuuguacgggagugguuaccgaagcagagacauauacuaacuucgugggcuacgucaccacaaccuuuaagagaaaacacuucaggcccacuccugaugugugccgggccgcguauaauuggaagauggcuggugacccacgcuacgaagagucccugcauaaccccuauccugauuaccacuggcuucgaacaguaaagaccacgaaagagucucugguuauuaucucgccaucaguggccgacuuggauccguacgacaagagccuccauagucgugucuuucccaaugggaaauguuccggaauaacuaucucuagcaccuauugcccuacaaaccacgauuacacuauuuggcugccagaaaaucccagacugggcaccccuugugacaucuucacaaacuccaggggcaagcgggcaucaaaagggaguaagaccugcggauuuguggaugagcgcggucucuauaagagcuuaaaaggcgccuguaagcugaaacuuugcgggguguugggacugagacuaauggacggcacgugggucgcuaugcaagcaucugaugaaacuaagugguguccacccgaccagcucguuaaucugcacgacuucagguccgaugagauugagcaucuugugguagaggaacuggugaaaaagcgggaagagugcuuggacgcccucgaaucaaucaugacaaccaaaagcgucaguuuucgccgacugucucacuuaagaaagcuggugccggguuucgggaaggcuuacacuauauucaacaaaacacucauggaggccgaugcgcauuauaaguccguuaggaccuggaaugagauuaucccuagcaaaggaugccuucgggugggcggccguugucacccccacgucaacgggguguuuuucaauggaauuauccuggguccagacggccauguauugaucccugaaaugcagucgucucuacugcagcaacacauggagcuccuggaauccucaguuauuccccuuaugcauccacuggcagaucccaguacgguguuuaaggacggggaugaggccgaaaacuucgucgaggugcacuugccugacguccauaaacagauaagcggaguggaucucggccugccaaacugggguaaguacguuuuaguguccgcugggguacugaucgcccuaaugcucauuaucuuucugaugaccugcuguggccgcgucaaucagccgaagucuacacagcacaaccuuggaggcacugggagagaggugagcguuacaccccaaucaggaaaagugauaaguuccugggaaagcuauaagucugguggcgagaccagguuguga

SEQ ID NO: 159166 - RNA, 1575 nt, Artificial Sequence
  derived and/or modified CDS sequence (opt3) from glycoprotein__RABV__HE801606.1
auggugccccagguccuucucuucguuccucuucugguguuuagcaugugcuucggcaaguuuccaaucuacaccauuccggacaaauuggggcccugguccccuauagauauccaccauuuaucuuguccaaacaaucugguaguggaggacgaaggaugcacaaaccuaucagguuucaguuauauggagcucaaggucggcuacauuagcgccaucaaagugaauggguuuacuuguacgggaguugugaccgaagcugagacauauacuaacuucgucggcuacgugaccacaaccuuuaagagaaaacacuucaggcccacuccugaugcaugccgggccgcguauaauuggaagcuggcuggugacccacgcuacgaagagucccuucauaaccccuauccugauuaccacuggcugcgaacaguaaagaccacgaaagagucuuugguuauuaucucgccaucaguggccgaccucgauccguacgacaagagccugcauagucgugucuuucccuccgggaaaugucugggaauaacuaucucuagcaccuauugcuccacaaaucacgauuacacuauuuggaugccugaaaacccaagacucggcaccucaugugacaucuucacaaauaguaggggcaagcgggcaagcaaagggucuaagaccugcggauuuguggaugagcgcgguuuauauaagucccugaaaggcgccuguaagcugaaauugugcggggugcugggacuaagacucauggacggcacgugggucgcuaugcaaacuucagaugaaacaaaguggugucccccugaccagcugguuaaccuucacgacuucaggagcgaugagauugagcaucuggugguagaagaguuggugaaaaagcgggaagagugccucgacgcacuggaaaguaucaugaccacuaaaucugucuccuuucgccgauucagccacuuaagaaagcuggugccagguuucgggaaggccuaccccauauuuaauaaaacacucauggaggcugaugcccauuauaagucgguuaggaccuggaacgagauuaucccgucuaaaggaugccuucgggugggcggccguugucacccucacgucaaugggguguucuuuaacggaauuauccugggucccgacggccauguauugaucccagaaaugcaguccucacuacugcagcaacacauggagcuccuggaaaguagcguuauuccucuuaugcauccccuggcggauccauccacgguguucaaggacggggaugaggcagaagacuuugucgaggugcacuugcccgauguccauaaacagauaucuggaguggaccucggccugccuagcugggguaaguacguuuuagugucagccgggguacuggucgugcuaaugcucaccaucuucacaaugacuugcuguggccgcguucacagaccaaagaguacccagcacucccugggaggcacagggaggaaagugagcgucacuucucagucaggaaaggugauuaguagcugggaguccuauaaaucugguggcgaaacccggcuuuga

SEQ ID NO: 159167 - RNA, 1575 nt, Artificial Sequence
  derived and/or modified CDS sequence (opt3) from glycoprotein__RABV__HE801607.1
auggugccccagguccacauguucguuccucugcucguguacgccaugugcuuuggcaaguucccaaucuauaccauuccggacaaacuugggcccuggagcccuauagauauccaucaccuguccuguccaaacaauuugguaguggaggacgaaggaugcacaaacuuaucugguuuuucauacauggagcugaaggucggcuauauuagugcuaucaaagugagcggguucacuuguacgggaguugugaccgaagcagagacauacacuaauuuugucggcuaugugaccacaaccuucaagagaaaacauuuuaggcccacuccugaugccugccgggcggcuuacaacuggaagcuagccggugacccacgcuaugaagagucccuccacaaucccuacccugauuaccauuggcugcgaacaguaaagaccacgaaagagucucuuguuauuaucucgccaucaguggcagaccuggauccguaugacaagagcuugcacagucgugucuuccccuccgggaaaugucucggaauaacuaucucuagcaccuacugcuccacaaaccacgauuauacuauuuggaugccugaaaauccaagacugggcaccucaugugacaucuuuacaaacaguaggggcaagcgggccagcaaagggucuaagaccugcggauucguggaugagcgcggucuguacaagucccucaaaggcgcuuguaaguuaaaacugugcggggugcuuggauugagacugauggacggcacgugggucgcaaugcaaacuucagaugaaacaaaguggugucccccugaccagcuaguuaaucuccaugacuuuaggagcgaugagauugagcaccuggugguagaggaacuugugaaaaagcgggaagagugccuggacgccuuggaaaguaucaugaccacuaaaucugucuccuuccgccgacucagccaucugagaaaguuagugccagguuuugggaaggcuuauacaauauucaacaaaacccugauggaggccgaugcgcacuacaagucgguuaggacguggaaugagauuauccccucuaaaggaugccuccgggugggcggccguugucacccgcaugucaacgggguguucuuuaauggaauuauccuugguccugacggccacguacugauccccgaaaugcaguccucauugcuacagcaacauauggagcugcucgaaaguagcguuauuccacugaugcacccucuugcagaucccuccaccguguucaaggacggggaugaggccgaagacuuugucgaggugcaucugccagauguccacaaacagauaucuggaguggacuugggccuccccagcugggguaaguauguucuggugucagcugggguauuagucgugcugaugcuagccaucuucauuaugacaugcuguggccgcguucacagaccuaagaguacucagcauucccucggaggcaccgggaggaaagcaagcgugacaucucagucaggaaaggucaucaguagcugggaguccuacaaaucugguggcgaaacucggcuguga

SEQ ID NO: 159168 - RNA, 1575 nt, Artificial Sequence
  derived and/or modified CDS sequence (opt3) from glycoprotein__RABV__HE801608.1
auggugccccagguccuacucuucguuccucuucugguguuuagcaugugcuucggcaaguuuccaaucuacaccauuccggacaaauuggggcccugguccccuauagauauccaccauuuaucuuguccaaacaaucugguaguggaggacgaaggaugcacaaaccuaucagguuucaguuauauggagcucaaggucggcuacauuagcgccaucaaagugaauggguuuacuuguacgggaguugugaccgaagcugagacauauacuaacuucgucggcuacgugaccacaaccuuuaagagaaaacacuucaggcccacuccugaugcaugccggacagccuauaauuggaagcuggcgggugacccacgcuacgaagagucccuucauaaccccuauccugauuaccacuggcugcgaaccguaaagacgacuaaagagucuuugguuauuaucucgccaucaguggcugaccucgauccguacgacaagagccugcauagucgugucuuucccuccgggaaaugucugggaauaaccaucucuagcacauauugcuccacuaaucacgauuacaccauuuggaugccugaaaacccaagacucggcacaucaugugacaucuucaccaauaguaggggcaagcgggccagcaaagggucuaagacgugcggauuuguggaugagcgcgguuuauauaagucccugaaaggcgcauguaaacuuaaguugugcggggugcugggacuaagacucauggacggcacuugggucgccaugcaaacaucagaugaaaccaaguggugucccccugaccagcugguuaaccuucacgacuucaggagcgaugagauugagcaucuggugguagaagaguuggugaaaaagcgggaagagugccucgacgcucuggaaaguaucaugacuacaaaaucugucuccuuucgccgauuaagccaccugagaaagcucgugccagguuucgggaaggcauacaccauauucaauaaaacgcuuauggaggccgaugcucauuauaagucgguuaggaccuggaacgagauuauccccucuaaaggaugccugcgggugggcggccguugucacccgcacgucaaugggguguuuuucaacggaauuaucuuggguccugacggccauguacuaauccccgaaaugcaguccucacugcuccagcaacacauggagcugcuugaaaguagcguuauuccacugaugcauccuuuggccgaucccuccacaguguuuaaggacggggaugaggcggaagacuucgucgaggugcaccucccagauguccauaaacagauaucuggaguggaccugggcuuacccagcugggguaaguacguucuggugucagcagggguacuggucgugcucaugcugacuaucuuuauuaugaccugcuguggccgcguucacagaccuaagaguacacagcacucccuuggaggcacugggaggaaagugagcgucaccucucagucaggaaaggugaucaguagcugggaguccuauaaaucugguggcgaaacacgguuguga

SEQ ID NO: 159169 - RNA, 1575 nt, Artificial Sequence
  derived and/or modified CDS sequence (opt3) from glycoprotein__RABV__HE801609.1
auggugccccagguccuucucuucguuccucuucugguguuuagcaugugcuucggcaaguuuccaaucuacaccauuccggacaaauuggggcccugguccccuauagauauccaccauuuaucuuguccaaacaaucugguaguggaggacgaaggaugcacaaaccuaucagguuucaguuauauggagcucaaggucggcuacauuagcgccaucaaagugaaugggcugacuuguacgggaguugugaccgaagcugagacauauacuaacuuugucggcuacgugaccacaaccuucaagagaaaacacuuuaggcccacuccugaugcaugccgggccgcguauaauuggaagcuggcuggugacccacgcuacgaagagucccugcauaaccccuauccugauuaccacugguugcgaacaguaaagaccacgaaagagucucucguuauuaucucgccaucaguggccgaccuggauccguacgacaagagccugcauagucgugucuuccccuccgggaaaugucucggaauaacuaucucuagcaccuauugcuccacaaaucacgauuacacuauuuggaugccugaaaacccaagauuaggcaccucaugugacaucuuuacaaauaguaggggcaagcgggcaagcaaagggucuaagaccugcggauucguggaugagcgcggucuguauaagucccuuaaaggcgccuguaaguugaaacugugcggggugcuaggacccagacucauggacggcacgugggucgcuaugcaaacuucagaugaaacaaagugguguccuccagaccagcugguuaaccuucacgacuuuaggagcgaugagauugagcaucuggugguagaagaguuggugaaaaagcgggaagagugccucgacgcacuggaaaguaucaugaccacuaaaucuuuauccuuccgccgacugagccaccucagaaagcugguccccgguuuugggaaggccuacacaauauucaauaaaacccugauggaggcugaugcccauuauaagucggugaggacguggaacgagauuaucccgucuaaaggaugcuugcggguuggcggccguugucacccucacgugaauggggucuucuuuaacggaauuauccuaggucccgacggccaugugcugaucccagaaaugcaguccucacuccugcagcaacacauggagcuucuggaaaguagcguaauuccuuugaugcauccccucgcggauccauccaccguuuucaaggacggggaugaggcagaagacuuuguggagguccaccuucccgaugugcauaaacagauaucuggagucgacuuaggccugccuagcugggguaaguacgugcuaguuucagccggggugcucguaguccugaugcuuacaaucuucauuaugacuugcuguggccgcgugcacagaccaaagaguacccagcacuccuugggaggcaucgggaggaaaguuagcgugacaucucagucaggaaaggucauaaguagcugggaguccuauaaaucugguggcgaaacucggcuguga

SEQ ID NO: 159170 - RNA, 1575 nt, Artificial Sequence
  derived and/or modified CDS sequence (opt3) from glycoprotein__RABV__HE801610.1
auggugccccagguccuucucuucguuccucuucugguguuuagcaugugcuucggcaaguuuccaaucuacaccauuccggacaaauuggggcccugguccccuauagauauccaccauuuaucuuguccaaacaaucugguaguggaggacgaaggaugcacaaaccuaucagguuucaguuauauggagcucaaggucggcuacauuagcgccaucaaagugaauggguuuacuuguacgggaguugugaccgaagcugagacauauacuaacuucgucggcuacgugaccacaaccuuuaagagaaaacacuucaggcccacuccugaugcaugccgggccgcguauaauuggaagcuggcuggugacccacgcuacgaagagucccuucugaaccccuauccugauuaccauugguugcgaacaguaaagaccacgaaagagucucucguuauuaucucgccaucaguggccgaccuggauccguacgacaagagccugcacaguaaagucuuucccuccgggaagugucucggaauaacuaucucuagcaccuauugcuccacaaaucaugauuacacuauuuggaugccugaaaacccacguuuaggcaccucaugugacaucuucacaaauaguagaggcaaaagggcaagcaaggggucuaagaccugcggauuuguggaugagcggggucuguauaaaucccuuaagggcgccuguaaauugaagcugugcggggugcuaggacuccgccugauggacggcacgugggucgcuaugcaaacuucagaugaaacaaaauggugucccccugaccagcuuguuaaccugcacgacuucagaagcgaugagauugagcacuuggugguagaggaacucgugaagaaaagggaagagugccuggacgcauuagaaaguaucaugaccacuaagucugucuccuuucggcgccugagccaucuccgaaagcuggugccagguuucgggaaagccuacacaauauucaauaagacccugauggaggcugaugcccacuauaaaucgguuagaacguggaacgagauuauccccucuaagggaugcuugagggugggcggccggugucauccgcacgucaaugggguguuuuucaacggaauuauccuagguccugacggccacguacugauccccgaaaugcaguccucacuccugcagcaacauauggagcuucuggaaaguagcguuauuccauugaugcacccucucgcggaucccuccaccguguuuaaagacggggaugaggcagaagacuucgucgaggugcaucugccagauguccacaagcagauaucuggaguggacuuaggccugcccagcugggguaaguacguucuagugucagccgggguacucgucgugcugaugcuugcuaucuuuauuaugacaugcuguggccguguucaucagccuaaaaguacucagcacuccuugggaggcaccgggcgcaaggugagcgucacaucucaaucaggaaaagugaucaguagcugggaguccuauaagucugguggcgaaacuagacuguga

SEQ ID NO: 159171 - RNA, 1575 nt, Artificial Sequence
  derived and/or modified CDS sequence (opt3) from glycoprotein__RABV__HE801611.1
auggugccccagguccuucucuucguuccucuucugguguuuagcaugugcuucggcaaguuuccaaucuacaccauuccggacaaauuggggcccugguccccuauagauauccaccauuuaucuuguccaaacaaucugguaguggaggacgaaggaugcacaaaccuaucagguuucaguuauauggagcucaaggucggcuacauuagcgccaucaaagugaauggguuuacuuguacgggaguugugaccgaagcugagacauauacuaacuucgucggcuacgugaccacaaccuuuaagagaaaacacuucaggcccacuccugaugcaugccgggccgcguauaauuggaagcuggcuggugacccacgcuacgaagagucccuucauaaccccuauccugauuaccacuggcugcgaacaguaaagaccacgaaagagucuuugguuauuaucucgccaucaguggccgaccucgauccguacgacaagagccugcauagucgugucuuucccuccgggaaaugucugggaauaacuaucucuagcaccuauugcuccacaaaucacgauuacacuauuuggaugccugaaaacccaagacucggcaccucaugugacaucuucacaaauaguaggggcaagcgggcaagcaaagggucuaagaccugcggauuuguggaugagcgcgguuuauauaagucccugaaaggcgccuguaagcugaaauugugcggggugcugggacuaagacucauggacggcacgugggucgcuaugcaaacuucagaugaaacaaaguggugucccccugaccagcugguuaaccuucacgacuucaggagcgaugagauugagcaucuggugguagaagaguuggugaaaaagcgggaagagugccucgacgcacuggaaaguaucaugaccacuaaaucugucuccuuucgccgauuaagccaccugagaaagcucgugccagguuucgggaaggccuacacaauauucaauaaaacccuuauggaggcugaugcccauuauaagucgauuaggacguggaacgagaucauucccucuaaaggaugccugcggguuggcggccguugucacccgcacgugaauggggucuuuuucaacggaaucaucuuggguccugacggccaugugcuaauucccgaaaugcaguccucacugcuccagcaacacauggagcugcuugaaaguagcguaauaccacugaugcauccuuuggcggaucccuccaccguuuuuaaggacggggaugaggcagaagacuucguggagguccaccucccagaugugcauaaacagaucucuggagucgaccugggcuuacccagcugggguaaguacgugcugguuucagccggggugcuaguaguccucaugcugacaauuuuuaucaugacuugcuguggccgcgugcacagaccuaagaguaugcagcacucccuuggaggcaccgggaggaaaguuagcgugacaucucagucaggaaaggucauaaguagcugggaguccuauaaaucugguggcgaaacucgguuguga

SEQ ID NO: 159172 - RNA, 1575 nt, Artificial Sequence
  derived and/or modified CDS sequence (opt3) from glycoprotein__RABV__HE801612.1
auggugccccagguccuacucuucguuccucuucugguguuuagcaugugcuucggcaaguuuccaaucuacaccauuccggacaaauuggggcccugguccccuauagauauccaccauuuaucuuguccaaacaaucugguaguggaggacgaaggaugcacaaaccuaucagguuucaguuauauggagcucaaggucggcuacauuagcgccaucaaagugaauggguuuacuuguacgggaguugugaccgaagcugagacauauacuaacuucgucggcuacgugaccacaaccuuuaagagaaaacacuucaggcccacuccugaugcaugccgggccgcguauaauuggaagcuggcuggugacccacgcuacgaagagucccuucauaaccccuauccugauuaccacuggcugcgaacaguaaagaccacgaaagagucuuugguuauuaucucgccaucaguggccgaccucgauccguacgacaagagccugcauagucgugucuuucccuccgggaaaugucugggaauaacuaucucuagcaccuauugcuccacaaaucacgauuacacuauuuggaugccugaaaacccaagacucggcaccucaugugacaucuucacaaauaguaggggcaagcgggcaagcaaagggucuaagaccugcggauuuguggaugagcgcgguuuauauaagucccugaaaggcgccuguaaacuuaaguugugcggggugcugggacuaagacucauggacggcacgugggucgcuaugcaaacuucagaugaaacaaaguggugucccccugaccagcugguuaaccuucacgacuucaggagcgaugagauugagcaucuggugguagaagaguuggugaaaaagcgggaagagugccucgacgcacuggaaaguaucaugaccacuaaaucugucuccuuucgccgauuaagccaccugagaaagcucgugccagguuucgggaaggccuacacaauauucaauaaaacccuuauggaggcugaugcccauuauaagucgguuaggacguggaacgagauuauccccucuaaaggaugccugcgggugggcggccguugucacccgcacgucaaugggguguuuuucaacggaauuaucuuggguccugacggccauguacuaauccccgaaaugcaguccucacugcuccagcaacacauggagcugcuugaaaguagcguuauuccacugaugcauccuuuggcggaucccuccaccguguuuaaggacggggaugaggcagaagacuucgucgaggugcaccucccagauguccauaaacagauaucuggaguggaccugggcuuacccagcugggguaaguacguucuggugucagccgggguacuggucgugcucaugcugacaaucuuuauuaugacuugcuguggccgcguucacagaccuaagaguacccagcacucccuuggaggcacagggaggaaagugagcgucacuucucagucaggaaaggugaucaguagcugggaguccuauaaaucugguggcgaaacccgguuguga

SEQ ID NO: 159173 - RNA, 1575 nt, Artificial Sequence
  derived and/or modified CDS sequence (opt3) from glycoprotein__RABV__HE801613.1
auggugccccagguccuacucuucguuccucuucugguguuuagcaugugcuucggcaaguuuccaaucuacaccauuccggacaaauuggggcccugguccccuauagauauccaccauuuaucuuguccaaacaaucugguaguggaggacgaaggaugcacaaaccuaucagguuucaguuauauggagcucaaggucggcuacauuagcgccaucaaagugaauggguuuacuuguacgggaguugugaccgaagcugagacauauacuaacuucgucggcuacgugaccacaaccuuuaagagaaaacacuucaggcccacuccugaugcaugccgggccgcguauaauuggaagcuggcuggugacccacgcuacgaagagucccuucauaaccccuauccugauuaccacuggcugcgaacaguaaagaccacgaaagagucuuugguuauuaucucgccaucaguggccgaccucgauccguacgacaagagccugcauaguaaagucuuucccuccgggaagugucugggaauaacuaucucuagcaccuauugcuccacaaaucacgauuacacuauuuggaugccugaaaacccacgucucggcaccucaugugacaucuucacaaauaguagaggcaaaagggcaagcaaggggucuaagaccugcggauuuguggaugagcgggguuuauauaaaucccugaagggcgccuguaaacuuaaguugugcggggugcugggacuacgccucauggacggcacgugggucgcuaugcaaacuucagaugaaacaaaauggugucccccugaccagcugguuaaccuucacgacuucagaagcgaugagauugagcaucuggugguagaagaguuggugaagaaaagggaagagugccucgacgcacuggaaaguaucaugaccacuaagucugucuccuuucggcgcuuaagccaucugcgaaagcucgugccagguuucgggaaagccuacacaauauucaauaagacccuuauggaggcugaugcccacuauaaaucgguuagaacguggaacgagauuauccccucuaagggaugccugagggugggcggccggugucacccgcacgucaaugggguguuuuucaacggaauuaucuuggguccugacggccauguacuaauccccgaaaugcaguccucacugcuccagcaacacauggagcugcuugaaaguagcguuauuccacugaugcauccuuuggcggaucccuccaccguguuuaaagacggggaugaggcagaagacuucgucgaggugcaccucccagauguccauaagcagauaucuggaguggaccugggcuuacccagcugggguaaguacguucuggugucagccgggguacuggucgugcucaugcuggcuaucuuuauuaugacaugcuguggccguguucaccagccuaaaaguacucagcacucccuuggaggcaccgggcgcaaggugagcgucacaucucaaucaggaaaagugaucaguagcugggaguccuauaagucugguggcgaaacuagauuguga

SEQ ID NO: 159174 - RNA, 1575 nt, Artificial Sequence
  derived and/or modified CDS sequence (opt3) from glycoprotein__RABV__HE801614.1
auggugccccagguccuccuguucguuccucuucugguguuuagcaugugcuucggcaaguuuccaaucuacaccauuccggacaaauuggggcccugguccccuauagauauccaccauuuaucuuguccaaacaaucugguaguggaggacgaaggaugcacaaaccuaucagguuucaguuauauggagcucaaggucggcuacauuagcgccaucaaagugaauggguuuacuuguacgggaguugugaccgaagcugagacauauacuaacuucgucggcuacgugaccacaaccuuuaagagaaaacacuucaggcccacuccugaugcaugccgggccgcguauaauuggaagauggcuggugacccacgcuacgaagagucccugcauaaccccuauccugauuaccacuggcuucgaacaguaaagaccacgaaagagucucugguuauuaucucgccaucaguggccgacuuggauccguacgacaagagccuccauagucgugucuuucccuccgggaaaugucugggaauaacuaucucuagcaccuauugcuccacaaaucacgauuacacuauuuggaugccugaaaacccaagacugggcaccucaugugacaucuucacaaauaguaggggcaagcgggcaagcaaagggucuaagaccugcggauuuguggaugagcgcggucucuauaaguccuuaaaaggcgccuguaagcugaaacuuugcgggguguugggacugagacuaauggacggcacgugggucgcuaugcaaacuucagaugaaacaaaguggugucccccugaccagcucguuaaccugcacgacuucaggagcgaugagauugagcaucuugugguagaggaacuggugaaaaagcgggaagagugcuuggacgcacucgaaaguaucaugaccacuaaaucugucuccuuucgccgacugagccacuuaagaaagcuggugccagguuucgggaaggccuacacaauauucaauaaaacccucauggaggcugaugcccauuauaagucgguuaggacguggaacgagauuauccccucuaaaggaugccuucgggugggcggccguugucacccgcacgucaaugggguguuuuucaacggaauuauccuggguccugacggccauguauugauccccgaaaugcaguccucacuacugcagcaacacauggagcuccuggaaaguagcguuauuccacuuaugcauccucuggcggaucccuccaccguguuuaaggacggggaugaggcagaagacuucgucgaggugcacuugccagauguccauaaacagauaucuggaguggaccucggccugcccagcugggguaaguacguuuuagugucagccgggguacuggucgugcuaaugcucacaaucuuuauuaugacuugcuguggccgcguuagaaggccuaagaguacccagcacucccugggaggcacagggcggaaagugagcgucacuucucagucaggaaaggugaucaguagcugggaguccuauaaaucugguggcgaaacccgacuuuga

SEQ ID NO: 159175 - RNA, 1575 nt, Artificial Sequence
  derived and/or modified CDS sequence (opt3) from glycoprotein__RABV__HE801615.1
auggugccccagguccuacucuucguuccucuucugguguuuagcaugugcuucggcaaguuuccaaucuacaccauuccggacaaauuggggcccugguccccuauagauauccaccauuuaucuuguccaaacaaucugguaguggaggacgaaggaugcacaaaccuaucagguuucaguuauauggagcucaaggucggcuacauuagcgccaucaaagugaauggguuuacuuguacgggaguugugaccgaagcugagacauauacuaacuucgucggcuacgugaccacaaccuuuaagagaaaacacuucaggcccacuccugaugcaugccggacagccuauaauuggaagcuggcgggugacccacgcuacgaagagucccuucauaaccccuauccugauuaccacuggcugcgaaccguaaagacgacuaaagagucuuugguuauuaucucgccaucaguggcugaccucgauccguacgacaagagccugcauagucgugucuuucccuccgggaaaugucugggaauaaccaucucuagcacauauugcuccacuaaucacgauuacaccauuuggaugccugaaaacccaagacucggcacaucaugugacaucuucaccaauaguaggggcaagcgggccagcaaagggucuaagacgugcggauuuguggaugagcgcgguuuauauaagucccugaaaggcgcauguaaacuuaaguugugcggggugcugggacuaagacucauggacggcacuugggucgccaugcaaacaucagaugaaaccaaguggugucccccugaccagcugguuaaccuucacgacuucaggagcgaugagauugagcaucuggugguagaagaguuggugaaaaagcgggaagagugccucgacgcucuggaaaguaucaugacuacaaaaucugucuccuuucgccgauuaagccaccugagaaagcucgugccagguuucgggaaggcauacaccauauucaauaaaacgcuuauggaggccgaugcucauuauaagucgguuaggaccuggaacgagauuauccccucuaaaggaugccugcgggugggcggccguugucaccaccaugucaaugggguguuuuucaacggaauuaucuuggguccggacggccacguacuaaucccugaaaugcaguccucacugcuccagcaacauauggagcugcuugaaaguagcguuauuccccugaugcacccauuggccgauccuuccacaguguuuaaggacggggaugaggcggaagacuucgucgaggugcaucuccccgauguccacaaacagauaucuggaguggaccugggcuuaccaagcugggguaaguacguucuggugucagcagggguacuggucgugcucaugcugacuaucuuuauuaugaccugcuguggccgcguucacagacccaagaguacacagcauucccuuggaggcacugggaggaaagugagcgucaccucucagucaggaaaggugaucaguagcugggaguccuauaaaucugguggcgaaacacgguuguga

SEQ ID NO: 159176 - RNA, 1575 nt, Artificial Sequence
  derived and/or modified CDS sequence (opt3) from glycoprotein__RABV__HE801616.1
auggugccccagguccuccuguucguuccucuucugguguuuagcaugugcuucggcaaguuuccaaucuacaccauuccggacaaauuggggcccugguccccuauagauauccaccauuuaucuuguccaaacaaucugguaguggaggacgaaggaugcacaaaccuaucagguuucaguuauauggagcucaaggucggcuacauuagcgccaucaaagugaauggguuuacuuguacgggaguugugaccgaagcugagacauauacuaacuucgucggcuacgugaccacaaccuuuaagagaaaacacuucaggcccacuccugaugcaugccgggccgcguauaauuggaagauggcuggugacccacgcuacgaagagucccugcauaaccccuauccugauuaccacuggcuucgaacaguaaagaccacgaaagagucucugguuauuaucucgccaucaguggccgacuuggauccguacgacaagagccuccauagucgugucuuucccuccgggaaaugucugggaauaacuaucucuagcaccuauugcuccacaaaucacgauuacacuauuuggaugccugaaaacccaagacugggcaccucaugugacaucuucacaaauaguaggggcaagcgggcaagcaaagggucuaagaccugcggauuuguggaugagcgcggucucuauaaguccuuaaaaggcgccuguaagcugaaacuuugcgggguguugggacugagacuaauggacggcacgugggucgcuaugcaaacuucagaugaaacaaaguggugucccccugaccagcucguuaaccugcacgacuucaggagcgaugagauugagcaucuugugguagaggaacuggugaaaaagcgggaagagugcuuggacgcacucgaaccaaucaugaccacuaaaagugucucuuuucgccgacugucccacuuaagaaagcuggugcccgguuucgggaaggccuacacaauauucaauaaaacccucauggaggcugaugcccauuauaagagcguuaggacguggaacgagauuaucccgucgaaaggaugccuucgggugggcggccguugucacccucacgucaaugggguguuuuucaacggaauuauccugggucccgacggccauguauugaucccagaaaugcagucuucccuacugcagcaacacauggagcuccuggaaucaaguguuauuccucuuaugcauccccuggcggauccaagcaccguguuuaaggacggggaugaggcagaagacuucgucgaggugcacuugcccgauguccauaaacagauauccggaguggaccucggccugccuucuugggguaaguacguuuuagugagcgccgggguacuggucgugcuaaugcucacaaucuuuauuaugacuugcuguggccgcguuagaaggccaaagucaacccagcacagucugggaggcacagggcggaaaguguccgucacuagccagucuggaaaggugaucucaaguugggagagcuauaaauccgguggcgaaacccgacuuuga

SEQ ID NO: 159177 - RNA, 1575 nt, Artificial Sequence
  derived and/or modified CDS sequence (opt3) from glycoprotein__RABV__HE801617.1
auggugccccagguccuccuguucguuccucuucugguguuuagcaugugcuucggcaaguuuccaaucuacaccauuccggacaaauuggggcccugguccccuauagauauccaccauuuaucuuguccaaacaaucugguaguggaggacgaaggaugcacaaaccuaucagguuucaguuauauggagcucaaggucggcuacauuagcgccaucaaagugaauggguuuacuuguacgggaguugugaccgaagcugagacauauacuaacuucgucggcuacgugaccacaaccuuuaagagaaaacacuucaggcccacuccugaugcaugccgggccgcguauaauuggaagauggcuggugacccacgcuacgaagagucccugcauaaccccuauccugauuaccacuggcuucgaacaguaaagaccacgaaagagucucugguuauuaucucgccaucaguggccgacuuggauccguacgacaagagccuccauagucgugucuuucccuccgggaaaugucugggaauaacuaucucuagcaccuauugcuccacaaaucacgauuacacuauuuggaugccugaaaacccaagacugggcaccucaugugacaucuucgcaaauaguaggggcaagcgggccagcaaagggucuaagacaugcggauuuguggaugagcgcggucucuauaaguccuuaaaaggcgcuuguaagcugaaacuuugcgggguguugggacugagacuaauggacggcaccugggucgcaaugcaaacgucagaugaaacuaaguggugucccccugaccagcucguuaaccugcacgacuucaggagcgaugagauugagcaucuugugguagaggaacuggugaaaaagcgggaagagugcuuggacgcccucgaaaguaucaugacaaccaaaucugucuccuuucgccgacugagccacuuaagaaagcuggugccagguuucgggaaggcuuacacuauauucaauaaaacacucauggaggccgaugcgcauuauaagucgguuaggaccuggaacgagauuauccccucuaaaggaugccuucgggugggcggccguugucacccgcacgucaaugggguguuuuucaacggaauuauccuggguccugacggccauguauugauccccgaaaugcaguccucacuacugcagcaacacauggagcuccuggaaaguagcguuauuccacuuaugcauccucuggcagaucccuccacgguguuuaaggacggggaugaggccgaagacuucgucgaggugcacuugccagauguccauaaacagauaucuggaguggaccucggccugcccagcugggguaaguacguuuuagugucagcugggguacuggucgugcuaaugcucaccaucuuuauuaucacaugcuguggccgcguucacagaccuaagaguauacagcacucccugggaggcacugggaggaaagugagcgucaccucucagucaggaaaggugauuaguagcugggaguccuauaaaucugguggcgaaacacggcuuuga

SEQ ID NO: 159178 - RNA, 1575 nt, Artificial Sequence
  derived and/or modified CDS sequence (opt3) from glycoprotein__RABV__HE802675.1
auggugccccagguccugcuguucguuccucuucugguguuuagcaugugcuucggcaaguuuccaaucuacaccauuccggacaaauuggggcccugguccccuauagauauccaccauuuaucuuguccaaacaaucugguaguggaggacgaaggaugcacaaaccuaucagguuucaguuauauggagcucaaggucggcuacauuagcgccaucaaagugaauggguuuacuuguacgggaguugugaccgaagcugagacauauacuaacuucgucggcuacgugaccacaaccuuuaagagaaaacacuucaggcccacuccugaugcaugccgggccgcguauaauuggaagauggcuggugacccacgcuacgaagagucccugcauaaccccuauccugauuaccacuggcuucgaacaguaaagaccacgaaagagucucugguuauuaucucgccaucaguggccgacuuggauccguacgacaagagccuccauagucgugucuuucccuccgggaaauguucuggaauaacuaucagcuccaccuauugcucaacaaaucacgauuacacuauuuggaugccugaaaacccaagacugggcaccaguugugacaucuucacaaauagcaggggcaagcgggcaucuaaagggggaaagaccugcgguuuuguggaugagcgcggccuguauaagucccucaaaggggccuguaaguuaaaacugugcggagugcuuggcuugagacugauggacgguacgugggucgcuaugcaaacuucagaugaaacaaaguggugucccccugaccagcuaguuaaccuccacgacuucaggagcgaugagauugagcaucuggugguagaggaacuugugaaaaagcgggaagagugccuggacgcauuggaaaguaucaugaccacuaaaucugucuccuuucgccgacucagccaccugagaaaguuagugccaggguucggaaaggccuacacaauauucaauaaaacccugauggaggcugaugcccauuauaagucgguuaggacguggaacgagauuauccccucuaaaggcugccuccgggugggcgggcguugucacccgcacgucaagggaguguuuuucaaugguauuauccuuggcccugacgggcauguacugauccccgaaaugcaguccucauugcuacagcaacacauggagcugcucgaaaguagcguuauuccacugaugcauccucuugcggaucccuccaccguguuuaaagacggagaugaggcagaagacuucgucgaggugcaccucccagauguccauaagcagauaucuggcguggacuugggucuccccagcugggggaaguacguucuggugucagccggcguauuagucgugcugaugcuaacaaucuuuauuaucacuugcuguggacgcauacacagaccuaaaaguacccagcacggccucgggggaacagguaggaagguuuccgugacuagccagucuggcaaagucauuucaaguugggagagcuauaaguccgggggagaaacccggcuguga

SEQ ID NO: 159179 - RNA, 1575 nt, Artificial Sequence
  derived and/or modified CDS sequence (opt3) from glycoprotein__RABV__HM535790.1
auggugccccagguccuccuguucguucuucuguugggcuuuagcuuaugcuucgggaaguuuccuaucuacaccauuccagacgagcugggaccguggucccccauagauauccaccaucuaucuuguccuaacaaucucgugguagaagacgaggguugcacaaaccugucagaguucaguuauauggaacuuaaagugggcuacauuagcgccaucaaggucaauggguuuacuuguacgggagugguuaccgaagcugagacauauacuaacuucgugggcuacgucaccacaaccuuuaaaagaaagcacuucaggccaacucccgaugcaugccgggccgcguauaauuggaaaauggcuggugacccucgcuacgaggaaucccugcauaacccauaucccgauuaccacugguugcgaacagugcguaccacgaaggagucucucauuaucauaucgccuucaguaacugaccuggauccauacgacaagagccugcauaguagaguuuuucccgggggaaaauguuccggcaucaccgugucuagcacauauugcuccacuaaucacgauuacaccauuuggaugccggaaaacccuaggccacggacacccugugacaucuucaccaauucacgcggcaagagagccaguaacgggaauaaaacgugcggauuugucgaugagaggggucucuauaagagcuuaaaaggcgcaugucggcugaaacuuugcgggguguugggacugcgccuaauggacggcacuuggguggccaugcaaacaucugaugagaccaagugguguccuccagaccagcucgucaaccugcacgacuuccgauccgaugaaauugagcaucuuguuguggaggaacugguaaagaagagagaagagugcuuggacgcucucgagucaaucaugacuacaaaaagcgugaguuuuaggcggcugucucacuuacguaagcugguccccgguuucgggaaagcauacaccauauucaauaagacgcucauggaagccgaugcucauuauaaauccgugcgcaccuggaacgagauuaucccgagcaagggaugccuuaagguuggcggcagaugucacccucacgugaauggggucuuuuucaacggaauuauccugggucccgacgaucauguguugaucccagaaaugcagucgucucuacugcagcaacacauggagcuccuggaauccucaguaauuccucuuaugcauccccuggccgacccaaguacaguuuuuaaagagggcgaugaggcggaagacuucguggagguccacuugcccgauguguacaagcagauaagcggggucgaccucggacugccuaacuggggcaaauauguguuaaugacugccggugcaaugaucgggcugguucuaauuuuuagucucaugaccuggugcaggcgggcuaaucgaccagaaucuaagcagcgcagcuucggcggaacaggcgggaacgugucaguaacuucccaguccggaaaagucaucccgagcugggagucuuacaagucagguggcgaaauaagacuguga

SEQ ID NO: 159180 - RNA, 1575 nt, Artificial Sequence; identical to SEQ ID NO: 159076
  derived and/or modified CDS sequence (opt3) from glycoprotein__RABV__HQ166186.1

SEQ ID NO: 159181 - RNA, 1575 nt, Artificial Sequence
  derived and/or modified CDS sequence (opt3) from glycoprotein__RABV__HQ232301.1
augaucccccaggcccuccuguucgugccuuuucuugucuucccacugugcuuuggcaaguucccgauuuacaccauacccgacaaauuggggccuuggagcccaaucgauauucaccauuuauccugucccaacaaucugguuguggaggacgaaggaugcacaaaccuaucugguuuuucauauauggagcucaagguaggcuacaucagugcuauuaaagugaauggguucacuuguacgggagucgugaccgaagcagagacauauacuaacuuuguuggcuacgugaccacaaccuucaagagaaaacacuuuaggccuacuccagaugccugccgggcggcuuauaauuggaagauggccggugacccccgcuacgaagagagccugcauaacccuuauccagauuaccacuggcuucgaacagucaagaccacgaaagagucccuggugaucauaucuccgucgguaucagacuuggaucccuacgacaagagccuccauagucguguuuucccuuccgggaaauguucuggaaucacugugagcuccaccuauugcccaacaucacacgauuacacuauuuggaugcccgaaaauccuagacugggcaccaguugugacaucuuuauuaacagcaggggcaagcgggcaucuaaaggguccaagacaugcggauucgucgaugagcgcggucuguauaagucacucaaaggcgccuguaaguuaaaacugugcggggugcuuggauugagacugauggacggcaccugggcugcaauccaaacgagcgaugaagccaagugguguccacccgaccagcuagugaauauacacgacuuucauagugaugagauugagcaccucgucguugaggaacuggugaaaaagagggaagagugccuugacgcucuggaaucuaucaugacuacaaaauccgugagcuuccggcgcuugucgcaucuccgaaagcugguaccggguuucgggaaggccuacaccauuuuuaacaaaacuuuaauggaggcggaugcacacuauaagucugucagaacauggaaugagaucaucccuuccaaaggaugccugagggugggcggccggugucacccccauguuaacgggguguucuuuaauggaauuauacucgguccagacggccacguccuuaucccugaaaugcagucaagucuguugcagcaacauauggagcuacuggaaagcuccgugauuccccucaugcacccacuggccgaucccucuaccguauucaaggacggggaugaggcugaagacuuuguugaggugcaucuuccugauguccacaaacaggugagcggagucgaccugggcuugccaucaugggguaaguacgugcucaugaguguuggggcccugaucgcauuaaugcugaugauauuccuaaugacgugcugucguaaggcuaacggcguggaguccaugcagcaccgccucggagaaaccggcagaaaaguaagcgucacaucucagucagggagggugauuaguagcugggaguccuauaagucuggaggugaaacuaaacuguga

SEQ ID NO: 159182 - RNA, 1575 nt, Artificial Sequence
  derived and/or modified CDS sequence (opt3) from glycoprotein__RABV__HQ266618.1
auggugccccaggcccuucucuucgucccucuucugguuuuuagcuugugcuucggcaaguuuccaaucuacaccauuccggacaaauuagggcccugguccccuauagauauccaccaucugucuuguccaaacaaucuagugguagaggacgaaggaugcacaaaccucucagguuucaguuauauggagcugaaggugggcuacauuagcgcuaucaaagucaauggguuuacuuguacgggagugguuaccgaagcagagacauauacuaacuucgugggcuacgucaccacaaccuuuaagagaaaacacuucaggccccuuccugaugccugccgggcggcuuauaauuggaagauggccggugacccacgcuacgaagagucccugcauaaccccuauccugauuaccacugguugcgaacugugaagacaaccaaagagucucucguaauuaucucgccaucaguugcagaccuggauccguacgacaagagccugcauagucguguguuucccuccgggaaauguucuggaauaacggucagcuccacuuucugcucaaccaaucacgauuauacaaucuggaugccugaaaacccaagacucggcaccaguugugacauuuuugccaauagcaggggcaagcgggcuucuaaagggggaaagacuugcgguuucguggaugagcgcggcuuauacaagucccugaaaggggcauguaagcugaaauugugcggagugcugggccuaagacucauggacgguacaugggucgccaugcaaaccucagaugaaacgaaguggugucccccugaccagcugguuaacaugcacgacuuuaggagcgaugagaucgagcaucuugugguagaggaacuggugaaaaagcgggaagagugcuuggacgcucucgaaaguauuaugacuacaaaaucugucuccuuccgccgacugagccacuuaagaaagcuggugccaggguucggaaaggccuauaccaucuuuaauaaaacucucauggaggcggaugcacauuacaagucgguuaggacauggaacgagauaauucccucuaaaggcugccuucgggugggcgggcguugucacccgcacgucaauggaguguucuuuaacgguaucauucugggcccugacgggcauguauugauccccgaaaugcaguccucacuacugcagcaacacauggagcuccuggaaaguagcguuaucccacuuaugcauccucuggccgaucccuccaccguguucaaggacggagaugaggcugaagacuuugucgaggugcacuugccagauguccauaaacaggugucuggcguugaccucggucugcccaauugggggaaguauguguuacugagcgccggcacgcuaauugcacucaugcugauaaucuuccuuaugaccugcuguaagcgcguaaaccagccugagucaacaaaaagaaguuugggaggcacugggaggaaggucuccgugaccagccagucuggaaaaguuauuucaaguugggaaagcuacaaguccgguggcgagacacggcuguga

SEQ ID NO: 159183 - RNA, 1575 nt, Artificial Sequence
  derived and/or modified CDS sequence (opt3) from glycoprotein__RABV__HQ266620.1
auggugccccaggcccuccuguuccuuccucuguuggucuuuccauuaugcuucggcagauuuccgaucuacaccauucccgacaagcuggggccuuggagcccaauagauauccaccaucuauccugucccaacaaucucguuguggaggacgaaggaugcacaaaccugucugguuucucauauauggagcuuaaaguaggcuacauuagugcuaucaaggugaauggguuuacuuguacgggagucgugaccgaagcagagacauauacuaacuucguuggcuacgugaccacaaccuuuaaaaggaagcacuuccggccuauuccagaugccugccgcgcggcuuauaauuggaaaauggccggugacccccgauacgaagagagccugcauaacccuuauccagauuaccacugguugcguacugucaagacaaccaaggagucccucgugaucauaucuccgucgguagcagaccuggaucccuacgacaaaucacugcauagcagaguuuuuccuagugggaaguguuccggaaucacggugucuagcacuuucugcuccaccaaucacgauuauacaauuuggaugccagaaaaccccaggcucggcacuucaugugacaucuuugccaauagucggggcaaacgcgcuagcaaagggggaaagaccugcgguuucgucgaugagagaggcuuauacaagucucugaagggggcauguaaacuuaaguugugcggagugcugggccuaaggcucauggacgguacauggguggccaugcaaaccuccgaugaaacgaaaugguguccuccagaccagcuggucaacauucacgacuuucggucagaugagaucgagcaucuuguuguggaggaacugguaaagaaacgcgaagagugcuuggacgcucucgaaagcauaaugacuacaaagagugugucuuuccgaagacugucccacuuaaggaaacugguccccggguucggaaaggccuauaccauuuuuaauaagacucucauggaggcggaugcacauuacaaaagcgugcggacauggaacgagaucauuccgucgaagggcugccuucguguuggcgggcgcugucacccucacgugaauggagucuucuuuaacgguaucauccugggccccgacgggcauguguugauuccagaaaugcagucuucccuacugcagcaacacauggagcuccuggaaucaaguguaauaccucuuaugcauccccuggccgauccaagcaccguuuucaaagacggagaugaggcugaagacuuuguggagguccacuugcccgaugugcauaagcaggucuccggcguggaccucggucugccuaauugggggaaauauaucuuacugucugccggcacgcuaauugcacucaugcugaucauauuccuuaugaccugcuguagaaggguuaaccggccagagagcacagaacgaucauugggaggcacugggcgcaaggugaguguaaccucccagagcggaaaggucauuucuucaugggagaguuacaaaagcgguggcgaaacaagacuguga

SEQ ID NO: 159184 - RNA, 1575 nt, Artificial Sequence
  derived and/or modified CDS sequence (opt3) from glycoprotein__RABV__HQ266621.1
auggugccccaggcccugcuguucgucccucuucugggcuuuagcuugugcuucgggaaguuuccaaucuacaccauuccggacaaauuaggacccugguccccuauagauauccaccaucugucuuguccaaacaaucuaguuguggaggacgaagguugcacaaaccucucaggcuucaguuauauggagcugaagguaggguacauuagcgcuaucaaagugaauggauuuacuuguacgggcgucgugaccgaagcagagacauauacuaacuucguugguuacgugaccacaaccuuuaagagaaaacacuucaggcccauuccugaugccugccgggcggcuuauaauuggaaggucgccggggacccacgcuacgaagagucccuucauaaccccuauccugauuaccacuggcugcgaacugugaagacaaccaaagagucuuugguaaucauaucgccaucaguugcagaccucgauccguacgacaagagccugcauagucguguguuucccuccggaaaauguucuggcaucacggucagcuccacuuauugcucaaccaaucacgauuacacaauuuggaugccugaaaacccaagacugggcaccaguugugacaucuucgccaauagcagggggaagcgggcuucuaaaggagguaagacuugcggcuuuguggaugagcgcgggcucuauaaguccuuaaaaggagcauguaagcugaaacuuugcggcguguugggucugagacuaauggacgggacaugggucgccaugcaaaccucagaugaaacgaaguggugucccccugaccagcucguuaacaugcacgacuucaggagcgaugagauugagcaucuggugguagaggaacuugugaaaaagcgggaagagugccuggacgcuuuggaaaguaucaugacuacaaaaucugucuccuuucgccgacucagccaccugagaaaguuagugccaggauucggcaaggccuacaccauauucaauaaaacucugauggaggcggaugcacauuauaagucgguuaggacauggaacgagauuauccccucuaaaggcugccuccgggucgggggacguugucacccgcacgugaaugguguguuuuucaacggcauuauccuugggccugacggacauguacugauccccgaaaugcaguccucauugcuacagcaacacauggagcugcucgaaaguagcguuauuccacugaugcauccucuugccgaucccuccaccguguuuaaggacggcgaugaggcugaagacuucgucgaggugcaccucccagauguccauaaacaggugucugguguugacuuggggcuccccaauuggggcaaguacgugcuguuaagcgccggaacgcugauagcacuaaugcucaucauuuuucugaugaccugcugucgcagaguaaacaggccugagucaacacagcggagucuuggcgggacuggacgaaaggucuccgugaccagccagucugguaaaguuaucucaaguugggaaagcuauaaguccggcggggagacacgcuuguga

SEQ ID NO: 159185 - RNA, 1575 nt, Artificial Sequence
  derived and/or modified CDS sequence (opt3) from glycoprotein__RABV__HQ266622.1
auggugccccaggcccuucucuucaucccucuucugggcuuuagcuugugcuucgggaaguuuccaauuuacaccauaccggacaaauuaggacccugguccccuaucgauauucaccaucugucuuguccaaacaaucuagucguugaggacgaagguugcacaaaccucucaggcuucaguuauauggagcugaaggugggguacaucagcgcuauuagaguaacuggauuuacguguaccggcguggucacagaagcagagacuuauaccaauuucguggguuacguuacaaccacuuuuaaaaggaagcacuuccggcccacaccugaugccugccgcgcggcuuauaacuggaaaauggccggggacccacgauacgaagagucccuucauaaucccuauccugauuaccacuggcugcguaccgugaagacgacuaaggagucuuuggucaucauaucgccaucaguggcagaccucgauccguacgacaaaagccugcauaguagaguauuucccuccggaaaguguucuggcaucaccguuagcuccacauauugcucaacuaaccacgauuacaccauuuggaugccugaaaauccaaggcugggcacaaguugugacaucuucgccaacagccgggggaaacgcgcuucuaagggagguaaaaccugcggcuuuguggaugagagagggcucuauaaguccuuaaagggagcauguaaacugaagcugugcggcgucuugggucugaggcuaauggacgggacguggguggccaugcaaacuucagaugaaacaaaauggugucccccugaccagcucgugaauaugcacgacuuccggagcgaugagauugagcaucuggucguugaggaacuugugaagaaacgcgaagagugccuggacgcuuuggaaaguaucaugaccacuaagucuguauccuuucgaagacucagccaccugaggaaauuagugccaggauucggcaaggccuacacaauauucaacaagacccugauggaggcggaugcacauuauaaaucgguccggacguggaaugagauuauccccucuaagggcugccuccguguugggggacgcugucacccgcacgugaacgguguguuuuucaauggcauuauccuugggccugacggacauguccugauccccgaaaugcaguccucauugcuacagcaacacauggagcugcucgaaaguagcgugauuccacugaugcauccucuugccgaucccuccgcuguauuuaaagacggcgaugaggccgaagacuucguugaggugcaucugccagauguccacaaacaggugucuggugucgacuuggggcuccccaacuggggcaaguacgugcuguuaagcgcaggaacccugguugcucuaaugcucauaaucuuucugaugacaugcuguagaagggugaaucggccugagucaacucagugcagucuuggcgggaccggacgaaaggguuccguaacaagccagucuggcaaggucauuucaaguugggaaagcuauaaauccgggggagagacucgcuuguga

SEQ ID NO: 159186 - RNA, 1575 nt, Artificial Sequence; identical to SEQ ID NO: 159074
  derived and/or modified CDS sequence (opt3) from glycoprotein__RABV__HQ317918.1

SEQ ID NO: 159187 - RNA, 1575 nt, Artificial Sequence
  derived and/or modified CDS sequence (opt3) from glycoprotein__RABV__JN234411.1
auggugccccaggcccugcuccuugucccucuguugggcuucagcuuaugcuuugggaaguucccaaucuacaccauuccggacacacugggacccugguccccuauagauauccaccaucuaucuuguccaaacaaucucguuguggaggacgaagguugcacuaaccugucaggcuuuaguuauauggagcuuaaaguagggcacauuagcgcuaucaaggugaauggauucacguguaccggcgucgugacagaagcagagacuuacaccaacuuuguugguuaugugacaaccacuuucaaaagaaagcauuuuaggcccacaccugaugccugccgggcggcuuacaauuggaaaauggccggggacccacgcuaugaagagucccugcacucucccuacccugauuaucauugguugcgaaccgucaagacgacuaaggagucgcucgugauuaucucaccaagcguagcaaaccuggacccguacgauaauagucugcacucccguguuuuccccucuggaaaauguagcggcauaaccgugccuuccgucuacugcucaacaaaccacgacuauacuguguggaugccagaaauccucagauuaggcaccaguugugauauuuuuacaaauagcagggggaagcgggccucuaaaggauccaagaccugcgguuucguggacgagcgcggccuguacaaaucacuuaagggggcuuguaaguugaaacugugcggaguccccggccuaagacucauggaugguacguggguugcaaugcaaacuagcaacgaaacaaagugguguccuccagggcagcuggugaaucuucaugaccugcacagugaugagaucgagcauuugguaguggaggaacucgucaaaaagagggaagagugccuggacgccuuagaaucugugauuaccacuaaauccguuagcuuucggcgccugucgcaccuccgaaaacuugugcccggauucggcaaggcuuauacaaucuuuaacaagacccugauggaggccgaggcgcacuacaagucugucagaacguggaaugaaauaauuccguccaaaggcugcuugaggguagggggacgguguuauccucaugugaacgguguuuucuucaauggcaucauucuagggcccgacggacacgugcugaucccagagaugcagucaagucuccugcagcaacauaucgaacuucuggagagcuccgucauuccuuugaugcacccccucgcagauccauuuaccguguucaaggacggcgaugaaauagaggacuuugucgaggugcaucugcccgauguucacgaacaggugucugguguagacuuagggcugccuaacuggggcgaguacguccuacucagcgccggaacacugaucgcucuuauguugauuaucuuccugauaacuugcuguaaacguguggaucgcccagaaucaacccagagaagucucaggggcacagggcggaacguuuccgugacuagccagucuggaaaguuuauuccgucaugggagaguuauaaaagcgguggcgaaaccgggcuguga

SEQ ID NO: 159188 - RNA, 1575 nt, Artificial Sequence
  derived and/or modified CDS sequence (opt3) from glycoprotein__RABV__JN234412.1
auggugccccaggcccugcuccuugucccucuguugggcuucagcuuaugcuuugggaaguucccaaucuacaccauuccggacacacugggacccugguccccuauagauauccaccaucuaucuuguccaaacaaucucguuguggaggacgaagguugcacuaaccugucaggcuuuaguuauauggagcuuaaaguagggcacauuagcgcuaucaaggugaauggauucacguguaccggcgucgugacagaagcagagacuuacaccaacuuuguugguuaugugacaaccacuuucaaaagaaagcauuuuaggcccacaccugaugccugccgggcggcuuacaauuggaaaauggccggggacccacgcuaugaagagucccugcacucucccuacccugauuaucauugguugcgaaccgucaagacgacuaaggagucgcucgugauuaucucaccaagcguagcaaaccuggacccguacgauaauagucugcacucccguguuuuccccucuggaaaauguagcggcauaaccgugccuuccgucuacugcucaacaaaccacgacuauacuguguggaugccagaaauccucagauuaggcaccaguugugauauuuuuacaaauagcagggggaagcgggccucuaaaggauccaagaccugcgguuucguggacgagcgcggccuguacaaaucacuuaagggggcuuguaaguugaaacugugcggaguccccggccuaagacucauggaugguacguggguugcaaugcaaacuagcaacgaaacaaagugguguccuccagggcagcuggugaaucuucaugaccugcacagugaugagaucgagcauuugguaguggaggaacucgucaaaaagagggaagagugccuggacgccuuagaaucuauuaucaccacuaaauccgugagcuuucggcgccugucgcaccuccgaaaacuuguucccggauucggcaaggcuuauacaauauuuaacaagacccugauggaggccgaggcgcacuacaagucugugagaacguggaaugaaauuaucccguccaaaggcugcuugagggucgggggacgguguuauccucaugugaacgguguauucuucaauggcauuauccuagggcccgacggacacguucugaucccagagaugcagucaagucuccugcagcaacauauugaacuucuggagagcuccgugauaccuuugaugcacccccucgcagauccauuuaccgucuucaaggacggcgaugaaaucgaggacuuuguggagguccaucugcccgaugugcacgaacagguuucugguguggacuuagggcugccuaacuggggcgaguacguacuacucagcgccggaacacugauugcucuuauguugaucauauuccugauuacuugcuguaaacgugucgaucgcccagaaucaacccagagaagucucaggggcacagggcggaacguguccguuacuagccagucuggaaaguuuaucccgucaugggagaguuauaaaagcgguggcgaaaccgggcuguga

SEQ ID NO: 159189 - RNA, 1575 nt, Artificial Sequence; identical to SEQ ID NO: 159078
  derived and/or modified CDS sequence (opt3) from glycoprotein__RABV__JN234413.1

SEQ ID NO: 159190 - RNA, 1575 nt, Artificial Sequence
  derived and/or modified CDS sequence (opt3) from glycoprotein__RABV__JN234420.1
augaucccccaggcccuccuguucgugccucuucuggucuuuccauugugcuucggcaaguuuccgauuuacaccauacccgacaaauuagggccuuggagcccaaucgauauucaccaucuguccugucccaacaaucuaguuguggaggacgaaggaugcacaaaccucucugguuucucauauauggagcugaagguaggcuacaucagugcuauuaaagugaauggguuuacuuguacgggagucgugaccgaagcagagacauauacuaacuucguuggcuacgugaccacaaccuuuaagagaaaacacuucaggccuacuccagaugccugccggagcgcguauaauuggaagauggcuggugacccccgcuacgaagagucccuucauaacccuuauccagauuaccacuggcugcgaacagucaagaccacgaaagagucugugguaaucauaucgccgucaguugccgacuuggaucccuacgacaagagccuccauagucguguguuuccuagagggaaauguuccggaaucacugucucuagcgcauauugcuccaccaaucacgauuacacaauuuggaugccagaaaaccccaggcugggcacuucaugugacaucuucaccaauagucggggcaagcgcgccagcaaagggucuaagacaugcggauuuguggaugagagaggucuguauaagucccucaaaggcgcuuguaaguuaaaacugugcggggugcuuggauugaggcugauggacggcaccugggucgcaauucaaacgucaaacgaaacuaagugguguccuccagaucagcuaguuaaucuccacgacuuccauagcgacgagaucgagcaccuggugguagaggaacuugugaaaaagcgggaagagugccuggaugccuuggaaaguauaaugacaaccaaaucugucuccuuucgccgacucagccaucugagaaaguuagugcccgguuucgggaaggcuuacacuauuuucaacaaaacacugauggaggccgacgcgcacuauaagucgguuaggaccuggaaugagaucauuccgucuaaaggaugccuccgggugggcggccguugucacccucaugucaacgggguguuuuucaauggaaucauccuuggucccgauggccacguacugauuccagaaaugcaguccucauugcuacagcaacauauggagcugcucaagaguagcguuauaccucugaugcacccccuugcagacccauccacgguguuuaaagauggggacgaagucgaggauuucguggaaguccaucugcccgacgugcacaagcagguuucuggaguggauuugggccucccuaacugggguaaggacguacugaugggggccggcgucuuaaccgcucugaugcuaaugaucuuucucaugacaugcugucgcagaacuaacagggccgagagcauucagcacucacugggagagaccggccggaaagugaguguuacaucccagagcgggcgagugaucucuucaugggaaaguuacaagagcggaggugagacuaaacuuuga

SEQ ID NO: 159191 - RNA, 1575 nt, Artificial Sequence; identical to SEQ ID NO: 159190
  derived and/or modified CDS sequence (opt3) from glycoprotein__RABV__JN234423.1

SEQ ID NO: 159192 - RNA, 1575 nt, Artificial Sequence
  derived and/or modified CDS sequence (opt3) from glycoprotein__RABV__JN234424.1
auggugccccaggcccuucucuucgucccucuucugguuuuuccauugugcuucggcaaguuuccgaucuacaccauucccgacaaauuagggccuuggagcccaauagauauccaccaucuguccugucccaacaaucuagugguagaggacgaaggaugcacaaaccucucugguuucucauauauggagcugaaggugggcuacauuagugcuaucaaaacuaauggguuuacguguaccggagucgugacagaagcagagacuuauaccaacuucguuggcuacgugacaaccacuuuuaagagaaaacacuucaggccuacaccagaugccugccgggcggcuuauaauuggaagauggccggugacccccgcuacgaagagagccuucauaacccuuauccagauuaccacuggcugcgaaccgucaagacgacuaaagaguccuuggugauuaucucuccgucgguagcagaccucgaucccuacgaccguucacugcauagcagaguuuuuccugggggaaauuguaguggcguggccgucuccucuaccuauugcagcacaaaccacgauuacacuauauggaugccagaaaaucccaggcugggcauguccugugacaucuucaccaacucacgggggaagcgcgcuaguaaaggaagcgagacaugcgguuuuguggaugaaagaggccucuauaagucuuuaaaaggggcauguaagcugaagcugugcggaguguugggccugaggcuaauggacgguaccugggucgccaugcaaacguccaaugagacuaaaugguguccuccagggcagcucguuaaccugcacgauuuccggucagacgagauugaacaucuugugguagaggaacuggugaagaaacgcgaggaaugcuuggacgcucucgagagcaucaugacaaccaagagugucucuuuucgaagacugucccacuuaaggaaacuggugcccggauucggcaaggccuacacuauuuucaauaaaacacucauggaggcggaugcacauuauaagagcguucggaccuggaacgaaaucauaccgucgaagggcugccuucgugucgggggacgcugucacccucacgugaaugguguguuuuucaacggcauuauccuggggcccgacggaaacguauugauuccagagaugcagucuucccuacugcagcaacauauggaacuccugguuucaagugugaucccucuuaugcaccccauggccgauccaagcacggucuuuaaaaauggcgacgaggcugaagauuucguggagguccaucugcccgacgugcacgagagaaucuccgguguugauuuggggcucccuaacuggggcaaguacgugcuguuaucugccggagcacugaccgcucuaaugcucauuauauuucugaugacaugcuggaggcggguaaaucgaagcgaaccaacucagcauaaccuucgcggcaccgggagagaggucucagugacaccgcagaguggaaaaaucauuuccagcugggaaucuuauaagucagguggcgagacuggguuguga

SEQ ID NO: 159193 - RNA, 1575 nt, Artificial Sequence; identical to SEQ ID NO: 159076
  derived and/or modified CDS sequence (opt3) from glycoprotein__RABV__JN786877.1

SEQ ID NO: 159194 - RNA, 1575 nt, Artificial Sequence
  derived and/or modified CDS sequence (opt3) from glycoprotein__RABV__JN786878.1
augaucccccaggcccuccuguucgugccucuucuggucuuuagcuccugcuucggcaaguuuccaauuuacaccauaccggacaaauuggggcccuggucuccuaucgauauucaccauuuaagauguccaaacaaucugguuguggaggacgaaggaugcacaaaccuaucagguuucaguuauauggagcucaagguaggcuacaucagcgcuauuaaagugaauggguuuacuuguacgggagucgugaccgaagcagagacauauacuaacuucguuggcuacgugaccacaaccuuuaagaggaaacacuuccggcccacuccugaugccugccgcgcggcuuauaauuggaagauggccggugacccacgauacgaagagucccugcauaaccccuauccugauuaccacuggcuucguacagucaagaccacgaaagagucucuggugaucauaucgccaucaguaagcgacuuggauccguacgacaagagucuccauuccagaguuuuucccucugggaaauguagcggaaucacuguguccucaaccuauugcccuacaaaucacgauuacacuauuuggaugccagaaaaccccaggcugggcaccaguugugacaucuucacaaauagccggggcaagcgcgcaucuaaagggggaaagaccugcgguuuugucgaugagagaggccuguauaagucccucaaaggggccuguaaguuaaaacugugcggagugcuuggcuugaggcugauggacgguacguggguggcuauucaaacuucagaugaagcaaagugguguccuccagaccagcuagucaacauccacgacuuccggagcgaugagauagagcaucucguuguggaggaacuggugaaaaagcgcgaagagugccuugacgcccuggaaaguauuaugacaaccaaaucuguauccuuucgaagauugagccaccucaggaagcugguccccggguucggaaaggcuuacacuaucuucaauaaaacauuaauggaggccgaugcgcauuauaagucggugcggaccuggaacgagauuaucccgucuaaaggcugccugcguguuggcgggcgcugucacccucacgugaauggagucuuuuucaacgguaucauucucggccccgacgggcaugugcuuauaccagaaaugcaguccucacuguugcagcaacacauggagcuacuggaaaguagcguaaucccucucaugcauccccuggcagauccauccacgguuuuuaaggacggagaugaggccgaagacuucguggagguccaccuucccgaugugccuaaacaggucucuggcguggaccuggguuugccaagcugggggaaguacguucucaugucagugggcgcuaugauugcccugauguuaaugaucuuucugaugaccugcuguagaaaggcaaauggagcugagacaauacagcauaggcuaggcgaaacugggcggaaaguaagugucaccucccagagcggacgagugauuucuucaugggagaguuauaagagcgguggcgaaacaaaacucuga

SEQ ID NO: 159195 - RNA, 1575 nt, Artificial Sequence; identical to SEQ ID NO: 158893
  derived and/or modified CDS sequence (opt3) from glycoprotein__RABV__JN936687.1

SEQ ID NO: 159196 - RNA, 1575 nt, Artificial Sequence
  derived and/or modified CDS sequence (opt3) from glycoprotein__RABV__JN936688.1
auggugccccagguccuucucuucguuccucuucuggccgugccauugugcuuuggcaaguucccgaucuacaccauucccgacaaauuagggccuuggagcccaauagauauccaccaucuguccugucccaacaaucuaguaguggaggacgaaggaugcacaaaccucucugguuuuucauauauggagcugaaggucggcuacauuagugcuaucaaagugaauggguucacuuguacgggaguugugaccgaagcagagacauauacuaacuuugucggcuacgugaccacaaccuucaagagaaaacacuuuaggccuacuccagaugccugccggagcgcguauaauuggaagauggcuggugacccccgcuacgaagagucccuucauaacccuuauccagauuaccacuggcugcgaacaguaaagaccacgaaagagucuuucguuauuaucucgccgucaguggccgacuuggaucccuacgacaagagccuccauagucgugucuuuccuagagggaaauguuccggaauaacugugucuagcaccuauugcuccacaaaucacgauuacacuaucuggaugccagaaaaccccaggcugggcaccucaugugacauuuucacaaauagucggggcaagcgcgcaagcaaagggucuaagaccugcggauuuguggaugagagaggucuguauaagucccucaaaggcgccuguaaguuaaaacugugcgggguccuuggauugaggcugauggacggcacguggguugcuauccaaacuucagaugaaacaaagugguguccuccagaccagcuagugaaccuccacgacuuccauagcgaugagauugagcaccugguaguggaggaacuugucaaaaagcgggaagagugccuggacgcauuggaaaguaucaugaccacuaaaucuguguccuuucgccgacucagccaucugagaaaguuaguucccgguuucgggaaggccuacacaauauucaauaaaacccugauggaggcugaugcccacuauaagucggugaggacguggaacgagauuaucccgucuaaaggaugccuccgggucggcggccguugucacccucaugugaaugggguauuuuucaacggaauuauccuuggucccgacggccacguucugaucccagaaaugcaguccucauugcuacagcaacauauggagcugcucgaaaguagcgugauuccucugaugcacccccuugcggauccauccaccgucuuuaaggacggggaugaggcagaagacuucguggagguccaucugcccgaugugcacaaacagguuucuggaguggacuugggccucccuagcugggguaaguacguacugaugucagccgggauauuaacagcucugaugcuaaugaucuuucucaugacuugcugucgcagaaccaauagggccgagaguauucagcacucccugggcgaaacaggacggaaggucagcgugacuucucagaacggccgaguuaucucaaguugggagagcuauaaauccgggggagaaaccaagcuguga

SEQ ID NO: 159197 - RNA, 1575 nt, Artificial Sequence
  derived and/or modified CDS sequence (opt3) from glycoprotein__RABV__JN936689.1
auggugccccagguccuucucuucguuccucuucuggccgugccauugugcuuuggcaaguucccgaucuacaccauucccgacaaauuagggccuuggagcccaauagauauccaccaucuguccugucccaacaaucuaguaguggaggacgaaggaugcacaaaccucucugguuuuucauauauggagcugaaggucggcuacauuagugcuaucaaagugaauggguucacuuguacgggaguugugaccgaagcagagacauauacuaacuuugucggcuacgugaccacaaccuucaagagaaaacacuuuaggccuacuccagaugccugccggagcgcguauaauuggaagauggcuggugacccccgcuacgaagagucccuucauaacccuuauccagauuaccacuggcugcgaacaguaaagaccacgaaagagucuuucguuauuaucucgccgucaguggccgacuuggaucccuacgacaagagccuccauagucgugucuuuccuagagggaaauguuccggaauaacugugucuagcaccuauugcuccacaaaucacgauuacacuaucuggaugccagaaaaccccaggcugggcaccucaugugacauuuucacaaauagucggggcaagcgcgcaagcaaagggucuaagaccugcggauuuguggaugagagaggucuguauaagucccucaaaggcgccuguaaguuaaaacugugcgggguccuuggauugaggcugauggacggcacguggguugcuauccaaacuucagaugaaacaaagugguguccuccagaccagcuagugaaccuccacgacuuccauagcgaugagauugagcaccugguaguggaggaacuugucaaaaagcgggaagagugccuggacgcauuggaaaguaucaugaccacuaaaucuguguccuuucgccgacucagccaucugagaaaguuaguucccgguuucgggaaggccuacacaauauucaauaaaacccugauggaggcugaugcccacuauaagucggugaggacguggaacgagauuaucccgucuaaaggaugccuccgggucggcggccguugucacccucaugugaaugggguauuuuucaacggaauuauccuuggucccgacggccacguucugaucccagaaaugcaguccucauugcuacagcaacauauggagcugcucgaaaguagcgugauuccucugaugcacccccuugcggauccauccaccgucuuuaaggacggggaugaggcagaagacuucguggagguccaucugcccgaugugcacaaacagguuucuggaguggacuugggccucccuagcugggguaaguacguacugaugucagccgggauauuaacagcucugaugcuaacuaucuuucucaugaccugcugucgcagaacaaauagggccgagaguauucagcacucccugggcgaaacuggacggaaggucagcgugaccucucagucaggccgaguuaucaguagcugggaguccuauaaaucugggggagaaacaaagcuguga

SEQ ID NO: 159198 - RNA, 1575 nt, Artificial Sequence
  derived and/or modified CDS sequence (opt3) from glycoprotein__RABV__JN936690.1
auggugccccaggccguccuguucguuccucuccuugcugugccacugugcuuuggcaaguucccgaucuacaccauucccgacaaauuggggccuuggagcccaauagauauccaccauuuauccugucccaacaaucugguaguggaggacgaaggaugcacaaaccuaucugguuuuucauauauggagcucaaggucggcuacauuagugcaaucaaagugaauggguucacuuguacgggaguugugaccgaagccgagacauauacuaacuuugucggcuacgugaccacaaccuucaagagaaaacacuuuaggccuacuccagaugcgugccggagcgcuuauaauuggaagauggccggugacccccgcuacgaagagucccugcauaacccuuauccagauuaccacuggcuucgaacaguaaagaccacgaaagagucuuucguuauuaucucgccgucaguggcagaccuggaucccuacgacaagagcuugcauagucgugucuuuccuagagggaaauguuccggaauaacugugucuagcaccuauugcuccacaaaucacgauuacacuaucuggaugccagaaaaccccaggcucggcaccucaugugacauuuucacaaauagucggggcaagcgcgccagcaaagggucuaagaccugcggauuuguggaugagagaggucuguauaagucccugaaaggcgcuuguaagcucaaauuaugcgggguccugggacuuagguugauggacggcacguggguugcaauccaaacuucagaugaaacaaagugguguccuccagaccagcuggugaaccuacacgacuuccauagcgaugagauugagcaccucguaguggaggaacuggucaaaaagcgggaagagugccuugacgcccuggaaaguaucaugaccacuaaaucuguguccuuucgccgauugagccaucucagaaagcugguucccgguuucgggaaggcuuacacaauauucaauaaaaccuuaauggaggccgaugcgcacuauaagucggugaggacguggaacgagauuaucccgucuaaaggaugccugcgggucggcggccguugucacccucaugugaaugggguauuuuucaacggaauuauccucggucccgacggccacguucuuaucccagaaaugcaguccucacuguugcagcaacauauggagcuacuggaaaguagcgugauuccucucaugcacccccuggcagauccauccaccgucuuuaaggacggggaugaggccgaagacuucguggagguccaucuucccgaugugcacaaacagguuucuggaguggaccugggcuugccuagcugggguaaguacguacucaugucagcugggauacugacagccuuaaugcugaugaucuuucuaaugacuugcugucgcagaaccaauagggcagagaguauucagcacucccucggcgaaacaggacggaaggucagcgugacuucucagaacggccgaguuaucucaaguugggagagcuauaaauccgggggagaaaccaagcuguga

SEQ ID NO: 159199 - RNA, 1575 nt, Artificial Sequence
  derived and/or modified CDS sequence (opt3) from glycoprotein__RABV__JN936691.1
augaucccccaggugcuccuguucgucccucuucugguuuuuagcuccugcuucggcaaguuuccaauuuacaccauaccggacaaauuggggcccuggucuccuaucgauauucaccauuuaucauguccaaacaauauggugguagaggacgaaggaugcacaaaccugagugguuucagcuauauggagcuaaaggugggcuacaucuccgccauuaaagucaauggguuuacuuguacgggagugguuaccgaagcugagacauauacuaacuucgugggcuacgucaccacaaccuuuaagagaaaacacuucaggcccaugccugaugcaugccgggccgcguauaauuggaagauggcuggugacccacgcuacgaagagucucuccauaaccccuauccugauuaccacuggcugcgaacugugaagacaaccaaagagucgcuuguaaucauaucaccaagcguugccgaccuggauccguacgacaagaguuugcauucccguguguuucccgggggaaaauguucuggcaucacggucagcuccacuugcuguucaaccaaucacgauuauacaauuuggaugccugaaaacccaagacucggcaccaguugcgacaucuucacuaauagcagggggaagcgggcaucuaaaggagguaagacauguggcuuuguggaugagcgcgggcuguacaagucccugaaaggagccugcaagcucaaauuauguggcgugcugggucuuagauugauggacgggaccugggucgcuauucaaacgucagaugaaaucaaguggugcagccccgaccagcugguuaaccuacacgacuuccauagugaugagauagagcaccucgugguagaggaacuggugaaaaagagggaagagugccuugacgcacuggaaacuauuaugacaaccaaaucugucuccuuucggcgcuugagccaucuccgaaagcuggugccuggauucggcaaggccuauacuaucuucaauaaaacauuaauggaggcugaugcccacuacaagucgauuagaaccuggaacgagaucaucccaucuaaaggcugucugaggguugggggacggugccacccccaugugaauggugucuuuuucaacggcauuauacucgggccggacggacacgugcuuaucccugaaaugcaguccucacuguugcaucagcacauggagcuacuggaaaguagcguaauuccccucaugcauccacuggcggauccuuccacgguuuuuaaggacggcgaugaggcagaagacuucguggagguccaccuucccgaugugcacaaacaaaucucuggugucgaccugggguugccaaauuggggcaaguaugugcucauaagcgccggagcucugaccgccuuaaugcugacaauuuuucuaaugacuuguugccguaagaccaaccgcgcagagucaauccagcauagucccggcgaaacagggagaaaaguuuccgugacuagccacaacggaaggguaaucucuucaugggagaguuacaagagcgguggcgaaaccaaacucuga

SEQ ID NO: 159200 - RNA, 1575 nt, Artificial Sequence; identical to SEQ ID NO: 158893
  derived and/or modified CDS sequence (opt3) from glycoprotein__RABV__JN936692.1

SEQ ID NO: 159201 - RNA, 1575 nt, Artificial Sequence
  derived and/or modified CDS sequence (opt3) from glycoprotein__RABV__JN936693.1
auggugccccaggccuuccuguuugucccucuccuugcuaucccacugugcuucggcaaguuuccgauuuacaccauacccgacaaauuggggccuuggagcccaaucgauauucaccauuuauccugucccaacaaucugguuguggaggacgaaggaugcacaaaccuaucugguuucucauauauggagcucaagguaggcuacaucagugcaauuaaagugaauggguuuacuuguacgggagucgugaccgaagccgagacauauacuaacuucguuggcuacgugaccacaaccuuuaagagaaaacacuucaggccuacuccagaugcgugccggagcgcuuauaauuggaagauggccggugacccccgcuacgaagagucccugcauaacccuuauccagauuaccacuggcuucgaacagucaagaccacgaaagagucuuuugugaucauaucgccgucaguagcagaccuggaucccuacgacaagagcuugcauagucguguuuucccuagagggaaauguuccggaaucacugugucuagcaccuauugcuccacaaaucacgauuacacuauuuggaugccagaaaaccccaggcucggcaccucaugugacaucuuuacaaauagucggggcaagcgcgccagcaaagggucuaagaccugcggauucgucgaugagagaggucuguauaagucccugaaaggcgcuuguaagcucaaauuaugcggggugcugggacuuagguugauggacggcacguggguggcaauucaaacuucagaugaaacaaagugguguccuccagaccagcuggucaaccuacacgacuuucauagcgaugagaucgagcaccucguuguggaggaacuggugaaaaagcgggaagagugccuugacacccuggaaaguauaaugacuacaaaaucuguauccuuccgccgauugagccaucucagaaagcugguccccgguuucgggaaggccuacaccauuuuuaauaaaacguuaauggaggcugaugcccacuauaagucggugaggaccuggaacgagaucauuccgucuaaaggaugccugcggguuggcggccguugucacccucaugugaauggggucuucuuuaacggaaucauccucggucccgacggccacgugcuuauuccagaaaugcaguccucacuguugcagcaacauauggagcuacuggaaaguagcguaauaccucucaugcacccccuggcggauccauccacaguuuucaaggacggggaugaggcagaagacuuuguggagguccaucuucccgaugugcacaaacaggucucuggaguggaccugggcuugccuagcugggguaaguacguucucaugucagccgggauccugacugcuuuaaugcugaugauuuuccuaaugaccugcugucgcagaacaaauagggccgagaguauccagcacucccucggcgaaacuggacggaaggugagcguaaccucucagucaggccgagucauaaguagcugggaguccuauaaaucugggggagaaacaaagcuguga

SEQ ID NO: 159202 - RNA, 1575 nt, Artificial Sequence
  derived and/or modified CDS sequence (opt3) from glycoprotein__RABV__JN936694.1
auggugccccaggcccugcuguucgucccucuucugguuuuuagcuccugcuucggcaaguuuccaaucuacaccauuccggacaaauuggggcccuggucuccuauagauauccaccauuuaucauguccaaacaauuucgugguagaggacgaaggaugcacaaaccugagugguuuuagcuauauggagcuaaaggugggcuacauuuccgcuaucaaagucaauggguucacuuguacgggagugguuaccgaagcagagacauauacuaacuuugugggcuacgucaccacaaccuucaagagaaaacacuuuaggcccaugccugaugccugccgggcggcuuauaauuggaagauggccggugacccacgcuacgaagagucucuccauaaccccuauccugauuaccacuggcugcgaacugugaagacaaccaaagagucgcuuguaauuaucucaccaagcguugcagaccuggauccguacgacaagaguuugcauucccguguguuccccgggggaaaauguucuggcauaacggucagcuccacuugcuguucaaccaaucacgauuauacaaucuggaugccugaaaacccaagacucggcaccaguugcgacauuuuuacuaauagcagggggaagcgggccucuaaaggagguaagacauguggcuucguggaugagcgcgggcuguacaagucccugaaaggagcuugcaagcucaaauuauguggcgugcugggucuuagauugauggacgggaccugggucgcaauccaaacgucagaugaaauuaaguggugcagccccgaccagcugguuaaccuacacgacuuucauagugaugagaucgagcacuucgugguagaggaacucgugaaaaagagggaagagugccuggacgcccuugaaacuauaaugacaaccaaaucugucuccuuccggcgccugagccauuugcgaaagcucgugccuggauuuggcaaggcuuauacuauuuucaauaaaacacugauggaggccgaugcgcacuacaagucgaucagaaccuggaacgagauuaucccaucuaaaggcuguuuaaggguugggggacggugccacccccaugugaauggugucuuuuucaacggcaucauucuggggccggacggacacgugcucauaccugaaaugcaguccucacuucugcaucagcacauggaguugcuagaaaguagcguaaucccccugaugcauccacucgcagauccuuccacgguuuuuaaggacggcgaugaggccgaagacuucguggagguccaccuccccgaugugcacaaacaaauuucuggugucgaccuugggcugccaaauuggggcaaguauguguugaucagcgcuggagcccucaccgcacugauguuaaugauauuucugaugacauguugccguaaggcuaaccgcgccgagucaauucagcauaaccccggcgaaacugggagaaaaguuagugugaccucccacaauggaaggguaaucagcucuugggagucauacaagagugguggcgaaacaaaacuauga

SEQ ID NO: 159203 - RNA, 1575 nt, Artificial Sequence
  derived and/or modified CDS sequence (opt3) from glycoprotein__RABV__JN936695.1
auggugccccaggccuuccuguuugucccucuccuugcuaucccacugugcuucggcaaguuuccgauuuacaccauacccgacaaauuggggccuuggagcccaaucgauauucaccauuuauccugucccaacaaucugguuguggaggacgaaggaugcacaaaccuaucugguuucucauauauggagcucaagguaggcuacaucagugcaauuaaagugaauggguuuacuuguacgggagucgugaccgaagccgagacauauacuaacuucguuggcuacgugaccacaaccuuuaagagaaaacacuucaggccuacuccagaugcgugccggagcgcuuauaauuggaagauggccggugacccccgcuacgaagagucccugcauaacccuuauccagauuaccacuggcuucgaacagucaagaccacgaaagagucuuuugugaucauaucgccgucaguagcagaccuggaucccuacgacaagagcuugcauagucguguuuucccuagagggaaauguuccggaaucacugugucuagcaccuauugcuccacaaaucacgauuacacuauuuggaugccagaaaaccccaggcucggcaccucaugugacaucuuuacaaauagucggggcaagcgcgccagcaaagggucuaagaccugcggauucgucgaugagagaggucuguauaagucccugaaaggcgcuuguaagcucaaauuaugcggggugcugggacuuagguugauggacggcacguggguggcaauucaaacuucagaugaaacaaagugguguccuccagaccagcuggucaaccuacacgacuuucauagcgaugagaucgagcaccucguuguggaggaacuggugaaaaagcgggaagagugccuugacgcccuggaaaguauaaugaccacuaaaucuguauccuuccgccgauugagccaucucagaaagcugguccccgguuucgggaaggcuuacacaauuuuuaauaaaaccuuaauggaggccgaugcgcacuauaagucggugaggacguggaacgagaucauuccgucuaaaggaugccugcggguuggcggccguugucacccucaugugaauggggucuucuuuaacggaaucauccucggucccgacggccacgugcuuauuccagaaaugcaguccucacuguugcagcaacauauggagcuacuggaaaguagcguaauaccucucaugcacccccuggcagauccauccaccguuuucaaggacggggaugaggccgaagacuuuguggagguccaucuucccgaugugcacaaacaggucucuggaguggaccugggcuugccuagcugggguaaguacguucucaugucagcugggauccugacagccuuaaugcugaugauuuuccuaaugacuugcugucgcagagcaaauagggcugagaguauccagcacucccucggcgaaaccggacggaaggugagcguaacaucucagucaggccgagucauaaguagcugggaguccuauaaaucugggggagaaacuaagcuguga

SEQ ID NO: 159204 - RNA, 1575 nt, Artificial Sequence
  derived and/or modified CDS sequence (opt3) from glycoprotein__RABV__JN936696.1
augauccuccaggugcugcuuuucguccccuuucugguuuucagcuccugcuuuggcaaguucccuauuuacaccauaccagacaaauuggggccguggucucccaucgauauucaccauuuaucauguccuaacaaucuggugguagaggacgaaggaugcacaaaccuaagugguuuuagcuauauggagcucaaggugggcuacaucuccgccauuaaagucaauggguucacuuguacgggagugguuaccgaagcugagacauauacuaacuuugugggcuacgucaccacaaccuucaagagaaaacacuuuaggccaaugcccgaugcaugccgggccgcguauaauuggaagauggcuggugacccucgcuacgaagagucucugcauaacccauaucccgauuaccacuggcuucgaacugugaagacaaccaaagagucgcugguaaucauaucaccuagcguugccgacuuggauccauacgacaagagucuccauucccguguguuccccgggggaaaauguucuggcaucacggucagcuccacuugcuguucaaccaaucacgauuauacaauuuggaugccggaaaacccuagacugggcaccaguugcgacaucuuuacuaauagcagggggaagcgggcaucuaaaggagguaagacauguggcuucguggaugagcgcgggcuguacaagucccucaaaggagccugcaaguuaaaacuguguggcgugcuugguuugagacugauggacgggaccugggucgcuauucaaacgucagaugaaaucaaguggugcccacccgaccagcuaguuaaccuccacgacuuucauagcgaugagauagagcaccuggugguagaggaacuugugaaaaagagggaagagugccuggacgcauuggaaacuauuaugacaaccaaaagugucucuuuccggcgccucucccaucugcgaaaguuagugccuggauucggcaaggccuauacuaucuuuaauaaaacacugauggaggcugaugcccacuacaagagcauuagaaccuggaacgagaucaucccaucgaaaggcugucucaggguugggggacggugccacccccaugugaauggugucuucuuuaacggcauuauacuugggccggacggacacgugcugaucccugaaaugcagucuuccuugcuacaucagcacauggagcugcucgaaucaaguguaauuccccugaugcauccacuugcggauccuagcacgguuuucaaggacggcgaugaggcagaagacuuuguggagguccaucugcccgaugugcacaaacaaaucuccggugucgacuuggggcucccaaauuggggcaaguaugugcugauaucugccggagcuuuaaccgcccugaugcuaaugauuuuccucaugacauguugccguaagaacaaccgcgcagagagcauccagcacucacccggcgaaacugggagaaaaguuagugugaccucccacaauggaaggguaaucagcucuugggagucauacaagagugguggcgaaacaaaacuguga

SEQ ID NO: 159205 - RNA, 1575 nt, Artificial Sequence
  derived and/or modified CDS sequence (opt3) from glycoprotein__RABV__JN936697.1
auggugccccaggccuuccuguuugucccucuccuugcuaucccacugugcuucggcaaguuuccgauuuacaccauacccgacaaauuggggccuuggagcccaaucgauauucaccauuuauccugucccaacaaucugguuguggaggacgaaggaugcacaaaccuaucugguuucucauauauggagcucaagguaggcuacaucagugcaauuaaagugaauggguuuacuuguacgggagucgugaccgaagccgagacauauacuaacuucguuggcuacgugaccacaaccuuuaagagaaaacacuucaggccuacuccagaugcgugccggagcgcuuauaauuggaagauggccggugacccccgcuacgaagagucccugcauaacccuuauccagauuaccacuggcuucgaacagucaagaccacgaaagagucuuuugugaucauaucgccgucaguagcagaccuggaucccuacgacaagagcuugcauagucguguuuucccuagagggaaauguuccggaaucacugugucuagcaccuauugcuccacaaaucacgauuacacuauuuggaugccagaaaaccccaggcucggcaccucaugugacaucuuuacaaauagucggggcaagcgcgccagcaaagggucuaagaccugcggauucgucgaugagagaggucuguauaagucccugaaaggcgcuuguaagcucaaauuaugcggggugcugggacuuagguugauggacggcacguggguggcaauucaaacuucagaugaaacaaagugguguccuccagaccagcuggucaaccuacacgacuuucauagcgaugagaucgagcaccucguuguggaggaacuggugaaaaagcgggaagagugccuugacgcccuggaaaguauaaugaccacuaaaucuguauccuuccgccgauugagccaucucagaaagcugguccccgguuucgggaaggcuuacacaauuuuuaauaaaaccuuaauggaggccgaugcgcacuauaagucggugaggacguggaacgagaucauuccgucuaaaggaugccugcggguuggcggccguugucacccucaugugaauggggucuucuuuaacggaaucauccucggucccgacggccacgugcuuauuccagaaaugcaguccucacuguugcagcaacauauggagcuacuggaaaguagcguaauaccucucaugcacccccuggcagauccauccaccguuuucaaggacggggaugaggccgaagacuuuguggagguccaucuucccgaugugcacaaacaggucucuggaguggaccugggcuugccuagcugggguaaguacguucucaugucagcugggauccugacagccuuaaugcugaugauuuuccuaaugacuugcugucgcagaaccaauagggcagagaguauccagcacucccucggcgaaacaggacggaaggugagcguaacuucucagucaggccgagucauaaguagcugggaguccuauaaaucugggggagaaaccaagcuguga

SEQ ID NO: 159206 - RNA, 1575 nt, Artificial Sequence; identical to SEQ ID NO: 158875
  derived and/or modified CDS sequence (opt3) from glycoprotein__RABV__JN936698.1

SEQ ID NO: 159207 - RNA, 1575 nt, Artificial Sequence
  derived and/or modified CDS sequence (opt3) from glycoprotein__RABV__JN936699.1
auggugccccagguccuccuguucguuccuuuucuuguguucagcuccugcuuuggcaaguucccaaucuacaccauuccggacaaacuggggcccuggucuccuauagauauccaccauuugucauguccaaacaauuuaguaguggaggacgaaggaugcacaaaccugagugguuuuagcuauauggagcuaaaggucggcuacauuuccgccaucaaagugaauggguucacuuguacgggaguugugaccgaagcugagacauauacuaacuuugucggcuacgugaccacaaccuucaagagaaaacacuuuaggcccaugccugaugcaugccgggccgcguauaauuggaagauggcuggugacccacgcuacgaagagucucuccauaaccccuauccugauuaccacuggcugcgaacuguaaagacaaccaaagagucgcuuguuauuaucucaccaagcguggccgaccuggauccguacgacaagaguuugcauucccgugucuuccccgggggaaaauguucuggcauaacggugagcuccacuugcuguucaaccaaucacgauuauacaaucuggaugccugaaaacccaagacucggcaccaguugcgacauuuuuacuaauagcagggggaagcgggcaucuaaaggagguaagacauguggcuucguggaugagcgcgggcuguacaagucccugaaaggagccugcaagcucaaauuauguggcguccugggucuuagauugauggacgggaccuggguugcuauccaaacgucagaugaaauuaaguggugcagccccgaccagcuggugaaccuacacgacuuucauagugaugagaucgagcaccucguaguggaggaacuggucaaaaagagggaagagugccuugacgcacuggaaacuauaaugacaaccaaaucuguguccuuccggcgcuugagccaucuccgaaagcugguuccuggauucggcaaggccuauacuauuuuuaauaaaacauuaauggaggcugaugcccacuacaagucgaucagaaccuggaacgagauuaucccaucuaaaggcugucugagggucgggggacggugccacccccaugugaaugguguguucuuuaacggcaucauucucgggccggacggacacguacuuauaccugaaaugcaguccucacuguugcaucagcacauggagcuacuggaaaguagcguuaucccccucaugcauccacuggcggauccuuccacgguguucaaggacggcgaugaggcagaagacuuugucgaggugcaccuucccgauguccacaaacaaauuucugguguggaccugggguugccaaauuggggcaaguauguucucaucagcgccggagcucugaccgccuuaaugcugaugauauuccuaaugacauguugccguaaggcaaaccgcgcugagucaauucagcauaaccccggcgaaacugggagaaaagugaguguaaccucccacaauggaagggucaucagcucuugggagucauacaagagugguggcgaaacaaaacucuga

SEQ ID NO: 159208 - RNA, 1575 nt, Artificial Sequence; identical to SEQ ID NO: 158574
  derived and/or modified CDS sequence (opt3) from glycoprotein__RABV__JN936700.1

SEQ ID NO: 159209 - RNA, 1575 nt, Artificial Sequence; identical to SEQ ID NO: 159207
  derived and/or modified CDS sequence (opt3) from glycoprotein__RABV__JN936701.1

SEQ ID NO: 159210 - RNA, 1575 nt, Artificial Sequence; identical to SEQ ID NO: 158574
  derived and/or modified CDS sequence (opt3) from glycoprotein__RABV__JN936702.1

SEQ ID NO: 159211 - RNA, 1575 nt, Artificial Sequence; identical to SEQ ID NO: 158574
  derived and/or modified CDS sequence (opt3) from glycoprotein__RABV__JN936703.1

SEQ ID NO: 159212 - RNA, 1575 nt, Artificial Sequence
  derived and/or modified CDS sequence (opt3) from glycoprotein__RABV__JN936704.1
auggugccccagguccuucucuucguuccucuucuggccuuuagcuccugcuucggcaaguuuccaaucuacaccauuccggacaaauuggggcccuggucuccuauagauauccaccauuuaucauguccaaacaaucuggugguagaggacgaaggaugcacaaaccuaagugguuucagcuauauggagcucaaggugggcuacauuuccgcuaucaaagucaauggguuuacuuguacgggagugguuaccgaagcagagacauauacuaacuucgugggcuacgucaccacaaccuuuaagagaaaacacuucaggcccaugccugaugccugccgggcggcuuauaauuggaagauggccggugacccacgcuacgaagagucucugcauaaccccuauccugauuaccacuggcuucgaacugugaagacaaccaaagagucgcugguaauuaucucaccaagcguugcagacuuggauccguacgacaagagucuccauucccguguguuucccgggggaaaauguucuggcauaacggucagcuccacuugcuguucaaccaaucacgauuauacaaucuggaugccugaaaacccaagacugggcaccaguugcgacauuuucacuaauagcagggggaagcgggccucuaaaggagguaagacauguggcuuuguggaugagcgcgggcuguacaagucccucaaaggagcuugcaaguuaaaacuguguggcgugcuugguuugagacugauggacgggaccugggucgcaauccaaacgucagaugaaauuaaguggugcagccccgaccagcuaguuaaccuccacgacuuccauagugaugagaucgagcaccuggugguagaggaacuugugaaaaagagggaagagugccuggacgccuuggaaacuauaaugacaaccaaaucugucuccuuucggcgccucagccaucugcgaaaguuagugccuggauucggcaaggcuuauacuauuuucaauaaaacacugauggaggccgaugcgcacuacaagucgaucagaaccuggaacgagauuaucccaucuaaaggcugucucaggguugggggacggugccacccccaugugaauggugucuuuuucaacggcaucauucuugggccggacggacacgugcugauaccugaaaugcaguccucauugcuacaucagcacauggagcugcucgaaaguagcguaaucccccugaugcauccacuugcagauccuuccacgguuuuuaaggacggcgaugaggccgaagacuucguggagguccaucugcccgaugugcacaaacaaauuucuggugucgacuuggggcucccaaauuggggccguuaugugcugaucagcgcuggagccuuaaccgcacugaugcuaaugauauuucucaugacauguugccgcaaggcuaacagagccgagcugauucagcacaaccccggcgaaacugggaggaagguuucagugaccagucacaauggacggguaaucuccagcugggagucuuacaaaucagguggcgaaacaaagcuguga

SEQ ID NO: 159213 - RNA, 1575 nt, Artificial Sequence
  derived and/or modified CDS sequence (opt3) from glycoprotein__RABV__JN936705.1
augaucccccaggugcuccuguucgucccucuucugguuuuuagcuccugcuucggcaaguuuccaauuuacaccauaccggacaaauuggggcccuggucuccuaucgauauucaccauuuaucauguccaaacaauauggugguagaggacgaaggaugcacaaaccugagugguuucagcuauauggagcuaaaggugggcuacaucuccgccauuaaagucaauggguuuacuuguacgggagugguuaccgaagcugagacauauacuaacuucgugggcuacgucaccacaaccuuuaagagaaaacacuucaggcccaugccugaugcaugccgggccgcguauaauuggaagauggcuggugacccacgcuacgaagagucucuccauaaccccuauccugauuaccacuggcugcgaacugugaagacaaccaaagagucgcuuguaaucauaucaccaagcguugccgaccuggauccguacgacaagaguuugcauucccguguguuucccgggggaaaauguucuggcaucacggucagcuccacuugcuguucaaccaaucacgauuauacaauuuggaugccugaaaacccaagacucggcaccaguugcgacaucuucacuaauagcagggggaagcgggcaucuaaaggagguaagacauguggcuuuguggaugagcgcgggcuguacaagucccugaaaggagccugcaagcucaaauuauguggcgugcugggucuuagauugauggacgggaccugggucgcuauucaaacgucagaugaaaucaaguggugcagccccgaccagcugguuaaccuacacgacuuccauagugaugagauagagcaccucgugguagaggaacuggugaaaaagagggaagagugccuugacgcacuggaaacuauuaugacaaccaaaucugucuccuuucggcgcuugagccaucuccgaaagcuggugccuggauucggcaaggccuauacuaucuucaauaaaacauuaauggaggcugaugcccacuacaagucgauuagaaccuggaacgagaucaucccaucuaaaggcugucugaggguugggggacggugccacccccaugugaauggugucuuuuucaacggcauuauacucgggccggacggacacgugcuuaucccugaaaugcaguccucacuguugcaucagcacauggagcuacuggaaaguagcguaauuccccucaugcauccacuggcggauccuuccacgguuuuuaaggacggcgaugaggcagaagacuucguggagguccaccuucccgaugugcacaaacaaaucucuggugucgaccugggguugccaaauuggggcaaguaugugcucauaagcgccugugcucugaccgccuuaaugcugacaauuuuucuaaugacuugcugucguaagaccucacgcgcagagaguauccagcauucccccggagaaacaggcagaaaaguuagcgugacuucucacaacgggaggguaaucucaaguugggagagcuacaaguccggaggugaaaccaaacucuga

SEQ ID NO: 159214 - RNA, 1575 nt, Artificial Sequence
  derived and/or modified CDS sequence (opt3) from glycoprotein__RABV__JN936706.1
augaucccccaggugcuccuguucgucccuuuucuuguuuucagcuccugcuuuggcaaguucccaauuuacaccauaccggacaaacuggggcccuggucuccuaucgauauucaccauuugucauguccaaacaauuuagugguagaggacgaaggaugcacaaaccugagugguuuuagcuauauggagcuaaaggugggcuacaucuccgccauuaaagucaauggguucacuuguacgggagugguuaccgaagcugagacauauacuaacuuugugggcuacgucaccacaaccuucaagagaaaacacuuuaggcccaugccugaugcaugccgggccgcguauaauuggaagauggcuggugacccacgcuacgaagagucucuccauaaccccuauccugauuaccacuggcugcgaacugugaagacaaccaaagagucgcuuguaaucauaucaccaagcguugccgaccuggauccguacgacaagaguuugcauucccguguguuccccgggggaaaauguucuggcaucacggucagcuccacuugcuguucaaccaaucacgauuauacaauuuggaugccugaaaacccaagacucggcaccaguugcgacaucuuuacuaauagcagggggaagcgggcaucuaaaggagguaagacauguggcuucguggaugagcgcgggcuguacaagucccugaaaggagccugcaagcucaaauuauguggcgugcugggucuuagauugauggacgggaccugggucgcuauucaaacgucagaugaaaucaaguggugcagccccgaccagcugguuaaccuacacgacuuucauagugaugagauagagcaccucgugguagaggaacuggugaaaaagagggaagagugccuugacgcacuggaaacuauuaugacaaccaaaucugucuccuuccggcgcuugagccaucuccgaaagcuggugccuggauucggcaaggccuauacuaucuuuaauaaaacauuaauggaggcugaugcccacuacaagucgauuagaaccuggaacgagaucaucccaucuaaaggcugucugaggguugggggacggugccacccccaugugaauggugucuucuuuaacggcauuauacucgggccggacggacacgugcuuaucccugaaaugcaguccucacuguugcaucagcacauggagcuacuggaaaguagcguaauuccccucaugcauccacuggcggauccuuccacgguuuucaaggacggcgaugaggcagaagacuuuguggagguccaccuucccgaugugcacaaacaaaucucuggugucgaccugggguugccaaauuggggcaaguaugugcucauaagcgccggagcucugaccgccuuaaugcugaugacauuccuaaugacuuguugccguaagaccaaccgcgcagagucaauucagcauagucccggcgaaacagggagaaaaguuuccgugacuagccacaacggaaggguaaucucuucaugggagaguuacaagagcgguggcgaaaccaaacucuga

SEQ ID NO: 159215 - RNA, 1575 nt, Artificial Sequence
  derived and/or modified CDS sequence (opt3) from glycoprotein__RABV__JN936707.1
auggugccccaggccuuccuguuugucccucuccuugcuguuccacugugcuucggcaaguuuccgaucuacaccauucccgacaaauuggggccuuggagcccaauagauauccaccauuuauccugucccaacaaucuggugguagaggacgaaggaugcacaaaccuaucugguuucucauauauggagcucaaggugggcuacauuagugcaaucaaagucaauggguuuacuuguacgggagugguuaccgaagccgagacauauacuaacuucgugggcuacgucaccacaaccuuuaagagaaaacacuucaggccuacuccagaugcgugccggagcgcuuauaauuggaagauggccggugacccccgcuacgaagagucccugcauaacccuuauccagauuaccacuggcuucgaacagugaagaccacgaaagagucuuuuguaauuaucucgccgucaguugcagaccuggaucccuacgacaagagcuugcauagucguguguucccuagagggaaauguuccggaauaacugucucuagcaccuauugcuccacaaaucacgauuacacuaucuggaugccagaaaaccccaggcucggcaccucaugugacauuuuuacaaauagucggggcaagcgcgccagcaaagggucuaagaccugcggauucguggaugagagaggucuguauaagucccugaaaggcgcuuguaagcucaaauuaugcggggugcugggacuuagguugauggacggcacgugggucgcaauccaaacuucagaugaaacaaagugguguccuccagaccagcugguuaaccuacacgacuuucauagcgaugagauugagcaccucgugguagaggaacuggugaaaaagcgggaagagugccuugacgcccuggaaaguaucaugaccacuaaaucugucuccuuccgccgauugagccaucucagaaagcuggugcccgguuucgggaaggcuuacacaauauuuaauaaaaccuuaauggaggccgaugcgcacuauaagucgguuaggacguggaacgagauuaucccgucuaaaggaugccugcgggugggcggccguugucacccucaugucaaugggguguucuuuaacggaauuauccucggucccgacggccacguacuuaucccagaaaugcaguccucacuguugcagcaacauauggagcuacuggaaaguagcguuauuccucucaugcacccccuggcagauccauccaccguguucaaggacggggaugaggccgaagacuuugucgaggugcaucuucccgauguccacaaacaggugucuggaguugaccugggcuugccuagcugggguaaguacgugcucaugucagcugggauacugacagccuuaaugcugacuaucuuccuaaugaccugcugucgcagaacaaauagggcagagaguauucagcacucccucggcgaaacuggacggaagguaagcgucaccucucagucaggccgagugaucaguagcugggaguccuauaaaucugggggagaaacaaagcuguga

SEQ ID NO: 159216 - RNA, 1575 nt, Artificial Sequence; identical to SEQ ID NO: 158875
  derived and/or modified CDS sequence (opt3) from glycoprotein__RABV__JN936708.1

SEQ ID NO: 159217 - RNA, 1575 nt, Artificial Sequence
  derived and/or modified CDS sequence (opt3) from glycoprotein__RABV__JN936709.1
augaucccccaggugcugcuguucgucccuuuucuuguuuucagccugugcuuuggcaaguucccaauuuacaccauaccggacaaauuggggcccugguccccuaucgauauucaccauuuaucuuguccaaacaaucuggugguagaggacgaaggaugcacaaaccuaucagguuuuaguuauauggagcucaaggugggcuacaucagcgccauuaaagucaauggguucacuuguacgggagugguuaccgaagcugagacauauacuaacuuugugggcuacgucaccacaaccuucaagagaaaacacuuuaggcccaugccugaugcaugccgggccgcguauaauuggaagauggcuggugacccacgcuacgaagagucccugcauaaccccuauccugauuaccacuggcuucgaacugugaagacaaccaaagagucucugguaaucauaucgccaucaguugccgacuuggauccguacgacaagagccuccauagucguguguuccccgggggaaaauguuccggcaucacggucucuagcacuugcuguuccaccaaucacgauuauacaauuuggaugccugaaaacccaagacugggcacuucaugcgacaucuuuaccaauaguagggggaagcgggcaagcaaaggagguaagacauguggcuucguggaugagcgcgggcuguacaagucucucaaaggagccugcaaguuaaaacuguguggcgugcuugguuugagacugauggacgggaccugggucgcuauucaaacguccgaugaaaucaaguggugcucacccgaccagcuaguuaaccuccacgacuuucauagcgaugagauagagcaccuggugguagaggaacuugugaaaaagagggaagagugccuggacgcauuggaaacuauuaugacaaccaaaagugucucuuuccggcgccucucccaucugcgaaaguuagugccuggauucggcaaggccuauacuaucuuuaauaaaacacugauggaggcugaugcccacuacaagagcauuagaaccuggaacgagaucaucccaucgaaaggcugucucaggguugggggacggugccacccccaugugaauggugucuucuuuaacggcauuauacuugggccggacggacacgugcugaucccugaaaugcagucuuccuugcuacaucagcacauggagcugcucgaaucaaguguaauuccccugaugcauccacuugcggauccuagcacgguuuucaaggacggcgaugaggcagaagacuuuguggagguccaccuccccgaugugcacaaacaaaucuccggugucgacuuggggcucccaaauuggggcaaguaugugcugauaucugccggagcuuuaaccgcccugaugcuaaugauuuuccucaugacauguugccguaagacuaaccgcgcagagagcauccagcauucacccggcgaaaccgggagaaaaguuagugugacaucccacaacggaaggguaaucagcucuugggagucauacaagagugguggcgaaacuaaacuguga

SEQ ID NO: 159218 - RNA, 1575 nt, Artificial Sequence; identical to SEQ ID NO: 158875
  derived and/or modified CDS sequence (opt3) from glycoprotein__RABV__JN936710.1

SEQ ID NO: 159219 - RNA, 1575 nt, Artificial Sequence; identical to SEQ ID NO: 159198
  derived and/or modified CDS sequence (opt3) from glycoprotein__RABV__JN936711.1

SEQ ID NO: 159220 - RNA, 1575 nt, Artificial Sequence
  derived and/or modified CDS sequence (opt3) from glycoprotein__RABV__JN936712.1
augaucccccaggugcuccuguucgucccucuucugguuuuuagcuugugcuucggcaaguuuccaauuuacaccauaccggacaaauuagggcccugguccccuaucgauauucaccaucugucuuguccaaacaaucuagugguagaggacgaaggaugcacaaaccucucagguuucaguuauauggagcugaaggugggcuacaucagcgccauuaaagucaauggguuuacuuguacgggagugguuaccgaagcugagacauauacuaacuucgugggcuacgucaccacaaccuuuaagagaaaacacuucaggcccaugccugaugcaugccgggccgcguauaauuggaagauggcuggugacccacgcuacgaagagucccuucauaaccccuauccugauuaccacuggcugcgaacugugaagacaaccaaagagucuuugguaaucauaucgccaucaguugccgaccucgauccguacgacaagagccugcauagucguguguuucccgggggaaaauguuccggcaucacggucucuagcacuugcuguuccaccaaucacgauuauacaauuuggaugccugaaaacccaagacugggcacuucaugcgacaucuucaccaauaguagggggaagcgggcaagcaaaggagguaagacauguggcuuuguggaugagcgcgggcucuacaagucuuuaaaaggagccugcaagcugaaacuuuguggcguguugggucugagacuaauggacgggaccugggucgcuauucaaacguccgaugaaaucaaguggugcucacccgaccagcucguuaaccugcacgacuuccauagcgaugagauagagcaccuugugguagaggaacuggugaaaaagagggaagagugcuuggacgcacucgaaacuauuaugacaaccaaaagugucucuuuucggcgccugucccauuuacgaaagcuggugccuggauucggcaaggccuauacuaucuucaauaaaacacucauggaggcugaugcccacuacaagagcauuagaaccuggaacgagaucaucccaucgaaaggcugucuuaggguugggggacggugccacccccaugugaauggugucuuuuucaacggcauuauacuggggccggacggacacguguugaucccugaaaugcagucuucccuacugcaucagcacauggagcuccuggaaucaaguguaauuccccuuaugcauccacuggcggauccuagcacgguuuuuaaggacggcgaugaggcagaagacuucguggagguccacuugcccgaugugcacaaacaaaucuccggugucgaccucgggcugccaaauuggggcaaguauguguuaauaucugccggagcucugaccgcccuaaugcucaugauuuuucugaugacauguugccguaagacuaaccgcgcagagagcauccagcauucacccggcgaaaccgggagaaaaguuagugugacaucccacaacggaaggguaaucagcucuugggagucauacaagagugguggcgaaacuaaacuuuga

SEQ ID NO: 159221 - RNA, 1575 nt, Artificial Sequence
  derived and/or modified CDS sequence (opt3) from glycoprotein__RABV__JN936713.1
auggugccccaggccguccuguucguuccucuccuugcugugccacugugcuuuggcaaguucccgaucuacaccauucccgacaaauuggggccuuggagcccaauagauauccaccauuuauccugucccaacaaucugguaguggaggacgaaggaugcacaaaccuaucugguuuuucauauauggagcucaaggucggcuacauuagugcaaucaaagugaauggguucacuuguacgggaguugugaccgaagccgagacauauacuaacuuugucggcuacgugaccacaaccuucaagagaaaacacuuuaggccuacuccagaugcgugccggagcgcuuauaauuggaagauggccggugacccccgcuacgaagagucccugcauaacccuuauccagauuaccacuggcuucgaacaguacguaccacgaaggagucuuucguuauuaucucgccgucaguggcagaccuggaucccuacgacaaaagccugcauaguagagucuuuccuagggggaaguguuccggaauaacugugucuagcaccuauugcuccacaaaucacgauuacacuaucuggaugccagaaaacccccggcucggcaccucaugugacauuuucacaaauagucgcggcaaaagagccagcaaggggucuaaaaccugcggauuuguggaugagaggggucuguauaagucccugaagggcgcuuguaaacucaaguuaugcgggguccugggacuucgguugauggacggcacguggguugcaauccaaacuucagaugaaacaaaaugguguccuccagaccagcuggugaaccuacacgacuuccauagcgaugagauugagcaccucguaguggaagaguuggucaagaaacgcgaagagugccuugacgcccuggaaaguaucaugaccacuaagucuguguccuuucgaagauugagccaucucaggaaacugguucccgguuucgggaaggcuuacacaauauucaauaagaccuuaauggaggccgaugcgcacuauaaaucggugcggacguggaacgagauuaucccgucuaagggaugccugcgugucggcggccgcugucacccucaugugaaugggguauuuuucaacggaauuauccucggucccgacggccacguucuuaucccagaaaugcaguccucacuguugcagcaacauauggagcuacuggaaaguagcgugauuccucucaugcacccccuggcagauccauccaccgucuuuaaagacggggaugaggccgaagacuucguggagguccaucuucccgaugugcacaagcagguuucuggaguggaccugggcuugccuagcugggguaaauacguacucaugucagcugggauacugacagccuuaaugcugaugaucuuucuaaugacuugcuguagaaggaccaaucgggcagagaguauucagcacucccucggcgaaacaggacgaaaggucagcgugacuucucagaacggccgcguuaucucaaguugggagagcuauaaguccgggggagaaaccaaacuguga

SEQ ID NO: 159222 - RNA, 1575 nt, Artificial Sequence; identical to SEQ ID NO: 158887
  derived and/or modified CDS sequence (opt3) from glycoprotein__RABV__JN936714.1

SEQ ID NO: 159223 - RNA, 1575 nt, Artificial Sequence
  derived and/or modified CDS sequence (opt3) from glycoprotein__RABV__JN936715.1
auggugccccaggcccuucucuucgucccucuucuggcuguuccauugugcuuuggcaaguucccgaucuacaccauucccgacaaauuagggccuuggagcccaauagauauccaccaucuguccugucccaacaaucuagugguagaggacgaaggaugcacaaaccucucugguuuuucauauauggagcugaaggugggcuacauuagugcaaucaaagucaauggguucacuuguacgggagugguuaccgaagccgagacauauacuaacuuugugggcuacgucaccacaaccuucaagagaaaacacuuuaggccuacuccagaugcgugccggagcgcuuauaauuggaagauggccggugacccccgcuacgaagagucccuucauaacccuuauccagauuaccacuggcugcgaacagugaagaccacgaaagagucuuucguaauuaucucgccgucaguugcagacuuggaucccuacgacaagagccuccauagucguguguuuccuagagggaaauguuccggaauaacugucucuagcaccuauugcuccacaaaucacgauuacacuaucuggaugccagaaaaccccaggcugggcaccucaugugacauuuucacaaauagucggggcaagcgcgccagcaaagggucuaagaccugcggauuuguggaugagagaggucuguauaagucccucaaaggcgcuuguaaguuaaaacugugcggggugcuuggauugaggcugauggacggcacgugggucgcaauccaaacuucagaugaaacaaagugguguccuccagaccagcuaguuaaccuccacgacuuccauagcgaugagauugagcaccuggugguagaggaacuugugaaaaagcgggaagagugccuggacgccuuggaaaguaucaugaccacuaaaucugucuccuuucgccgacucagccaucugagaaaguuagugcccgguuucgggaaggcuuacacaauauucaauaaaacccugauggaggccgaugcgcacuauaagucgguuaggacguggaacgagauuaucccgucuaaaggaugccuccgggugggcggccguugucacccucaugucaaugggguguuuuucaacggaauuauccuuggucccgacggccacguacugaucccagaaaugcaguccucauugcuacagcaacauauggagcugcucgaaaguagcguuauuccucugaugcacccccuugcagauccauccaccguguuuaaggacggggaugaggccgaagacuucgucgaggugcaucugcccgauguccacaaacaggugucuggaguugacuugggccucccuagcugggguaaguacgugcugaugucagcugggauauuaacagcccugaugcuaaugaucuuucucaugacuugcugucgcagaaccaauagggcagagaguauucagcacucccugggcgaaacaggacggaagguaagcgucacuucucagaacggccgagugaucucaaguugggagagcuauaaauccgggggagaaaccaagcuguga

SEQ ID NO: 159224 - RNA, 1575 nt, Artificial Sequence
  derived and/or modified CDS sequence (opt3) from glycoprotein__RABV__JN936716.1
augaucccccaggugcugcuccuugucccucuguugguuuucagcuccugcuuuggcaaguucccaauuuacaccauaccggacaaauuagggcccuggucuccuaucgauauucaccaucugucauguccaaacaaucuagugguagaggacgaaggaugcacaaaccucagugguuuuagcuauauggagcugaaggugggcuacaucuccgccauuaaagucaauggguucacuuguacgggagugguuaccgaagcugagacauauacuaacuuugugggcuacgucaccacaaccuucaagagaaaacacuuuaggcccaugccugaugcaugccgggccgcguauaauuggaagauggcuggugacccacgcuacgaagagucucuucauaaccccuauccugauuaccacuggcugcgaacugugaagacaaccaaagagucguugguaaucauaucaccaagcguugccgaccucgauccguacgacaagagucugcauucccguguguuccccgggggaaaauguucuggcaucacggucagcuccacuugcuguucaaccaaucacgauuauacaauuuggaugccugaaaacccaagacugggcaccaguugcgacaucuuuacuaauagcagggggaagcgggcaucuaaaggagguaagacauguggcuucguggaugagcgcgggcucuacaaguccuuaaaaggagccugcaagcugaaacuuuguggcguguugggucugagacuaauggacgggaccugggucgcuauucaaacgucagaugaaaucaaguggugcagccccgaccagcucguuaaccugcacgacuuucauagugaugagauagagcaccuugugguagaggaacuggugaaaaagagggaagagugcuuggacgcacucgaaacuauuaugacaaccaaaucugucuccuuccggcgccugagccauuuacgaaagcuggugccuggauuuggcaaggccuauacuaucuucaauaaaacacucauggaggcugaugcccacuacaagucgauuagaaccuggaacgagaucaucccaucuaaaggcugucuuaggguugggggacggugccacccccaugugaauggugucuucuuuaacggcauuauacuggggccggacggacacguguugaucccugaaaugcaguccucacuacugcaucagcacauggagcuccuggaaaguagcguaauuccccuuaugcauccacuggcggauccuuccacgguuuucaaggacggcgaugaggcagaagacuuuguggagguccacuugcccgaugugcacaaacaaaucucuggugucgaccucgggcugccaaauuggggcaaguauguguuaauaagcgccggagcucugaccgcccuaaugucaaugauuuuccucaugacauguugccguaagacuaaccgcgcagagaguauccagcauucccccggcgaaaccgggagaaaaguuagcgugacaucucacaacggaaggguaaucucaaguugggagagcuacaaguccgguggcgaaacuaaacuguga

SEQ ID NO: 159225 - RNA, 1575 nt, Artificial Sequence
  derived and/or modified CDS sequence (opt3) from glycoprotein__RABV__JN936717.1
augaucccccaggcccugcuccuugugccucuguuggucuucagcuccugcuuuggcaaguucccaauuuacaccauaccggacaaauuagggcccuggucuccuaucgauauucaccaucugucauguccaaacaaucuaguuguggaggacgaaggaugcacaaaccucagugguuuuagcuauauggagcugaagguaggcuacaucuccgcuauuaaagugaauggguucacuuguacgggagucgugaccgaagcagagacauauacuaacuuuguuggcuacgugaccacaaccuucaagagaaaacacuuuaggcccaugccugaugccugccgggcggcuuauaauuggaagauggccggugacccacgcuacgaagagucucuucauaaccccuauccugauuaccacuggcugcgaacugucaagacaaccaaagagucguuggugaucauaucaccaagcguagcagaccucgauccguacgacaagagucugcauucccguguuuuccccgggggaaaauguucuggcaucacggugagcuccacuugcuguucaaccaaucacgauuauacaauuuggaugccugaaaacccaagacugggcaccaguugcgacaucuuuacuaauagcagggggaagcgggccucuaaaggagguaagacauguggcuucgucgaugagcgcgggcucuacaaguccuuaaaaggagcuugcaagcugaaacuuuguggcguguugggucugagacuaauggacgggaccuggguggcaauucaaacgucagaugaaaucaaguggugcagccccgaccagcucgucaaccugcacgacuuucauagugaugagauagagcaccuuguuguggaggaacuggugaaaaagagggaagagugcuuggacgcccucgaaacuauuaugacaaccaaaucuguguccuuccggcgccugagccauuuacgaaagcuggucccuggauuuggcaaggcuuauacuaucuucaauaaaacacucauggaggccgaugcgcacuacaagucgauuagaaccuggaacgagaucaucccaucuaaaggcugucuuaggguagggggacggugccacccccauguuaaugguguguucuuuaacggcauuauacuggggccggacggacacgucuugaucccugaaaugcaguccucacuacugcaucagcacauggagcuccuggaaaguagcgugauuccccuuaugcauccacuggcagauccuuccacgguauucaaggacggcgaugaggccgaagacuuuguugaggugcacuugcccgauguccacaaacaaaucucugguguggaccucgggcugccaaauuggggcaaguaugucuuaauaagcgcuggagcccugaccgcacuaaugucaaugauuuuccucaugacauguugccguaagacuaaccgcgcugagaguauccagcauucccccggcgaaaccgggagaaaagugagcguuacaucucacaacggaagggugaucucaaguugggagagcuacaaguccgguggcgaaacuaaacuguga

SEQ ID NO: 159226 - RNA, 1575 nt, Artificial Sequence
  derived and/or modified CDS sequence (opt3) from glycoprotein__RABV__JN936718.1
augaucccccaggugcugcuccuugucccucuguugguuuucagcuccugcuuuggcaaguucccaauuuacaccauaccggacaaauuagggcccuggucuccuaucgauauucaccaucugucauguccaaacaaucuagugguagaggacgaaggaugcacaaaccucagugguuuuagcuauauggagcugaaggugggcuacaucuccgccauuaaagucaauggguucacuuguacgggagugguuaccgaagcugagacauauacuaacuuugugggcuacgucaccacaaccuucaagagaaaacacuuuaggcccaugccugaugcaugccgggccgcguauaauuggaagauggcuggugacccacgcuacgaagagucucuucauaaccccuauccugauuaccacuggcugcgaacugugaagacaaccaaagagucguugguaaucauaucaccaagcguugccgaccucgauccguacgacaagagucugcauucccguguguuccccgggggaaaauguucuggcaucacggucagcuccacuugcuguucaaccaaucacgauuauacaauuuggaugccugaaaacccaagacugggcaccaguugcgacaucuuuacuaauagcagggggaagcgggcaucuaaaggaggucaaacauguggcuucguggaugagcgcgggcucuacaaguccuuaaagggagccugcaaacugaaacuuuguggcguguugggucugagacuaauggacgggaccugggucgcuauucagacgucagaugaaaucaaguggugcagccccgaccagcucguuaaccugcacgacuuucauagugaugagauagagcaccuugugguagaggaacuggugaagaaaagggaagagugcuuggacgcacucgaaacuauuaugacaaccaagucugucuccuuccggcgccugagccauuuacgaaaacuggugccuggauuuggcaaggccuauacuaucuucaauaagacacucauggaggcugaugcccacuacaaaucgauuagaaccuggaacgagaucaucccaucuaagggcugucuuaggguugggggacggugccacccccaugugaauggugucuucuuuaacggcauuauacuggggccggacggacacguguugaucccugaaaugcaguccucacuacugcaucaacacauggagcuccuggaaaguagcguaauuccccuuaugcauccacuggcggauccuuccacgguuuucaaagacggcgaugaggcagaagacuuuguggagguccacuugcccgaugugcacaagcagaucucuggugucgaccucgggcugccaaauuggggcaaauauguguuaauaagcgccggagcucugaccgcccuaaugucaaugauuuuccucaugacauguugccguaagacuaaccgcgcagagaguauccagcauucccccggcgaaaccgggagaaagguuagcgugacaucucacaacggaaggguaaucucaaguugggagagcuacaaauccgguggcgaaacuaagcuguga

SEQ ID NO: 159227 - RNA, 1575 nt, Artificial Sequence
  derived and/or modified CDS sequence (opt3) from glycoprotein__RABV__JN936719.1
augaucccccaggcccugcuguucgugccucuucuggcugucccauugugcuuuggcaaguucccgauuuacaccauacccgacaaauuagggccuuggagcccaaucgauauucaccaucuguccugucccaacaaucuaguuguggaggacgaaggaugcacaaaccucucugguuuuucauauauggagcugaagguaggcuacaucagugcaauuaaagugaauggguucacuuguacgggagucgugaccgaagccgagacauauacuaacuuuguuggcuacgugaccacaaccuucaagagaaaacacuuuaggccuacuccagaugcgugccggagcgcuuauaauuggaagauggccggugacccccgcuacgaagagucccuucauaacccuuauccagauuaccacuggcugcgaacagucaagaccacgaaagagucuuucgugaucauaucgccgucaguagcagacuuggaucccuacgacaagagccuccauagucguguuuuuccuagagggaaauguuccggaaucacugugucuagcaccuauugcuccacaaaucacgauuacacuauuuggaugccagaaaaccccaggcugggcaccucaugugacaucuucacaaauagucggggcaagcgcgccagcaaagggucuaagaccugcggauuugucgaugagagaggucuguauaagucccucaaaggcgcuuguaaguuaaaacugugcggggugcuuggauugaggcugauggacggcacguggguggcaauucaaacuucagaugaaacaaagugguguccuccagaccagcuagucaaccuccacgacuuccauagcgaugagaucgagcaccugguuguggaggaacuuguaaagaagcgggaagagugccuggacgccuuggaaaguauaaugaccacuaaaucuguguccuuucgccgacucagccaucugagaaaguuaguccccgguuucgggaaggcuuacacaauuuucaauaaaacccugauggaggccgaugcgcacuauaagucgaucaggacguggaacgagauuaucccgucuaaaggaugccuccgggugggcggccguugucacccucauguuaaugggguguuuuucaacggaaucauucuuggucccgacggccacguccugauaccagaaaugcaguccucauugcuacaucagcacauggagcugcucgaaaguagcgugaucccucugaugcauccccuugcagauccauccaccguauuuaaggacggggaugaggccgaagacuucguugaggugcaccuccccgauguccacaaacaaauuucuggaguggacuugggccucccuagcugggguaaguacguccugaugucagcuggggccuuaacagcacugaugcuaaugaucuuucucaugacuugcugucgcagaaccaauagggcugagaguauacagcauucccugggcgaaacaggacggaaggugagcguuacuucucagaacggccgagugauuucaaguugggagagcuauaaauccgggggagaaaccaaacuuuga

SEQ ID NO: 159228 - RNA, 1575 nt, Artificial Sequence
  derived and/or modified CDS sequence (opt3) from glycoprotein__RABV__JN936720.1
augaucccccaggcccuccuguucgugccucuucuggucuuuccauugugcuucggcaaguuuccgauuuacaccauacccgacaaauuagggccuuggagcccaaucgauauucaccaucuguccugucccaacaaucuaguuguggaggacgaaggaugcacaaaccucucugguuucucauauauggagcugaagguaggcuacaucagugcuauuaaagugaauggguuuacuuguacgggagucgugaccgaagcagagacauauacuaacuucguuggcuacgugaccacaaccuuuaagagaaaacacuucaggccuacuccagaugccugccggagcgcguauaauuggaagauggcuggugacccccgcuacgaagagucccuucauaacccuuauccagauuaccacuggcugcgaacagucaagaccacgaaagagucugugguaaucauaucgccgucaguugccgacuuggaucccuacgacaagagccuccauagucguguguuuccuagagggaaauguuccggaaucacugucucuagcgcauauugcuccaccaaucacgauuacacaauuuggaugccagaaaaccccaggcugggcacuucaugugacaucuucaccaauagucggggcaagcgcgccagcaaagggucuaagacaugcggauuuguggaugagagaggucuguauaagucccucaaaggcgcuuguaaguuaaaacugugcggggugcuuggauugaggcugauggacggcaccugggucgcaauucaaacgucaaacgaaacuaagugguguccuccagaucagcuaguuaaucuccacgacuuccauagcgacgagaucgagcaccuggugguagaggaacuuguggaaaaacgggaggaaugccuggaugccuuggagaguauaaugacaaccaagucugucuccuuucgccgacucagccaucugagaaaauuagugcccgguuucgggaaggcuuacacuauuuucaacaagacacugauggaggccgacgcgcacuauaaaucgguuaggaccuggaaugaaaucauuccgucuaagggaugccuccgggugggcggccguugucacccucaugucaacgggguguuuuucaauggaaucauccuuggucccgauggccacguacugauuccagagaugcaguccucauugcuacagcaacauauggaacugcucgagaguagcguuauaccucugaugcacccccuugcagacccauccacgguguuuaaagauggggacgaagccgaggauuucgucgaggugcaucugcccgacguccacaaacaggugucuggaguugauuugggccucccuagcugggguaaguacgugcugaugucagcugggaucuuaaccgcccugaugcuaaugauuuuucucaugacaugcugucgcagaacuaacagggcagaaaguauccagcacucccugggcgagaccggacggaagguaagcgucacaucucagaacggccgagugauaucaaguugggaaagcuauaaguccgggggagagacuaaacuuuga

SEQ ID NO: 159229 - RNA, 1575 nt, Artificial Sequence
  derived and/or modified CDS sequence (opt3) from glycoprotein__RABV__JN936721.1
augaucccccaggcccugcuguucgugccucuucuggucuuuccauugugcuucggcaaguuuccgauuuacaccauacccgacaaauuagggccuuggagcccaaucgauauucaccaucuguccugucccaacaaucuaguuguggaggacgaaggaugcacaaaccucucugguuucucauauauggagcugaagguaggcuacaucagugcuauuaaagugaauggguuuacuuguacgggagucgugaccgaagcagagacauauacuaacuucguuggcuacgugaccacaaccuuuaagagaaaacacuucaggccuacuccagaugccugccggagcgcguauaauuggaagauggcuggugacccccgcuacgaagagucccuucauaacccuuauccagauuaccacuggcugcgaacagucaagaccacgaaagagucugugguaaucauaucgccgucaguugccgacuuggaucccuacgacaagagccuccauagucguguguuuccuagagggaaauguuccggaaucacugucucuagcgcauauugcuccaccaaucacgauuacacaauuuggaugccagaaaaccccaggcugggcacuucaugugacaucuucaccaauagucggggcaagcgcgccagcaaagggucuaagacaugcggauuuguggaugagagaggucuguauaagucccucaaaggcgcuuguaaguuaaaacugugcggggugcuuggauugaggcugauggacggcaccugggucgcaauucaaacgucaaacgaaacuaagugguguccuccagaucagcuaguuaaucuccacgacuuccauagcgacgagaucgagcaccuggugguagaggaacuuguggaaaaacgggaggaaugccuggaugccuuggagacaauaaugaccacuaagagugucucuuuucgccgacucucccaucugagaaaauuagugcccgguuucgggaaggcuuacacaauuuucaacaagacccugauggaggccgacgcgcacuauaaaagcaucaggacguggaaugaaauuaucccgucgaagggaugccuccggguuggcggccguugucacccucaugugaacggggucuuuuucaauggaaucauucuuggucccgauggccacgugcugauaccagagaugcagucuuccuugcuacaucagcacauggaacugcucgagucaaguguaaucccucugaugcauccccuugcagacccaagcaccguuuuuaaagauggggacgaagccgaggauuucguggagguccaccuccccgacgugcacaagcaaauuuccggagucgauuugggccucccuaacugggguaaauacgugcugaucucugcuggggccuuaacagcacugaugagcaugauauuucuaaugacuugcugucgcaagaccaacagagcugaaucaauucagcauaguccaggcgagacaggaaggaagguuuccgugacuagccacaauggccggguaaucucuucaugggaaaguuauaaaagcgggggagagaccaagcucuga

SEQ ID NO: 159230 - RNA, 1575 nt, Artificial Sequence
  derived and/or modified CDS sequence (opt3) from glycoprotein__RABV__JN936722.1
augaucccccaggcccugcuguucgugccucuucuggucuuuccauugugcuucggcaaguuuccgauuuacaccauacccgacaaauuagggccuuggagcccaaucgauauucaccaucuguccugucccaacaaucuaguuguggaggacgaaggaugcacaaaccucucugguuucucauauauggagcugaagguaggcuacaucagugcuauuaaagugaauggguuuacuuguacgggagucgugaccgaagcagagacauauacuaacuucguuggcuacgugaccacaaccuuuaagagaaaacacuucaggccuacuccagaugccugccggagcgcguauaauuggaagauggcuggugacccccgcuacgaagagucccuucauaacccuuauccagauuaccacuggcugcgaacagucaagaccacgaaagagucugugguaaucauaucgccgucaguugccgacuuggaucccuacgacaagagccuccauagucguguguuuccuagagggaaauguuccggaaucacugucucuagcgcauauugcuccaccaaucacgauuacacaauuuggaugccagaaaaccccaggcugggcacuucaugugacaucuucaccaauagucggggcaagcgcgccagcaaagggucuaagacaugcggauuuguggaugagagaggucuguauaagucccucaaaggcgcuuguaaguuaaaacugugcggggugcuuggauugaggcugauggacggcaccugggucgcaauucaaacgucaaacgaaacuaagugguguccuccagaucagcuaguuaaucuccacgacuuccauagcgacgagaucgagcaccuggugguagaggaacuuguggaaaaacgggaggaaugccuggaugccuuggagaguauaaugacaaccaagucugucuccuuucgccgacucagccaucugagaaaauuagugcccgguuucgggaaggcuuacacuauuuucaacaagacacugauggaggccgacgcgcacuauaaaucgaucaggaccuggaaugaaauuaucccgucuaagggaugccuccggguuggcggccguugucacccucaugugaacggggucuuuuucaauggaaucauucuuggucccgauggccacgugcugauaccagagaugcaguccucauugcuacaucagcacauggaacugcucgagaguagcguaaucccucugaugcauccccuugcagacccauccacgguuuuuaaagauggggacgaagccgaggauuucguggagguccaccuccccgacgugcacaagcaaauuucuggagucgauuugggccucccuaacugggguaaauacgugcugaucagcgcuggggccuuaaccgcacugaugucaaugauauuucuaaugacaugcugucgcaagacuaacagagcugaaaguauucagcauuccccaggcgagaccggaaggaagguuagcgugacaucucacaauggccggguaaucucaaguugggaaagcuauaaauccgggggagagacuaagcucuga

SEQ ID NO: 159231 - RNA, 1575 nt, Artificial Sequence
  derived and/or modified CDS sequence (opt3) from glycoprotein__RABV__JN936723.1
augaucccccaggcccugcuccuugugccucuguuggcuuucccauuaugcuuuggcaaguucccgauuuacaccauacccgacaaacuggggccuuggagcccaaucgauauucaccaucuauccugucccaacaaucucgucguugaggacgaaggaugcacaaaccugucugguuuuucauauauggagcuuaaggugggcuacaucagugcaauuaaaguaaauggguucacuuguacgggaguggucaccgaagccgagacauauacuaacuuugugggcuacguuaccacaaccuucaagagaaaacacuuuaggccuacuccagaugcgugccggagcgcuuauaauuggaagauggccggugacccccgcuacgaagagucccugcauaacccuuauccagauuaccacugguugcgaacagugaagaccacgaaagagucucucgucaucauaucgccgucaguggcagaccuggaucccuacgacaagagccugcauagucguguauucccuagagggaaauguuccggaaucacuguuucuagcacaugcuguuccaccaaucacgauuauacuauuuggaugccagaaaaccccaggcucggcaccucaugcgacaucuuuacaaauagucggggcaagcgcgccagcaaagggucuaagaccuguggauucguggaugagagagguuuauacaagucccugaaaggcgcuugcaaacuuaaguugugugggguccugggacuaaggcucauggacggcacguggguggcaauucaaacuucagaugaaaucaaguggugcccuccagaccagcuggugaaccuucacgacuuucauagcgaugagauagagcaccuggucguugaagaguuggugaaaaagcgggaagagugccucgacgcccuggaaacaauuaugaccacuaaaaguguaucuuuccgccgauuaucccaucugagaaagcucgugcccgguuuugggaaggcuuauacaaucuucaauaaaacccuuauggaggccgaugcgcacuacaagagcauuaggacguggaacgagaucaucccgucgaaaggaugucugcgggucggcggccguugccacccucaugugaaugggguuuucuuuaacggaauuauauugggucccgacggccacgugcuaaucccagaaaugcagucuucccugcuccaucagcacauggagcugcuugaaucaagugucauuccucugaugcaucccuuggcagauccaagcaccguguucaaggacggggaugaggccgaagacuuuguagagguucaccuccccgaugugcacaaacaaaucuccggagucgaccugggcuuaccuaauugggguaaguaugugcugauaucugcuggggcccuaacagcacucaugagcaugauuuuccugaugacuuguugccgcaagaccaacagagcugagucaauccagcauaguccaggcgaaacaggaaggaaagucuccgugacuagccacaacggccggguuaucucuucaugggagaguuacaagagcgggggagaaaccaaacuuuga

SEQ ID NO: 159232 - RNA, 1575 nt, Artificial Sequence
  derived and/or modified CDS sequence (opt3) from glycoprotein__RABV__JN936724.1
augaucccccaggcccugcuguucgugccucuucuggucuuuccauugugcuucggcaaguuuccgauuuacaccauacccgacaaauuagggccuuggagcccaaucgauauucaccaucuguccugucccaacaaucuaguuguggaggacgaaggaugcacaaaccucucugguuucucauauauggagcugaagguaggcuacaucagugcuauuaaagugaauggguuuacuuguacgggagucgugaccgaagcagagacauauacuaacuucguuggcuacgugaccacaaccuuuaagagaaaacacuucaggccuacuccagaugccugccggagcgcguauaauuggaagauggcuggugacccccgcuacgaagagucccuucauaacccuuauccagauuaccacuggcugcgaacagucaagaccacgaaagagucugugguaaucauaucgccgucaguugccgacuuggaucccuacgacaagagccuccauagucguguguuuccuagagggaaauguuccggaaucacugucucuagcgcauauugcuccaccaaucacgauuacacaauuuggaugccagaaaaccccaggcugggcacuucaugugacaucuucaccaauagucggggcaagcgcgccagcaaagggucuaagacaugcggauuuguggaugagagaggucuguauaagucccucaaaggcgcuuguaaguuaaaacugugcggggugcuuggauugaggcugauggacggcaccugggucgcaauucaaacgucaaacgaaacuaagugguguccuccagaucagcuaguuaaucuccacgacuuccauagcgacgagaucgagcaccuggugguagaggaacuuguggaaaaacgggaggaaugccuggaugccuuggagacaauaaugaccacuaagagugucucuuuucgccgacucucccaucugagaaaauuagugcccgguuucgggaaggcuuacacaauuuucaacaagacccugauggaggccgacgcgcacuauaaaagcaucaggacguggaaugaaauuaucccgucgaagggaugccuccggguuggcggccguugucacccucaugugaacggggucuuuuucaauggaaucauucuuggucccgauggccacgugcugauaccagagaugcagucuuccuugcuacaucagcacauggaacugcucgagucaaguguaaucccucugaugcauccccuugcagacccaagcaccguuuuuaaagauggggacgaagccgaggauuucguggagguccaccuccccgacgugcacaagcaaauuuccggagucgauuugggccucccuaacugggguaaauacgugcugaucucugcuggggccuuaacagcacugaugcuaacuauauuucucaugaccugcugucgcaagacaagcagagcugaaucaauucagcauaguccaggcgagacuggaaggaagguuuccgugaccagccacaacggccggguaaucucuucaugggaaaguuauaaaagcgggggagagacaaagcuguga

SEQ ID NO: 159233 - RNA, 1575 nt, Artificial Sequence; identical to SEQ ID NO: 158894
  derived and/or modified CDS sequence (opt3) from glycoprotein__RABV__JN936725.1

SEQ ID NO: 159234 - RNA, 1575 nt, Artificial Sequence; identical to SEQ ID NO: 159115
  derived and/or modified CDS sequence (opt3) from glycoprotein__RABV__JN936726.1

SEQ ID NO: 159235 - RNA, 1575 nt, Artificial Sequence; identical to SEQ ID NO: 158894
  derived and/or modified CDS sequence (opt3) from glycoprotein__RABV__JN936727.1

SEQ ID NO: 159236 - RNA, 1575 nt, Artificial Sequence; identical to SEQ ID NO: 158894
  derived and/or modified CDS sequence (opt3) from glycoprotein__RABV__JN936728.1

SEQ ID NO: 159237 - RNA, 1575 nt, Artificial Sequence; identical to SEQ ID NO: 158894
  derived and/or modified CDS sequence (opt3) from glycoprotein__RABV__JN936729.1

SEQ ID NO: 159238 - RNA, 1575 nt, Artificial Sequence; identical to SEQ ID NO: 158893
  derived and/or modified CDS sequence (opt3) from glycoprotein__RABV__JN936731.1

SEQ ID NO: 159239 - RNA, 1575 nt, Artificial Sequence; identical to SEQ ID NO: 158893
  derived and/or modified CDS sequence (opt3) from glycoprotein__RABV__JN936732.1

SEQ ID NO: 159240 - RNA, 1575 nt, Artificial Sequence
  derived and/or modified CDS sequence (opt3) from glycoprotein__RABV__JN936733.1
augaucccccaggugcugcuguucgucccucuucugguuuuuagcuccugcuucggcaaguuuccaauuuacaccauaccggacaaauuggggcccuggucuccuaucgauauucaccauuuaucauguccaaacaaucuggugguagaggacgaaggaugcacaaaccuaagugguuucagcuauauggagcucaaggugggcuacaucuccgccauuaaagucaauggguuuacuuguacgggagugguuaccgaagcugagacauauacuaacuucgugggcuacgucaccacaaccuuuaagagaaaacacuucaggcccaugccugaugcaugccgggccgcguauaauuggaagauggcuggugacccacgcuacgaagagucucugcauaaccccuauccugauuaccacuggcuucgaacugugaagacaaccaaagagucgcugguaaucauaucaccaagcguugccgacuuggauccguacgacaagagucuccauucccguguguuucccgggggaaaauguucuggcaucacggucagcuccacuugcuguucaaccaaucacgauuauacaauuuggaugccugaaaacccaagacugggcaccaguugcgacaucuucacuaauagcagggggaagcgggcaucuaaaggagguaagacauguggcuuuguggaugagcgcgggcuguacaagucccucaaaggagccugcaaguuaaaacuguguggcgugcuugguuugagacugauggacgggaccugggucgcuauucaaacgucagaugaaaucaaguggugcagccccgaccagcuaguuaaccuccacgacuuccauagugaugagauagagcaccuggugguagaggaacuugugaaaaagagggaagagugccuggacgcauuggaaacuauuaugacaaccaaaucugucuccuuucggcgccucagccaucugcgaaaguuagugccuggauucggcaaggccuauacuaucuucaauaaaacacugauggaggcugaugcccacuacaagucgauuagaaccuggaacgagaucaucccaucuaaaggcugucucaggguugggggacggugccacccccaugugaauggugucuuuuucaacggcauuauacuugggccggacggacacgugcugaucccugaaaugcaguccucauugcuacaucagcacauggagcugcucgaaaguagcguaauuccccugaugcauccacuugcggauccuuccacgguuuuuaaggacggcgaugaggcagaagacuucguggagguccaccuccccgaugugcacaaacaaaucucuggugucgacuuggggcucccaaauuggggcaaguaugugcugauaagcgccggagcuuuaaccgcccugaugcuaacaauuuuucucaugacuuguugccguaagaccaaccgcgcagagucaauccaucacagucccggcgaaacagggagaaaaguuuccgugacuagccauaacggaaggguaaucucuucaugggagaguuacaagagcgguuccgaaaccaaacuguga

SEQ ID NO: 159241 - RNA, 1575 nt, Artificial Sequence; identical to SEQ ID NO: 159240
  derived and/or modified CDS sequence (opt3) from glycoprotein__RABV__JN936734.1

SEQ ID NO: 159242 - RNA, 1575 nt, Artificial Sequence; identical to SEQ ID NO: 158894
  derived and/or modified CDS sequence (opt3) from glycoprotein__RABV__JN936735.1

SEQ ID NO: 159243 - RNA, 1575 nt, Artificial Sequence; identical to SEQ ID NO: 158894
  derived and/or modified CDS sequence (opt3) from glycoprotein__RABV__JN936736.1

SEQ ID NO: 159244 - RNA, 1575 nt, Artificial Sequence
  derived and/or modified CDS sequence (opt3) from glycoprotein__RABV__JN936737.1
augaucccccaggugcuccuguucgucccucuucugguuuuuagcuccugcuucggcaaguuuccaauuuacaccauaccggacaaauuggggcccuggucuccuaucgauauucaccauuuaucauguccaaacaaucuggugguagaggacgaaggaugcacaaaccuaagugguuucagcuauauggagcucaaggugggcuacaucuccgccauuaaagucaauggguuuacuuguacgggagugguuaccgaagcugagacauauacuaacuucgugggcuacgucaccacaaccuuuaagagaaaacacuucaggcccaugccugaugcaugccgggccgcguauaauuggaagauggcuggugacccacgcuacgaagagucucugcauaaccccuauccugauuaccacuggcuucgaacugugaagacaaccaaagagucgcugguaaucauaucaccaagcguugccgacuuggauccguacgacaagagucuccauucccguguguuucccgggggaaaauguucuggcaucacggucagcuccacuugcuguucaaccaaucacgauuauacaauuuggaugccugaaaacccaagacugggcaccaguugcgacaucuucacuaauagcagggggaagcgggcaucuaaaggagguaagacauguggcuuuguggaugagcgcgggcuguacaagucccucaaaggagccugcaaguuaaaacuguguggcgugcuugguuugagacugauggacgggaccugggucgcucuacaaacgucagaugaaauuaaguggugcagccccgaccagcucguuaaccugcacgacuuccauagugaugagaucgagcaccuugugguagaggaacuggugaaaaagagggaagagugcuuggacgcacucgaaacuauaaugacaaccaaaucugucuccuuucggcgccugagccauuuacgaaagcuggugccuggauucggcaaggccuauacuauuuucaauaaaacacucauggaggcugaugcccacuacaagucgaucagaaccuggaacgagauuaucccaucuaaaggcugucuuaggguugggggacggugccacccccaugugaauggugucuuuuucaacggcaucauucuggggccggacggacacguguugauaccugaaaugcaguccucacuacugcaucagcacauggagcuccuggaaaguagcguaaucccccuuaugcauccacuggcggauccuuccacgguuuuuaaggacggcgaugaggcagaagacuucguggagguccacuugcccgaugugcacaaacaaauuucuggugucgaccucgggcugccaaauuggggcaaguauguguuaaucagcgccggagcucugaccgcccuaaugcucacaauauuucugaugacuuguugccguaagaccaaccgcgcaggcucaauucagcauagucccggggagacaggaagaaaaguuuccgugacuagccacaacgguaggguaaucucuucaugggaaaguuacaagagcggcuccgagaccaaacuuuga

SEQ ID NO: 159245 - RNA, 1575 nt, Artificial Sequence; identical to SEQ ID NO: 158893
  derived and/or modified CDS sequence (opt3) from glycoprotein__RABV__JN936738.1

SEQ ID NO: 159246 - RNA, 1575 nt, Artificial Sequence; identical to SEQ ID NO: 158893
  derived and/or modified CDS sequence (opt3) from glycoprotein__RABV__JN936739.1

SEQ ID NO: 159247 - RNA, 1575 nt, Artificial Sequence; identical to SEQ ID NO: 158893
  derived and/or modified CDS sequence (opt3) from glycoprotein__RABV__JN936740.1

SEQ ID NO: 159248 - RNA, 1575 nt, Artificial Sequence; identical to SEQ ID NO: 158893
  derived and/or modified CDS sequence (opt3) from glycoprotein__RABV__JN936741.1

SEQ ID NO: 159249 - RNA, 1575 nt, Artificial Sequence; identical to SEQ ID NO: 158893
  derived and/or modified CDS sequence (opt3) from glycoprotein__RABV__JN936742.1

SEQ ID NO: 159250 - RNA, 1575 nt, Artificial Sequence; identical to SEQ ID NO: 158893
  derived and/or modified CDS sequence (opt3) from glycoprotein__RABV__JN936743.1

SEQ ID NO: 159251 - RNA, 1575 nt, Artificial Sequence
  derived and/or modified CDS sequence (opt3) from glycoprotein__RABV__JN936744.1
augauccuccaggugcugcuuuucgucccccuguugguuuuuagcuccugcuucggcaaguuuccuauuuacaccauaccagacaaauuagggccguggucucccaucgauauucaccaucugucauguccuaacaaucuagugguagaggacgaaggaugcacaaaccucagugguuucagcuauauggagcugaaggugggcuacaucuccgccauuaaagucaauggguuuacuuguacgggagugguuaccgaagcugagacauauacuaacuucgugggcuacgucaccacaaccuuuaagagaaaacacuucaggccaaugcccgaugcaugccgggccgcguauaauuggaagauggcuggugacccucgcuacgaagagucucuucauaacccauaucccgauuaccacuggcugcgaacugugaagacaaccaaagagucguugguaaucauaucaccuagcguugccgaccucgauccauacgacaagagucugcauucccguguguuucccgggggaaaauguucuggcaucacggucagcuccacuugcuguucaaccaaucacgauuauacaauuuggaugccggaaaacccuagacugggcaccaguugcgacaucuucacuaauagcagggggaagcgggcaucuaaaggagguaagacauguggcuuuguggaugagcgcgggcucuacaaguccuuaaaaggagccugcaagcugaaacuuuguggcguguugggucugagacuaauggacgggaccugggucgcuauucaaacgucagaugaaaucaaguggugcccacccgaccagcucguuaaccugcacgacuuccauagcgaugagauagagcaccuugugguagaggaacuggugaaaaagagggaagagugcuuggacgcacucgaaacuauuaugacaaccaaaagugucucuuuucggcgccugucccauuuacgaaagcuggugccuggauucggcaaggccuauacuaucuucaauaaaacacucauggaggcugaugcccacuacaagagcauuagaaccuggaacgagaucaucccaucgaaaggcugucuuaggguugggggacggugccacccccaugugaauggugucuuuuucaacggcauuauacuggggccggacggacacguguugaucccugaaaugcagucuucccuacugcaucagcacauggagcuccuggaaucaaguguaauuccccuuaugcauccacuggcggauccuagcacgguuuuuaaggacggcgaugaggcagaagacuucguggagguccacuugcccgaugugcacaaacaaaucuccggugucgaccucgggcugccaaauuggggcaaguauguguuaauaucugccggagcucugaccgcccuaaugcucaugauuuuucugaugacauguugccguaagaacaaccgcgcagagagcauccagcauucacccggcgaaacugggagaaaaguuagugugaccucccacaauggaaggguaaucagcucuugggagucauacaagagugguggcgaaacaaaacuuuga

SEQ ID NO: 159252 - RNA, 1575 nt, Artificial Sequence; identical to SEQ ID NO: 159132
  derived and/or modified CDS sequence (opt3) from glycoprotein__RABV__JN936745.1

SEQ ID NO: 159253 - RNA, 1575 nt, Artificial Sequence
  derived and/or modified CDS sequence (opt3) from glycoprotein__RABV__JN936746.1
augaucccccaggugcugcuguucgucccucuucugguuuuuagcuccugcuucggcaaguuuccaauuuacaccauaccggacaaauuggggcccuggucuccuaucgauauucaccauuuaucauguccaaacaaucuggugguagaggacgaaggaugcacaaaccuaagugguuucagcuauauggagcucaaggugggcuacaucuccgccauuaaagucaauggguuuacuuguacgggagugguuaccgaagcugagacauauacuaacuucgugggcuacgucaccacaaccuuuaagagaaaacacuucaggcccaugccugaugcaugccgggccgcguauaauuggaagauggcuggugacccacgcuacgaagagucucugcauaaccccuauccugauuaccacuggcuucgaacugugaagacaaccaaagagucgcugguaaucauaucaccaagcguugccgacuuggauccguacgacaagagucuccauucccguguguuucccgggggaaaauguucuggcaucacggucagcuccacuugcuguucaaccaaucacgauuauacaauuuggaugccugaaaacccaagacugggcaccaguugcgacaucuucacuaauagcagggggaagcgggcaucuaaaggagguaagacauguggcuuuguggaugagcgcgggcuguacaagucccucaaaggagccugcaaguuaaaacuguguggcgugcuugguuugagacugauggacgggaccugggucgcuauucaaacgucagaugaaaucaaguggugcagccccgaccagcuaguuaaccuccacgacuuccauagugaugagauagagcaccuggugguagaggaacuugugaaaaagagggaagagugccuggacgcauuggaaacuauuaugacaaccaaaucugucuccuuucggcgccucagccaucugcgaaaguuagugccuggauucggcaaggccuauacuaucuucaauaaaacacugauggaggcugaugcccacuacaagucgauuagaaccuggaacgagaucaucccaucuaaaggcugucucaggguugggggacggugccacccccaugugaauggugucuuuuucaacggcauuauacuugggccggacggacacgugcugaucccugaaaugcaguccucauugcuacaucagcacauggagcugcucgaaaguagcguaauuccccugaugcauccacuugcggauccuuccacgguuuuuaaggacggcgaugaggcagaagacuucguggagguccaccuccccgaugugcacaaacaaaucucuggugucgacuuggggcucccaaauuggggcaaguaugugcugauaagcgccggagcuuuaaccgcccugaugcuaaugauuuuucucaugacauguugccguaacacuaaccgcgcagagucaauccagcauagucccggcgaaaccgggagaaagguuuccgugacaagccacaauggaaggguaaucucuucaugggagaguuacaaaagcgguggcgaaacuaagcuguga

SEQ ID NO: 159254 - RNA, 1575 nt, Artificial Sequence
  derived and/or modified CDS sequence (opt3) from glycoprotein__RABV__JN936747.1
augauccuccaggugcugcuuuucgucccccuguugguuuuuagcuccugcuucggcaaguuuccuauuuacaccauaccagacaaauuagggccguggucucccaucgauauucaccaucugucauguccuaacaaucuagugguagaggacgaaggaugcacaaaccucagugguuucagcuauauggagcugaaggugggcuacaucuccgccauuaaagucaauggguuuacuuguacgggagugguuaccgaagcugagacauauacuaacuucgugggcuacgucaccacaaccuuuaagagaaaacacuucaggccaaugcccgaugcaugccgggccgcguauaauuggaagauggcuggugacccucgcuacgaagagucucuucauaacccauaucccgauuaccacuggcugcgaacugugaagacaaccaaagagucguugguaaucauaucaccuagcguugccgaccucgauccauacgacaagagucugcauucccguguguuucccgggggaaaauguucuggcaucacggucagcuccacuugcuguucaaccaaucacgauuauacaauuuggaugccggaaaacccuagacugggcaccaguugcgacaucuucacuaauagcagggggaagcgggcaucuaaaggagguaagacauguggcuuuguggaugagcgcgggcucuacaaguccuuaaaaggagccugcaagcugaaacuuuguggcguguugggucugagacuaauggacgggaccugggucgcuauucaaacgucagaugaaaucaaguggugcccacccgaccagcucguuaaccugcacgacuuccauagcgaugagauagagcaccuugugguagaggaacuggugaaaaagagggaagagugcuuggacgcacucgaaacuauuaugacaaccaaaagugucucuuuucggcgccugucccauuuacgaaagcuggugccuggauucggcaaggccuauacuaucuucaauaaaacacucauggaggcugaugcccacuacaagagcauuagaaccuggaacgagaucaucccaucgaaaggcugucuuaggguugggggacggugccacccccaugugaauggugucuuuuucaacggcauuauacuggggccggacggacacguguugaucccugaaaugcagucuucccuacugcaucagcacauggagcuccuggaaucaaguguaauuccccuuaugcauccacuggcggauccuagcacgguuuuuaaggacggcgaugaggcagaagacuucguggagguccacuugcccgaugugcacaaacaaaucuccggugucgaccucgggcugccaaauuggggcaaguauguguuaauaucugccggagcucugaccgcccuaaugcucaugauuuuucugaugacauguugccguaagaacaaccgcgcagagagcauccagcauucacccggcgaaacugggagaaaaguuagugugaccucccacaauggaaggguaacaagcucuugggagucauacaagagugguggcgaaacuaaacuuuga

SEQ ID NO: 159255 - RNA, 1575 nt, Artificial Sequence; identical to SEQ ID NO: 159132
  derived and/or modified CDS sequence (opt3) from glycoprotein__RABV__JN936748.1

SEQ ID NO: 159256 - RNA, 1575 nt, Artificial Sequence; identical to SEQ ID NO: 159132
  derived and/or modified CDS sequence (opt3) from glycoprotein__RABV__JN936749.1

SEQ ID NO: 159257 - RNA, 1575 nt, Artificial Sequence; identical to SEQ ID NO: 159132
  derived and/or modified CDS sequence (opt3) from glycoprotein__RABV__JN936750.1

SEQ ID NO: 159258 - RNA, 1575 nt, Artificial Sequence; identical to SEQ ID NO: 159132
  derived and/or modified CDS sequence (opt3) from glycoprotein__RABV__JN936751.1

SEQ ID NO: 159259 - RNA, 1575 nt, Artificial Sequence
  derived and/or modified CDS sequence (opt3) from glycoprotein__RABV__JN936753.1
augaucccccaggugcugcuguucgucccucuucugguuuuuagcuccugcuucggcaaguuuccaauuuacaccauaccggacaaauuggggcccuggucuccuaucgauauucaccauuuaucauguccaaacaaucuggugguagaggacgaaggaugcacaaaccuaagugguuucagcuauauggagcucaaggugggcuacaucuccgccauuaaagucaauggguuuacuuguacgggagugguuaccgaagcugagacauauacuaacuucgugggcuacgucaccacaaccuuuaagagaaaacacuucaggcccacuccugaugcaugccgggccgcguauaauuggaagauggcuggugacccacgcuacgaagagucucugaacaaucccuauccugauuaccauuggcuucgaacagugaagaccucgaaagagucacugguaaucauaagcccaaguguugccgacuuggauccguacgacaagucccuccacucucguguguuucccgggggaaaauguagcggcaucacggucuccucaacuugcuguaguaccaaccaugauuauacaauuuggaugccugaaaauccaagacugggcacuagcugcgacaucuucaccaacucuagggggaagcgggcauccaaaggagguaagacauguggcuuuguggaugagcgcgggcuguacaagucacucaaaggagccugcaaguuaaaacuguguggcgugcuugguuugagacugauggacgggaccugggucgcuauucaaacgagcgaugaaaucaaguggugcagucccgaccagcuaguuaaucuccacgacuuccacucugaugagauagagcaucuggugguagaggaacuugugaaaaagagggaagagugccuggacgcauuggaaacuauuaugacaaccaaauccgucagcuuucggcgccucucgcaccuccgaaaguuagugccuggauucggcaaggccuauacuaucuucaacaaaacacugauggaggcugaugcccauuacaagucuauuagaaccuggaaugagaucaucccauccaaaggcugucucaggguugggggacggugccacccccacgugaacggugucuuuuucaauggcauuauacuugggccggacggacaugugcugaucccugaaaugcagucaaguuugcuacaccagcauauggagcugcucgaaagcuccguaauuccccugaugcacccacuugcggauccuucuacgguuuuuaaggacggcgaugaggcagaagacuucguggagguccaucugcccgaugugcacaaacaaaucagcggugucgacuuggggcucccaaacuggggcaaguaugugcugguuucagccggagcuuuaaccgcccugaugcuaaugauauuucucaugacauguugccguaagacuaaccgcgcagagaguauucagcacucccccggcgaaaccgggagaaaagugagcguaacaucucauaauggaagggucaucucaaguugggagagcuacaaguccgguggcgaaacuaaacuguga

SEQ ID NO: 159260 - RNA, 1575 nt, Artificial Sequence; identical to SEQ ID NO: 158875
  derived and/or modified CDS sequence (opt3) from glycoprotein__RABV__JN936754.1

SEQ ID NO: 159261 - RNA, 1575 nt, Artificial Sequence
  derived and/or modified CDS sequence (opt3) from glycoprotein__RABV__JN936755.1
augaucccccaggugcugcuguucgucccucuucugguuagcuccucuugcuuuggcaaguucccaauuuacaccauaccggacaaauuggggcccuggucaccuaucgauauucaccauuuaaguuguccaaacaaucuggugguagaggacgaaggaugcacaaaccuaagcgguuuuuccuauauggagcucaaggugggcuacaucucugccauuaaagucaauggguucacuuguacgggagugguuaccgaagcugagacauauacuaacuuugugggcuacgucaccacaaccuucaagagaaaacacuuuaggcccacuccugaugcaugccgggccgcguauaauuggaagauggcuggugacccacgcuacgaagagucgcugcauaaccccuauccugauuaccacuggcuucgaacagugaagaccucaaaagagagccugguaaucauaaguccauccguugccgacuuggauccguacgacaagucucuccauagccguguguuccccgggggaaaauguuccggcaucacggucucaaguacuugcuguagcaccaaucacgauuauacaauuuggaugccugaaaacccaagacugggcacuucuugcgacaucuuuaccaauuccagggggaagcgggcaucaaaaggagguaagacauguggcuucguggaugagcgcgggcuguacaagagccucaaaggagccugcaaguuaaaacuguguggcgugcuugguuugagacugauggacgggaccugggucgcuauucaaacgagugaugaaaucaaguggugcucucccgaccagcuaguuaaccuccacgacuuucauuccgaugagauagagcaccuggugguagaggaacuugugaaaaagagggaagagugccuggacgcauuggaaacuauuaugacaaccaaaagcgucucguuccggcgccucucucaucugcgaaaguuagugccuggauuuggcaaggccuauacuaucuucaauaaaacacugauggaggcugaugcccacuacaaguccauuagaaccuggaacgagaucaucccaucaaaaggcugucucaggguugggggacggugccacccccaugugaauggugucuucuuuaacggcauuauacuugggccggacggacacgugcugaucccugaaaugcagaguagcuugcuacaucagcacauggagcugcucgaauccucuguaauuccccugaugcauccacuugcggauccuagcacgguuuucaaggacggcgaugaggcagaagacuuuguggagguccaccuccccgaugugcacaaacaaaucucaggugucgacuuggggcucccaaauuggggcaaguaugugcugguuagugccggagcuuuaaccgcccugaugcuaaugauauuccucaugacauguugccguaagacuaaccgcgcagaguccauucagcauagccccggcgaaaccgggagaaaagugucuguaacaucacacaacggaagggucaucaguagcugggaguccuacaagucugguggcgaaacuaaacuguga

SEQ ID NO: 159262 - RNA, 1575 nt, Artificial Sequence; identical to SEQ ID NO: 159132
  derived and/or modified CDS sequence (opt3) from glycoprotein__RABV__JN936756.1

SEQ ID NO: 159263 - RNA, 1575 nt, Artificial Sequence
  derived and/or modified CDS sequence (opt3) from glycoprotein__RABV__JN936757.1
augaucccccaggugcugcuguucgucccucuucugguuuuuagcuccugcuucggcaaguuuccaauuuacaccauaccggacaaauuggggcccuggucuccuaucgauauucaccauuuaucauguccaaacaaucuggugguagaggacgaaggaugcacaaaccuaagugguuucagcuauauggagcucaaggugggcuacaucuccgccauuaaagucaauggguuuacuuguacgggagugguuaccgaagcugagacauauacuaacuucgugggcuacgucaccacaaccuuuaagagaaaacacuucaggcccacuccugaugcaugccgggccgcguauaauuggaagauggcuggugacccacgcuacgaagagucucugcauaaccccuauccugauuaccacuggcuucgaacagugaagaccucgaaagagucacugguaaucauaagcccaaguguugccgacuuggauccguacgacaagucccuccauucucguguguuucccgggggaaaauguagcggcaucacggucuccucaacuugcuguaguaccaaucacgauuauacaauuuggaugccugaaaacccaagacugggcacuagcugcgacaucuucaccaauucuagggggaagcgggcauccaaaggagguaagacauguggcuuuguggaugagcgcgggcuguacaagucacucaaaggagccugcaaguuaaaacuguguggcgugcuugguuugagacugauggacgggaccugggucgcuauucaaacgagcgaugaaaucaaguggugcagucccgaccagcuaguuaaccuccacgacuuccauucugaugagauagagcaccuggugguagaggaacuugugaaaaagagggaagagugccuggacgcauuggaaacuauuaugacaaccaaauccgucagcuuucggcgccucucgcaucugcgaaaguuagugccuggauucggcaaggccuauacuaucuucaauaaaacacugauggaggcugaugcccacuacaagucuauuagaaccuggaacgagaucaucccauccaaaggcugucucaggguugggggacggugccacccccaugugaauggugucuuuuucaacggcauuauacuugggccggacggacacgugcugaucccugaaaugcagucaaguuugcuacaucagcacauggagcugcucgaaagcuccguaauuccccugaugcauccacuugcggauccuucuacgguuuuuaaggacggcgaugaggcagaagacuucguggagguccaccuccccgaugugcacaaacaaaucagcggugucgacuuggggcucccaaauuggggcaaguaugugcugguuucagccggagcuuuaaccgcccugaugcuaaugauauuucucaugacauguugccguaagacugaucgcgcagagaguauucagcauucccccggcgaaaccagaaggaaagugagcguaacaucucacaacgggcgggucaucucaaguugggagagcuacaaguccggaggugaaacuaaacuguga

SEQ ID NO: 159264 - RNA, 1575 nt, Artificial Sequence
  derived and/or modified CDS sequence (opt3) from glycoprotein__RABV__JN936758.1
augaucccccaggugcugcuguucgucccucuucugguuuuuagcuccugcuucggcaaguuuccaauuuacaccauaccggacaaauuggggcccuggucuccuaucgauauucaccauuuaucauguccaaacaaucuggugguagaggacgaaggaugcacaaaccuaagugguuucagcuauauggagcucaaggugggcuacaucuccgccauuaaagucaauggguuuacuuguacgggagugguuaccgaagcugagacauauacuaacuucgugggcuacgucaccacaaccuuuaagagaaaacacuucaggcccaugccugaugcaugccgggccgcguauaauuggaagauggcuggugacccacgcuacgaagagucucugcauaaccccuauccugauuaccacuggcuucgaacugugaagacaaccaaagagucgcugguaaucauaucaccaagcguugccgacuuggauccguacgacaagagucuccauucccguguguuucccgggggaaaauguucuggcaucacggucagcuccacuugcuguucaaccaaucacgauuauacaauuuggaugccugaaaacccaagacugggcaccaguugcgacaucuucacuaauagcagggggaagcgggcaucuaaaggagguaagacauguggcuuuguggaugagcgcgggcuguacaagucccucaaaggagccugcaaguuaaaacuguguggcgugcuugguuugagacugauggacgggaccugggucgcuauucaaacgucagaugaaaucaaguggugcagccccgaccagcuaguuaaccuccacgacuuccauagugaugagauagagcaccuggugguagaggaacuugugaaaaagagggaagagugccuggacgcauuggaaacuauuaugacaaccaaaucugucuccuuucggcgccucagccaucugcgaaaguuagugccuggauucggcaaggccuauacuaucuucaauaaaacacugauggaggcugaugcccacuacaagucgauuagaaccuggaacgagaucaucccaucuaaaggcugucucaggguugggggacggugccacccccaugugaauggugucuuuuucaacggcauuauacuugggccggacggacacgugcugaucccugaaaugcaguccucauugcuacaucagcacauggagcugcucgaaaguagcguaauuccccugaugcauccacuugcggauccuuccacgguuuuuaaggacggcgaugaggcagaagacuucguggagguccaccuccccgaugugcacaaacaaaucucuggugucgacuuggggcucccaaauuggggcaaguaugugcugauaggagccggcgcuuuaaccgcccugaugcuaacaauuuuucucaugacuuguugccguaagaccaaccgcgcagagagcauccagcauucacccggggaaacaggaagaaaaguuagugugacuucccacaacgguaggguaaucagcucuugggagucauacaagaguggcagcgaaaccaaacuguga

SEQ ID NO: 159265 - RNA, 1575 nt, Artificial Sequence
  derived and/or modified CDS sequence (opt3) from glycoprotein__RABV__JN936759.1
augaucccccaggugcugcuguucgucccucuucugguuuuuagcuccugcuucggcaaguuuccaauuuacaccauaccggacaaauuggggcccuggucuccuaucgauauucaccauuuaucauguccaaacaaucuggugguagaggacgaaggaugcacaaaccuaagugguuucagcuauauggagcucaaggugggcuacaucuccgccauuaaagucaauggguuuacuuguacgggagugguuaccgaagcugagacauauacuaacuucgugggcuacgucaccacaaccuuuaagagaaaacacuucaggcccaugccugaugcaugccgggccgcguauaauuggaagauggcuggugacccacgcuacgaagagucucugcauaaccccuauccugauuaccacuggcuucgaacugugaagacaaccaaagagucgcugguaaucauaucaccaagcguugccgacuuggauccguacgacaagagucuccauucccguguguuucccgggggaaaauguucuggcaucacggucagcuccacuugcuguucaaccaaucacgauuauacaauuuggaugccugaaaacccaagacugggcaccaguugcgacaucuucacuaauagcagggggaagcgggcaucuaaaggagguaagacauguggcuuuguggaugagcgcgggcuguacaagucccucagaggagccugcaaauuaaagcuguguggcgugcuugguuugaggcugauggacgggaccugggucgcuauucaaacgucagaugaaaucaaauggugcagccccgaccagcuaguuaaccuccacgacuuccauagugaugagauagagcaccuggugguagaggaacuugugaagaaacgggaagagugccuggacgcauuggaaacuauuaugacaaccaagucugucuccuuucgccgacucagccaucugagaaaauuagugccuggauucggcaaggccuauacuaucuucaauaagacacugauggaggcugaugcccacuacaaaucgauuaggaccuggaacgagaucaucccaucuaagggcugucuccggguugggggacguugccacccccaugugaauggugucuuuuucaacggcauuauacuugggccggacggacacgugcugaucccugaaaugcaguccucauugcuacaucagcacauugagcugcucgaaaguagcguaaucccccugaugcauccacuugcggauccuuccacgguuuuuaaagacggcgaugaggcagaagacuucguggagguccaccuccccgaugugcacaagcaaauaucuggugucgacuuggggcucccaaauuggggcaaauaugugcugauuagcgccggagcuuuaaccgcccugaugcuaacaaucuuucucaugacuuguugccgcaagaccaacagagcagagucaauccagcauagucccggcgaaacagggaggaagguuuccgugacuagccacaacggacggguaauuucuucaugggagaguuacaaaagcgguuccgaaaccaagcuguga

SEQ ID NO: 159266 - RNA, 1575 nt, Artificial Sequence
  derived and/or modified CDS sequence (opt3) from glycoprotein__RABV__JN936760.1
augaucccccaggugcuccuguucgucccucuucugguuuuuagcuugugcuucggcaaguuuccaauuuacaccauaccggacaaauuagggcccugguccccuaucgauauucaccaucugucuuguccaaacaaucuagugguagaggacgaaggaugcacaaaccucucagguuucaguuauauggagcugaaggugggcuacaucagcgccauuaaagucaauggguuuacuuguacgggagugguuaccgaagcugagacauauacuaacuucgugggcuacgucaccacaaccuuuaagagaaaacacuucaggcccaugccugaugcaugccgggccgcguauaauuggaagauggcuggugacccacgcuacgaagagucccuucauaaccccuauccugauuaccacuggcugcgaacugugaagacaaccaaagagucuuugguaaucauaucgccaucaguugccgaccucgauccguacgacaagagccugcauagucguguguuucccgggggaaaauguuccggcaucacggucucuagcacuugcuguuccaccaaucacgauuauacaguguggaugccugaaaacccaagacugggcacuucaugcgacauuuucaccaauaguagggggaagcgggcaagcaaaggagguaagacauguggcuuuguggaugagcgcgggcucuacaagucuuuaaaaggagccugcaagcugaaacuuuguggcgucuugggucugagacuaauggacgggaccuggguugcuauccaaacguccgaugaaauuaaguggugcucacccgaccagcucgugaaccugcacgacuuccauagcgaugagaucgagcaccuuguaguggaggaacuggucaaaaagagggaagagugcuuggacgcacucgaaacuauaaugacaaccaaaagugugucuuuucggcgccugucccauuuacgaaagcugguuccuggauucggcaaggccuauacuauuuucaauaaaacacucauggaggcugaugcccacuacaagagcaucagaaccuggaacgagauuaucccaucgaaaggcugucuuagggucgggggacggugccacccccaugugaaugguguguuuuucaacggcaucauucuggggccggacggacacguauugauaccugaaaugcagucuucccuacugcaucagcacauggagcuccuggaaucaaguguuaucccccuuaugcauccacuggcggauccuagcacgguguuuaaggacggcgaugaggcagaagacuucgucgaggugcacuugcccgauguccacaaacaaauuuccgguguggaccucgggcugccaaauuggggcaaguauguuuuaaucucugccggagcucugaccgcccuaaugcucacaauauuucugaugacuuguugccguaagaccaaccgcgcagagagcauucagcauucacccggcgaaacagggagaaaagugaguguaacuucccacaacggaagggucaucagcucuugggagucauacaagagugguagcgaaaccaaacuuuga

SEQ ID NO: 159267 - RNA, 1575 nt, Artificial Sequence
  derived and/or modified CDS sequence (opt3) from glycoprotein__RABV__JN936761.1
augaucccccaggugcugcuguucgucccucuucugguuuuuagcuccugcuucggcaaguuuccaauuuacaccauaccggacaaauuggggcccuggucuccuaucgauauucaccauuuaucauguccaaacaaucuggugguagaggacgaaggaugcacaaaccuaagugguuucagcuauauggagcucaaggugggcuacaucuccgccauuaaagucaauggguuuacuuguacgggagugguuaccgaagcugagacauauacuaacuucgugggcuacgucaccacaaccuuuaagagaaaacacuucaggcccaugccugaugcaugccgggccgcguauaauuggaagauggcuggugacccacgcuacgaagagucucugcauaaccccuauccugauuaccacuggcuucgaacugugaagacaaccaaagagucgcugguaaucauaucaccaagcguugccgacuuggauccguacgacaagagucuccauucccguguguuucccgggggaaaauguucuggcaucacggucagcuccacuugcuguucaaccaaucacgauuauacaauuuggaugccugaaaacccaagacugggcaccaguugcgacaucuucacuaauagcagggggaagcgggcaucuaaaggagguaagacauguggcuuuguggaugagcgcgggcuguacaagucccucaaaggagccugcaaguuaaaacuguguggcgugcuugguuugagacugauggacgggaccugggucgcuauucaaacgucagaugaaaucaaguggugcagccccgaccagcuaguuaaccuccacgacuuccauagugaugagauagagcaccuggugguagaggaacuugugaaaaagagggaagagugccuggacgcauuggaaacuauuaugacaaccaaaucugucuccuuucggcgccucagccaucugcgaaaguuagugccuggauucggcaaggccuauacuaucuucaauaaaacacugauggaggcugaugcccacuacaagucgauuagaaccuggaacgagaucaucccaucuaaaggcugucucaggguugggggacggugccacccccaugugaauggugucuuuuucaacggcauuauacuugggccggacggacacgugcugaucccugaaaugcaguccucauugcuacaucagcacauggagcugcucgaaaguagcguaauuccccugaugcauccacuugcggauccuuccacgguuuuuaaggacggcgaugaggcagaagacuucguggagguccaccuccccgaugugcacaaacaaaucucuggugucgacuuggggcucccaaauuggggcaaguaugugcugauaagcgccggagcuuuaaccgcccugaugcuaaugauuuuucucaugacauguugccguaagacuaaccgcgcagagucaauccagcauagucccggcgaaaccgggagaaaaguuuccgugacaagccacaacggaaggguaaucucuucaugggagaguuacaagagcgguuccgaaacuaaacuguga

SEQ ID NO: 159268 - RNA, 1575 nt, Artificial Sequence; identical to SEQ ID NO: 159132
  derived and/or modified CDS sequence (opt3) from glycoprotein__RABV__JN936762.1

SEQ ID NO: 159269 - RNA, 1575 nt, Artificial Sequence; identical to SEQ ID NO: 158875
  derived and/or modified CDS sequence (opt3) from glycoprotein__RABV__JN936763.1

SEQ ID NO: 159270 - RNA, 1575 nt, Artificial Sequence
  derived and/or modified CDS sequence (opt3) from glycoprotein__RABV__JN936764.1
augaucccccaggugcuccuguucgucccuuuucuuguuuucagcuccugcuuuggcaaguucccaauuuacaccauaccggacaaacuggggcccuggucuccuaucgauauucaccauuugucauguccaaacaauuuagugguagaggacgaaggaugcacaaaccugagugguuuuagcuauauggagcuaaaggugggcuacaucuccgccauuaaagucaauggguucacuuguacgggagugguuaccgaagcugagacauauacuaacuuugugggcuacgucaccacaaccuucaagagaaaacacuuuaggcccaugccugaugcaugccgggccgcguauaauuggaagauggcuggugacccacgcuacgaagagucucuccauaaccccuauccugauuaccacuggcugcgaacugugaagacaaccaaagagucgcuuguaaucauaucaccaagcguugccgaccuggauccguacgacaagaguuugcauucccguguguuccccgggggaaaauguucuggcaucacggucagcuccacuugcuguucaaccaaucacgauuauacaauuuggaugccugaaaacccaagacucggcaccaguugcgacaucuuuacuaauagcagggggaagcgggcaucuaaaggagguaagacauguggcuucguggaugagcgcgggcuguacaagucccugaaaggagccugcaagcucaaauuauguggcgugcugggucuuagauugauggacgggaccugggucgcuauucaaacgucagaugaaaucaaguggugcagccccgaccagcugguuaaccuacacgacuuucauagugaugagauagagcaccucgugguagaggaacuggugaaaaagagggaagagugccuugacgcacuggaaacuauuaugacaaccaaaucugucuccuuccggcgcuugagccaucuccgaaagcuggugccuggauucggcaaggccuauacuaucuuuaauaaaacauuaauggaggcugaugcccacuacaagucgauuagaaccuggaacgagaucaucccaucuaaaggcugucugaggguugggggacggugccacccccaugugaauggugucuucuuuaacggcauuauacucgggccggacggacacgugcuuaucccugaaaugcaguccucacuguugcaucagcacauggagcuacuggaaaguagcguaauuccccucaugcauccacuggcggauccuuccacgguuuucaaggacggcgaugaggcagaagacuuuguggagguccaccuucccgaugugcacaaacaaaucucuggugucgaccugggguugccaaauuggggcaaguaugugcucauaagcgccggagcucugaccgccuuaaugcugacaauuuuccuaaugacuuguugccguaagaccaaccgcgcagagucaauccagcauagucccggcgaaacagggagaaaaguuuccgugacuagccacaacggaaggguaaucucuucaugggagaguuacaagagcgguuccgaaaccaaacucuga

SEQ ID NO: 159271 - RNA, 1575 nt, Artificial Sequence; identical to SEQ ID NO: 158893
  derived and/or modified CDS sequence (opt3) from glycoprotein__RABV__JN936765.1

SEQ ID NO: 159272 - RNA, 1575 nt, Artificial Sequence; identical to SEQ ID NO: 158893
  derived and/or modified CDS sequence (opt3) from glycoprotein__RABV__JN936766.1

SEQ ID NO: 159273 - RNA, 1575 nt, Artificial Sequence; identical to SEQ ID NO: 158893
  derived and/or modified CDS sequence (opt3) from glycoprotein__RABV__JN936767.1

SEQ ID NO: 159274 - RNA, 1575 nt, Artificial Sequence; identical to SEQ ID NO: 159115
  derived and/or modified CDS sequence (opt3) from glycoprotein__RABV__JN936768.1

SEQ ID NO: 159275 - RNA, 1575 nt, Artificial Sequence; identical to SEQ ID NO: 158894
  derived and/or modified CDS sequence (opt3) from glycoprotein__RABV__JN936769.1

SEQ ID NO: 159276 - RNA, 1575 nt, Artificial Sequence
  derived and/or modified CDS sequence (opt3) from glycoprotein__RABV__JN936770.1
augaucccccaggugcugcuguucgucccucuucugguuuuuagcuccugcuucggcaaguuuccaauuuacaccauaccggacaaauuggggcccuggucuccuaucgauauucaccauuuaucauguccaaacaaucuggugguagaggacgaaggaugcacaaaccuaagugguuucagcuauauggagcucaaggugggcuacaucuccgccauuaaagucaauggguuuacuuguacgggagugguuaccgaagcugagacauauacuaacuucgugggcuacgucaccacaaccuuuaagagaaaacacuucaggcccaugccugaugcaugccggucugccuauaauuggaagauggcgggugacccacgcuacgaagagucgcugcauaaccccuauccugauuaccacuggcuucgaacugugaagacaaccaaagagucacugguaaucauaagcccaaguguugcugacuuggauccguacgacaagucccuccauucucguguguuucccgggggaaaauguagcggcaucacggucuccucaacuugcuguaguaccaaucacgauuauacaauuuggaugccugaaaacccaagacugggcacuagcugcgacaucuucaccaauucuagggggaagcgggccuccaaaggagguaagacauguggcuuuguggaugagcgcgggcuguacaagucacucaaaggagcaugcaaguuaaaacuguguggcgugcuugguuugagacugauggacgggaccugggucgccauucaaacgagcgaugaaaucaaguggugcagucccgaccagcuaguuaaccuccacgacuuccauucugaugagauagagcaccuggugguagaggaacuugugaaaaagagggaagagugccuggacgcuuuggaaacuauuaugacaaccaaauccgucagcuuucggcgccucucgcaucugcgaaaguuagugccuggauucggcaaggcauauacuaucuucaauaaaacacugauggaggccgaugcucacuacaagucuauuagaaccuggaacgagaucaucccauccaaaggcugucucaggguugggggacggugccacccccaugugaauggugucuuuuucaacggcauuauacuugggccggacggacacgugcugaucccugaaaugcagucaaguuugcuacaucagcacauggagcugcucgaaagcuccguaauuccccugaugcauccacuugccgauccuucuacgguuuuuaaggacggcgaugaggcggaagacuucguggagguccaccuccccgaugugcacaaacaaaucagcggugucgacuuggggcucccaaauuggggcaaguaugugcugauaucagcaggagccuuaaccgcucugaugcuaacaauuuuucucaugacuuguugccguaagaccaaccgcgccgagaguauccagcauucccccggcgaaacagggagaaaaguuagcgugacuucucacaacggaaggguaaucucaaguugggagagcuacaaguccgguucugaaaccaaacuguga

SEQ ID NO: 159277 - RNA, 1575 nt, Artificial Sequence; identical to SEQ ID NO: 158875
  derived and/or modified CDS sequence (opt3) from glycoprotein__RABV__JN936771.1

SEQ ID NO: 159278 - RNA, 1575 nt, Artificial Sequence; identical to SEQ ID NO: 159240
  derived and/or modified CDS sequence (opt3) from glycoprotein__RABV__JN936772.1

SEQ ID NO: 159279 - RNA, 1575 nt, Artificial Sequence
  derived and/or modified CDS sequence (opt3) from glycoprotein__RABV__JN936773.1
augaucccccaggugcugcuguucgucccucuucugguuuuuagcuccugcuucggcaaguuuccaauuuacaccauaccggacaaauuggggcccuggucuccuaucgauauucaccauuuaucauguccaaacaaucugaucguggaggacgaaggaugcacaaaccuaagugguuucagcuauauggagcucaagguaggcuacauuuccgccaucaaagugaauggguuuacuuguacgggagucgugaccgaagcugagacauauacuaacuucguuggcuacgugaccacaaccuuuaagagaaaacacuucaggcccaugccugaugcaugccgggccgcguauaauuggaagauggcuggugacccacgcuacgaagagucucugcauaaccccuauccugauuaccacuggcuucgaacugucaagacaaccaaagagucgcuggugauaaucucaccaagcguagccgacuuggauccguacgacaagagucuccauucccguguuuuucccgggggaaaauguucuggcauuacggugagcuccacuugcuguucaaccaaucacgauuauacaaucuggaugccugaaaacccaagacugggcaccaguugcgacauuuucacuaauagcagggggaagcgggcaucuaaaggagguaagacauguggcuuugucgaugagcgcgggcuguacaagucccucaaaggagccugcaaguuaaaacuguguggcgugcuugguuugagacugauggacgggaccuggguggcuauccaaacgucagaugaaauaaaguggugcagccccgaccagcuagucaaccuccacgacuuccauagugaugagauugagcaccugguuguggaggaacuugugaaaaagagggaagagugccuggacgcauuggaaacuaucaugacaaccaaaucuguguccuuucggcgccucagccaucugcgaaaguuagucccuggauucggcaaggccuauacuauuuucaauaaaacacugauggaggcugaugcccacuacaagucgaucagaaccuggaacgagaucauuccaucuaaaggcugucucaggguagggggacggugccacccccauguuaaugguguguuuuucaacggcauaauccuugggccggacggacacguccugauuccugaaaugcaguccucauugcuacaucagcacauggagcugcucgaaaguagcgugaucccccugaugcauccacuugcggauccuuccacgguauuuaaggacggcgaugaggcagaagacuucguugaggugcaccuccccgauguccacaaacaaauaucugguguggacuuggggcucccaaauuggggcaaguauguccugauuagcgccggagcuuuaaccgcccugaugcuaacaaucuuucucaugacuuguugccguaagaccaaccgcgcaggcucaauccagcauagucccggggagacaggaagaaaaguguccguuacuagccacaacgguagggugauuucuucaugggaaaguuacaagagcggcuccgagaccaaacuguga

SEQ ID NO: 159280 - RNA, 1575 nt, Artificial Sequence; identical to SEQ ID NO: 158893
  derived and/or modified CDS sequence (opt3) from glycoprotein__RABV__JN936774.1

SEQ ID NO: 159281 - RNA, 1575 nt, Artificial Sequence; identical to SEQ ID NO: 158894
  derived and/or modified CDS sequence (opt3) from glycoprotein__RABV__JN936775.1

SEQ ID NO: 159282 - RNA, 1575 nt, Artificial Sequence; identical to SEQ ID NO: 158875
  derived and/or modified CDS sequence (opt3) from glycoprotein__RABV__JN936776.1

SEQ ID NO: 159283 - RNA, 1575 nt, Artificial Sequence; identical to SEQ ID NO: 158894
  derived and/or modified CDS sequence (opt3) from glycoprotein__RABV__JN936777.1

SEQ ID NO: 159284 - RNA, 1575 nt, Artificial Sequence; identical to SEQ ID NO: 158894
  derived and/or modified CDS sequence (opt3) from glycoprotein__RABV__JN936778.1

SEQ ID NO: 159285 - RNA, 1575 nt, Artificial Sequence; identical to SEQ ID NO: 159115
  derived and/or modified CDS sequence (opt3) from glycoprotein__RABV__JN936779.1

SEQ ID NO: 159286 - RNA, 1575 nt, Artificial Sequence
  derived and/or modified CDS sequence (opt3) from glycoprotein__RABV__JN936780.1
augaucccccaggugcuccuguucgucccucuucugguuuuuagcuccugcuucggcaaguuuccaauuuacaccauaccggacaaauuggggcccuggucuccuaucgauauucaccauuuaucauguccaaacaaucuggugguagaggacgaaggaugcacaaaccuaagugguuucagcuauauggagcucaaggugggcuacaucuccgccauuaaagucaauggguuuacuuguacgggagugguuaccgaagcugagacauauacuaacuucgugggcuacgucaccacaaccuuuaagagaaaacacuucaggcccaugccugaugcaugccgggccgcguauaauuggaagauggcuggugacccacgcuacgaagagucucugcauaaccccuauccugauuaccacuggcuucgaacugugaagacaaccaaagagucgcugguaaucauaucaccaagcguugccgacuuggauccguacgacaagagucuccauucccguguguuucccgggggaaaauguucuggcaucacggucagcuccacuugcuguucaaccaaucacgauuauacaauuuggaugccugaaaacccaagacugggcaccaguugcgacaucuucacuaauagcagggggaagcgggcaucuaaaggagguaagacauguggcuuuguggaugagcgcgggcuguacaagucccucaaaggagccugcaaguuaaaacuguguggcgugcuugguuugagacugauggacgggaccugggucgcuauucaaacgucagaugaaaucaaguggugcagccccgaccagcuaguuaaccuccacgacuuccauagugaugagauagagcaccuggugguagaggaacuugugaaaaagagggaagagugccuggacgcauuggaaacuauuaugacaaccaaaucugucuccuuucggcgccucagccaucugcgaaaguuagugccuggauucggcaaggccuauacuaucuucaauaaaacacugauggaggcugaugcccacuacaagucgauuagaaccuggaacgagaucaucccaucuaaaggcugucucaggguugggggacggugccacccccaugugaauggugucuuuuucaacggcauuauacuugggccggacggacacgugcugaucccugaaaugcaguccucauugcuacaucagcacauggagcugcucgaaaguagcguaauuccccugaugcauccacuugcggauccucugacgguuuuuaaggacggcgaugaggcagaagacuucguggagguccacuugcccgaugugcacaaacaaaucuccggugucgaccucgggcugccaaauuggggcaaguauguguuaauaucugccggagcucugaccgcccuaaugcucacaauuuuucugaugacuuguugccguaagaccaaccgcgcagagagcauccagcauucacccggcgaaacagggagaaaaguuagugugacuucccacaacggaaggguaaucagcucuugggagucauacaagagugguagcgaaaccaaacuuuga

SEQ ID NO: 159287 - RNA, 1575 nt, Artificial Sequence; identical to SEQ ID NO: 158893
  derived and/or modified CDS sequence (opt3) from glycoprotein__RABV__JN936781.1

SEQ ID NO: 159288 - RNA, 1575 nt, Artificial Sequence; identical to SEQ ID NO: 158893
  derived and/or modified CDS sequence (opt3) from glycoprotein__RABV__JN936782.1

SEQ ID NO: 159289 - RNA, 1575 nt, Artificial Sequence
  derived and/or modified CDS sequence (opt3) from glycoprotein__RABV__JN936783.1
augaucccccaggugcugcuguucgucccucuucugguuuuuagcuccugcuucggcaaguuuccaauuuacaccauaccggacaaauuggggcccuggucuccuaucgauauucaccauuuaucauguccaaacaaucuggugguagaggacgaaggaugcacaaaccuaagugguuucagcuauauggagcucaaggugggcuacaucuccgccauuaaagucaauggguuuacuuguacgggagugguuaccgaagcugagacauauacuaacuucgugggcuacgucaccacaaccuuuaagagaaaacacuucaggcccaugccugaugcaugccgggccgcguauaauuggaagauggcuggugacccacgcuacgaagagucucugcauaaccccuauccugauuaccacuggcuucgaacugugaagacaaccaaagagucgcugguaaucauaucaccaagcguugccgacuuggauccguacgacaagagucuccauucccguguguuucccgggggaaaauguucuggcaucacggucagcuccacuugcuguucaaccaaucacgauuauacaauuuggaugccugaaaacccaagacugggcaccaguugcgacaucuucacuaauagcagggggaagcgggcaucuaaaggagguaagacauguggcuuuguggaugagcgcgggcuguacaagucccucaaaggagccugcaaguuaaaacuguguggcgugcuugguuugagacugauggacgggaccugggucgcuauucaaacgucagaugaaaucaaguggugcagccccgaccagcuaguuaaccuccacgacuuccauagugaugagauagagcaccuggugguagaggaacuugugaaaaagagggaagagugccuggacgcauuggaaacuauuaugacaaccaaaucugucuccuuucggcgccucagccaucugcgaaaguuagugccuggauucggcaaggccuauacuaucuucaauaaaacacugauggaggcugaugcccacuacaagucgauuagaaccuggaacgagaucaucccaucuaaaggcugucucaggguugggggacggugccacccccaugugaauggugucuuuuucaacggcauuauacuugggccggacggacacgugcugaucccugaaaugcaguccucauugcuacaucagcacauugagcugcucgaaaguagcguaaucccccugaugcauccacuugcggauccuuccacgguuuuuaaggacggcgaugaggcagaagacuucguggagguccaccuccccgaugugcacaaacaaauaucuggugucgacuuggggcucccaaauuggggcaaguaugugcugauuagcgccggagcuuuaaccgcccugaugcuaacaaucuuucucaugacuuguugccguaagaccaaccgcgcagagucaauccagcauagucccggcgaaacagggagaaaaguuuccgugacuagccacaacggaaggguaauuucuucaugggagaguuacaagagcgguuccgaaaccaaacuguga

SEQ ID NO: 159290 - RNA, 1575 nt, Artificial Sequence
  derived and/or modified CDS sequence (opt3) from glycoprotein__RABV__JN936784.1
augaucccccaggugcugcuguucgucccucuucugguuuuuagcuccugcuucggcaaguuuccaauuuacaccauaccggacaaauuggggcccuggucuccuaucgauauucaccauuuaucauguccaaacaaucuggugguagaggacgaaggaugcacaaaccuaagugguuucagcuauauggagcucaaggugggcuacaucuccgccauuaaagucaauggguuuacuuguacgggagugguuaccgaagcugagacauauacuaacuucgugggcuacgucaccacaaccuuuaagagaaaacacuucaggcccaugccugaugcaugccgggccgcguauaauuggaagauggcuggugacccacgcuacgaagagucucugcauaaccccuauccugauuaccacuggcuucgaacugugaagacaaccaaagagucgcugguaaucauaucaccaagcguugccgacuuggauccguacgacaagagucuccauucccguguguuucccgggggaaaauguucuggcaucacggucagcuccacuugcuguucaaccaaucacgauuauacaauuuggaugccugaaaacccaagacugggcaccaguugcgacaucuucacuaauagcagggggaagcgggcaucuaaaggagguaagacauguggcuuuguggaugagcgcgggcuguacaagucccucaaaggagccugcaaguuaaaacuguguggcgugcuugguuugagacugauggacgggaccugcgucgcuauucaaacgucagaugaaaucaaguggugcagccccgaccagcuaguuaaccuccacgacuuccauagugaugagauagagcaccuggugguagaggaacuugugaaaaagagggaagagugucuggacgcauuggaaacuauuaugacaaccaaaucugucuccuuucggcgccucagccaucugcgaaaguuagugccuggauucggcaaggccuauacuaucuucaauaaaacacugauggaggcugaugcccacuacaagucgauuagaaccuggaacgagaucaucccaucuaaaggcugccucaggguugggggacggugucacccccaugugaauggugucuuuuucaacggcauuauacuugggccggacggacacgugcugaucccugaaaugcaguccucauugcuacaucagcacauugagcugcucgaaaguagcguaaucccccugaugcauccacuugcggauccuuccacgguuuuuaaggacggcgaugaggcagaagacuucguggagguccaccuccccgaugugcacaaacaaauaucuggugucgacuuggggcucccaaauuggggcaaguaugugcugauuagcgccggagcuuuaaccgcccugaugcuaacaaucuuucucaugacuugcugucguaagaccaaccgcgcagagucaauccagcauagucccggcgaaacagggagaaaaguuuccgugacuagccacaacggaaggguaauuucuucaugggagaguuacaagagcgguuccgaaaccaaacuguga

SEQ ID NO: 159291 - RNA, 1575 nt, Artificial Sequence; identical to SEQ ID NO: 159132
  derived and/or modified CDS sequence (opt3) from glycoprotein__RABV__JN936786.1

SEQ ID NO: 159292 - RNA, 1575 nt, Artificial Sequence
  derived and/or modified CDS sequence (opt3) from glycoprotein__RABV__JN936788.1
augaucccccaggcccuucucuucgugccucuucuggucguuagcuugugcuuuggcaaguucccaauuuacaccauaccggacaaauuagggcccugguccccuaucgauauucaccaucugucuuguccaaacaaucuagugguagaggacgaaggaugcacaaaccucucagguuuuaguuauauggagcugaaggugggcuacaucagcgcuauuaaagucaauggguucacuuguacgggagugguuaccgaagcagagacauauacuaacuuugugggcuacgucaccacaaccuucaagagaaaacacuuuaggcccacuccugaugccugccgguccgcguauaauuggaagauggcuggugacccacgcuacgaagagucucuucauaaccccuauccugauuaccacuggcugcgaacagugaagaccacgaaagagucguucguaaucauaucaccaagcguugccgacuuggauccguacgacaagagucuccauucccguguguuucccagagggaaauguucuggaaucacugucagcuccaccuauugcucaacaaaucacgauuacacuauuuggaugccugaaaacccaaggcugggcaccaguugugacaucuucacaaauagccggggcaagcgcgcauuuaaagggucuaagaccugcggauucguggaugagagaggucuguauaagucccucaaaggcgccuguaaguuaaaacugugcggggugcuuggauugaggcugauggacggcacgugggucgcuauucaaacuucagaugaaacaaaguggugucccccugaccagcuaguuaaccuccacgacuuucauagcgaugagaucgagcaccuggugguagaggaacuugugaaaaagcgggaagagugccuggacgcauuggaaaguauaaugaccacuaaaucugucuccuuccgccgacucagccaucugagaaaguuagugccagguuucgggaaggccuacacaauuuuuaauaaaacccugauggaggcugaugcccacuauaagucgguuaggacguggaacgagaucauucccucuaaaggaugccuccgggugggcggccguugucacccgcaugucaaugggguguucuuuaacggaaucauccuugguccugacggccacguacugauucccgaaaugcaguccucauugcuacagcaacauauggagcugcucgaaaguagcguuauaccacugaugcacccucuugcggaucccuccaccguguucaagaauggggacgaggcagaagauuuugucgaggugcaucugccagacguccacaaacaggugucuggaguugauuugggccuccccagcugggguaaguacgugcugaugucagccgggguauuaacagcucugaugcuaaugaucuuccucaugacuugcugucgcagaaccaacaggccugagaguauucagcacucccugggcgaaacaggacggaaggucagcgugacuucucagaacggccgaguuaucucaaguugggagagcuauaaauccgggggagaaaccaagcuguga

SEQ ID NO: 159293 - RNA, 1575 nt, Artificial Sequence; identical to SEQ ID NO: 159270
  derived and/or modified CDS sequence (opt3) from glycoprotein__RABV__JN936790.1

SEQ ID NO: 159294 - RNA, 1575 nt, Artificial Sequence; identical to SEQ ID NO: 159132
  derived and/or modified CDS sequence (opt3) from glycoprotein__RABV__JN936791.1

SEQ ID NO: 159295 - RNA, 1575 nt, Artificial Sequence; identical to SEQ ID NO: 158893
  derived and/or modified CDS sequence (opt3) from glycoprotein__RABV__JN936793.1

SEQ ID NO: 159296 - RNA, 1575 nt, Artificial Sequence
  derived and/or modified CDS sequence (opt3) from glycoprotein__RABV__JQ595307.1
augaucccccaggcccuccuguucgugccucuucugauucccagcuugugcuuaggcgaguuuccgauauacaccauccccgacaagcuggggccuuggacaccaauugauauccaccaucuauccugucccaacaaucucgucgcugaaaacgacggaugcacuucucugucagguuucaguuauauggagcuuaaaguuggcuacauuagcgcaaucaaggugaauggguuuacguguaccggaguagugacagaagccgagacuuauaccaacuucgucggcuacgugacaaccacuuuuaaaagaaagcacuucaggccuaugccagaugcgugccgggcugcccaugacuggaaaauggccggugauccccgcuaugaagacucccugcaaaauccuuacccagauuaucacugguugcgaacaguuaagaccacgaaggagucucucgugauaaucucgccgucagucgccgaccuggaucccuacgacaaaagccugcauagucguguguuuccuuccgggaagugucucggaauuacuguaucuagcaccuacugcuccacaaaccacgauuauacuaucuggaugccaguugagcccagauuaggcaccucaugugacauuuucacaaauaguaggggcaaacgggcuagcaaagggggacgcgugugcgguuuugucgaugaaagaggccuguacaagucucuuaagggggcauguaaguugaaacugugcggagugccuggcaucaggcuaauggacgguaccuggguguccauacagacgucagaggacauuaagugguguccacccgaucggcucgucaaccugcacgacuuccauagcgaugaacuugagcaccugguuguggaggaauugaucaaacgccgagagaauugccucgacgcccuggaaaguauuaugacuacaaagucuguauccuuuagaagguuaagccaucugcggaaacucgugccgggguucggaaaggcuuauaccaucuuuaacaaaacucuuauggaggccgaugcgcacuacaagucggucaagacauggaaugaagugaucccuucuaaaggcugccuggagguuggcgggaagugucacccaccagugaacggagucuucuucaaugguauuauauugggcccugacgggaacgugcuaauccccgagaugcaguccucacugcuccagcaacauauggaacugcuugagaguagcguaauuccacugaugcaccccuuggcagauccuuccaccguuuuuaaagaaggagacgaggccgaagauuucguggagguccaucucccagacgugcacaagcaggucucugauguggaccugggcuuaccgagcugggguaaauaucugcuaaugucagcuggggcccucgcaauccugauacuugcuauuguuuugaucaucugcugucgucgcgugaauaagacgggcaguacccagagaggacauagggagucccggggcaagaugagcguagcaccccagaacgggaaaauuaucucuucaugggaacuguacaagagugagagcgaaacaggacucuga

SEQ ID NO: 159297 - RNA, 1575 nt, Artificial Sequence
  derived and/or modified CDS sequence (opt3) from glycoprotein__RABV__JQ595308.1
augaucccccaggcccuguuguucgugccucuucugauuccaagccucugcuuaggcgaguuuccgauauacaccauccccgacaagcuggggccuugguccccaauugauauccaccaucuaucuugucccaacaaucucgucgcugaaaacgacggaugcacaucacugagugguuucagcuauauggagcuuaaaguuggcuacauuuccgcaaucaaggugaauggguuuacuuguacgggaguagugaccgaagccgagacauauacuaacuucgucggcuacgugaccacaaccuuuaaaagaaagcacuucaggccuacuccagaugcgugccgggcugcccaugacuggaaaauggcaggggauccccgcuaugaagccucucugcaaaauccuuacccagacuaucacugguugcgaacaguuaagaccacgaaggagucgcucgugauaaucucaccgagcgucgcugaucuggaccccuacgauaaaagucugcauucccguguguuuccuucugggaagugucucggaauuacuguaagcuccaccuacugcucaacaaaccacgacuauacuaucuggaugccaguugagcccagauuaggcaccaguugugauauuuucacaaauagcaggggcaaacgggcaucuaaggguggacgcgugugcgguuuugucgacgaaagaggccuguacaaaucccuuaagggggccuguagguugaagcugugcggagugccuggcauccggcuacucgaugguaccugggugucaauacagacgagcgaggacauuaaaugguguccacccgaccgccuggucaaccuucacgauuuccauagugacgaaaucgagcaccugguuguggcugaguugauuaagcgaagagaaaauugccucgaugcccuggagucuaucaugacuacaaaauccgugagcuuuaggcgguuaucgcaucugcguaagcucguaccgggguucggaaaagcguauaccaucuuuaacaagacucuuauggaagcagacgcccacuacaaaucugucaagacauggaaugaggugauuccuuccaagggcugccuggaaguuggcgggcgcugucacccccaugugaacggagucuucuucaaugguauaaucuugggcccagaugggaacgugcuaauuccugagaugcagucaagucugcuccagcaacacauggagcugcuugaaagcuccguaaucccccugaugcauccauuggcugaccccucuaccguuuuuaaagagggagaugaagccgaggacuucguggaaguccaccucccugaugugcauaagcaggucagcgacguggaucugggcuuaccaucaugggguaaauaucugcuaauaagugcaggggcucucgccauucugauccuugcgaucguuuugauuaucugcuguagaagggugaauaagacgggcuccacccagcggggacaccgagagagcggcgggaaaaugucuguagucccgcagaacggaaagauuauaucaaguugggagcuguacaagagcgaauccgagacaggucucuga

SEQ ID NO: 159298 - RNA, 1575 nt, Artificial Sequence
  derived and/or modified CDS sequence (opt3) from glycoprotein__RABV__JQ595309.1
augaucccccaggcccuguuguucgugccucuucugauuccaagccucugcuuaggcgaguuuccgauauacaccauccccgacaagcuggggccuugguccccaauugauauccaccaucuaucuugucccaacaaucucgucgcugaaaacgacggaugcacaucacugagugguuucagcuauauggagcuuaaaguuggcuacauuuccgcaaucaaggugaauggguuuacuuguacgggaguagugaccgaagccgagacauauacuaacuucgucggcuacgugaccacaaccuuuaaaagaaagcacuucaggccuacuccagaugcgugccgggcugcccaugacuggaaaauggcaggggauccccgcuaugaagccucucugcaaaauccuuacccagacuaucacugguugcgaacaguuaagaccacgaaggagucgcucgugauaaucucaccgagcgucgcugaucuggaccccuacgauaaaagucugcauucccguguguuuccuucugggaagugucucggaauuacuguaagcuccaccuacugcucaacaaaccacgacuauacuaucuggaugccaguugagcccagauuaggcaccaguugugauauuuucacaaauagcaggggcaaacgggcaucuaaggguggacgcgugugcgguuuugucgacgaaagaggccuguacaaaucccuuaagggggccuguagguugaagcugugcggagugccuggcauccggcuacucgaugguaccugggugucaauacagacgagcgaggacauuaaaugguguccacccgaccgccuggucaaccuucacgauuuccauagugacgaaaucgagcaccugguuguggcugaguugauuaagcgaagagaaaauugccucgaugcccuggagucuaucaugacuacaaaauccgugagcuuuaggcgguuaucgcaucugcguaagcucguaccgggguucggaaaagcguauaccaucuuuaacaagacucuuauggaagcagacgcccacuacaaaucugucaagacauggaaugaggugauuccuuccaagggcugccuggaaguuggcgggcgcugucacccccaugugaacggagucuucuucaaugguauaaucuugggcccagaugggaacgugcuaauuccugagaugcagucaagucugcuccagcaacacauggagcugcuugaaagcuccguaaucccccugaugcauccauuggcugaccccucuaccguuuuuaaagagggagaugaagccgaggacuucguggaaguccaccucccugaugugcauaagcaggucagcgacguggaucugggcuuaccaucaugggguaaauaucugcuaauaagugcaggggcucucgccauucugauccuugcgaucguuuugauuaucugcuguagaagggugaagaaaacgggcuccacccagcggggacaccgagagagcggcgggaagaugucuguagucccgcagaauggaaagauuauaucaaguugggagcuguacaaaagcgaauccgagacaggucucuga

SEQ ID NO: 159299 - RNA, 1575 nt, Artificial Sequence
  derived and/or modified CDS sequence (opt3) from glycoprotein__RABV__JQ595310.1
augaucccccaggcccuccuguucgugccucuucugauuccauuguuaugcagaggcgaguuuccgauauacaccauccccgacaagcuggggccuuggagcccaauugauauccaccaucuauccugucccaacaaucucgucgcugaaaacgacggaugcacaucucugucagguuucaguuauauggagcuuaaaguuggcuacauuagcgcaaucaaggugaauggguuuacuuguacgggaguagugaccgaagccgagacauauacuaacuucgucggcuacgugaccacaaccuuuaaaaggaagcacuuccggccuacuccagaugcgugccgcgcugcccaugacuggaaaauggccggugauccccgauaugaagacucccugcaaaauccuuacccagauuaucacugguugcguacaguuaagaccacgaaggagucucucgugauaaucucgccgucagucgccgaccuggaucccuacgacaaaagccugcauaguagaguguuuccuuccgggaagugucucggaauuacuguaucuagcaccuacugcuccacaaaccacgauuauacuaucuggaugccaguugagcccagguuaggcaccucaugugacauuuucacaaauagucggggcaaacgcgcuagcaaagggggaagagugugcgguuuugucgaugaaaggggccuguacaagucucuuaagggggcauguaaguugaaacugugcggagugccuggcauccggcuacucgacgguaccuggguguccauacagacgucagaggacauuaagugguguccacccgaucgccuggucaaccuucacgacuuccauagcgaugaaaucgagcaccugguuguggaggaauugauuaaacgaagagagaauugccucgacgcccuggaaaguaucaugacuacaaagucuguauccuuuaggcgguuaagccaucugcguaaacucgugccgggguucggaaaggcuuauaccaucuuuaacaauacucuuauggaggccgaugcgcacuacaaaucggucaagacauggaacgaagugauuccuucuaagggcugccuggagguuggcgggcgcugucaucccccagugaauggagucuucuucaacgguauaaucuugggcccugacgggaaugugcuaauucccgagaugcaguccucacugcuccagcaacacauggaacugcuugagaguagcguaaucccacugaugcaccccuuggcagauccuuccaccguuuuuaaagaaggagacgaggccgaagauuucguggagguccaucucccagacgugcacaagcaggucucugauguggaccugggcuuaccgagcugggguaaauaucugcuaaugucagcuggggcccucgcaauacugauucuugcuaucguuuugaucauuugcuguagaagggugaacaagacgcggaguucccagcgaggccaucgcgagagcggaggcaaaaugucuguagcaccccagaacgggaagaucauuucaaguugggaacuguacaagagcgaguccgaaaccggacucuga

SEQ ID NO: 159300 - RNA, 1575 nt, Artificial Sequence
  derived and/or modified CDS sequence (opt3) from glycoprotein__RABV__JQ595312.1
augaucccccaggcccuguuguucgugccucuucugauuccaagccucugcuuaggcgaguuuccguucuacaccauacccgacaagcuggggccuugguccccaaugcacauccaucaccuaucuugucccaacaaucucgucgcugaagaugacggaugcacaucacugagugguuuuagcuauauggagcuuaaaguuggcuacauuuccgcaaucaaggugaacggguucacuuguacgggaguagugaccgaagccgagacauauacuaauuuugucggcuacgugaccacaaccuucaaaagaaagcauuuuaggccuaugccagaugcgugccgggcugcccacgacuggaaaauggccggugauccccgcuaugaagacucucugcaaaacccuuacccagauucgcauugguugcgaacuguuaagacaaccaaggagucacucgugauuaucagcccgagugucgccgaccuggaucccuaugacaaaucccugcacucucguguguucccuagcgggaagugucucggaauaacgguauccucaacuuacugcaguaccaaucacgauuacacaaucuggaugccaguugagcccagauuaggcacuagcugugacauuuuuaccaacucuaggggcaaacgggcuuccaaagggggacgcgugugcgguuucgucgaugaaagaggccuguauaagucacuuaagggggcauguaaguugaaacugugcggagugccuggcaucaggcuaauggacgguacaugggugagcauucagaccagugaggacaucaagugguguccacccgaucggcucgucaaucugcaugacuuucacucugaugaaauagagcaucuuguuguggaggaacugauuaaacgccgagagaacugcuuggacgcccucgaauccaucaugacgacuaagagcguaucguucagaaggcugucucacuuacggaaacuggugccgggguuuggaaaggcuuacacaauuuucaauaaaacccucauggaggccgaugcgcacuauaaguccgucaagaacuggaaugaagugaucccuucaaaaggcugccuugagguuggcgggcguugucaucccccagugaacggagucuucuuuaaugguaucauucugggcccugacgggaacguguugauacccgagaugcagaguagccuacugcagcaacacauggaacuccuggaguccucuguaaucccacuuaugcauccccuggcagauccuagcacuguuuucaaggaaggagacgaggccgaagauuuuguggagguccacuugccagacgugcauaaacaggucucagauguggaccucggccugccgaguugggguaaguacuuacugauguccgcuggggcccuagcaauucuccugcuugcuaucguuagcauaauuugcugucgcagagugucuaaaacaaggucaacccagcggggccaccgagagaguggaggccgcaugagcguagcaccccagaaugggaagaucaucuccucuugggaauuguauaagucggagagcgaaacgggacuguga

SEQ ID NO: 159301 - RNA, 1575 nt, Artificial Sequence
  derived and/or modified CDS sequence (opt3) from glycoprotein__RABV__JQ595313.1
augaucccccaggccuugcucuuugugccucuucugauuccaagccugggcuuagggaaguuuccgauauacaccauccccgacaaacugggaccuugguccccaauugauauccaccaucuaucuugccccaacaaucucgucguugaggacgaagguuguacaucacugaguggcuucagcuauauggagcuuaaggugggguacauuuccucuaucaaaguaaacggauuuacuugcacgggcguggucaccgaagcugagacauauacuaauuucguggguuacguuaccacaaccuuuaagagaaaacacuucaggccuaugccagaugcaugucgggccgcgcaugacuggaagauagcuggggauccccgcuaugaagacucgcugcaaaacccuuacccagauuaucacugguugcgaacugugaagacaaccaaagagucacucgucaucauuagcccgaguguggccgagcuggaccccuacgauaagucccugcauucucguguauuuccuagcggaaaaugccucggcaucacgguuuccucaacuuacuguaguaccaaucacgacuauacaauuuggaugccaguggaagcaagauuaggcacuagcugcgauaucuucaccaacucuagggggaagaaagccuccaagggaggucggacauguggcuuugucgacgagcgcgggcuguacaagucacuuaaaggagcuugcaaguugaaacuguguggcgugcccggucuaagacucauggaugggaccugggugagcauacagacgagugacgacauuaaguggugcccuccagaucagcuggucaaucuucacgacuuccauucugaugaaaucgagcaccugguuguggaggaauugauuaaaaagagggagggaugucucgacgcacuggaauccaucaugacuacaaaaagcguaucguuucggcgcuuaucucaucugcgaaagcucgugcccggcuucggcaaggccuauaccaucuuuaacaauacucuuauggaggcugaugcccacuacaaauccgucagaacauggaacgaagugauuccgucaaaggggugccugaaaguuggagguaggugccacccucccgugaauggcgucuucuucaacgggauaaucuugggaccagacggcaaugugcuaauuccugagaugcagaguagccugcuccaacagcauauggagcugcuugaauccucuguaaucccccugaugcacccauuggcggaucccagcaccguuuuuaaggacggugaugaggcagaagacuucguggagguccaucucccugaugugcacaaacaggucucagacguggaccugggguuaccaaguuggggcaaguaucugcuaauguccgccggagcucucgccacgcugauacuugcaauuuucuugaucaccuguugccggcgugcuaaccgcacagaaagcacucagagaggccauagggagucugggggaaagguuucaguggccccgcaaaaugguaaaaucauuaguagcugggagcuguacaaguccgaaucugagaccggcauguga

SEQ ID NO: 159302 - RNA, 1575 nt, Artificial Sequence
  derived and/or modified CDS sequence (opt3) from glycoprotein__RABV__JQ595315.1
augaucccccaggcccuccuguucgugccucuucugauuccaaguuugugcuuaggcaaguuuccgauauacaccauccccgacaaacuggggccuugguccccaauugauauccaccaucuaucuugucccaacaaucucgucgcugaggacgaaggaugcacaucacugagugguuucagcuauauggagcuuaagguuggcuacauuuccgcaaucaaagugaacggguuuacuuguacgggaguagugaccgaagccgagacauauacuaauuucgucggcuacgugaccacaaccuuuaagagaaaacacuucaggccuaugccagaugcgugccgggcugcccaugacuggaagauggccggugauccccgcuaugaagacucucugcaaaacccuuacccagauuaucacugguugcgaacuguuaagacaaccaaagagucgcucgugauaaucucaccgagcgucgcagaccuggaucccuacgacaagagucugcauucccguguguuuccuucugggaaaugucucggaauuacgguaagcuccacuuacugcucaaccaaucacgauuauacaaucuggaugccaguugaggcuagauuaggcacuagcugugacauuuucaccaacagcaagggcaaaaaggcaucuaaagggggaaggacaugcgguuuuguggaugaacggggccuguacaagucccuuaagggggccuguaaauugaagcugugcggaguccccggccuacgccucauggacgguaccugggugucaauccagacgagcgacgauauaaaaugguguccuccagaccagcuggugaaucuucacgauuuccauagugacgagauugaacaccuggucguugaggaguugaucaagaaaagagaagggugccucgaugcucuggagucuauuaugacuacaaaguccgugagcuuuaggcgguuaucgcaucugcgcaagcucguacccggauucggcaaagccuauaccaucuuuaacaauacucuuauggaagcggacgcacacuacaagucugugcgaacauggaacgaggucaucccguccaaaggcugccugaagguugggggaagaugucacccucccgugaaugguguguucuucaacggcauuauauuggggccagauggaaauguccuaaucccugaaaugcagucaagucugcuccaacagcauauggagcugcuugagagcuccgugauuccccugaugcacccauuggccgaccccucuaccguauuuaaagauggcgacgaagcugaggauuucguugaagugcaucucccugacguccacaaacaggugagcgagaucgaccuggguuuaccaucaugggggaaguaucugcuaaugagugccggcguccucgcaacgcugauacuugcuaucuuuuugauuaccugcuguaggcgggccaaccguacagaauccacucagcgcggaagaagggagagcggcgggaaggugucuguugcgccgcaaaaugugaagaucauuucaaguugggagcuguacaaaagcgaauccgagaccggacucuga

SEQ ID NO: 159303 - RNA, 1575 nt, Artificial Sequence
  derived and/or modified CDS sequence (opt3) from glycoprotein__RABV__JQ595316.1
augaucccccaggcccuccuguucgugccucuucugauuccaaguuugugcuuaggcaacuuuccgauauacaccauccccgacaagcuggggccuugguccccaauugauauccaccaucuaucuugucccaauaaccucgucgcugaggacgaaggaugcacaucacugagugguuucagcuauauggagcuuaaaguuggcuacauuuccgcaaucaaggugaauggguuuacuuguacgggaguagugaccgaagccgagacauauacuaacuucgucggcuacgugaccacaaccuuuaaaagaaagcacuucaggccuaugccagaugcgugccgggcugcccaugacuggaaaauggccggugauccccgcuaugaagacucucugcaaaauccuuacccagauuaucacugguugcgaacuguuaagacaaccaaggagucgcucgugauaaucucaccgagcgucgcagaccuggaucccuacgacaaaagucugcauucccguguguuuccuucugggaagugucucggaauuacgguaagcuccacuuacugcucaaccaaccacgauuauacaaucuggaugccaguugaggcuagauuaggcacuagcugugacauuuucaccaauagcaaaggcaagaaagcaucuaaagggggaaggacaugcgguuuuguggaugaacggggccuguacaagucccuuaagggggccuguaaguugaaacugugcggaguccccggccuacgccucauggacgguaccugggugucaauccagacgagcgacgauauaaagugguguccuccagaccagcuggugaaccuucacgauuuccauagugacgagauugaacaccuggucguugaggaguugaucaaaaagagagaagggugccucgaugcucuggagucuauuaugacuacaaaauccgugagcuuuaggcgguuaucgcaucugcgcaagcucguacccggauucggcaaggccuauaccaucuuuaauaacacucuuauggaagcggacgcacacuacaaaucugugcgaacauggaaugaggucaucccguccaagggcugccugaaaguugggggaagaugucacccucccgugaacgguguguucuucaauggcauuauauuggggccagauggaaacguccuaaucccugaaaugcagucaagucugcuccaacagcauauggagcugcuugagagcuccgugauuccccugaugcacccauuggccgaccccucuaccguauuuaaggauggcgacgaagcugaggauuucguugaagugcaucucccugacguccacaaacaggugagcgagaucgaccuggguuuaccaucaugggggaaguaucugcuaaugagugccggcguccucgcaacgcugauacuugcuaucuuuuugauuaccugcuguaggcgggccaaucguacagaauccacucagcgcggaagaagggagagcggcgggaaggugucuguugcgccgcaaaacggaaaaaucauuucaaguugggagcuguacaagagcgaauccgagaccggucucuga

SEQ ID NO: 159304 - RNA, 1575 nt, Artificial Sequence
  derived and/or modified CDS sequence (opt3) from glycoprotein__RABV__JQ595317.1
augaucccccaggcccuucucuucgugccucuucugauuagcuccuugugcuuuggcaaguucccaauauacaccaucccggacaaauuagggcccuggucuccuauugauauccaccaucuguguugcccaaacaaucuagucgcugaggaagagggauguacaucacucagugguuuuagcuauauggaacugaagguuggcuacauuuccgcaaucaaagugaacggguucacuugcacgggaguagugaccgaggccgaaacauauacuaauuuugucggcuacgugaccacaaccuucaagagaaaacacuuuaggcccaugccugacgcgugucgggcugccuaugauuggaagauggcaggggacccacgcuacgaggauucucuucaaaaccccuauccugacuaccauuggcugcgaacuguuaagacaaccaaagagucguugauaaucauuucaccaagcguggccgaucucgacccguacgauaagagucugcacucccgugucuuccccgggggaaaaugccugggcaucacgauuucuagcacuuauuguuccaccaaucaugacuacacaaucuggaugccugaagaggcuagacucggcacuucaugcaacauauuuaccaauaguagggggaagaaagcaagcaagggaggucggacauguggcuucguggaugaacgcggguuauauaagucucugaaaggagccugcaagcugaaauuguguggcguaccaggucugagacuaauggacgggaccuggguuuccauucagacgucaaacgagacuaaguggugucccccugaucagcucgugaaucugcacgacuuucacagcgacgagaucgaacaucuugucguggaggaacuggugaaaaagagggaggaaugcuuggaugcucucgagaguauuaugacaaccaaaucugucuccuuccggcgccugagccacuuacgaaagcugguuccaggauuuggcaaggccuacacuaucuucaacaaaacacucauggaggcggacgcacauuauaagucggugagaaccuggaaugaaaucauucccucuaaaggcugccuuaagguagggggaaggugccacccgcacguggauggugucuucuuuaacggcauaauccuggggccugacggacauguguugauucccgagaugcaguccucacuacugcaacagcacauggaacuccuggagaguagcguuaucccacuuauacauccucuggccgaucccuccacgguguucaaagacggcgaugaagcugacgauuuugucgaggugcacuugccagacguacauaagcagguuucugguguggaucucgggcugcccggcuggggaaaguacuuacugaugagcgccggcgcacuagcuacccucauucugacaaucuuccuuaucaaauguugccggggugucaaucguacugagucagugcagcgcaguuugagagacuccggagguaaggucagcgugccuccacaaaacggcaaaguuauuucuucaugggaacuguauaagagugggggagagaccggccucuga

SEQ ID NO: 159305 - RNA, 1575 nt, Artificial Sequence
  derived and/or modified CDS sequence (opt3) from glycoprotein__RABV__JQ595319.1
augaucccccaggcccugcucagcgugccucuucugauuuccucuuugugcuuaggcaaguucccaauauacaccaucccggacaaacuggggcccuggucaccuauugauauccaccaucuaaguuguccaaacaaucucgucguugaggacgaaggaugcacaagccuguccgguuuuucuuauauggagcuuaaggugggcuacauuucggcuaucaaaguaaacggguucacuuguacgggaguggucaccgaagcagagacauauacuaauuuugugggcuacguuaccacaaccuucaagagaaaacacuuuaggcccaugccugaugccugccgggcggcucaugaauggaagauggccggugacccacgcuaugaggauucacugcaaaaccccuacccugacuaucacugguugcgaacugugaagacaaccaaagagagccucauaaucauuaguccauccgucgcagaucuggacccguacgauaagucucugcauagccguguguuccccgggggaaauugucucggcaucacgauuuccucaacuuacugcaguaccaaccacgacuauacaaucuggaugccugaagaggccagauuaggcacuagcugugauauauuuaccaauucuagggggaaacgggcuuccaagggagguaaaauuugcggcuucguagacgaacgcgggcuguacaagucacuuaagggagcauguaaauugaagcugugcggcguuccaggucuaagacucauggaugggacaugggugagcauccagaccagugacgagacgaaauggugucccccugaccagcuggucaacgugcacgauuuucauucugacgagauugaacaccuuaucguggaggaacuggucaagaaaagggaggaaugcuuggaugcccucgaguccaucaugacuacaaagagcguuucguuccggcgccugucucauuuacgaaaacuggugccaggauuuggcaaggcuuauaccauuuucaauaacacucucauggaggccgacgcgcacuacaaguccguaagaacauggaaugaaauaauccccucaaaaggcugccuuaaggucgggggaaugugucacccgcauguggguggcguguuuuucaacgggauuauccugggaccugauggcaccguuuugauacccgagaugcagaguagccuacugcaacagcacauggaacuccuggaguccucugugauuccacuuaugcauccucuggcagaccccagcacggucuucaaagaaggugaugaggccgaggacuuuguggaaauccacuugccagauguacauaagcagaucucagggguugaccucggccugcccaguuggggaaaauauuuacugauuuccgcuggcgcccuagcaacccucauccugacaauuuuccuuauaacuugcuguaggaaggugaaucggaccgagagcauccagcgugggcacggagaaucugagcgcaaggucucagugaguccucaaaacgguagagucauuagcuccugggaauuguacaaaucuggcggggagacaaaucuguga

SEQ ID NO: 159306 - RNA, 1575 nt, Artificial Sequence
  derived and/or modified CDS sequence (opt3) from glycoprotein__RABV__JQ595320.1
augaucuuccaggcccugcucuuugugccccuucugauuagcuccuugugcuuaggcaaguucccuauauacaccaucccagacaaacuggggccguggucucccauugauauccaccaucuaucauguccuaacaaucucgucguugaggacgaaggaugcacaagucugagcgguuuuuccuauauggagcuuaaggugggcuacauuucugcuaucaaaguaaacggguucacuuguacgggaguggucaccgaagcagagacauauacuaauuuugugggcuacguuaccacaaccuucaagagaaaacacuuuaggccaauacccgaugccugccgggcggcuuauaacuggaagaucgccggugacccucgcuacgaagagucgcugcaaaauccauaucccgauuaccauugguugcgaacugugaagacaaccaaagagucacucauuaucauuagcccuagugucgcagaccuggauccauacgacaagucccugcacucucgucucuucccagggggaaaauguuuaggcaucacgauaagcuccacuuauugcucaaccaaccaugauuacacaauuuggaugcccgaggaaccuagacugggcaccaguugugacaucuuuacuaauagcaaggggaaaaaggccucuaagggagguaaagugugcggcuucguagaugaaagggggcuuuauaaguccuugaaaggagcuuguaagcugaaacuaugcggcguuucaggucuccggcugauggacgggacaugggugaccauucagacgagcgaugagacuaagugguguccacccgaccagcuugucaaccugcacgacuuucacagugaugagaucgaacauuuggugguggaggaacucgucaaaaagcgcgaggaaugccuggacgcauuagagucuaucaugacaaccaaguccguuagcuucagaaggcugucguaccuccggaaacuugugccuggauuuggcaaggccuauacuauuuucaauaaaacacugauggaggcugaugcccacuacaagucuguacgcaccuggaacgaaauaaucccauccaaaggcugcuugaaggugucagaccgaugucauccccacgucgaugggguguucuuuaauggaauuauccuagguccggacggcaacguucugauaccugagaugcagaguagccuccugcaacagcacauggaacuucuggaguccucugugauucccuugaugcauccacucgcggauccuagcacggucuucaaggacggggaugaagcagaggacuuuguggagguacaucugcccgauguucacaaacagaucucaggaguggacuuaggccugccaaguugggguaaguaucuacucaugaucgccgggggccuggcuacccuugucuugauuaucuuccugauggccugcuguagaaggacaaaacggacugaaucccguccccgcggaagcggcgagucuggggaaaaggugcucgcaaccccucagccgaaaaaggucgugucaaguugggagcuguacaagagagaaggagacgcuaggcuuuga

SEQ ID NO: 159307 - RNA, 1575 nt, Artificial Sequence
  derived and/or modified CDS sequence (opt3) from glycoprotein__RABV__JQ595321.1
augaucuuccaggcccugcucuuugugccccuucugauuagcuccuugugcuuaggcaaguucccuauauacaccaucccagacaaacuggggccguggucucccauugauauccaccaucuaucauguccuaacaaucucgucguugaggacgaaggaugcacaagucugagcgguuuuuccuauauggagcuuaaggugggcuacauuucugcuaucaaaguaaacggguucacuuguacgggaguggucaccgaagcagagacauauacuaauuuugugggcuacguuaccacaaccuucaagagaaaacacuuuaggccaauacccgaugccugccgggcggcuuauaacuggaagaucgccggugacccucgcuacgaagagucgcugcaaaauccauaucccgauuaccauugguugcgaacugugaagacaaccaaagagucacucauuaucauuagcccuagugucgcagaccuggauccauacgacaagucccugcacucucgucucuuccccgggggaaaauguuuaggcaucacgauaagcuccacuuauugcucaaccaaccaugauuacacaauuuggaugccggaggaaccuagacugggcaccaguugugacaucuuuaccaauagcaaggggaaaaaggccucuaagggagguaaagugugcggcuucguagaugaaagggggcuuuauaaguccuugaaaggagcuuguaagcugaaacuaugcggcguuucaggucuccggcugauggacgggacaugggugaccauucagacgagcgaugagacuaagugguguccacccgaccagcuugucaaccugcacgacuuucacagugaugagaucgaacauuuggugguggaggaacucgucaaaaagcgcgaggaaugccuggacgcauuagagucuaucaugacaaccaaguccguuagcuucagaaggcugucguaccuccggaaacuugugccuggauuuggcaaggccuauacuauuuucaauaaaacacugauggaggcugaugcccacuacaagucuguacgcaccuggaacgaaauaaucccauccaaaggcugcuugaaggugucagaccgaugucauccccacgucgaugggguguucuuuaauggaauuauccuagguccggacggcaacguucugauaccugagaugcagaguagccuccugcaacagcacauggaacuucuggaguccucugugauucccuugaugcauccacucgcggauccuagcacggucuucaaggacggggaugaagcagaggacuuuguggagguacaucugcccgauguucacaaacagaucucaggaguggacuuaggccugccaaguugggguaaguaucuacucaugaucgccgggggccuggcuacccuugucuugauuaucuuccugauggccugcuguagaaggacaaaacggacugaaucccgucgcagagcacucggagagagcggcgaaaaggugcuggcuacuccccagccuaaaaaggucgugucuucaugggagcuuuacaagagggaaggggacgcccggcuguga

SEQ ID NO: 159308 - RNA, 1575 nt, Artificial Sequence
  derived and/or modified CDS sequence (opt3) from glycoprotein__RABV__JQ595322.1
augaucccccaggcccugcucagcgugccucuucugauuuccucuuugugcuucggcaaguuuccaauauacaccaucccggagaaauuagggcccuggucaccuauugacauccaccaucugaguuguccaaacaaucuagucguugaagaugagggaugcaacagccucuccgguuucucuuauauggaacugaaggugggcuacauuucggcuaucaaaguaaauggguuuacauguacuggaguggucacggaggcagaaaccuauacaaacuucgugggcuacguuacuaccacauuuaagagaaaacacuucaggcccaugccugacgccugccgggcggcuuauaauuggaagaccgccggugauccacgcuacgaggagucacuucauaaccccuauccugacuaccacuggcugcgaacugugaagacaaccaaagaaagccuuauaaucauuaguccauccgucgcagaucucgacccguacgauaagucucugcauagccguaucuuucccgggggaaaaugucugggcauuacgaucuccucaacuuauugcaguaccaaucacgacuacacaauauggaugccugaggaagccagacucggcacuagcugugauauuuucaccaacucuaaggggaaaagggcuuccaagggaggucggacaugcggcuuuguggacgagcgcggguuauauaagucacugaaaggagcauguaaguugaaauugugcggcguaccaggucugagacuaauggaugggaccuggguugccauccaaacgcccaaugagacuaagugguguagcccugaccagcucgugaacguccacgauuucaggagugacgaaauugagcaucuggugguggaggaacuuauccggaaacgcgaagagugccuggacgcuuuggagucuaucaugacaaccaaguccgucagcuuucgaagacucucgaaucugaggaaauuaguuccaggauucggcaaggccuacacuauuuuuaacaagacacugauggaagcggaugcacacuauaaaucugugcggaccuggaaugagauaauccccucccguggcugccucaagguagggggacgcugucauccgcacgugaacggugucuucuucaauggcauuauccuugggccugacggacacauacugauucccgaaaugcagucaaguuugcuacagcaacauauggagcugcucgaaagcuccgugaucccacugauccacccucuugccgaucccucuacgguuuuuaaagacggcgaugaggcugaggacuucguggaaguccaucugccagaugugcaccagcagguaagcgguguugacuuggggcuccccgauuggggcaaguacgugcugaugucagccggagcauuagcuaccgucaugcugacaauuuuucuaaucacuugcuguagaagggugaaacggaccgagaguauucaucagggccucggggaauccggacgaaaggucagcgugacaccucaaaacgguaagguuaugucuucaugggaguauuacaaaagugaaggcgggacucgccuguga

SEQ ID NO: 159309 - RNA, 1575 nt, Artificial Sequence
  derived and/or modified CDS sequence (opt3) from glycoprotein__RABV__JQ595323.1
augaucagccaggccgugcuguacgucccccuccuuauuccuucccugugcauaggcgaguucccaaucuauaccauuccggacaagaucgggcccuggucuccuauugauauccaccauuugucauguccaaacaauuuaguuguggaagacgagggaugcacaagucugagcgguuuuuccuacauggaacuaaaaguaggcuauauaucugcuaucaaggugaacggguucacuuguacgggagucgugaccgaggcagaaacauacacuaauuuuguuggcuaugugaccacaaccuucaaaagaaagcacuuuaggcccaugccugaugccugccgggcggcuuacaacuggaaaauggccggugacccacgcuaugaggagucgcuccaaaaucccuacccugauuacaacuggcugcgaacugucaagacaaccaaggaaucacuuauuaucauuagcccaaguguggcagaccuggauccguaugacaaauccuugcauucucguguauuccccaaugggaagugucucggaguuacgaucagcuccacuuacugcucaaccaaccacgauuauacaauauggaugccugaggaagccagacugggcaccaguugugacauuuuuacuaauagcaaaggcaagagggcuucuaaagggggacggacaugcgguuucguggaugagcgcggccuguacaagucccucagaggggcauguaaguuaaaacugugcggagucccaggccuuagguugauggacgguaccugggugucaauccagacgagcgaugacacuaaguggugucccccugaccagcuggugaacguccaugauuuucacagugacgagauugaacaccuaguuguggaggaacucguaaagaaacgggaggaaugccuggaugcccuugagucuaucaugacaaccaaauccgugagcuuccgccgacugucgcauuugagaaagcucgucccaggguuuggaaaggcuuauacuaucuucaauaaaacacugauggaggccgacgcgcacuacaagucuauucagaccuggaacgaaauaauccccuccaaaggcugcuuaaaggugggcgggaugugucauccgcacguugauggaguguuuuucaaugguauuauccugggcccugacgggaacguccucauacccgagaugcaaucaagucuucugcagcagcacauggaauugcuagagagcuccgugauuccacugaugcauccucucgcagaucccucuacgguauucaaagacggagaugaagccgaggacuuuguugaggugcaucugccagauauccacaagcaggucagcggcaucgaccuuggucugcccgacugggggaaauauuugcucaugucagcuggcgcccuggcaauuuuacugcuaaccaucuuccucaugacaugcuguaggcgggugaaucguacuaagagugcucaacgcgauccuggagaacugggcagaaaggucuccgccaccccacagaacaggaaagugauuagcucuugggagcuuuacaagucagggggagacacacgguuguga

SEQ ID NO: 159310 - RNA, 1575 nt, Artificial Sequence
  derived and/or modified CDS sequence (opt3) from glycoprotein__RABV__JQ595324.1
augaucccccaggcccugcucagcgugccucuucugauuuccucuuugugcuucggcaaguuuccaauauacaccaucccggagaaauuagggcccuggucaccuauugacauccaccaucugaguuguccaaacaaucuagucguugaagaugagggaugcaacagccucuccgguuucucuuauauggaacugaaggugggcuacauuucggcuaucaaaguaaauggguuuacauguacuggaguggucacggaggcagaaaccuauacaaacuucgugggcuacguuacuaccacauuuaagagaaaacacuucaggcccaugccugacgccugccgggcggcuuauaauuggaagaccgccggugauccacgcuacgaggagucacuucauaaccccuauccugacuaccacuggcugcgaacugugaagacaaccaaagaaagccuuauaaucauuaguccauccgucgcagaucucgacccguacgauaagucucugcauagccguaucuuucccgggggaaaaugucugggcauuacgaucuccucaacuuauugcaguaccaaucacgacuacacaauauggaugccugaggaagccagacucggcacuagcugugauauuuucaccaacucuaaggggaaaagggcuuccaagggaggucggacaugcggcuuuguggacgagcgcggguuauauaagucacugaaaggagcauguaaguugaaauugugcggcguaccaggucugagacuaauggaugggaccuggguugccauccaaacgcccaaugagacuaagugguguagcccugaccagcucgugaacguccacgauuucaggagugacgaaauugagcaucuggugguggaggaacuuauccggaaacgcgaagagugccuggacgcuuuggagucuaucaugacaaccaaguccgucagcuuucgaagacucucgaaucugaggaaauuaguuccaggauucggcaaggccuacacuauuuuuaacaagacacugauggaagcggaugcacacuauaaaucugugcggaccuggaaugagauaauccccucccguggcugccucaagguagggggacgcugucauccgcacgugaacggugucuucuucaauggcauuauccuugggccugacggacacauacugauucccgaaaugcagucaaguuugcuacagcaacauauggagcugcucgaaagcuccgugaucccacugauccacccucuugccgaucccucuacgguuuuuaaagacggcgaugaggcugaggacuucguggaaguccaucugccagaugugcaccagcagguaagcgguguugacuuggggcuccccgauuggggcaaguacgugcugaugucagccggagcauuagcuaccgucaugcugacaauuuuucuaaucacuugcuguagaagggugaaacggaccgagaguguccaucagggccucggggaauccggacgaaaggugagcguugccccucaaaacgguaaggugaugucuucaugggaguauuacaaaaguggcgggggaacacgccuguga

SEQ ID NO: 159311 - RNA, 1575 nt, Artificial Sequence
  derived and/or modified CDS sequence (opt3) from glycoprotein__RABV__JQ595325.1
augaucccccaggcccugcucagcgugccucuucugauuuccucuuugugcuucggcaaguuuccaauauacaccaucccggagaaauuagggcccuggucaccuauugacauccaccaucugaguuguccaaacaaucuagucguugaagaugagggaugcaacagccucuccgguuucucuuauauggaacugaaggugggcuacauuucggcuaucaaaguaaauggguuuacauguacuggaguggucacggaggcagaaaccuauacaaacuucgugggcuacguuacuaccacauuuaagagaaaacacuucaggcccauggccgacgcgugccgggcugccuauaauuggaagaccgcaggggauccucgcuacgaggagucacuucauaacccauaucccgacuaccacuggcugcgaacugugaagacaaccaaagaaagccuuauaaucauuaguccuuccgucgccgaucucgacccauacgauaagucucugcauagccguaucuuuccggguggaaaaugucugggcauuacgaucuccucaacuuauugcaguaccaaucacgacuacacaauauggaugcccgaggaagcuagacucggcacuagcugugauauuuucaccaacucuaaggggaaaagggcauccaagggaggucggacaugcggcuuuguggacgagcgcggguuauauaagucacugaaaggagccuguaaguugaaauugugcggcguaccuggucugagacuaauggaugggaccuggguugcuauccaaacgccaaaugagacuaagugguguagccccgaccagcucgugaacguccacgauuucaggagugacgaaauugagcaucuggugguggaggaacuuauccggaaacgcgaagagugccuggacgccuuggagucuaucaugacaaccaaguccgucagcuuucgaagacucucgaaucugaggaaauuaguuccuggauucggcaaggcguacacuauuuuuaacaagacacugauggaagcagaugcccacuauaaaucugugcggaccuggaaugagauaaucccaucccguggcugccucaagguagggggacgcugucauccccacgugaacggugucuucuucaauggcauuauccuugggccggacggacacauacugauuccugaaaugcagucaaguuugcuacagcaacauauggagcugcucgaaagcuccgugaucccccugauccacccacuugcugauccuucuacgguuuuuaaagacggcgaugaggccgaggacuucguggaaguccaucugcccgaugugcaccagcagguaagcgguguugacuuggggcucccagauuggggcaaguacgugcugaugucagcaggagcuuuagccaccgucaugcugacaauuuuucuaaucacuugcuguagaagggugaaaaagaccgagaguauucaucagggccccggggaauccggacggaaggucagcgugacaccucaaaacgguaaaguuaugucuucaugggaguauuacaagaguggcgggggaacucgacucuga

SEQ ID NO: 159312 - RNA, 1575 nt, Artificial Sequence
  derived and/or modified CDS sequence (opt3) from glycoprotein__RABV__JQ595326.1
augaucccccaggcccuguuguucgugccucuucuguuuccaagccucugcuuaggcaaguucccgauuuacaccauacccgagaaacuggggccuugguccccaaucgacauucaccaucuaucuugucccaacaaucucgucguugaagaugagggaugcgacucacugagugguuuuagcuauaucgaacuuaaggugggcuacauuuccgcuaucaaaguaaacggguucacauguacuggaguggucacggaggcagaaaccuauacaaauuuugugggcuacguuacuaccacauucaagagaaaacacuuuaggccuaugccagaugccugccgggcggcuuauaacuggaagaccgccggugacccccgcuacgaggagucucugcauaauccuuauccagauuaccacugguugcgaacugugaagacaaccaaagaaucgcucauaaucauuucaccgagcgucgcagaccuggaucccuacgacaagagucugcauucccguguguucccugggggaaaaugucucggcaucacgguaucuagcacuuauugcuccaccaaccacgauuacacaauuuggaugccagaggaagccagauuaggcacuucaugugacaucuuuaccaauaguaaggggaaaagggcuagcaagggaggucggacaugcggcuucguugaugagcgcgggcuguauaagucucuuaaaggagcauguaaguugaaacugugcggcgugcccggucuaagacucauggacgggaccugggucgccauacaaacgccuggagagacuaagugguguuccccagaucagcuggugaaccuucacgacuuuaggucagacgaaauugagcaucugguggucgaagaguugaucaaaaagcgggaagagugccucgaugcucuggagagcauuaugacaaccaaaaguguuucuuuccgccgauuauccaaucugagaaagcucgugcccggcuuuggcaaggccuacacuaucuucaacaaaacacuuauggaagcggacgcacacuauaagagcguaaggaccugggaugagaucauuccgucgaaagggugccugcgggugggaggucguugucauccucacgucaauggcguguucuuuaacgggauaaucuugggacccgacggccacguucuaauuccagaaaugcagucuucccugcuccagcaacauauggagcugcuugaaucaagugugaucccucugauacaccccuuggccgauccaagcacggucuucaaggacggugaugaggcugaggacuuuguggaaguacaucuccccgauguucacaaacagguguccggggucgaccugggcuuaccuaauuggggaaaguacgugcugaugucugccggcguccuagcaaccgugauucucacaaucuuccugcuuacuugcugucgcagaguuaacaggaccaagccaaaacagcagagcuuggaggaaucagggcggaaggugaguguaacaccgcaaaauggaaaagucauguccagcugggaguauuacaagucugaaggucgaacuucacuguga

SEQ ID NO: 159313 - RNA, 1575 nt, Artificial Sequence
  derived and/or modified CDS sequence (opt3) from glycoprotein__RABV__JQ595327.1
augauccugcaggcccuccuuuucgugccccuguugauuagcuccuuaugcuuuggcgacuucccuauauacaccaucccagagaagcuggggccguggucucccauugauauccaccaucuaucauguccuaacaaucucgucguugaagacgagggaugcaguagccuguccgguuuuucuuauauggaacuuaaagugggcuacauuucggcuaucaagguaaacggguucacauguacuggaguggucacggaggcagaaaccuauacaaauuuugugggcuacguuacuaccacauucaaaagaaagcacuuuaggccaaugcccgaugccugccgggcggcuuauaacuggaaaaccgccggugacccucgcuacgaggagucacugcaaaauccauaucccgauuaccauugguugcgaacugugaagacaaccaaggaaagccucgucauaaucaguccuuccguggcagaccuggauccauacgacaaaucucugcacagccguguauucuccgaugggaagugucucggaauuacgaucucaaguacuuauugcagcaccaaccaugacuacacaauuuggaugccggaggaagccagauuaggcacuucuugugauaucuuuaccacauccaggggcaaacgggcuucaaaagggggaaagaccugcgguuucguugacgagcgcggccuguauaagagccuuaagggggcauguaaauugaagcugugcggagugaguggccuaagacucauggaugguacgugggucucuauacaggcccccgacgaggcuaaaugguguuccacugaccagcuggugaauauucacgauaucaggagcgacgaaauugagcaccuuguggucgaggaacugguuaagaaacgggaagagugcuuggaugcccucgagucgaucaugacaaccaagucuguguccuuucgccgacugucacauuuaagaaaacugguaccuggguucggaaaggcguacacuaucuuuaacaagacacucauggaagcagacgcccacuauaaaagugugaggaccuggagcgaggucauuccauccaagggcugccuuucugugggcgggcggugucauccccacgaaaauggaguuuucuucaacgguauaauccugggcccugaugggagcguguugauuccagagaugcagucaagucuacugcaacagcacauggaacuccuggaguccagcgucaucccccuuaugcauccgcuggcuaauccuucuacgguguuuaaagacggagaugaggccgaagacuucguagagguucacuugcccgaugugcaggaacagauaucaggcgucgaccucggucugccaaacugggggaaguacgugaugaugagugcaggcgcuuuagccauucugaugcuaaccaucuuucucaugacaugcugucgucgcgcgaauagaacuaggagcacccaacgggaucugggaggccuugagcgaaaagucuccgugccucccaaggacgggcgcguuaugucuucgugggaaagcuauaaguccggaggugagacaucauuguga

SEQ ID NO: 159314 - RNA, 1575 nt, Artificial Sequence
  derived and/or modified CDS sequence (opt3) from glycoprotein__RABV__JQ595328.1
augaucacccaggcccuccuguucgugccccuucugauuagcuccuugugcuuaggccaauuuccuauauacacaaucccagacaagcuggggccguggucucccauugauauccaccaucuaucauguccuaacaaucucgucguugaggacgaaggaugcaacagucugagcgguuucuccuauauggagcuuaaagugggcuacauuucuucgaucaagguaaauggguuuacuuguacgggaguggucaccgaagcugagacauauacuaacuucgugggcuacguuaccacaaccuuuaaaagaaagcacuucaggccaaugcccgaugcaugccgggccgcguauucauggaaaauggcuggugacccucgcuacgaagagagccugcauacuccauaucccgauuaccacugguugcgaacagugaagaccacgaaggagagucucgucauaaucuccccuucuguggccgaccuggauccauacgacaaaagccugcauucccguguauuuucagggggaaagugucucggcauuacuaucaguagcaccuauugcucuacaaaucacgauuacacuauuuggaugccggaagaggcaagauuaggcaccuccugugacaucuucacaaacucaaaagggaagagggccagcaaaggaggucggaccugcggcuuuguugaugaacgcgggcuguauaagagucuuaagggagcuuguaaauugaagcugugcggcgugcccggucuaagacucauggacgggacgugggucucuauacagacuuccgaugagacaaaaugguguccuccagaccagcuggugaauauucacgacuucaggagcgaugagaucgaacaucuuguggucgaggaacugguuaagaaacgggaggaaugcuuggacgcacucgagucgauuaugaccacuaagucuguguccuuucgccgacugucacacuuaagaaaacugguacccggauucggcaaggccuacacaaucuuuaacaagacccucauggaggcugaugcccauuauaaaagugugaggacguggaaugaaaucauuccuagcaagggcugccuuuccgucgggggacggugucacccacacgugaacgguguuuucuucaauggcauaauccuggggcccgacggaucuguguugauuccggagaugcagagcucacuacugcaacagcauauggaacuccuggagaguuccgucaucccucuuaugcacccccuggcgaacccaagcaccguguuuaaagauggcgacgaagcagaggauuucguagagguucauuugccugacgugcaggaacaggucucugguguggaucucgggcugcccaauuggggcaaguacgucuuaaugucagccggagugcuggcuauacuaauucucacaaucuuucugaugaucugcugucgucgcgccaacagaacuaaaaguauucaacagggcccaggggagagcggaaggaagguuuccgugcccccucagaaugguaagguaaucucuucgugggagagcuucaaauccggcggggaaacccggcuuuga

SEQ ID NO: 159315 - RNA, 1575 nt, Artificial Sequence
  derived and/or modified CDS sequence (opt3) from glycoprotein__RABV__JQ647510.1
augaucccccaggugcugcuguucgucccucuucugguuuuuagcuccugcuucggcaaguuuccaauuuacaccauaccggacaaauuggggcccuggucuccuaucgauauucaccauuuaucauguccaaacaaucuggugguagaggacgaaggaugcacaaaccuaagugguuucagcuauauggagcucaaggugggcuacaucuccgccauuaaagucaauggguuuacuuguacgggagugguuaccgaagcugagacauauacuaacuucgugggcuacgucaccacaaccuuuaagagaaaacacuucaggcccaugccugaugcaugccggacugccuauaauuggaagauggcgggugacccacgcuacgaagagucucugcauaaccccuauccugauuaccacuggcuucgaacagugaagaccacgaaagagucgcugguaaucauaucaccaagcguugcugacuuggauccguacgacaagagucuccauucccguguguuucccgggggaaaauguucuggcaucacugucagcuccaccagaugcucaacaaaucacgauuauacuauuuggaugccugaaaacccaaggcugggcaccaguugugacaucuucacaaauagccgggggaagcgcgccucuaaaggagguaagaccugcggcuuuguggaugagagagggcuguacaagucccucaaaggagcauguaaguuaaaacugugcggcgugcuugguuugaggcugauggacgggacgugggucgccauucaaacuucagaugaaaucaagugguguagccccgaccagcuaguuaaccuccacgacuuccauagugaugagauagagcaccuggugguagaggaacuugugaaaaagcgggaagagugccuggacgcuuuggaaacaauuaugaccacuaaaucugucuccuuucgccgacucagccaucugagaaaguuagugccuggauucggcaaggcauauacaaucuucaauaaaacccugauggaggccgaugcucacuacaagucgauuaggacguggaacgagaucaucccaucuaaaggcugccuccggguugggggacguugucacccccaugugaauggugucuuuuucaacggcauuauacuugggccggacggacacgugcugaucccugaaaugcaguccucauugcuacaucagcacauggagcugcucgaaaguagcguaauuccccugaugcauccacuugccgauccuuccaccguuuuuaaggacggcgaugaggcggaagacuucguggagguccaccuccccgaugugcacaaacaaaucucuggugucgacuuggggcucccaaauuggggcaaguaugugcugauaagcgcaggaucauuaacagcccugaugcuaaugauuuuucucaugacuugcugucgcaagaccaacagagcugagaguauccagcauucccccggcgaaacagggaggaaaguuagcgugacuucucacaacggacggguaaucucaaguugggagagcuacaaguccgguggcgaaaccaaacuguga

SEQ ID NO: 159316 - RNA, 1575 nt, Artificial Sequence
  derived and/or modified CDS sequence (opt3) from glycoprotein__RABV__JQ685892.1
augaucccccaggcccugcucuacgugccucuucugauuagcuccuugugcuucggcggguuuccaauauauaccaucccggacaaguuaggacccuggucuccuauugauauccaccaucugucauguccaaacaaucuagucguugaggacgaagguugcacaagucucagcggcuucuccuacauggagcugaaagugggguauauuucugcuaucaagguaaacggauuuacuuguacgggcguggucaccgaagcagagacauacacuaauuucguggguuauguuaccacaaccuuuaaaagaaagcacuucaggcccaugccugaugccugccgggcggcuuacaacuggaaaauggccggggacccacgcuaugaagagucgcuucaaaaucccuacccugauuacucauggcugcgaacugugaagacaaccaaggagagcuugauaaucauuaguccauccgucgcagaccucgauccguaugacaaaucucugcauagccguguguuucccggaggcaagugucugggcaucacgauuuccucaacuuacugcaguaccaaccacgauuauacaaucuggaugccugaagaggccagacucgggacuagcugugacauauucaccaauucuaggggaaaacgggcuuccaaggguggcaaaacaugcggguuuguagaugaacgcggauuauacaagucacugaagggcgcauguaaacuuaaguugugcgguguuccagggcugagacuaauggacggaaccugggugacgauucagacuagcgaugagacaaaauggugucccagugaccagcucgucaaccugcaugacuuccacucugaugagaucgaacaccuugugguggaggaacuggucaagaaaagggaggaaugcuuggacgcccucgaguccauuaugaccacuaagagcguuucguuucggcgccugucucauuuacgaaaacuggugccuggcuucggcaaggcuuauacaaucuuuaauaagacccucauggaggccgaugcgcacuacaaauccaucagaacguggaacgaaauuauaccaucaaaggggugccuuaaaguaggagguaggugucauccccacguggacggcgucuucuucaaugggaucauucugggaccggauggcaacguguugaucccugagaugcagaguagccuacugcaacagcacguugaacuccuggaguccucugugauaccccuuaugcauccacuggcagacccuagcaccgucuuuaaggauggugacgaagccgaggauuucguggagguacacuugcccgacauucauaaacagguuucagggguggaucucggccugccaaauuggggaaaguauuuacugaugagugcuggcgcccuagcaacacucaugcugaucaucuuucuuauggcuugcugucggcgugccaaccgcacugaauccauucagagagaccccggggagagcggaaggaaggucucuaucccuucacaagacgguaaagugauuaguagcugggaauuguacaaguccggcggggagacccggcuguga

SEQ ID NO: 159317 - RNA, 1575 nt, Artificial Sequence
  derived and/or modified CDS sequence (opt3) from glycoprotein__RABV__JQ685893.1
augaucccccaggcccugcucuacgugccucuucugauuccaaguuugugcuucggcggguuuccgauauauaccauccccgacaaguuaggaccuugguccccaauugauauccaccaucugucuugucccaacaaucuagucguugaggacgaagguugcacaucacucaguggcuucagcuacauggagcugaaagugggguauauuuccgcuaucaagguaaacggauuuacuuguacgggcguggucaccgaagcagagacauacacuaauuucguggguuauguuaccacaaccuuuaaaagaaagcacuucaggccuaugccagaugccugccgggcggcuuacaacuggaaaguggccggggacccccgcuaugaagagucucuucaaaauccuuacccagauuacucguggcugcgaacugucaagacaaccaaggagucauugauaaucauuagcccgaguguggcagaccucgaucccuaugacaaaucccugcauucucguguauuuccuggaggcaagugucugggcaucacgauuagcuccacuuacugcucaaccaaccacgauuauacaaucuggaugccagaagaggccagacucgggacuagcugugacauauucaccaauagcaggggaaaacgggcuucuaaggguggcaaaacaugcggguuuguugaugaacgcggauuauacaagucccugaagggcgcauguaaacuuaaguugugcggugugcccgggcugagacuaauggacggaaccugggucacgauucagacuucagaugagacaaaaugguguccuagcgaccagcucgugaaccugcaugacuuccacagugaugagaucgaacaccuuguggucgaggaacugguuaagaaaagggaggaaugcuuggacgcccucgagucuauuaugaccacuaaguccgugagcuuucggcgccugucgcauuuacgaaaacugguaccaggcuucggcaaggcuuauacaaucuuuaauaagacccucauggaggccgaugcgcacuacaaaucuaucagaacguggaacgaaauuauacccuccaaggggugccuuaaagugggagguaggugucauccgcacgucgacggcguguucuucaaugggaucauucugggaccugauggcaacguuuugauccccgagaugcagucaagucuacugcaacagcacguggaacuccuggagagcuccgucauaccacuuaugcauccucuggcagaccccucuaccguguuuaaggauggugacgaagccgaggauuucguagagguucacuugccagacauucauaaacaggugagcggggucgaucucggccugcccaauuggggaaaguauuuacugaugucagcuggcgcccuagcaacacucaugcugacuaucuuucuuaugaccugcugucggcgugcuaaccgcacagaaaguauccagagagacccuggggaguccggaaagaaagugagcauuacuucucaagacgguaaggucaucucaaguugggaauuguacaaaagcggcggggagaccaggcuguga

SEQ ID NO: 159318 - RNA, 1575 nt, Artificial Sequence
  derived and/or modified CDS sequence (opt3) from glycoprotein__RABV__JQ685894.1
auguucccccaggcccugcucuuugugucgcuucugaucuccucuuugugcuucggcaaguuuccuauuuacaccauaccagacaaauuagggccguggucacccaucgauauucaccaucugaguuguccuaacaaucuagucguugaggacgaaggaugcacaaaccucagcgguuucuccuauauggagcugaaggugggcuacaucucugcuauuaaaguaaauggguuuacuuguacgggaguggucaccgaagcagagacauauacuaacuucaucggcuacgugaccacaguuuuuaagagaaaacacucgaggccaacccccgaugccugccgggcggcuuauaauuggaagauggccggugacccucgcuacgaagagucacuucauaacccauaucccgauuaccacuggcugcgaacugugaagacaaccaaagagagcuuggucauaaucaguccuuccguggcagaccucgauccauacgacaagucucugcauagccguguauucccguccgggaaauguucaggaauuacgguuaguagcacuuauugccugaccaaucacgaauacacaaucuggaugcccgagaaccucagauuaggcacuucuugugauauuuuuaccaauuccaggggcaagcgggccucacgcgggagcaaaacaugcggauucguggacgaaagaggucuguauaagagucuuaagggcgcuuguaaauugaagcugugcgggguccuaggacucaggcugauggauggcaccuggguggcaaugcaaacgucugacgagacuaaaugguguccuccagaucagcuugugaaccugcacgacuuucgguccgacgagaucgaacauuuggucguugaggaacucgugaagaaacgcgaggaaugccuggaugccauagagagcauuaugacaaccaagucgguaucuuuccgaagauuaucccaccugaggaaacucgugcccgguuuugggaaggcuuacacuaucuucaauaagacacuuauggaggccgacgcgcauuauaaaucaguccggaccuggaacgaaauuaucccuaguaagggaugccugcgugugggcggccgcugucacccacacguuaaagggguguucuuuaauggaaucauuuugggucccgauggccauguccuaauaccggagaugcagagcucccugcuccagcaacacauggaacugcuugagucuagcaucauuccucugaugcaucccuuggcagacccaucagccguguucaaggauggggacgaagcugaggauuuuguagagguucaccucccugacgugcauaaacaggucaguggaguggaucugggcuuacccaacugggguaaguacauccuggucuccgccggggcacuaauagcucucaugcugauuaucuuccuuaugacgugcuuuagaggcuucaauuugccaaagagcacccagcacucucugggagaaacagagaggaaaaugucagugacuccccagaguggcaagaucauuagcuccugggaaucuuauaaaagcgggggagagacccggcucuga

SEQ ID NO: 159319 - RNA, 1575 nt, Artificial Sequence
  derived and/or modified CDS sequence (opt3) from glycoprotein__RABV__JQ685896.1
augaucccccaggcccugcucuacgugccucuucugauuagcuccuugugcuucggcggguuuccaauauauaccaucccggacaaguuaggacccuggucuccuauugauauccaccaucugucauguccaaacaaucuagucguugaggacgaagguugcacaagucucagcggcuucuccuacauggagcugaaagugggguauauuucugcuaucaagguaaacggauuuacuuguacgggcguggucaccgaagcagagacauacacuaauuucguggguuauguuaccacaaccuuuaaaagaaagcacuucaggcccaugccugaugccugccgggcggcuuacaacuggaaaauggccggggacccacgcuaugaagagucgcuucaaaaucccuacccugauuacucauggcugcgaacugugaagacaaccaaggagagcuugauaaucauuaguccauccgucgcagaccucgauccguaugacaaaucucugcauagccguguguuucccggaggcaagugucugggcaucacgauuuccucaacuuacugcaguaccaaccacgauuauacaaucuggaugccugaagaggccagacucgggacuagcugugacauauucaccaauucuaggggaaaacgggcuuccaaggguggcaaaacaugcggguuuguagaugaacgcggauuauacaagucacugaagggcgcauguaaacuuaaguugugcgguguuccagggcugagacuaauggacggaaccugggugacgauucagacuagcgaugagacaaaauggugucccagugaccagcucgucaaccugcaugacuuccacucugaugagaucgaacaccuugugcuggaggaauuggugaagaaaagggaggaaugccucgacgcccuggaguccauuaugaccacuaagagcgucucguuucggcgcuuaucucaucugcgaaaacucguuccuggcuucggcaaggcuuauacaaucuuuaauaagacccuuauggaggccgaugcgcacuacaaauccaucagaacguggaacgaaauuauaccaucaaaggggugccugaaagugggagguaggugucauccccacguagacggcguguucuucaaugggaucauuuugggaccggauggcaacguccuaaucccugagaugcagaguagccugcuccaacagcacguggaacugcuugaguccucuguuauaccccugaugcauccauuggcagacccuagcaccguguuuaaggauggugacgaagccgaggauuucgucgaggugcaccuccccgacauucauaaacagguaucagggguugaucugggcuuaccaaauuggggaaaguaucugcuaaugagugcuggcgcccucgcaacacugaugcuuaucaucuuuuugauggcuugcugucggcgugccaaccccacugaauccauucagcgcgacccuggggagagcggaagaaaggugucuaucccaucacaagacgguaaagucauuaguagcugggaacuguacaaguccggcggggagaccaggcucuga

SEQ ID NO: 159320 - RNA, 1575 nt, Artificial Sequence
  derived and/or modified CDS sequence (opt3) from glycoprotein__RABV__JQ685897.1
augaucccccaggcccugcucuacgugccucuucugauuagcuccuugugcuucggcggguuuccaauauauaccaucccggacaaguuaggacccuggucuccuauugauauccaccaucugucauguccaaacaaucuagucguugaggacgaagguugcacaagucucagcggcuucuccuacauggagcugaaagugggguauauuucugcuaucaagguaaacggauuuacuuguacgggcguggucaccgaagcagagacauacacuaauuucguggguuauguuaccacaaccuuuaaaagaaagcacuucaggcccaugccugaugccugccgggcggcuuacaacuggaaaguggccggggacccacgcuaugaagagucgcuucaaaaucccuacccugauuacucauggcugcgaacugucaagacaaccaaggagagcuugauaaucauuaguccauccguggcagaccucgauccguaugacaaaucucugcauagccguguauuucccggaggcaagugucugggcaucacgauuuccucaacuuacugcaguaccaaccacgauuauacaaucuggaugccugaagaggccagacucgggacuagcugugacauauucaccaauucuaggggaaaacgggcuuccaaggguggcaaaacaugcggguuuguugaugaacgcggauuauacaagucacugaagggcgcauguaaacuuaaguugugcggugugccagggcugagacuaauggacggaaccugggucacgauucagacuagcgaugagacaaaauggugucccagugaccagcucgugaaccugcaugacuuccacucugaugagaucgaacaccuuguggucgaggaacugguuaagaaaagggaggaaugcuuggacgcccucgaguccauuaugaccacuaagagcgugucguuucggcgccugucucauuuacgaaaacugguaccuggcuucggcaaggcuuauacaaucuuuaauaagacccucauggaggccgaugcgcacuacaaauccaucagaacguggaacgaaauuauaccaucaaaggggugccuuaaagugggagguaggugucauccccacgucgacggcguguucuucaaugggaucauucugggaccggauggcaacguuuugaucccugagaugcagaguagccuacugcaacagcacguggaacuccuggaguccucugucauaccccuuaugcauccacuggcagacccuagcaccguguuuaaggauggugacgaagccgaggauuucguagagguucacuugcccgacauucauaaacaggugucaggggucgaucucggccugccaaauuggggaaaguauuuacugaucagugcuggcgcccuagcaacacucaugcugacuaucuuucuuaugaccugcugucggcgugcuaaccgcacagaauccauucagagagaccccggggagccuggaaagaaagugagcaucacuucucaagacgguaaggucauuucaaguugggaauuguacaaaagcggcggggagaccaggcuguga

SEQ ID NO: 159321 - RNA, 1575 nt, Artificial Sequence; identical to SEQ ID NO: 159316
  derived and/or modified CDS sequence (opt3) from glycoprotein__RABV__JQ685898.1

SEQ ID NO: 159322 - RNA, 1575 nt, Artificial Sequence
  derived and/or modified CDS sequence (opt3) from glycoprotein__RABV__JQ685899.1
auggugccccaggcccuccuguucgucccucuucugguuuuuccaagcugcuugggcaaguucccgaucuacaccauucccgacaaauuagggccuugguccccaauagauauccaccaucugucuugucccaacaaucuagugguagaggacgaaggaugcaacaaucucucagguuuuaguuauauggagcugaaggugggcuacauuagcgcuaucaaagucaacggguucacauguacuggagugguuacggaagcagagaccuauacaaauuuugugggcuacgucacuaccacauucaagagaaaacacuuuaggccuaccccagaugccugccgggcggcuuauaacuggaagauggccggugacccccgcuacgaagagucccuucauacuccuuauccagauuaccacuggcugcgaacagugaagaccacgaaagagucuuugguaauuaucucgccgucaguugcagaccucgaucccuacgacaagagccugcauagucguguguucccuuccgggaaauguucuggaaugacugucagcucaaccugcuguuccacaaaucacgauuauacuauauggaugccagaaaaccccagacugggcaccaguugcgacaucuuuacaaauagcaggggcaagcgggccucuaaaggguccaagaccuguggauucguggaugagcgcggucucuacaagucauuaaaaggcgcuugcaagcugaaacuuugugggguguugggacugagacuaauggacggcacgugggucgcaaugcaaauuagcgaugaaacuaaguggugcccuccagaccagcucguuaaccugcacgacuuuaggagugaugagaucgagcaucuugugguagaggaacuggugaaaaagcgggaagagugcuuggacgcccucgaaucuauuaugacaaccaaauccgucagcuuccgccgacugucgcacuuaagaaagcuggugcccgguuuugggaaggcuuauacuaucuucaauaggacacucauggaggccgaugcgcauuacaaaucuguucggaccuggaacgaggugauaccguccaagggaugucuucgugucggcggccgcugccacccucacgugaaugggguauucuuuaacggaauuauccugggucccgacggccauguuuugauuccagaaaugcagucaagucuacugcagcaacacauggagcuccuggaaagcuccgugaucccucuuaugcauccccuggcaaauccaucuacggucuucaaagagggggaugaagccgaggacuuuguggagguccacuugcccgaugugcauaagcagguuagcggaguggaccucggccugccuaacugggguaaauauguauuaaugucagcuggggcccugaucgcacuaaugcucauuauauuccugaugaccuguugcagaagggucagucggccagaauccaugcagcgaagccuuggcggaacaggccgcaaggugucugcugccucacagagugggaagguuaucagcuccugggagucuuacaaaucgggaggugaaacuagauuguga

SEQ ID NO: 159323 - RNA, 1575 nt, Artificial Sequence
  derived and/or modified CDS sequence (opt3) from glycoprotein__RABV__JQ685900.1
augaucccccaggcccuccuguucgugccucuucugauucccagcuugugcuuaggcgaguuuccgauauacaccauccccgacaagcuggggccuuggauuccaaucgauauucaccaucuauccugucccaacaaucucgucgcugaaaacgacggaugcaauucucugucagguuucaguuauauggagcuuaaaguuggcuacaucagcgcaauaaaggugaacggguuuacauguacuggaguagugacggaagccgagaccuauacaaauuucgucggcuacgugacuaccacauuuaaaagaaagcacuucaggccuaugccagaugcgugccgggcugcccaugacuggaaaauggccggugauccccgcuaugaagacucccugcaaaacccuuacccagauuaucacugguugcgaaccguuaagacuacaaaggagucucucgugaucauuucgccgucagucgccgaccuggaucccuacgacaaaagccugcauagucguguguuuccuuccgggaagugucucggaaucaccguaucuagcacguacugcuccacuaaucacgauuauaccauuuggaugccaguugagcccagauuaggcacaucaugugacaucuucacuaacaguaggggcaaacgggcuagcaaagggggaaaagugugcgguuuugucgaugaacgcggccuguacaagucucuuaagggggcauguaaauugaagcugugcggagugccuggcauaagacuaauggacgguaccuggguguccauucagacaucagaggacaucaaaugguguccacccgauaggcucgucaaucugcacgacuuccauagcgaugaaauugagcaccuuguuguggaggaacugaucaagcggcgcgagaacugcuuggacgcccucgaaaguaucaugaccacgaaaucuguauccuuucgaagacugagccauuuaaggaagcuggugccgggguucggaaaggcuuauacuauuuuuaauaagacacucauggaggccgaugcgcacuacaagucggucaaaaccuggaacgaagugauaccuucuaagggcugccuugagguuggcgggcggugucacccaccagugaauggagucuucuucaacgguaucauucugggcccugacgggaauguguugauccccgagaugcaguccucacuacugcagcaacauauggaacuccuggagaguagcguaauaccacuuaugcacccccuggcagauccuuccacuguuuuuaaagaaggagacgaggccgaagauuucguggagguccauuugccagacgugcacaagcaggucucugauguggaccucggccugccgagcugggguaaauauuuacugaugucagcuggggcccuagcaauucucauccuggcuaucguucuuauuaucugcugucgucgcgugaacaagacaggcaguacccagagaggacauagggaguccggcgggaagaugagcguagcaccccagaacggaaaaauuauaucuucaugggaauuguacaagagugagagcgaaacgggucuguga

SEQ ID NO: 159324 - RNA, 1575 nt, Artificial Sequence
  derived and/or modified CDS sequence (opt3) from glycoprotein__RABV__JQ685901.1
auggugcccuggguccuccuguucguuccuuuucuuaucagcucccugugcuucggcaaguuuccaauuuacaccauaccggacaaauuggggcccuggucuccuaucgauauucaccauuuaucauguccaaacaaucuggugguagaggacgaaggaugcaacagucuaagcgguuucuccuauauggagcucaaggugggcuacaucucugccauuaaagucaauggguuuacauguacuggagugguuacggaagcugagaccuauacaaacuucgugggcuacgucacuaccacauuuaagagaaaacacuucaggcccaugccugaugcaugccggucggccuauaauuggaagauggcgggugacccacgcuacgaagagucacugcauaaccccuauccugauuaccacuggcuucgaaccgugaagacuacaaaagagagccugaucauaaucaguccauccguagcugacuuggauccguacgacaagucucuccauagccguauuuuucccgggggaaaauguaccggccugacgguuuccucaacuuauugcaguaccaaucacgauuacacaaucuggaugccugaaaaggccggccuggggacuagcugugacauuuucaccaacucuaaaggaaagagagcauccaaggguggcaaaacaugcggguuuguggaugagaggggacucuauaagucauuaaaaggcgccuguaagcugaaacuuugcggugucagcggguugcggcugauggacggaaccuggguggcuauccagacgcuagaugaaacuaagugguguaguccagaccaacucgugaaucugcacgacuuccauucugaugagcuugagcaccuggucguugaagaguuggugcgcaaaagagaagagugccucgacgcacuggaauccauaaugacaaccaagagcguaucguuuaggcgguuaucucaucugcgcaagcucgugcccggcuucggcaaagccuacacuauuuucaacaagacacuuauggaggcugaugcccacuauaaauccguccgaaccuggucagagaucauuccuaguaaggggugccugagagugggagguaggugucacccacauguuaauggcguguuuuucaacgggaucaucuugggacccgacggccacguccuaauuccggaaaugcagagcucccugcuccagcagcauguggagcugcuugaaucuagcguaauaccucugaugcaccccuuggcggauccaucagcaguuuuuaaagacggugaugaggccgaagacuucguggagguccaucucccugaugugcacaagcaaaucaguggggucgaccugggcuuacccuccuggggaaaguacaugcugaugauugcuggcgcccuaaugacgcucaugcuguuuaucuuccuuaugaccugcugucggcgugugaaucgcacagagagcauaagacaggggccaagggaauuggagucuaaaguuucagugacuccccagaaccggaagguaauuaguagcugggaauccuauaaaucuggaggugagaccaagcuguga

SEQ ID NO: 159325 - RNA, 1575 nt, Artificial Sequence
  derived and/or modified CDS sequence (opt3) from glycoprotein__RABV__JQ685902.1
augaucccccaggcccuguuguucgugccucuucugauuccaagccucugcuuaggcgaguuuccgauauacaccauccccgacaagcuggggccuugguccccaauugauauccaccaucuaucuugucccaacaaucucgucgcugaaaacgacggaugcacaucacugagugguuucagcuauauggagcuuaaaguuggcuacauuuccgcaaucaaggugaauggguuuacuuguacgggaguagugaccgaagccgagacauauacuaacuucgucggcuacgugaccacaaccuuuaaaagaaagcacuucaggccuacuccagaugcgugccgggcugcccaugacuggaaaauggcaggggauccccgcuaugaagccucucugcaaaauccuuacccagacuaucacugguugcgaacaguuaagaccacgaaggagucgcucgugauaaucucaccgagcgucgcugaucuggaccccuacgauaaaagucugcauucccguguguuuccuucugggaagugucucggaauuacuguaagcuccaccuacugcucaacaaaccacgacuauacuaucuggaugccaguugagcccagauuaggcaccaguugugauauuuucacaaauagcaggggcaaacgggcaucuaaggguggacgcgugugcgguuuugucgacgaaagaggccuguacaaaucccuuaagggggccuguagguugaagcugugcggagugccuggcauccggcuacucgaugguaccugggugucaauacagacgagcgaggacauuaaaugguguccacccgaccgccuggucaaccuucacgauuuccauagugacgaaaucgagcaccugguuguggcugaguugauuaagcgaagagaaaauugccucgaugcccuggagucuaucaugacuacaaaauccguaaccuuuaggcgguuaacucaucugcguaagcucgugccgggguucggaaaagcguauacaaucuuuaacaagacccuuauggaagcagacgcccacuacaaaagcgucaagacguggaaugaggugauuccuucgaagggcugccuggaaguuggcgggcgcugucacccccaugugaacggagucuucuucaaugguauaaucuugggcccagaugggaacgugcuaauuccugagaugcagucuucccugcuccagcaacacauggagcugcuugaaucaaguguaaucccccugaugcauccauuggcugaccccagcaccguuuuuaaagagggagaugaagccgaggacuucguggaaguccaccucccugaugugcauaagcaggucuccgacguggaucugggcuuaccaucuugggguaaauaucugcuaauaagcgcaggggcucucgccauucugauccuugcgaucguuuugauuaucugcuguagaagggugaauaagacaggcucaacucagcggggacaccgagagaguggcgggaaaauguccguagucccgcagaacggaaagauuauaagcucuugggagcuguacaagucagaaagugagaccggucucuga

SEQ ID NO: 159326 - RNA, 1575 nt, Artificial Sequence
  derived and/or modified CDS sequence (opt3) from glycoprotein__RABV__JQ685903.1
augauccugcaggcccuccuuuucgugccccuguugauuagcuccuuaugcuuuggcggguucccuauauacaccaucccagacaagcugggaccguggucucccauugauauccaccaucuaucauguccuaacaaucucgucguugaggacgaagguugcacaagucugagcggcuuuuccuauauggagcuuaaagugggguacauuucugcuaucaagguaaacggauucacuuguacgggcguggucaccgaagcagagacauauacuaauuuuguggguuacguuaccacaaccuucaaaagaaagcacuuuaggccaaugcccgauucgugccgggccgcguauaacuggaaaacugcuggggacccucgcuacgaagagucacugcaaaauccauaucccgauuaccauugguugcgaacagugaagaccacgaaggagagccucauaaucauuaguccuuccgucgccgaccuggauccauacgacaaaucucugcacagccguguguucccgggaggcaagugucucggcaucacuguauccucaaccuauugcaguacaaaccaugauuacacuauuuggaugcccgaagaggcaagauuagggaccagcugugacaucuuuacaaauucuaggggaaaacgggccuccaaggguggcagaaccugcggguucguugaugaacgcggacuguauaaaucacuuaagggcgcuuguaaguugaaacugugcggugugcuagggcucaggcugauggacggaacgugggucacuauacacacaagcaacgagaccaagugguguccuagugaucagcuugugaaucugcacgacuuucauucugacgagauugaacacuugguggucgaggaacucguuaaaaagcgggaggaaugccuggaugcauuagaguccaucaugacuacaaaaagcgugucguuccgccgacugucucaucucagaaagcugguaccaggcuuuggcaaagccuacaccauuuucaacaagacgcugauggaggcugacgcccacuauaaguccaucaggaccuggaaugaaaucauucccucaaaagggugcuugaaggugggaggucggugucacccucaugucgauggcguguucuuuaacgggauaauccuaggaccagacggcaauguucugauucccgagaugcagaguagccuccugcagcaacacguggaacuucuggaguccucugucaucccguugaugcauccucucgcggaucccagcacaguguucaaagacggugaugaagcagaggacuuuguagagguucaccuuccagaugugcauaagcaggucucagggguggacuuaggccugccuaacuggggaaaauaccuacucaugagugccggcguccuggcuacucuuauguugaccauauuccugauuacaugcugucgucgcguggauagaacugaauccauccagagggggcccggagagcucggucgggaaaugagcguuaccucucagaauggcaaggugaucucaaguugggagcuguauaagagcgggggagaaacacgacuuuga

SEQ ID NO: 159327 - RNA, 1575 nt, Artificial Sequence
  derived and/or modified CDS sequence (opt3) from glycoprotein__RABV__JQ685905.1
augaucuuccaggcccugcucuuugugccccuucugauuagcuccuugugcuuaggcaaguucccuauauacaccaucccagacaaacuggggccguggucucccauugauauccaccaucuaucauguccuaacaaucucgucguugaggacgaaggaugcacaagucugagcgguuuuuccuauauggagcuuaaggugggcuacauuucugcuaucaaaguaaacggguucacuuguacgggaguggucaccgaagcagagacauauacuaauuuugugggcuacguuaccacaaccuucaagagaaaacacuuuaggccaauacccgaugccugccgggcggcuuauaacuggaagaucgccggugacccucgcuacgaagagucgcugcaaaauccauaucccgauuaccauugguugcgaacugugaagacaaccaaagagucacucauuaucauuagcccuagugucgcagaccuggauccauacgacaagucccugcacucucgucucuuccccgggggaaaauguuuaggcaucacgauaagcuccacuuauugcucaaccaaccaugauuacacaauuuggaugccggaggaaccuagacugggcaccaguugugacaucuuuaccaauagcaaggggaaaaaggccucuaagggagguaaagugugcggcuucguagaugaaagggggcuuuauaaguccuugaaaggagcuuguaagcugaaacuaugcggcguuucaggucuccggcugauggacgggacaugggugaccauucagacgagcgaugagacuaagugguguccacccgaccagcuugucaaccugcacgacuuucacagugaugagaucgaacauuuggugguggaggaacucgucaaaaagcgcgaggaaugccuggacgcauuagagucuaucaugacaaccaaguccguuagcuucagaaggcugucguaccuccggaaacuugugccuggauuuggcaaggccuauacuauuuucaauaaaacacugauggaggcugaugcccacuacaagucuguacgcaccuggaacgaaauaaucccauccaaaggcugcuugaaggugucagaccgaugucauccccacgucgaugggguguucuuuaauggaauuauccuagguccggacggcaacguucugauaccugagaugcagaguagccuccugcaacagcacauggaacuucuggaguccucugugauucccuugaugcauccacucgcggauccuagcacggucuucaaggacggggaugaagcagaggacuuuguggagguacaucugcccgauguucacaaacagaucucaggaguggacuuaggccugccaaguugggguaaguaucuacucaugaucgccgggggccuggcuacccuugucuugauuaucuuccugauggccugcuguagaaggacaaaacggacugaaucccgucgcagaggaagcggcgagucuggggaaaaggugcucgcaacuccccagccuaaaaaggucgugucaaguugggagcuguacaagagggaaggagacgcucggcuuuga

SEQ ID NO: 159328 - RNA, 1575 nt, Artificial Sequence
  derived and/or modified CDS sequence (opt3) from glycoprotein__RABV__JQ685906.1
augaucccccaggcccugcucuacgugccucuucugauuccaaguuugugcuucggcggguuuccgauauauaccauccccgacaaguuaggaccuugguccccaauugauauccaccaucugucuugucccaacaaucuagucguugaggacgaagguugcacaucacucaguggcuucagcuacauggagcugaaagugggguauauuuccgcuaucaagguaaacggauuuacuuguacgggcguggucaccgaagcagagacauacacuaauuucguggguuauguuaccacaaccuuuaaaagaaagcacuucaggccuaugccagaugccugccgggcggcuuacaacuggaaaguggccggggacccccgcuaugaagagucucuucaaaauccuuacccagauuacucguggcugcgaacugucaagacaaccaaggagucauugauaaucauuagcccgaguguggcagaccucgaucccuaugacaaaucccugcauucucguguauuuccuggaggcaagugucugggcaucacgauuagcuccacuuacugcucaaccaaccacgauuauacaaucuggaugccagaagaggccagacucgggacuagcugugacauauucaccaauagcaggggaaaacgggcuucuaaggguggcaaaacaugcggguuuguugaugaacgcggauuauacaagucccugaagggcgcauguaaacuuaaguugugcggugugcccgggcugagacuaauggacggaaccugggucacgauucagacuucagaugagacaaaaugguguccuagcgaccagcucgugaaccugcaugacuuccacagugaugagaucgaacaccuuguggucgaggaacugguuaagaaaagggaggaaugcuuggacgcccucgagucuauuaugaccacuaaguccgugagcuuucggcgccugucgcauuuacgaaaacugguaccaggcuucggcaaggcuuauacaaucuuuaauaagacccucauggaggccgaugcgcacuacaaaucuaucagaacguggaacgaaauuauacccuccaaggggugccuuaaagugggagguaggugucauccgcacgucgacggcguguucuucaaugggaucauucugggaccugauggcaacguuuugauccccgagaugcagucaagucuacugcaacagcacguggaacuccuggagagcuccgucauaccacuuaugcauccucuggcagaccccucuaccguguuuaaggauggugacgaagccgaggauuucguagagguucacuugccagacauucauaaacaggugagcggggucgaucucggccugcccaauuggggaaaguauuuacugaugucagcuggcgcccuagcaacacucaugcugacuaucuuucuuaugaccugcugucggcgugcuaaccgcacagaaaguauccagagagacccuggggaguccggaaagaaagugagcacuaccucucaagacgguaaggucauuucaaguugggaauuguacaaaagcggcggggagacaaggcuguga

SEQ ID NO: 159329 - RNA, 1575 nt, Artificial Sequence
  derived and/or modified CDS sequence (opt3) from glycoprotein__RABV__JQ685907.1
augaucccccaggcccugcucuacgugccucuucugauuagcuccuugugcuucggcggguuuccaauauauaccaucccggacaaguuaggacccuggucuccuauugauauccaccaucugucauguccaaacaaucuagucguugaggacgaagguugcacaagucucagcggcuucuccuacauggagcugaaagugggguauauuucugcuaucaagguaaacggauuuacuuguacgggcguggucaccgaagcagagacauacacuaauuucguggguuauguuaccacaaccuuuaaaagaaagcacuucaggcccaugccugaugccugccgggcggcuuacaacuggaaaauagccggggacccacgcuaugaagagucgcuucaaaaucccuacccugauuacucauggcugcgaacugugaagacaaccaaggagagcuugaucauuaucaguccauccgucgcagaccucgauccguaugacaaaucucugcauagccguguguuucccggaggcaagugucugggcauuacgaucuccucaacuuacugcaguaccaaccacgauuauacaauauggaugccugaagaggccagacucgggacuagcugugacauuuucaccaauucuaggggaaaacgggcuuccaaggguggcaaaacaugcggguuuguagaugaacgcggauuauacaagucacugaagggcgcauguaaacuuaaguugugcgguguuccagggcugagacuaauggacggaaccugggugacgauccagacuagcgaugagacaaaauggugucccagugaccagcucgucaaccugcaugacuuccacucugaugagauugaacaccuugugguggaggaacuggucaagaaaagggaggaaugcuuggacgcccucgaguccaucaugaccacuaagagcguuucguuucggcgccugucucauuuacgaaaacuggugccuggcuucggcaaggcuuauacaaucuuuaauaagacccucauggaggccgaugcgcacuacaaauccauuagaacguggaacgaaauaaucccaucaaaggggugccuuaaaguaggagguaggugucauccccacguggacggcgucuucuucaaugggauuauccugggaccggauggcaacguguugauaccugagaugcagaguagccuacugcaacagcacguugaacuccuggaguccucugugauuccccuuaugcauccacuggcagacccuagcaccgucuuuaaggauggugacgaagccgaggauuucguggagguacacuugcccgacauccauaaacagguuucagggguggaucucggccugccaaauuggggaaaguauuuacugaugagugcuggcgcccuagcaacacucaugcugaucauuuuucuuauggcuugcugucggcgugccaaccgcacugaauccauccagagagaccccggggagagcggaaggaaggucucuauuccuucacaagacgguaaagugauaaguagcugggaauuguacaaguccggcggggagacccggcuguga

SEQ ID NO: 159330 - RNA, 1575 nt, Artificial Sequence
  derived and/or modified CDS sequence (opt3) from glycoprotein__RABV__JQ685909.1
augaucccccaggcccugcucuacgugccucuucugauuagcuccuugugcuucggcggguuuccaauauauaccaucccggacaaguuaggacccuggucuccuauugauauccaccaucugucauguccaaacaaucuagucguugaggacgaagguugcacaagucucagcggcuucuccuacauggagcugaaagugggguauauuucugcuaucaagguaaacggauuuacuuguacgggcguggucaccgaagcagagacauacacuaauuucguggguuauguuaccacaaccuuuaaaagaaagcacuucaggcccaugccugaugccugccgggcggcuuacaacuggaaaauggccggggacccacgcuaugaagagucgcuucaaaaucccuacccugauuacucauggcugcgaacugugaagacaaccaaggagagcuugauaaucauuaguccauccgucgcagaccucgauccguaugacaaaucucugcauagccguguguuucccggaggcaagugucugggcaucacgauuuccucaacuuacugcaguaccaaccacgauuauacaaucuggaugccugaagaggccagacucgggacuagcugugacauauucaccaauucuaggggaaaacgggcuuccaaggguggcaaaacaugcggguuuguagaugaacgcggauuauacaagucacugaagggcgcauguaaacuuaaguugugcgguguuccagggcugagacuaauggacggaaccugggugacgauucagacuagcgaugagacaaaauggugucccagugaccagcucgucaaccugcaugacuuccacucugaugagaucgaacaccuugugguggaggaacuggucaagaaaagggaggaaugcuuggacgcccucgaguccauuaugaccacuaagagcguuucguuucggcgccugucucauuuacgaaaacuggugccuggcuucggcaaggcuuauacaaucuuuaauaagacccucauggaggccgaugcgcacuacaaauccaucagaacguggaacgaaauuauaccaucaaaggggugccuuaaaguaggagguaggugucauccccacguggacggcgucuucuucaaugggaucauucugggaccggauggcaacguguugaucccugagaugcagaguagccuacugcaacagcacguugaacuccuggaguccucugugauaccccuuaugcauccacuggcagacccuagcaccgucuuuaaggauggugacgaagccgaggauuucguggagguacacuugcccgacauucauaaacagguuucagggguggaucucggccugccaaauuggggaaaguauuuacugaugagugcuggcgcccuagcaacacucaugcugacuaucuuucuuaugaccugcugucggcgugcuaaccgcacagaauccauccagagagaccccggggagagcggaaggaaggucucuauuacuucaccugacgguaaagugaucaguagcugggaauuguacaaguccggcggggagaccggacuguga

SEQ ID NO: 159331 - RNA, 1575 nt, Artificial Sequence
  derived and/or modified CDS sequence (opt3) from glycoprotein__RABV__JQ685910.1
augaucccccaggccuuccuguuugugccucuccuuauuccaagccugugcuugggcgaguucccgauauacaccauccccgacaaguuagggccuugguccccaauugauauccaccaucugucuugucccaacaaucuagucgcugaaaacgacggaugcacaucacucagugguuuuagcuauauggagcugaaaguuggcuacauuuccgcaaucaaggugaauggguucacuuguacgggaguaaugaccgaagccgagacauauacuaacuuugugggcuacgucaccacaaccuucaaaagaaagcacuuuaggccuaugccagaugcgugccgggcugcccaugacuggaaaauagcaggggauccccgcuaugaagacucucuucaaaauccuuacccagauuaucacuggcugcgaacugugaagacaaccaaggagucguugguuaucauuucaccgagcguggccgaccucgaucccuacgacaaaagucugcauucccgugucuucccuucugggaagugucugggaaucacggugagcuccacuuacugcucaaccaaccacgauuauacaauuuggaugccaguagagcccagacucggcaccaguugugacaucuuuacuaauagcaggggcaaacgggcuucuaaggguggacgcguuugcgguuucguggaugaaagaggcuuauacaaaucccugaagggggcauguaaacuuaaguugugcggagucccuggcauaaggcugauggacgguacaugggugucaauucagaccagcgaggaaaucaagugguguccacccgaccggcuagugaaccuccacgauuuucauagugacgagauugagcaccuggucguugaggaacuuaucaaacgccgagaaaauugccuggaugccuuggagucuaucaugacgacuaaguccgugagcuucagaaggcucucgcaucugcggaaauuaguaccgggguuuggaaaggcuuauacaauuuucaacaaaacccugauggaagccgacgcgcacuacaagucugugaagacuuggaaugaggucauaccuuccaaaggcugccucgaggugggcgggcguugucaucccccaguuaacggaguguucuuuaaugguaucauucuuggcccugaugggaacguccugauccccgaaaugcagucaaguuugcuacagcaacacauggagcugcucgaaagcuccgugauaccacugaugcacccccuugcagacccuucuacaguauucaaggagggagaugaagccgaggacuuuguugaggugcaucugccagauguccacaaacaggugagcgacgucgauuugggccucccgucaugggguaaguaucuguuaaugagugcuggggcccuggcaauucuaauccucgugaucguucugauuaucugcugucgcagagugaauaaaaccggcuccacgcagaggggacaucgggaaagcggcgggaagaugucuguagcuccccagaacggaaagauuauaucaaguugggagcuuuacaaaagcgaauccgagaccgguuuguga

SEQ ID NO: 159332 - RNA, 1575 nt, Artificial Sequence
  derived and/or modified CDS sequence (opt3) from glycoprotein__RABV__JQ685911.1
augaucccccaggcccugcucuacgugccucuucugauuccaaguuugugcuucggcggguuuccgauauauaccauccccgacaaguuaggaccuugguccccaauugauauccaccaucugucuugucccaacaaucuagucguugaggacgaagguugcacaucacucaguggcuucagcuacauggagcugaaagugggguauauuuccgcuaucaagguaaacggauuuacuuguacgggcguggucaccgaagcagagacauacacuaauuucguggguuauguuaccacaaccuuuaaaagaaagcacuucaggccuaugccagaugccugccgggcggcuuacaacuggaaaguggccggggacccccgcuaugaagagucucuucaaaauccuuacccagauuacucguggcugcgaacugucaagacaaccaaggagucauugauaaucauuagcccgaguguggcagaccucgaucccuaugacaaaucccugcauucucguguauuuccuggaggcaagugucugggcaucacgauuagcuccacuuacugcucaaccaaccacgauuauacaaucuggaugccagaagaggccagacucgggacuagcugugacauauucaccaauagcaggggaaaacgggcuucuaaggguggcaaaacaugcggguuuguugaugaacgcggauuauacaagucccugaagggcgcauguaaacuuaaguugugcggugugcccgggcugagacuaauggacggaaccugggucacgauucagacuucagaugagacaaaaugguguccuagcgaccagcucgugaaccugcaugacuuccacagugaugagaucgaacaccuuguggucgaggaacugguuaagaaaagggaggaaugcuuggacgcccucgagucuauuaugaccacuaaguccgugagcuuucggcgccugucgcauuuacgaaaacugguaccaggcuucggcaaggcuuauacaaucuuuaauaagacccucauggaggccgaugcgcacuacaaaucuaucagaacguggaacgaaauuauacccuccaaggggugccuuaaagugggagguaggugucauccgcacgucgacggcguguucuucaaugggaucauucugggaccugauggcaacguuuugauccccgagaugcagucaagucuacugcaacagcacguggaacuccuggagagcuccgucauaccacuuaugcauccucuggcagaccccucuaccguguuuaaggauggugacgaagccgaggauuucguagagguucacuugccagacauucauaaacaggugagcggggucgaucucggccugcccaauuggggaaaguauuuacugaugucagcuggcgcccuagcaacacucaugcugacuaucuuucuuaugaccugcugucggcguaguaaccgcacagaauccauccagagagacccuggggagagcggaaagaaagugucuauuacuucacaagacgguaaggucaucaguagcugggaauuguacaaauccggcggggagaccaggcuguga

SEQ ID NO: 159333 - RNA, 1575 nt, Artificial Sequence; identical to SEQ ID NO: 159316
  derived and/or modified CDS sequence (opt3) from glycoprotein__RABV__JQ685912.1

SEQ ID NO: 159334 - RNA, 1575 nt, Artificial Sequence; identical to SEQ ID NO: 159316
  derived and/or modified CDS sequence (opt3) from glycoprotein__RABV__JQ685913.1

SEQ ID NO: 159335 - RNA, 1575 nt, Artificial Sequence
  derived and/or modified CDS sequence (opt3) from glycoprotein__RABV__JQ685914.1
augaucccccaggcccuucucuucgugccucuucugauuagcuccuugugcuuuggcggguucccaauauacaccaucccggacaaguuaggacccuggucuccuauugauauccaccaucugucauguccaaacaaucuagucguugaggacgaagguugcacaagucucagcggcuuuuccuauauggagcugaaagugggguacauuucugcuaucaagguaaacggauucacuuguacgggcguggucaccgaagcagagacauauacuaauuuuguggguuacguuaccacaaccuucaaaagaaagcacuuuaggcccaugccugauucgugccgggccgcguauaacuggaaaacugcuggggacccacgcuacgaagagucacuucaaaaucccuauccugauuaccauuggcugcgaacagugaagaccacgaaggagagcuugauaaucauuaguccauccgucgccgaccucgauccguacgacaaaucucugcacagccguguguuccccggaggcaagugucugggcaucacuguauccucaaccuauugcaguacaaaccaugauuacacuauuuggaugccugaagaggcaagacucgggaccagcugugacaucuuugccaauucuaggggaaaacgggcuuccaaggguggccgcacaugcggguucguugaugaaagaggauuauauaaaucacugaagggcgcauguaagcugaaauugugcggugugcuggggcuaaggcucauggacggaaccugggccacgauacacacuagcaacgagacaaagugguguccaagugaucagcuggucaaucuucacgacuuucauucugacgagauugaacaccuggugguggaggaauuggucaaaaagcgggaggaaugccucgaugcucuggaguccaucaugaccacuaaaagcguuucguuccgccgauuaucucaucugagaaagcucgugcccggcuuuggcaaagccuacacaauuuucaacaagacccuuauggaggcggacgcacacuauaaguccaucaggacguggaaugaaaucauuccuucaaaagggugccugaagguaggaggucggugucacccacauguggauggcgucuucuuuaacgggauaaucuugggacccgacggcaaugugcuaauuccggagaugcagaguagccugcuccagcaacacguugaacugcuugaguccucugugaucccucugaugcaucccuuggccgauccaagcaccgucuucaaagacggugaugaagcugaggacuuuguggagguacaccucccugauguucauaaacaggugucaggggucgaccugggcuuacccaacuggggaaaguaccugcuaaugagugccggcgcacucgcuacacugaugcuuacuauauucuugauuaccugcugucgucgcguggauaagacagaauccauccagagagggccaggagagcuggguagggaagucagcgugacuucucagaauggcaagguuaucucaaguugggagcucuauaaaagcgggggagaaacccggcuguga

SEQ ID NO: 159336 - RNA, 1575 nt, Artificial Sequence
  derived and/or modified CDS sequence (opt3) from glycoprotein__RABV__JQ685915.1
augauccugcaggcccuccuucuguugcccuuacugauuagcuccuggugccuaggcaaguucccuauauacaccaucccagacaaacucgggccguggucucccauugauauccaccaucugucauguccuaacaaucuuguggucgaggacgaaggaugcacaagucugagcgguuuuuccuauauggaguugaagguuggcuacauuucugcuaucaaagugaacggguucacuuguacgggaguagugaccgaagcagagacauauacuaauuuugucggcuacgugaccacaaccuucaagagaaaacacuuuaggccaaugcccgaugccugccgggcggcucaugaauggaagauggccggugacccucgcuaugaggauucgcuccaaaacccauaccccgacuaucacuggcugcgaacuguuaagacaaccaaagagucacugauaaucauuagcccuaguguggcagaucucgacccauacgauaaguccuuacauucucgugucuuccccgggggaaauugucugggcgugacgaucagcuccacuuacugcucaaccaaccacgacuauacaauuuggaugccggaagaggccagacuuggcacuucuugugauaucuuuaccaauagcaaagggaagaaagcuaguaagggagguaagguaugcggcuucguugacgaaaggggguuguacaaaucccugaagggagcauguaaacuaaagcucugcggcgugccuggucugcggcuuauggaugggacaugggucucaauacagaccagcgacgagacgaaaugguguccacccgaccagcuggugaacauucacgauuuucauagugacgagaucgaacacuugauuguggaggaacucgucaagaaacgcgaggaaugccuggaugccuuagagucuaucaugacuacaaaguccguuagcuucagaaggcugucgcaucuccggaaacuugugccuggauuuggcaaggcuuauaccaucuucaauaagacucugauggaggccgacgcgcacuacaaaucuguacgcacauggaacgaagugauuccauccaagggcugcuugaaagucgggggacgaugucacccccauguggguggcguguuuuucaaugggauaauccuaggaccggauggcaccguucugauuccugagaugcagucaagucuccugcaacagcacauggaacuucuggagagcuccgucauccccuugaugcauccacucgcagacccuucuaagguguucaaggaaggugaugaggccgaggacuuuguagaaguucaucugcccgaugugcacaaacaggucagcgggguggacuuaggccugccaucauggggaaaguaucuacucaugagugucggcgcucuggccacgcuuauauugauuaucuuccugauuaccugcuguagaaaagugaagaggacagaguccauccagcgggggcacggagaaagcggucguaaaguuucugcaucaccccaaaacggcaaggugaucaguagcugggagcucuacaaguccgaaggggagacuaaucuguga

SEQ ID NO: 159337 - RNA, 1575 nt, Artificial Sequence
  derived and/or modified CDS sequence (opt3) from glycoprotein__RABV__JQ685916.1
augaucccccaggcccugcucagccuucuguuguuaauuuccucucugugccuaggcaaguucccuauauacaccaucccagacaaacucgggccguggucacccauugauauccaccaucugaguuguccuaacaaucuuguggucgaggacgaaggaugcacaagccuguccgguuuuucuuauauggaguugaagguuggcuacauuucggcuaucaaagugaacggguucacuuguacgggaguagugaccgaagcagagacauauacuaauuuugucggcuacgugaccacaaccuucaagagaaaacacuuuaggccaaugcccgaugccugccgggcggcucaugaauggaagauggccggugacccucgcuaugaggauucacuccaaaacccauaccccgacuaucacuggcugcgaacuguuaagacaaccaaagagagccugauaaucauuaguccuuccguggcagaucucgacccauacgauaagucuuuacauagccgugucuuccccgggggaaauugucugggcaucacgauuuccucaacuuacugcaguaccaaccacgacuauacaaucuggaugccggaagaggccagacuuggcacuagcugugauauauuuaccaauucuaaagggaagagggcuuccaaaggagguaagauuugcggcuucguggacgaacggggguuguacaagucacugaaaggagcauguaagcuaaaacucugcggcguaccuggucugcgccuuauggaugggacauggguuagcauccagaccagugacgagacgaagugguguccacccgaccagcuggugaacguccacgauuuucauucugacgagauugaacacuugaucguggaggaacucgugaaaaagagagaggaaugccuggaugccuuagaguccaucaugacuacaaaaagcgucucguucaggcggcugucucaucuccgcaagcugguuccuggauuuggcaaggcuuauaccauuuucaauaaaacucugauggaggccgacgcgcacuacaaguccgugcgaacauggaacgaaauaaucccaucaaaaggcugcuugaagguagggggaaugugucacccccauguggguggcgucuuuuucaaugggauuauccuaggaccggauggcaccgugcugauaccugagaugcagaguagccuccugcaacagcacauggaacuucuggaguccucuguuauucccuugaugcauccacucgcagacccuagcacgguguucaaagaaggugaugaggccgaggacuuugucgaaauccaccuucccgaugugcauaagcagaucucagggguagacuuaggccugccaaguuggggaaaguaucuacucauuuccgcuggcgcccuggcaacccuuaucuugacaauuuuccugauaacuugcuguagaaaaguuaacaggaccgagagcauccagcgggggcacggagaaucugagcguaaggugucagucaguccccaaaauggucgcgugauuagcuccugggaacucuacaaaucuggcggggagacaaaccuguga

SEQ ID NO: 159338 - RNA, 1575 nt, Artificial Sequence
  derived and/or modified CDS sequence (opt3) from glycoprotein__RABV__JQ685917.1
augaucccccaggcccugcucuacgugccucuucugauuagcuccuugugcuucggcggguuuccaauauauaccaucccggacaaguuaggacccuggucuccuauugauauccaccaucugucauguccaaacaaucuagucguugaggacgaagguugcacaagucucagcggcuucuccuacauggagcugaaagugggguauauuucugcuaucaagguaaacggauuuacuuguacgggcguggucaccgaagcagagacauacacuaauuucguggguuauguuaccacaaccuuuaaaagaaagcacuucaggcccgugccugaugccugccgggcggcuuacaacuggaaagucgccggggacccacgcuaugaagagucgcuucaaaaucccuacccugauuacucauggcugcgaacugugaagacaaccaaggagagcuugauaaucauuaguccauccguagcagaccucgauccguaugacaaaucucugcauagccguguuuuucccggaggcaagugucugggcaucacgauuuccucaacuuacugcaguaccaaccacgauuauacaaucuggaugccugaagaggccagacucgggacuagcugugacauauucaccaauucuaggggaaaacgggcuuccaaggguggcaaaacaugcggguuuguggaugaacgcggauuauacaagucacugaagggcgcauguaaacuuaaguugugcggugucccagggcugagacuaauggacggaaccugggugacgauucagacuagcgaugagacaaaauggugucccagugaccagcucgugaaccugcaugacuuccacucugaugagaucgaacaccuugucguugaggaacuggugaagaaaagggaggaaugcuuggacgcccucgaguccauuaugaccacuaagagcguaucguuucggcgccugucucauuuacgaaaacuggugccuggcuucggcaaggcuuauacaaucuuuaauaagacccucauggaggccgaugcgcacuacaaauccaucagaacguggaacgaaauuauaccaucaaaggggugccuuaaagucggagguaggugucauccccacguggacggcguuuucuucaaugggaucauucugggaccggauggcaacguguugaucccugagaugcagaguagccuacugcaacagcacgucgaacuccuggaguccucugugauaccccuuaugcauccacuggcagacccuagcaccguauuuaaggauggugacgaagccgaggauuucguugaggugcacuugcccgacauucauaaacaggucucagggguggaucucggccugccagacuggggaaaguauuuacugaugagugcuggcgcccuagcaacacucaugcugacuaucuuucuuaugaucugcugucggcgugcuaaucgcaccgaauccauucagagagaccccggggagagcggaaagaaagucucuaucacaucacaagaugguaaggugauuaguagcugggaauuguacaaauccggcggggagacuaggcuguga

SEQ ID NO: 159339 - RNA, 1575 nt, Artificial Sequence
  derived and/or modified CDS sequence (opt3) from glycoprotein__RABV__JQ685918.1
augaucccccagagccuccuguuccuuccucuguugauuuccucuuuaugcuuuggcgaguucccaauauacaccaucccggaaaagcuggggcccuggucaccuauugacauccaccaucuaaguuguccaaacaaucucguggucgaggaugaaggaugcaacagccuguccgguuuuucuuauauggagcuuaaaguuggcuacauuucgucaaucaaggugaauggguucacauguacuggaguagugacggaagccgagaccuauacaaacuuugucggcuacgugacuaccacauucaaaagaaagcacuuuaggcccaugccugacgcuugccgggcagccuauagcuggaaaauggcgggugauccacgcuacgaggaaagucugcauaaucccuauccugacuaccacugguugcgaaccguuaagacuacaaaggagucccucgugauaaucucuccaagcgucgcugaucuggacccguacgauaaaucccugcauucacguguguucagugggggaaagugucucggcauuaccaucagcucuacguauugcuccacuaaccacgacuacaccauuuggaugcccgaagaggccagauuaggcacaucaugugauaucuuuacuaauagcaaagggaagagggcaaguaaaggaggucggaccugcggcuucguagacgagcgcgggcuguauaagucucuuaagggagccuguaaauugaagcugugcggcguuccuggucuaagacucauggaugggacauggguguccauacaaaccagcaacgaaacgaaaugguguccacccgaccagcuggucaauauucacgauuuuaggucggacgagaucgaacaucuugugguggaggaacuggucaagaaacgggaggagugcuuggacgcucucgaaucuauuaugacuacaaaguccguuucauuccgccgacugagucacuuaagaaaacuggugccuggauuuggcaaggcauacaccaucuucaacaagacucucauggaggccgaugcucauuauaaaagcguaaggacauggaaugaagugaucccauccaagggcugccuuucugucgggggacgguguuacccccacgugagcgguguuuucuuuaacggcauuauacuggggccggacggaucaguguugaucccugagaugcagaguucccuacugcagcaacacauggaacuccuggagagcucugucauuccccuuaugcauccacuggccaauccuucaaccguguucaaagauggcgacgaggcggaagauuuuguagagguucacuugcccgacgugaaggaacaggucagugguguggaucucgggcugccaaacuggggcaaauaugucuuaaugagcgcaggagcccuggcuauccuaaugcucgccauauuccugaugacgugcugucgucgcgcaaauagaaccaaguccauucagcagggccccagggagucugggcggaaggugucgguuccuccacaaaacggaaaagugaucagcuccugggaaucauuuaagagugguggcgagacacgacuuuga

SEQ ID NO: 159340 - RNA, 1575 nt, Artificial Sequence
  derived and/or modified CDS sequence (opt3) from glycoprotein__RABV__JQ685920.1
augaucccccaggcccuucucuucgugccuuuucuuuucccaagccugugcuugggcaaguuuccgauuuacaccauacccgagaaauuagggccuugguccccaaucgacauucaccaucugucuugucccaacaaucuagucguugaagaugagggaugcgacucacucagugguuucagcuauauggaacugaaggugggcuacaucuccgcuauuaaaguaaacggguuuacauguacuggaguggucacggaggcagaaaccuauacaaauuucgugggcuacguuacuaccacauuuaagagaaaacacuucaggccuaugccagaugccugccgggcggcuuauaacuggaagaccgccggugacccccgcuacgaggagucucuucauaauccuuauccagauuaccacuggcugcgaacugugaagacaaccaaagaaucguuggucaucauaucaccgagcguggcagaccucgaucccuacgacaagagucugcauucccguguauuuccugggggaaaaugucugggcaucacgauuucuagcacuuauugcuccaccaaccacgauuacacaaucuggaugccagaggaagccagacucggcacuucaugugacauuuucaccaauaguaaggggaaaagggcuagcaagggaggucggacaugcggcuuuguugaugagcgcggguuauauaagucucugaaaggagcauguaagcugaaauugugcggcgugcccggucugagacuaauggacgggaccugggucgccauccaaacgccuggagagacuaagugguguuccccagaucagcucgugaaccugcacgacuucaggucagacgaaauagagcaucuuguggucgaggaacugauuaaaaagcgggaagagugcuuggaugcucucgagagcaucaugacaaccaaaaguguuucuuuucgccgacuguccaauuuaagaaagcuggugcccggcuucggcaaggccuacacuauuuucaacaaaacacucauggaagcggacgcacacuauaagagcguaaggaccugggaugagaucaucccgucgaaagggugccuucgggugggaggucguugucauccucacgucaauggcguguuuuucaacgggauuauacugggacccgacggccacguuuugaucccagaaaugcagucuucccuacugcagcaacauauggagcuccuggaaucaagugugauuccucuuauccacccccuggccgauccaagcacggucuuuaaggacggugaugaggcugaggacuucguggaaguacauuugcccgauguucacaaacagguguccggggucgaccucggccugccuaauuggggaaaguacguguuaaugucugccggcguccuggcaaccgugauacuaacaauuuuucuccugacuugcugucgcagaguuaacaggaccaagccaaaacagcagagccuuggggagucaggacggaaggugaguguaacaccgcaaaaugguaaagucauguccagcugggaauauuacaagucugagggccgaacuucauuguga

SEQ ID NO: 159341 - RNA, 1575 nt, Artificial Sequence
  derived and/or modified CDS sequence (opt3) from glycoprotein__RABV__JQ685921.1
augauccugcaggcccuccuuuucgugcccauucugauaagcuccuuuugcuucggcgacuuuccuaucuacaccauuccagagaaguuggggccguggucucccaucgauauucaccauuuaucauguccuaacaaucuggucguugaagacgagggaugcaguagccuauccgguuucucuuauauggaacucaaagugggcuacaucucggcuauaaagguaaacggguuuacauguacuggaguggucacggaggcagaaaccuauacaaauuucgugggcuacguuacuaccacauuuaaaagaaagcacuucaggccaaugcccgaugccugccgggcggcuuauaacuggaaaaccgccggugacccucgcuacgaggagucacugcaaaauccauaucccgauuaccauuggcuucgaacugugaagacaaccaaggaaagccuggucaucauuaguccuuccguggcagacuuggauccauacgacaaaucucuccacagccguguauuuuccgaugggaagugucugggaaucacgauuucaaguacuuauugcagcaccaaccaugacuacacaaucuggaugccggaggaagccagacugggcacuucuugugauauauucaccacauccaggggcaaacgggcuucaaaagggggaaagaccugcgguuuuguugacgagcgcggccucuauaagagcuuaaagggggcauguaaacugaaacuuugcggagugaguggcuugagacugauggaugguacgugggucucuauucaggcccccgacgaggcuaagugguguuccacugaccagcuagugaauauccacgauauuaggagcgacgaaaucgagcaccucguggucgaggaacugguuaagaaacgggaagagugccuugaugcccuggagucgaucaugacaaccaagucuguguccuuccgccgauugucacaucucagaaaacugguaccuggguuuggaaaggcguacacuauuuucaacaagacauuaauggaagcagacgcccacuauaaaagugugaggaccuggagcgaggucauaccauccaagggcugccugucugugggcgggcggugucauccccacgaaaauggaguuuucuuuaacgguaucauucucggcccugaugggagcgugcuuaucccagagaugcagucaagucuguugcaacagcacauggaacuacuggaguccagcgucauaccccucaugcauccgcuggcuaauccuucuacgguguucaaagacggagaugaggccgaagacuuuguagagguucaccuucccgaugugcaggaacagauuucaggcgucgaccuggguuugccaaacugggggaaguacgugaugaugagugcaggcgcucucgccauccugauguuaaccaucuuccugaugacaugcugucgucgcgcgaauagaacuaggagcacccaacgggaucuaggaggccucgagcgaaaagucuccgugccucccaaggacgggcgcguuaugucuucgugggaaagcuauaaguccggaggugagacaucacuguga

SEQ ID NO: 159342 - RNA, 1575 nt, Artificial Sequence
  derived and/or modified CDS sequence (opt3) from glycoprotein__RABV__JQ685922.1
augaucccccaggcccuccuguucgugccucuucugauuccaaguuugugcuuaggcaaguuuccgauauacaccauccccgacaaacuggggccuugguccccaauugauauccaccaucuaucuugucccaacaaucucgucguugaggacgaaggaugcacaucacugagugguuucagcuauauggagcuuaaggugggcuacauuuccgcuaucaaaguaaacggguuuacuuguacgggaguggucaccgaagcagagacauauacuaauuucgugggcuacguuaccacaaccuuuaagagaaaacacuucaggccuaugccagaugccugccgggcggcucaugacuggaagauagccggugauccccgcuaugaagacucucugcaaaacccuuacccagauuaucacugguugcgaacugugaagacaaccaaagagucgcucgucaucauuucaccgagcguggcagagcuggaccccuacgauaagagucugcauucccguguauuuccuucugggaaaugucucggaaucacgguuagcuccacuuacugcucaaccaaucacgacuauacaauuuggaugccaguggaagccagauuaggcacuagcugugauaucuucaccaacagcaggggcaagaaggcuucuaaagggggacggacaugcgguuuugucgacgagcgcggccuguacaagucccuuaaaggggcauguaaguugaaacugugcggagugcccggccuaagacucauggaugguaccugggugucaauacagacgagcgacgacauuaagugguguccuccagaucagcuggucaaucuucacgacuuccauagugaugaaaucgagcaccugguuguggaggaauugauuaaaaagagggaggggugccucgacgcccuggaaucuaucaugacuacaaaauccgugagcuuucggcgcuuaucgcaucugcgaaagcucguacccggauucggcaaggcuuauaccaucuuuaacaauacucuuauggaggccgaugcgcacuacaaaucugucagaacauggaacgaagugauuccguccaagggcugccugaaaguugggggaaggugucacccucccgugaauggugucuucuucaacggcauaaucuuggggccagacggaaaugugcuaauuccugagaugcagucaagucugcuccaacagcauauggagcugcuugaaagcuccguaaucccccugaugcacccauuggcagaucccucuaccguuuuuaaggacggcgaugaggccgaagacuucguggagguccaucucccugaugugcacaaacaggucagcgacguggaccuggguuuaccaucaugggggaaguaucugcuaaugagugcuggcgcccucgcaacgcugauacuugcuaucuuuuugauuaccugcugucggcgugccaaccgcacagaauccacucagagaggacauagggagagcggcgggaagguuucuguggcgccgcaaaauggaaaaaucauuucaaguugggagcuguacaagagcgaauccgagaccgguauguga

SEQ ID NO: 159343 - RNA, 1575 nt, Artificial Sequence; identical to SEQ ID NO: 159317
  derived and/or modified CDS sequence (opt3) from glycoprotein__RABV__JQ685923.1

SEQ ID NO: 159344 - RNA, 1575 nt, Artificial Sequence
  derived and/or modified CDS sequence (opt3) from glycoprotein__RABV__JQ685925.1
augaucccccaggcccugcucagcgugccucuucugauuuccucuuugugcuucggcaaguuuccaauauacaccaucccggagaaauuagggcccuggucaccuauugacauccaccaucugaguuguccaaacaaucuagucguugaagaugagggaugcaacagccucuccgguuucucuuauauggaacugaaggugggcuacauuucggcuaucaaaguaaauggguuuacauguacuggaguggucacggaggcagaaaccuauacaaacuucgugggcuacguuacuaccacauuuaagagaaaacacuucaggcccaugccugacgccugccgggcggcuuauaauuggaagaccgccggugauccacgcuacgaggagucacuucauaaccccuauccugacuaccacuggcugcgaacugugaagacaaccaaagaaagccuuauaaucauuaguccauccgucgcagaucucgacccguacgauaagucucugcauagccguaucuuucccgggggaaaaugucugggcauuacgaucuccucaacuuauugcaguaccaaucacgacuacacaauauggaugccugaggaagccagacucggcacuagcugugauauuuucaccaacucuaaggggaaaagggcuuccaagggaggucggacaugcggcuuuguggacgagcgcggguuauauaagucacugaaaggagcauguaaguugaaauugugcggcguaccaggucugagacuaauggaugggaccuggguugccauccaaacgcccaaugagacuaagugguguagcccugaccagcucgugaacguccacgauuucaggagugacgaaauugagcaucuggugguggaggaacuuauccggaaacgcgaagagugccuggacgcuuuggagucuaucaugacaaccaaguccgucagcuuucgaagacucucgaaucugaggaaauuaguuccaggauucggcaaggccuacacuauuuuuaacaagacacugauggaagcggaugcacacuauaaaucugugcggaccuggaaugagauaauccccucccguggcugccucaagguagggggacgcugucauccgcacgugaacggugucuucuucaauggcauuauccuugggccugacggacacauacugauucccgaaaugcagucaaguuugcuacagcaacauauggagcugcucgaaagcuccgugaucccacugauccacccucuugccgaucccucuacgguuuuuaaagacggcgaugaggcugaggacuucguggaaguccaucugccagaugugcaccagcagguaagcgguguugacuuggggcuccccgauuggggcaaguacgugcugaugucagccggagcauuagcuaccgucaugcugacaauuuuucuaaucacuugcuguagaagggugaaacggaccgagaguguccagcaaggccucggggaauccggacgaaaggugagcguugccccucagaacgguaaggugaugucuucaugggaguauuacaaaaguggcgggggaacacgccuguga

SEQ ID NO: 159345 - RNA, 1575 nt, Artificial Sequence
  derived and/or modified CDS sequence (opt3) from glycoprotein__RABV__JQ685926.1
augaucccccaggcccugcucuacgugccucuucugauuccgagcuugugcuuaggcggguucccaauauauaccauccccgacaagcugggaccuugguccccaauugauauccaccaucuaucuugucccaacaaucucgucguugaggacgaagguugcacaucacugaguggcuuuagcuacauggagcuuaaagugggguauauuuccgcuaucaagguaaacggauucacuuguacgggcguggucaccgaagcagagacauacacuaauuuuguggguuauguuaccacaaccuucaaaagaaagcacuuuaggccuaugccagaugccugccgggcggcuuacaacuggaaaguggccggggacccccgcuaugaagagucucugcaaaauccuuacccagauuacucgugguugcgaacugucaugacaaccaaggagucacucauaaucauuagcccgaguguggcagaccuggaucccuaugacaagucccugcauucucguguauucccuggaggcaaaugucucggcaucacgauuuuuagcacuuacugcuccaccaaccacgauuauacaaucuggaugccagaagaggccagauuagggacuucaugugacauauucaccaauaguaggggaaagcgggcuagcaaagguggcaagacaugcggguuuguugaugaacgcggacuguacaaaucucuuaagggcgcauguaaguugaaacugugcggugugcccgggcuaagacucauggacggaaccugggucacgauucagacuuccgaugagacaaagugguguccuucagaccagcuggugaaccuucaugacuuccacagcgaugagaucgaacaccugguggucgaggaauugguuaaaaagagggaggaaugccucgacgcccuggagaguauuaugaccacuaaaucuguguccuuucggcgcuuaagccaucugcgaaagcucguaccaggcuucggcaaggcuuauacaaucuuuaauaagacccuuauggaggccgaugcgcacuacaagucgaucagaacguggaacgaaauuauacccucuaaagggugccugaaggugggagguaggugucauccgcacgucgacggcguguucuucaaugggaucauuuugggaccugauggcaacguucuaauccccgagaugcaguccucacugcuccaacagcacguggaacugcuugagaguagcgucauaccacugaugcauccuuuggcagaccccuccaccguguuuaaagauggugacgaagccgaggauuucguagagguucaccucccagacauucauaaacaggugucuggggucgaucugggcuuacccaauuggggaaaauaucugcuaaugagcgcuggcgcccucgcaacacugaugcuuacuaucuuuuugaugaccugcugucggcgugcuaaccgcacagaaucaauccagagagacccuggggagaguggaaagaagguguccgucacuagccaagacgguaaagugauuucuucaugggaacuguacaagaguggcggggagaccaggcucuga

SEQ ID NO: 159346 - RNA, 1575 nt, Artificial Sequence; identical to SEQ ID NO: 159316
  derived and/or modified CDS sequence (opt3) from glycoprotein__RABV__JQ685928.1

SEQ ID NO: 159347 - RNA, 1575 nt, Artificial Sequence
  derived and/or modified CDS sequence (opt3) from glycoprotein__RABV__JQ685929.1
auggugccccaggcccuucucuucgucccucuucugaucccaccgguuugcuugggcaaguuucccauuuacaccauaccugacaaauuagggccauggagccccaucgauauucaccaucuguccuguccuaacaaucuagugguagaggacgaaggaugcucuaaccucucagguuucaguuauauggagcugaaggugggcuacaucagcgcuauuaaagucgauggguuuacauguacuggagugguuacggaagcagagaccuauacaaauuucaucggcuacgugacuaccacauuuaagagaaaacacuucaggccaaugcccgacgccugccgguccgcguauaacuggaagauagcuggugauccucgcuacgaagagucucuucauaccccauauccggacuaccacuggcugcgaacugucaagacaaccaaagagucguuggugaucauuucacccagcguagccgaucucgacccuuacgauaagagucugcauuccaugguuuuuccaaaugggaaauguucuggaaucacgguguauagcacuuacugcuccaccaaccacgacuauacaauuuggaugcccgaaaaggcaggccugggcacuucaugugauaucuucaccaauagucgugggaaaagagccagcaagggagguaggacaugcggcuuugucgacgagcgggggcucuacaagucuuuacgcggagcuuguaaacugaagcugugcggcgugccugguuugagacugauggaugggaccugggcaacgauacaaacuccagaagagacaaaaugguguucccccgaccagcuagugaaccuccacgacuuccauucagaugagauugaacaccuggucguugaggaccuugugaagaaaagggaagagugccuggauaccuuggaaagcaucaugacuacaaagaguguaucuuuucggcgccucucccaucugcgaaaauuagugccgggauucggcaaggccuauaccauuuuuaauaagacgcugauggaggcugacgcccacuacaaaagcgucagaaccuggaacgagaucaucccuucgaagggcugccucaggguugggggacggugucacccccaugugaaugguguguucuucaacggcgucauuauggggccagauggacacgugcuuauaccugaaaugcagucuucccuguugcagcaacauauggagcuacuggaaucaaguguaaucccccucauucacccacuggcggaccccagcacaguuuuuaaagauaaugacgaggcagaagauuucguggagguccaucuuccugacgugcacaagcaggucuccggcaucgaucuggguuugccaucuugggggcguuaucucgugaugauagccggcgcucugaugacuuuaacccugguuauuuuucuaaugaucugcugucgcagagugaacaaagccggaagcauccagcaggacccggagaagucagaaaagaggcggaguguaacaccccaaaauggcaaagucauuuccagcugggagucuuacaagucagggagugaaacucgacucuga

SEQ ID NO: 159348 - RNA, 1575 nt, Artificial Sequence
  derived and/or modified CDS sequence (opt3) from glycoprotein__RABV__JQ685931.1
augaucccccaggcccuccuguucgugccucuucugauuagcuccuugugcuuuggcggguucccaauauacaccaucccggacaaguuaggacccuggucuccuauugauauccaccaucugucauguccaaacaaucuagucguugaggacgaagguugcacaagucucagcggcuuuuccuauauggagcugaaagugggguacauuucugcuaucaagguaaacggauucacuuguacgggcguggucaccgaagcagagacauauacuaauuuuguggguuacguuaccacaaccuucaaaagaaagcacuuuaggcccaugccugaugccugccgggcggcuuauaacuggaaaacugccggggacccacgcuacgaagagucgcuucaaaaucccuauccugauuaccauuggcugcgaacagugaagaccacgaaggagucauugauaaucauuagcccaagugucgcagaccucgauccguacgacaaaucccugcacucucguguguuccccggaggcaagugucugggcaucacuguaagcuccaccuauugcucaacaaaccaugauuacacuauuuggaugccugaagaggccagacucgggaccaguugugacaucuuuacaaauagcaggggaaaacgggcuucuaaggguggcagaaccugcggguucguugaugaacgcggauuauauaaaucccugaagggcgcauguaaacuuaaauugugcggugugcuggggcuaaggcucauggacggaacgugggucacuauacagacaucaaacgagaccaagugguguccaagcgaucagcuggugaaucuucacgacuuucacagugacgagauugaacaucugguggucgaggaauugguuaaaaagcgggaggaaugccucgaugcccuggagucuaucaugacuacaaaauccgugagcuuccgccgauuaucgcaccugagaaagcucguacccggcuuuggcaaggcuuacaccauuuucaacaagacgcuuauggaggccgacgcgcauuauaagucuaucaggaccuggaaugaaaucauuccuuccaaagggugccugaaggugggaggucggugucacccacacgucgauggcguguucuuuaacgggauaaucuugggacccgacggcaauguucuaauuccggagaugcagucaagucugcuccaacagcauguggaacugcuugagagcuccgucaucccucugaugcaccccuuggcagauccaucuacaguguucaaagacggugaugaagccgaggacuuuguagagguucaucucccugaugugcacaagcaggucagcgggguggaccugggcuuacccaacuggggaaaauaccugcuaaugucagcuggcgcccucgcaacucugaugcuuaccauauucuugauuacaugcugucgucgcgucgauagaacugaaaguauccagagggggccaggagagcugggucgggaaguguccguuaccagccaaaauggcaaggugaucucuucaugggagcucuauaagagugggggagaaacacgacuguga

SEQ ID NO: 159349 - RNA, 1575 nt, Artificial Sequence; identical to SEQ ID NO: 159317
  derived and/or modified CDS sequence (opt3) from glycoprotein__RABV__JQ685932.1

SEQ ID NO: 159350 - RNA, 1575 nt, Artificial Sequence
  derived and/or modified CDS sequence (opt3) from glycoprotein__RABV__JQ685933.1
augaucccccaggcccugcucuacgugccucuucugauuccaaguuugugcuucggcggguuuccgauauauaccauccccgacaaguuaggaccuugguccccaauugauauccaccaucugucuugucccaacaaucuagucguugaggacgaagguugcacaucacucaguggcuucagcuacauggagcugaaagugggguauauuuccgcuaucaagguaaacggauuuacuuguacgggcguggucaccgaagcagagacauacacuaauuucguggguuauguuaccacaaccuuuaaaagaaagcacuucaggccuaugccagaugccugccgggcggcuuacaacuggaaaauggccggggacccccgcuaugaagagucucuucaaaauccuuacccagauuacucguggcugcgaacugugaagacaaccaaggagucauugauaaucauuagcccgagugucgcagaccucgaucccuaugacaaaucccugcauucucguguguuuccuggaggcaagugucugggcaucacgauuagcuccacuuacugcucaaccaaccacgauuauacaaucuggaugccagaagaggccagacucgggacuagcugugacauauucaccaauagcaggggaaaacgggcuucuaaggguggcaaaacaugcggguuuguagaugaacgcggauuauacaagucccugaagggcgcauguaaacuuaaguugugcgguguucccgggcugagacuaauggacggaaccugggugacgauucagacuucagaugagacaaaaugguguccuagcgaccagcucgucaaccugcaugacuuccacagugaugagaucgaacaccuugugguggaggaacuggucaagaaaagggaggaaugcuuggacgcccucgagucuauuaugaccacuaaguccguuagcuuucggcgccugucgcauuuacgaaaacuggugccaggcuucggcaaggcuuauacaaucuuuaauaagacccucauggaggccgaugcgcacuacaaaucuaucagaacguggaacgaaauuauacccuccaaggggugccuuaaaguaggagguaggugucauccgcacguggacggcgucuucuucaaugggaucauucugggaccugauggcaacguguugauccccgagaugcagucaagucuacugcaacagcacguugaacuccuggagagcuccgugauaccacuuaugcauccucuggcagaccccucuaccgucuuuaaggauggugacgaagccgaggauuucguggagguacacuugccagacauucauaaacagguuagcgggguggaucucggccugcccaauuggggaaaguauuuacugaugucagcuggcgcccuagcaacacucaugcugaucauccuuuugaugacuugcugucggcgugcuaaccgcaccgaaaguauucagagagacccuggggaguccggaaggaaggucagcaucacaucuccagacgguaaagugauuucaaguugggaacuguacaagagcggcggggagacucggcucuga

SEQ ID NO: 159351 - RNA, 1575 nt, Artificial Sequence
  derived and/or modified CDS sequence (opt3) from glycoprotein__RABV__JQ685934.1
augaucccccaggcccugcucuacgugccucuucugauuagcuccuugugcuucggcggguuuccaauauauaccaucccggacaaguuaggacccuggucuccuauugauauccaccaucugucauguccaaacaaucuagucguugaggacgaagguugcacaagucucagcggcuucuccuacauggagcugaaagugggguauauuucugcuaucaagguaaacggauuuacuuguacgggcguggucaccgaagcagagacauacacuaauuucguggguuauguuaccacaaccuuuaaaagaaagcacuucaggcccaugccugaugccugccgggcggcuuacaacuggaaaauggccggggacccacgcuaugaagagucgcuucaaaaucccuacccugauuacucauggcugcgaacugugaagacaaccaaggagagcuugauaaucauuaguccauccgucgcagaccucgauccguaugacaaaucucugcauagccguguguuucccggaggcaagugucugggcaucacgauuuccucaacuuacugcaguaccaaccacgauuauacaaucuggaugccugaagaggccagacucgggacuagcugugacauauucaccaauucuaggggaaaacgggcuuccaaggguggcaaaacaugcggguuuguagaugaacgcggauuauacaagucacugaagggcgcauguaaacuuaaguugugcgguguuccagggcugagacuaauggacggaaccugggugacgauucagacuagcgaugagacaaaauggugucccagugaccagcucgucaaccugcaugacuuccacucugaugagaucgaacaccuugugguggaggaacuggucaagaaaagggaggaaugcuuggacgcccucgaguccauuaugaccacuaagagcguuucguuuaaacggcugucucauuuacgcaagcuggugccuggcuucggcaaggcuuauacaaucuuuaauaaaacccucauggaggccgaugcgcacuacaaguccauccgaacguggaacgaaauuauaccaucaaaagggugccuuaagguaggagguagaugucauccccacguggacggcgucuucuucaaugggaucauucugggaccggauggcaacguguugaucccugagaugcagaguagccuacugcaacagcacguugaacuccuggaguccucugugauaccccuuaugcauccacuggcagacccuagcaccgucuuuaaagauggugacgaagccgaggauuucguggagguacacuugcccgacauucauaagcagguuucagggguggaucucggccugccaaauuggggaaaguauuuacugaugagugcuggcgcccuagcaacacucaugcugaucaucuuucuuauggcuugcuguaggcgggccaaccguacugaauccauucagcgcgaccccggggagagcggaagaaaagucucuaucccuucacaagacgguaaggugauuaguagcugggaauuguacaaauccggcggggagaccaggcuguga

SEQ ID NO: 159352 - RNA, 1575 nt, Artificial Sequence
  derived and/or modified CDS sequence (opt3) from glycoprotein__RABV__JQ685936.1
augauccugcaggcccuccuuuucgugccccuguugauuagcccuuuaugccugggcaaguuuccaauauacaccaucccggacaaacuagggcccugguccccuauugauauccaccaucucucuuguccaaacaaucuggucguugaggacgaaggaugcacaaaccuuucagguuucaguuauauggagcugaaggugggcuacauuagcgcuaucaaaguaaauggguuuacuuguacgggaguggucaccgaagcagagacauauacuaacuucgugggcuacguuaccacaaccuuuaagagaaaacacuucaggcccauaccugaugccugccgggcggcuuauaauuggaagauggccggugacccacgcuacgaagaguccuugcaaaaccccuauccugaguaccauuggcuccgaacugugaagacaaccaaagaaucucugaucauuaucucgccaucagucgcagaucuggacccguacgauaagagccuccacagucguguguuucccgggggaaaauguuuaggcauuacgguauccucuacuuauugcagcaccaaucaugacuacacaaucuggaugccugaggaaccaagacugggcacuuccugugauauauucaccucaaguaaggggaaaaaggccagcaagggagguaaaacaugcggcuuuguugacgagagggggcuuuauaagucuuugaaaggagcuuguaagcugaaacuaugcggcgugcucggucugcggcuuauggaugggaccugggucuccauucagacgucagacgauacuaaguggugucccccugaccagcuggugaacuugcacgacuuccacagcgaugagaucgaacaucucguggucgaggaacugguuaaaaagcgcgaggaaugcuuagacgcacuggagaguauuaugacaaccaagucuguguccuuuagaaggcucagcuaccuucggaaacugguaccaggauucggcaaggccuauacuaucuuuaauaaaacauugauggaggcugaugcccacuacaagucggugcgcaccuggaacgaaaucauucccucuaaaggcugccuaaagguccgagagagaugucauccgccuguggacgggguuuucuucaauggaauaauccugggucccgauggcaacgugcucauuccagaaaugcaguccucacugcuucaacagcacauggagcuguuggaaaguagcgucaucccucucaugcacccccuggcggacccauccacgguguuuaaggagggggaugaggcagaagacuucguagagguucauuuacccgaugugcacaaacagauaucuggagucgaccugggccuaccuagcugggguaaguaucuccugaugauugccgggggccuugugaccuugguccugaucaucugcucaauugcuuguugcaggcgggccaaacguacagaaagucgcagaaggggauccggcgagagcgggaagaaagugaaugcaacuccacagacccggaagguugugucuucaugggaacucuacaagcgagagggagaugcucgccuguga

SEQ ID NO: 159353 - RNA, 1575 nt, Artificial Sequence
  derived and/or modified CDS sequence (opt3) from glycoprotein__RABV__JQ685938.1
auggugcugcaggcccuccuuuucgcccccuuucugaucagcuccuugugcuuaggcaaguucccuauuuacaccauaccagacaaacuggggccguggucucccaucgauauucaccaucuaucauguccuaacaaucucgucguugaggacgaaggaugcaacagucugagcgguaucuccuauauggagcuuaaggugggcuacauuucugcaaucaaaguaaauggguuuacauguacuggaguggucacggaagccgagaccuauacaaacuucgugggcuacguuacuaccacauuuaagagaaaacacuuccauccaaugcccgaugcgugcaggucggcuuauaauuggaagcuggccggugacccucgguacgaagagucauugcaaaacccauaucccgauuaccacuggcuccgcaccgugaagacuacaaaagagagccugauaaucauuaguccuuccgucgcagaccuggauccauacgacaagucucuccauagccgaaucuuuccguccgggaaauguucaggaaugaccauuaguagcacguauugcucuacuaaucacgaauacaccaucuggaugcccgagaaggccggcuuaggcacauccugugauauauucacuaccucaaaagggaagcgugcuagcaagggagguaaaacaugcggcuuuguggacgaaagagggcuguauaagagucuuaaaggagcauguaaguugaaacugugcggcguaucuggucuaaggcucauggaugggaccuggguugccauucagacguccgaggagacuaagugguguccuccagaccagcuggugaaccuucacgaucugcauagcgacgaaaucgagcacuuggucguggaggaacucgugaaaaagcgggaagagugccuggacgcuuuagagucgauuaugacaaccaagucugucuccuuccgcagacugucacaucucaggaaacuuguucccggauuuggcaaggccuacacuaucuucaauaaaacacugauggaagcggaugcacacuauaagaguauccggaccuggaacgagauuauaccuagcaaaggcugcuugcgcguagggggaaagugucacccacaugugaaugguguguuuuucaacggcaucauucuagggcccgacggacacguccugaucccggaaaugcaguccucucuccugcaacagcauauggagcuucuggaaagcucagugauaccuuugaugcacccccucgccgaucugaguacgguuuucaaggacggcgaugaggcugaggacuuuguggaaguccauuuaccagaugugcacaaacagauuuccgguguagaccuggggcuaccuagcuggggcaaguacguucucaugucugccggagcacuggcuauccuuauguuggugaucucacugaugaaaugcuucuggggcgucaaucgaaccaagcccauucagcaagggccaagagagagugaaaggaaagugagcaucgcuccccagucccggaaggucauuucuucgugggagagcuauaaguccggaggugaaacagagcucuga

SEQ ID NO: 159354 - RNA, 1575 nt, Artificial Sequence
  derived and/or modified CDS sequence (opt3) from glycoprotein__RABV__JQ685940.1
augaucccccaggcccugcucuacgugccucuucugauuccaaguuugugcuucggcggguuuccgauauauaccauccccgacaaguuaggaccuugguccccaauugauauccaccaucugucuugucccaacaaucuagucguugaggacgaagguugcacaucacucaguggcuucagcuacauggagcugaaagugggguauauuuccgcuaucaagguaaacggauuuacuuguacgggcguggucaccgaagcagagacauacacuaauuucguggguuauguuaccacaaccuuuaaaagaaagcacuucaggccuaugccagaugccugccgggcggcuuacaacuggaaaguggccggggacccccgcuaugaagagucucuucaaaauccuuacccagauuacucguggcugcgaacugucaagacaaccaaggagucauugauaaucauuagcccgaguguggcagaccucgaucccuaugacaaaucccugcauucucguguauuuccuggaggcaagugucugggcaucacgauuagcuccacuuacugcucaaccaaccacgauuauacaaucuggaugccagaagaggccagacucgggacuagcugugacauauucaccaauagcaggggaaaacgggcuucuaaggguggcaaaacaugcggguuuguugaugaacgcggauuauacaagucccugaagggcgcauguaaacuuaaguugugcggugugcccgggcugagacuaauggacggaaccugggucacgauucagacuucagaugagacaaaaugguguccuagcgaccagcucgugaaccugcaugacuuccacagugaugagaucgaacaccuuguggucgaggaacugguuaagaaaagggaggaaugcuuggacgcccucgagucuauuaugaccacuaaguccgugagcuuucggcgccugucgcauuuacgaaaacugguaccaggcuucggcaaggcuuauacaaucuuuaauaagacccucauggaggccgaugcgcacuacaaaucuaucagaacguggaacgaaauuauacccuccaaggggugccuuaaagugggagguaggugucauccgcacgucgacggcguguucuucaaugggaucauucugggaccugauggcaacguuuugauccccgagaugcagucaagucuacugcaacagcacguggaacuccuggagagcuccgucauaccacuuaugcauccucuggcagaccccucuaccguguuuaaggauggugacgaagccgaggauuucguagagguucacuugccagacauucauaaacaggugagcggggucgaucucggccugcccaauuggggaaaguauuuacugaugucagcuggcgcccuagcaacacucaugcugacuaucuuucuuauuaccugcugucggcguaguaaccgcacagaauccauccagagagacccuggggagagcggaaagaaagugucuaucacuucacaagacgguaaggucauuaguagcugggaauuguacaaauccggcggggagaccaggcuguga

SEQ ID NO: 159355 - RNA, 1575 nt, Artificial Sequence; identical to SEQ ID NO: 159316
  derived and/or modified CDS sequence (opt3) from glycoprotein__RABV__JQ685941.1

SEQ ID NO: 159356 - RNA, 1575 nt, Artificial Sequence
  derived and/or modified CDS sequence (opt3) from glycoprotein__RABV__JQ685942.1
augaucccccaggcccugcuccuugugccucuguugauuagcuccuuaugcuucggcggguuuccaauauacaccaucccggacaagcugggacccuggucuccuauugauauccaccaucuaucauguccaaacaaucucgucguugaggacgaagguugcacaagucugagcggcuucuccuauauggagcuuaaagugggguacauuucugcuaucaagguaaacggauuuacuuguacgggcguggucaccgaagcagagacauauacuaauuucguggguuacguuaccacaaccuuuaaaagaaagcacuucaggcccacuccugaugccugccgggcggcuuauaacuggaaaauggccggggacccacgcuacgaagagucgcugcaaaaucccuauccugauuaccauugguugcgaacagugaagaccacgaaggagucacucauaaucauuagcccaagugucgcagaccuggauccguacgacaaaucccugcacucucguguguuucccggaggcaagugucucggcaucacuguaagcuccaccuauugcucaacaaaccaugauuacacuauuuggaugccugaagaggccagauuagggaccaguugugacaucuucacaaauagcaggggaaaacgggcuucuaaggguggcaaaaccugcggguuuguugaugaacgcggacuguauaagucccuuaagggcgcauguaaauugaagcugugcggugugccagggcuaagacucauggacggaacgugggucacuauacagacaucagaugagaccaaauggugucccagcgaccagcuggugaaccuucacgacuuccacagugaugagauugaacaucugguggucgaggaauugguuaagaaaagggaggaaugccucgacgcccuggagucuaucaugacuacaaaguccgugagcuuucggcgcuuaucgcaucugcgaaaacucguaccuggcuucggcaaggcuuacaccauuuuuaauaagacgcuuauggaggccgaugcgcacuauaaaucuaucagaaccuggaacgaaaucauuccauccaaggggugccugaaagugggagguaggugucacccccacgucgacggcguguucuucaaugggauaaucuugggaccggauggcaacguucuaauuccugagaugcagucaagucugcuccaacagcauguggaacugcuugagagcuccgucaucccccugaugcacccauuggcagacccuucuacaguguuuaaggauggugacgaagccgaggauuucguagagguucaucuccccgacauacacaaacaggugagcggggucgaucugggcuuaccaaauuggggaaaguaccugcuaaugucagcuggcgcccucgcaacucugauucuuaccaucuuuuuggugacaugcugucggcgugucgaccgcacuagaaguauccagaggggguccggagaaagcggucggaaggugucuguuaccucacaaaacggcaaagugauuaguagcugggagcuguauaaguccgggggagaaacacgacucuga

SEQ ID NO: 159357 - RNA, 1575 nt, Artificial Sequence
  derived and/or modified CDS sequence (opt3) from glycoprotein__RABV__JQ685943.1
auggugcugcaggcccuccuuuucgucccccuguugguuuuuccuagcugcuucggcaaguuuccaaucuacaccauuccggacaaauuagggcccugguccccuauagauauccaccaucugucuuguccaaacaaucuagugguagaggacgaaggaugcaacaaucucucagguuucaguuauauggagcugaaggugggcuacauuagcgcuaucaaagucaacggguuuacauguacuggagugguuacggaagcagagaccuauacaaauuucgugggcuacgucacuaccacauuuaagagaaaacacuucaggcccaccccugaugccugccgggcggcuuauaacuggaagauggccggugacccacgcuacgaagagucccuucauaaucccuauccugauuaccacuggcugcgaacugugaagacaaccaaagagucuuugguaauuaucucgccaucaguugcagaccucgauccguacgacaagagccugcauagucguguguuucccuccgggaaauguucuggaaugacggucagcuccacuugcuguucaaccaaccacgauuauacaauauggaugccugaaaauccaagacugggcaccaguugcgacaucuucacuaacagcaggggcaagcgggccucuaaaggguccaagacauguggauuuguggaugagcgcggucucuacaagucauuaaaaggcgcuugcaagcugaaacuuugugggguguugggacugagacuaauggacggcaccugggucgcaaugcaaacgagcgaugaaauuaaguggugucccccugaccagcucguuaaucugcacgacuucaggagugaugagaucgagcaucuugugguagaggaacuggugaaaaagcgggaagagugcuuggacgcccucgaaucuauuaugacuacaaaauccgucagcuuucgccgacugucgcacuuaagaaagcuggugccagguuucgggaaggcuuauaccaucuucaacaggacucucauggaggccgaugcgcauuacaaaucuguucggacauggaaugaggugauacccuccaagggaugccuucgugucggcggccgcugccacccgcacgugaacgggguauuuuucaauggaauuauccuggguccugacggccauguuuugauucccgaaaugcagucaagucuacugcagcaacacauggagcuccuggaaagcuccgugaucccacuuaugcauccucuggcaaaccccucuaccgucuuuaaagagggggaugaagccgaggacuucguggagguccacuugccagaugugcauaagcagguuagcggaguggaccucggccugcccaacugggguaaauauguauuaaugucagcuggggcccugaucgcacuaaugcucauuauauuucugaugacguguugcagaagggucaaucggccugaaaguacccagcgaauccuuggcggaacaggcaagaagguguccgcugccagccagucugggaaaguuauuucaaguugggagagcuacaaguccggaggugaaacucaauuguga

SEQ ID NO: 159358 - RNA, 1575 nt, Artificial Sequence
  derived and/or modified CDS sequence (opt3) from glycoprotein__RABV__JQ685944.1
auggugccccaggcccugcucgucguuccucuucugggcuucagcuugugcuuugggaaguucccaaucuacaccauuccggacaaauuaggacccugguccccuauagauauccaccaucugucuuguccaaacaaucuagugguagaggacgaagguugcacaaaccucucaggcuuuaguuauauggagcugaaggugggguacauuagcgcuaucaaagucaauggauucacuuguacgggcgugguuaccgaagcagagacauauacuaacuuuguggguuacgucaccacaaccuucaagagaaaacacuuucaucccacuccugaugaaugcagggccgcguauaauuggaagauggcuggggacccacgguacgaggagucccuucacaaccccuauccugauuaccauuggcugcgcacagugaagaccacgaaagaaucuuugguaauuaucucgccaucaguugccgaccucgauccguacgacaagagccugcacagucgaguguuccccuccggaaaauguucuggcauaacugucagcuccaccuauugcucaacaaaucacgauuacacuaucuggaugccugagaacccacgucugggcaccaguugugacauuuuuacaaauagcagagggaagagggcaucuaaaggauccaagaccugcgguuucguggaugaacggggccucuauaagucauuaaaaggggccuguaagcugaaacuuugcggagugcccggcuugaagcugaucgacgguacguggauugcuaugcaaacuagcgaugagacaaaaugguguccuccagaccagcuagucaaccuccaugacuuucgcagugaugagaucgaacaccugguuguggaggaccuuguaaagaaaagagaagagugccuggaugcauuggaaucuauaaugaccacuaaguccgugagcuucaggcggcucucgcaucugcgcaaguuaguccccggguuuggaaaagccuacacaauuuucaauaagacccugauggaggcugacgcccacuauaaaucugugcgaacguggaacgagaucauuccguccaagggcugccucaaaguuggcgggagaugucacccucaugugaauggagucuucuuuaacggugugauccuuggccccgaugggcacguacugaucccagaaaugcagucaaguuugcuacagcaacauauggagcugcucgaaagcuccguuauuccucugaugcacccccuugcggacccaucuaccguguucaaggauggagacgaggcagaagauuuugucgagauacaucugcccaaugugcacaagcaggucagcggcguggacuugggucucccuaacugggggaaauacguuucacugagugccggcgcuuuaacagcccugaugcuaaucauuuuccucauggcaugcuguaggaaggugaaccggccagagccgacucagcguucccuggaaggaaaaggccgcaagguaagcaucaccucucagucagggaaagucauaaguagcugggaguccuauaagucuggaggugaaacaagacuuuga

SEQ ID NO: 159359 - RNA, 1575 nt, Artificial Sequence; identical to SEQ ID NO: 159320
  derived and/or modified CDS sequence (opt3) from glycoprotein__RABV__JQ685945.1

SEQ ID NO: 159360 - RNA, 1575 nt, Artificial Sequence
  derived and/or modified CDS sequence (opt3) from glycoprotein__RABV__JQ685946.1
augaucccccaggcccugcucuacgugccucuucugauuccaaguuugugcuucggcggguuuccgauauauaccauccccgacaaguuaggaccuugguccccaauugauauccaccaucugucuugucccaacaaucuagucguugaggacgaagguugcacaucacucaguggcuucagcuacauggagcugaaagugggguauauuuccgcuaucaagguaaacggauuuacuuguacgggcguggucaccgaagcagagacauacacuaauuucguggguuauguuaccacaaccuuuaaaagaaagcacuucaggccuaugccagaugccugccgggcggcuuacaacuggaaaauggccggggacccccgcuaugaagagucucuucaaaauccuuacccagauuacucguggcugcgaacugugaagacaaccaaggagucauugauaaucauuagcccgagugucgcagaccucgaucccuaugacaaaucccugcauucucguguguuuccuggaggcaagugucugggcaucacgauuagcuccacuuacugcucaaccaaccacgauuauacaaucuggaugccagaagaggccagacucgggacuagcugugacauauucaccaauagcaggggaaaacgggcuucuaaggguggcaaaacaugcggguuuguagaugaacgcggauuauacaagucccugaagggcgcauguaaacuuaaguugugcgguguucccgggcugagacuaauggacggaaccugggugacgauucagacuucagaugagacaaaaugguguccuagcgaccagcucgucaaccugcaugacuuccacagugaugagaucgaacaccuugugguggaggaacuggucaagaaaagggaggaaugcuuggacgcccucgagucuauuaugaccacuaaguccguuagcuuucggcgccugucgcauuuacgaaaacuggugccaggcuucggcaaggcuuauacaaucuuuaauaagacccucauggaggccgaugcgcacuacaaaucuaucagaacguggaacgaaauuauacccuccaaggggugccuuaaaguaggagguaggugucauccgcacguggacggcgucuucuucaaugggaucauucugggaccugauggcaacguguugauccccgagaugcagucaagucuacugcaacagcacguugaacuccuggagagcuccgugauaccacuuaugcauccucuggcagaccccucuaccgucuuuaaggauggugacgaagccgaggauuucguggagguacacuugccagacguucauaaacaggugagcggggucgaucucggccugcccaauuggggaaaguauuuacugaugucagcuggcgcccuagcaacacucaugcugacuauuuuucuuaugaccuacugccggcgugcuaaccgcgccgaaaguauccagagagacccuggggaguccggaaggaaggugagcaucacaucucaagacgguaaagucauuucaaguugggaauuguacaagagcggcggggaggcgcggcuguga

SEQ ID NO: 159361 - RNA, 1575 nt, Artificial Sequence
  derived and/or modified CDS sequence (opt3) from glycoprotein__RABV__JQ685947.1
augaucccccaggcccuccuguucgugagccuucugauuccuuccuugugcuuaggcgaguuuccaauauacaccaucccggacaagcuggggcccuggacaccuauugauauccaccaucuaucuuguccaaacaaucucgucgcugaaaacgacggaugcacuucacugagugguuucagcuauauggagcuuaaaguuggcuacauuuccgcaaucaaggugaauggguuuacguguaccggaguagugacagaagccgagacuuauaccaacuucgucggcuacgugacaaccacuuuuaaaagaaagcacuucaggcccaugccugaugcgugccgggcugcccaugacuggaaaauggcaggggauccacgcuaugaagacucucugcaaaaucccuacccugauuaucacugguugcgaacaguuaagaccacgaaggagucgcucgugauaaucucaccaagcgucgccgaccuggauccguacgacaaaagucugcauucccguguguuucccucugggaagugucucggaauuacuguaagcuccaccuacugcucaacaaaccacgauuauacuaucuggaugccuguugagccaagauuaggcaccaguugugacauuuucacaaauagcaggggcaaacgggcuucuaaggguggacgcgugugcgguuuugucgaugaaagaggccuguacaaaucccuuaagggggcauguaaguugaaacugugcggagugcccggcaucaggcuaauggacgguaccugggugucaauacagacgagcgaggacauuaagugguguccuccagaucggcucgucaaccugcacgacuuccauagugaugaacuugagcaccugguuguggaggaauugaucaaacgccgagagaauugccucgacgcccuggaaucuauuaugacuacaaaguccgugagcuuuagaagguuaucgcaucugcggaaacucguacccggguucggaaaggcuuauaccaucuuuaacaaaacucuuauggaggccgaugcgcacuacaagucugucaagacauggaaugaagugaucccguccaaaggcugccuggagguuggcgggaagugucacccucccgugaacggagucuucuucaaugguauuauauugggcccagacgggaacgugcuaaucccugagaugcagucaagucugcuccagcaacauauggaacugcuugagagcuccguaauuccccugaugcacccauuggcagaucccucuaccguuuuuaaagaaggagacgaggccgaagauuucguggagguccaucucccugacgugcacaagcaggucagcgauguggaccugggcuuaccaucaugggguaaauaucugcuaaugagugcuggggcccucgcaauccugauacuugcuauuguuuugaucaucugcugucgucgcgugaauaagacgagauccacccagaggggccagcgggagagccgaggaaagaugucuguagccccgcaaaacggcaaaauuaucucaaguugggaacuguacaagcgcgagagcgaaacagggcucuga

SEQ ID NO: 159362 - RNA, 1575 nt, Artificial Sequence; identical to SEQ ID NO: 159360
  derived and/or modified CDS sequence (opt3) from glycoprotein__RABV__JQ685951.1

SEQ ID NO: 159363 - RNA, 1575 nt, Artificial Sequence
  derived and/or modified CDS sequence (opt3) from glycoprotein__RABV__JQ685952.1
augaucccccaggccauucugagcgugccucuccuuauauccucucugugcuucggcaaguuuccaaucuacaccauuccggagaaauuggggcccuggucaccuaucgacauucaccauuuaaguuguccaaacaaucuggucguugaagaugagggaugcacaacucuaagcgguuucuccuauaucgaacucaaggugggcuacauaucugcuaucaaaguaaacggguuuacguguaccggaguggucacagaggcagaaacuuauaccaauuucgugggcuacguuacaaccacuuuuaagagaaaacacuucaggcccaugccugacgccugccgggcggcuuauaacuggaagauggccggugauccacgcuacgaggagucgcugcauaaucccuauccugacuaccacuggcuucgaacagugaagaccacgaaagaaucacuggucauuaucagcccaaguguggcagauuuggacccguacgauaagucccuccauucucguguauuucccgggggaaaaugucugggcauuacuaucagcuccaccuauugcucaacaaaccacgacuacacuauauggaugccugaggaagccagacugggcaccaguugugauauuuucaucaauagcagggggaagcgggcuucuaaaggaggucgcacaugcggcuuuguugacgagagagggcucuauaaguccuuaaagggagcauguaaacugaagcuaugcggcgugccagguuugaggcugauggaugggaccugggucucaauucccgccagcgacgagacgaaaugguguaguccugaucaacuugugaacgugcacgacuuccauucugacgaaaucgagcaccucgucguugaggagcuggugaagcggcgcgaagagugccuugaugcucuggaguccaucguaacuacaaaaagcauuucguuucgaagauugucucaucucaggaagcuggugccaggauucggcaaagccuacaccauauuuaauaagacuuuaauggaagcggacgcacacuauaaguccguccggacauggaacgagaucauucccucaaaaggcugccugaguguugggggacguugucacccgcaugugaaugguguguucuucaacggcaucauacucgggccugauggaaauguccuuauucccgaaaugcagagcucccuguugcagcagcacauggagcuacuggaaucuagcgugaucccacucaugcauccucuggccgaccccucaaccguauuuaaggauggcgacgaggcugaggauuucguugaagugcaccuuccagacguccaagaacaggugaguggugucgaucugggguugcccaacuggggcaaauacgugcucauguccgccggagcacuggcuaucuuaauucugacgaucuuucuaauuaccugcugucgcagagccgacaagacaaaaagcauacagcagggccucgggggaucugguaggaagguuucagugaguccucaaaauggcaagguaaucagcuccugggaaucuuauaaaaacgggggagagacucggcuguga

SEQ ID NO: 159364 - RNA, 1575 nt, Artificial Sequence
  derived and/or modified CDS sequence (opt3) from glycoprotein__RABV__JQ685953.1
augaucuuccaggcccugcccuuugugccucuccuuauuagcucccugugcuugggcaaguucccaauauacaccaucccggacaaauuagggcccuggucuccuauugauauccaccaucugucauguccaaacaaucuagucguugaggacgaaggaugcacaagucucagcgguuuuuccuauauggagcugaaggugggcuacauuucugcuaucaaaguaaacggguucacuuguacgggaguggucaccgaagcagagacauauacuaauuuugugggcuacguuaccacaaccuucaagagaaaacacuuuaggcccauaccugaugccugccgggcggcuuauaacuggaagauggccggugacccacgcuacgaagagucgcuucaaaaucccuauccugaguaccauuggcugcgaacugugaagacaaccaaagaaucauugaucauuaucagcccaagugucgcagaucucgacccguacaacaagucccugcacucucguguguuccccgggggaaaaugucugggcauuacgaucagcuccacuuauugcucaaccaaucaugauuacacaauauggaugccugaggaaccaagacucggcaccaguugugacauuuuuacuagcucuaaggggaaaaaggccuccaagggagguaaaacaugcggcuucguagaugagaggggguuauauaagucacugaaaggagcuuguaaacuuaaguugugcggcguucugggucuacggcucauggacgggaccugggugagcauccagacgagugaugacacuaaguggugucccccugaucagcuggucaaccuucacgacuuucacucugacgagauugaacaucuggugguggaggaauuggucaaaaagcgcgaggaaugccucgaugcacuggaguccaucaugacaaccaagagcguuucguucagaagguuaucuuaccugcggaaacucgugccaggauuuggcaaggccuauacuaucuucaauaaaacacuuauggaggcugacgcccacuacaaguccguacgcaccuggaacgaaauuauacccucaaaaggcugccugaaggugcgagagagaugucauccgccugucgaugggguguucuuuaauggaaucauuuugggucccgacggcaacguucuaaucccagaaaugcagaguagccugcuccaacagcacauggagcugcuugaauccucugugauaccucugaugcaccccuuggcggauccaagcacggucuucaaggacggggaugaggcagaggacuuuguggaaguacaucuccccgauguucacaaacagauuucaggaguggaccugggcuuaccuaguugggguaaguaucugcuaaugaucgccgggggccucgcuacccuggcccuuaucauuuucuccauggcaugcuguaggcgggcuaaacguacagagccaggacgcagaggcagcggggaaucuggaaagagggucccggccacuccccagacccggaaaguggucucaaguugggaguuguacaagagcgaaggugaugcgcgacuguga

SEQ ID NO: 159365 - RNA, 1575 nt, Artificial Sequence
  derived and/or modified CDS sequence (opt3) from glycoprotein__RABV__JQ685954.1
auggugccccaggcccuccuguucgucccucuucugaucccaagcguuugcuugggcaaguuuccgauuuacaccauacccgacaaauuagggccuugguccccaaucgauauucaccaucugucuugucccaacaaucuagugguagaggacgaaggaugcucaaaccucagugguuucagcuauauggagcugaaggugggcuacaucuccgcuauuaaagucgauggguuuacauguacuggagugguuacggaagcagagaccuauacaaauuucaucggcuacgugacuaccacauuuaagagaaaacacuucaggccuaugccagacgccugccggucugcguauaacuggaagauagcuggugauccccgcuacgaagagucgcuucauaccccuuauccagacuaccacuggcugcgaacugucaagacaaccaaagagucauuggugaucauuagcccgaguguagccgaucucgaccccuacgauaagucccugcauucuaugguuuuuccuaaugggaaauguagcggaaucacgguguauuccacuuacugcucaaccaaccacgacuauacaauuuggaugccagaaaaggcaggccugggcaccaguugugauaucuucacuaauagcaaagggaagcgugccucuaagggagguagaacaugcggcuuugucgacgagagggggcucuacaaauccuuacggggagcuuguaagcugaaacuuugcggcgugcccgguuugcgccugauggaugggaccugggcaacgauacaaacuccugaagagacaaagugguguucaccagaccagcuagugaaccuccacgacuuccauagcgaugagauugaacaccuggucguugaggaccuugugaaaaagagagaagagugccuggauaccuuggaaaguaucaugacuacaaaaucuguauccuuuaggcggcucagccaucugcgcaaguuagugcccggauucggcaaggccuauaccauuuuuaauaaaacgcugauggaggcugacgcccacuacaagucgguccgaaccuggaacgagaucaucccgucuaaaggcugccucagaguugggggaaggugucacccucaugugaaugguguguucuucaacggcgucauuauggggcccgauggacacgugcuuauaccagaaaugcaguccucacuguugcagcaacauauggagcuacuggaaaguagcguaaucccucucauucacccccuggcggacccauccacaguuuuuaaggauaaugacgaggcagaagauuucguggagguccaucuucccgacgugcacaaacaggucucuggcaucgaucuggguuugccuagcugggggcgguaucuccugaugauagccggcgcuuuaaugacucugacccuagugauuuuucucaugaucugcugucgucgcguuaacaaggccggaucaauccagcaggacccagagaagagugaaagaaggcgguccgugacaccgcaaaauggcaaaguaauuagcucuugggagucauacaagagugggagcgaaacucgacuguga

SEQ ID NO: 159366 - RNA, 1575 nt, Artificial Sequence
  derived and/or modified CDS sequence (opt3) from glycoprotein__RABV__JQ685955.1
augaucagccaggccuuccuguacgugccccuccuuauuuccucucugugcuuuggcaaguucccuauauauaccaucccagacaaaauugggccguggucacccaucgauauucaccauuugaguuguccuaacaauuuagucguugaggacgaaggaugcacaagccuguccgguuuuucuuacauggagcuaaaggugggcuauaucucggcuauaaaaguaaacggguucacuuguacgggaguggucaccgaagcagagacauacacuaauuuugugggcuauguuaccacaaccuucaagagaaaacacuuuaggccaaugcccgaugccugccggucagcguacaacuggaagacugcuggugacccucgcuaugaagagagccuccaaaauccauaccccgauuacaguuggcugcgaacagugaagaccacgaaagagucccuugucaucauuucuccuagcguggccgaccuggauccauaugacaaguccuugcauucacguguauucccgaacgggaaaugucucggaaucacuauuaguagcaccuacugcucuacaaaucacgauuauacuaucuggaugcccgaagaggcaagacugggcaccuccugugacauauuuacaaacucaaagggcaaaagggccagcaaagggggacggaccugcgguuucguugaugaacgcggccuguacaagagucucagaggggcuuguaaguuaaagcugugcggagugccuggccuuagguugauggacgguacgugggucucuauucagacuuccgaugagacaaaaugguguccacccgaccagcuggugaaugugcaugacuuucacagcgaugagaucgaacaccuagucguugaggaacucgugaagaaacgggaggaaugccuggacgcacuugagucgauuaugaccacuaagucuguauccuuccgccgacugucacauuugagaaaacucgugccuggguuuggaaaggccuauacaaucuucaacaagacccugauggaggcugaugcccacuacaaaaguguccagacguggaaugaaaucauuccaagcaagggcugcuuaaaagugggcgggaugugucauccccacguugacggaguguucuuuaacgguauaauccugggcccggaugggaauguccucauuccugagaugcaauccucucuucugcagcagcacauggaauugcuagagagcucagugaucccccugaugcauccacucgcggacccuaguaccguauucaaggauggagacgaagcagaggauuuuguugaggugcaucugcccgacauacacaaacaggucuccggcauugaucuuggucugccagacugggggaaguauuugcucaugagcgccggcgcucuggccaucuuacugcuaacaaucuuccucaugacuugcuguaggcgggugaaccguaccgaaucugcacaacgcgaccccggagagcugggcagaaaggucucagcuacaccucagaauaggaaagugauuaguagcugggaacuuuacaaguccgggggagauacucgguuguga

SEQ ID NO: 159367 - RNA, 1575 nt, Artificial Sequence
  derived and/or modified CDS sequence (opt3) from glycoprotein__RABV__JQ685956.1
augaucccccaggcccugcucuacgugccucuucugauuagcuccuugugcuucggcggguuuccaauauauaccaucccggacaaguuaggacccuggucuccuauugauauccaccaucugucauguccaaacaaucuagucguugaggacgaagguugcacaagucucagcggcuucuccuacauggagcugaaagugggguauauuucugcuaucaagguaaacggauuuacuuguacgggcguggucaccgaagcagagacauacacuaauuucguggguuauguuaccacaaccuuuaaaagaaagcacuucaggcccaugccugaugccugccgggcggcuuacaacuggaaaguggccggggacccacgcuaugaagagucgcuucaaaaucccuacccugauuacucauggcugcgaacugucaagacaaccaaggagagcuugauaaucauuaguccauccguggcagaccucgauccguaugacaaaucucugcauagccguguauuucccggaggcaagugucugggcaucacgauuuccucaacuuacugcaguaccaaccacgauuauacaaucuggaugccugaagaggccagacucgggacuagcugugacauauucaccaauucuaggggaaaacgggcuuccaaggguggcaaaacaugcggguuuguugaugaacgcggauuauacaagucacugaagggcgcauguaaacuuaaguugugcggugugccagggcugagacuaauggacggaaccugggucacgauucagacuagcgaugagacaaaauggugucccagugaccagcucgugaaccugcaugacuuccacucugaugagaucgaacaccuuguggucgaggaacugguuaagaaaagggaggaaugcuuggacgcccucgaguccauuaugaccacuaagagcgugucguuucggcgccugucucauuuacgaaaacugguaccuggcuucggcaaggcuuauacaaucuuuaauaagacccucauggaggccgaugcgcacuacaaauccaucagaacguggaacgaaauuauaccaucaaaggggugccuuaaagugggagguaggugucauccccacgucgacggcguguucuucaaugggaucauucugggaccggauggcaacguuuugaucccugagaugcagaguagccuacugcaacagcacguggaacuccuggaguccucugucauaccccuuaugcauccacuggcagacccuagcaccguguuuaaggauggugacgaagccgaggauuucguagagguucacuugcccgacauucauaaacaggugucaggggucgaucucggccugccaaauuggggaaaguauuuacugaugagugcuggcgcccuagcaacacucaugcugacuaucuuucuuaugaccugcugucggcgugcuaaccgcacagaauccauccagagagaccccggggagagcggaaagaaagugucuauuacuucacaagacgguaaggucaucaguagcugggaauuguacaaauccggcggggagaccaggcuguga

SEQ ID NO: 159368 - RNA, 1575 nt, Artificial Sequence
  derived and/or modified CDS sequence (opt3) from glycoprotein__RABV__JQ685957.1
augaucagccaggcccuccuguucgugccccuucugauuuccucuuugugcuuaggcgaguuuccuauauacaccaucccagaaaagcuggggccguggucacccauugacauccaccaucuaaguuguccuaacaaucucgucguugaggaugaaggaugcaacagccuguccgguuucucuuauauggagcuuaaagugggcuacauuucgucaaucaagguaaauggguuuacauguacuggaguggucacggaagcugagaccuauacaaacuucgugggcuacguuacuaccacauuuaaaagaaagcacuucaggccaaugcccgacgcaugccgggccgcguauaauuggaaaaugagcggugauccucgcuacgaggaaagucugcauaacccauaucccgacuaccacugguugcgaaccgugaagacuacaaaggagucccucgucauaaucucuccuagcguggcugaucuggacccauacgauaaaucccugcauucacguguauuuagugggggaaagugucucggcauuaccaucagcucuacguauugcuccacuaaucacgacuacaccauuuggaugccggaagaggccagauuaggcacaucaugugauaucuucacuaacagcaaagggaagaaagcaaguaagggagguaggaccugcggcuuuguugacgagcgggggcuguauaagucucuuaaaggagccuguaaguugaaacugugcggcgugcccggucuacgccucauggaugggacaugggucuccauacaaaccagcgacgaaacgaagugguguccuccagaucagcuggugaauauucacgacuucagaucggacgagaucgaacaucuuguggucgaggaacugguuaaaaagagggaggagugcuuggaugcucucgaaucuauuaugacuacaaaauccgugucauuucggcgccugagucacuuacgaaagcugguacccggauucggcaaggcauacaccaucuuuaacaaaacucucauggaggccgacgcucauuauaagagcgugagaacauggaaugaaaucauuccuuccaaaggcugccuuucugucgggggaaggugucacccacacguggaugguguuuucuucaacggcauaauccuggggcccgacggaagcguguugauuccggagaugcagucaagucuacugcagcaacauauggaacuccuggaguccagcgucaucccucuuaugcacccccuggccaauccaucuaccguguuuaaggauggcgacgaggcggaagauuucguagagguucauuugccugacauacaggaacaggugucaggugucgaucucgggcugcccaacuggggcaaauacguguuaaugagugcaggagcccuggcuauucuacuccugacgaucuuucuuaugaccugcuguauccggacaaaucguacuaagagcauucagcaaggcccaggggaguccggacgcaaggucucugugcccccucagaacgguagaguuaucucgagcugggaauccuucaaaucaggcggggagaccggauuguga

SEQ ID NO: 159369 - RNA, 1575 nt, Artificial Sequence; identical to SEQ ID NO: 159332
  derived and/or modified CDS sequence (opt3) from glycoprotein__RABV__JQ685959.1

SEQ ID NO: 159370 - RNA, 1575 nt, Artificial Sequence
  derived and/or modified CDS sequence (opt3) from glycoprotein__RABV__JQ685960.1
augaucccccaggcccugcucuacgugccucuucugauuagcuccuugugcuucggcggguuuccaauauauaccaucccggacaaguuaggacccuggucuccuauugauauccaccaucugucauguccaaacaaucuagucguugaggacgaagguugcacaagucucagcggcuucuccuacauggagcugaaagugggguauauuucugcuaucaagguaaacggauuuacuuguacgggcguggucaccgaagcagagacauacacuaauuucguggguuauguuaccacaaccuuuaaaagaaagcacuucaggcccaugccugaugccugccgggcggcuuacaacuggaaaguggccggggacccacgcuaugaagagucgcuucaaaaucccuacccugauuacucauggcugcgaacugucaagacaaccaaggagagcuugauaaucauuaguccauccguggcagaccucgauccguaugacaaaucucugcauagccguguauuucccggaggcaagugucugggcaucacgauuuccucaacuuacugcaguaccaaccacgauuauacaaucuggaugccugaagaggccagacucgggacuagcugugacauauucaccaauucuaggggaaaacgggcuuccaaggguggcaaaacaugcggguuuguugaugaacgcggauuauacaagucacugaagggcgcauguaaacuuaaguugugcggugugccagggcugagacuaauggacggaaccugggucacgauucagacuagcgaugagacaaaauggugucccagugaccagcucgugaaccugcaugacuuccacucugaugagaucgaacaccuuguggucgaggaacugguuaagaaaagggaggaaugcuuggacgcccucgaguccauuaugaccacuaagagcgugucguuucggcgccugucucauuuacgaaaacugguaccuggcuucggcaaggcuuauacaaucuuuaauaagacccucauggaggccgaugcgcacuacaaauccaucagaacguggaacgaaauuauaccaucaaaggggugccuuaaagugggagguaggugucauccccacgucgacggcguguucuucaaugggaucauucugggaccggauggcaacguuuugaucccugagaugcagaguagccuacugcaacagcacguggaacuccuggaguccucugucauaccccuuaugcauccacuggcagacccuagcaccguguuuaaggauggugacgaagccgaggauuucguagagguucacuugcccgacauucauaaacaggugucaggggucgaucucggccugccaaauuggggaaaguauuuacugaugagugcuggcgcccuagcaacacucaugcugacuaucuuucuuaugaccugcugucggcgugcuaaccgcacagaauccauccagagagaccccggggagagcggaaagaaagugucuauuacuucacaagacgguaaggucaucaguagcugggaauuguacaaaaggggcggggagacccggcuguga

SEQ ID NO: 159371 - RNA, 1575 nt, Artificial Sequence
  derived and/or modified CDS sequence (opt3) from glycoprotein__RABV__JQ685961.1
augaucccccaggcccugcucuacgugccucuucugauuagcccauugugcuucggcggguuuccgauauauaccauccccgacaaguuaggaccuugguccccaauugauauccaccaucugucuugucccaacaaucuagucguugaggacgaagguugcacaucacucaguggcuucagcuacauggagcugaaagugggguauauuuccgcuaucaagguaaacggauuuacuuguacgggcguggucaccgaagcagagacauacacuaauuucguggguuauguuaccacaaccuuuaaaagaaagcacuucaggccuaugccagaugccugccgggcggcuuacaacuggaaaguggccggggacccccgcuaugaagagucucuucaaaauccuuacccagauuacucguggcugcgaacugucaagacaaccaaggagucauugauaaucauuagcccgaguguggcagaccucgaucccuaugacaaaucccugcauucucguguauuuccuggaggcaagugucugggcaucacgauuagcuccacuuacugcucaaccaaccacgauuauacaaucuggaugccagaagaggccagacucgggaccaguugugacauauucacuaauagcaggggaaaacgggcuucuaaggguggcaaaacaugcggguuuguugaugaacgcggauuauacaagucccugaagggcgcauguaaacuuaaguugugcggugugcccgggcugagacuaauggacggaaccugggucacgauucagacuucagaugagacaaaaugguguccuagcgaccagcucgugaaccugcaugacuuccacagugaugagaucgaacaccuuguggucgaggaacugguuaagaaaagggaggaaugcuuggacgcccucgagucuauuaugaccacuaaguccgugagcuuucggcgccugucgcauuuacgaaaacugguaccaggcuucggcaaggcuuauacaaucuuuaauaagacccucauggaggccgaugcgcacuacaaaucuaucagaacguggaacgaaauuauacccuccaaggggugccuuaaagugggagguaggugucauccgcacgucgacggcguguucuucaaugggaucauucugggaccugauggcaacguuuugauccccgagaugcagucaagucuacugcaacagcacguggaacuccuggagagcuccgucauaccacuuaugcauccucuggcagaccccucuaccguguuuaaggauggugacgaagccgaggauuucguagagguucacuugccagacauucauaaacaggugagcggggucgaucucggccugcccaauuggggaaaguauuuacugaucucagcuggcgcccuagcaacacucaugcugacuaucuuucuuaugaccugcugucggcgugcuaaccgcacagaaaguauucagagagacccuggggagccaggaaagaaaguguccaucacuagccaagacgguaaggucauuucuucaugggaauuguacaaaaguggcggggagaccaggcuguga

SEQ ID NO: 159372 - RNA, 1575 nt, Artificial Sequence
  derived and/or modified CDS sequence (opt3) from glycoprotein__RABV__JQ685962.1
augaucccccaggcccugcucuacgugccucuucugauuccaaguuugugcuucggcggguuuccgauauauaccauccccgacaaguuaggaccuugguccccaauugauauccaccaucugucuugucccaacaaucuagucguugaggacgaagguugcacaucacucaguggcuucagcuacauggagcugaaagugggguauauuuccgcuaucaagguaaacggauuuacuuguacgggcguggucaccgaagcagagacauacacuaauuucguggguuauguuaccacaaccuuuaaaagaaagcacuucaggccuaugccagaugccugccgggcggcuuacaacuggaaaguggccggggacccccgcuaugaagagucucuucaaaauccuuacccagauuacucguggcugcgaacugucaagacaaccaaggagucauugauaaucauuagcccgaguguggcagaccucgaucccuaugacaaaucccugcauucucguguauuuccuggaggcaagugucugggcaucacgauuagcuccacuuacugcucaaccaaccacgauuauacaaucuggaugccagaagaggccagacucgggacuagcugugacauauucaccaauagcaggggaaaacgggcuucuaaggguggcaaaacaugcggguuuguugaugaacgcggauuauacaagucccugaagggcgcauguaaacuuaaguugugcggugugcccgggcugagacuaauggacggaaccugggucacgauucagacuucagaugagacaaaaugguguccuagcgaccagcucgugaaccugcaugacuuccacagugaugagaucgaacaccuuguggucgaggaacugguuaagaaaagggaggaaugcuuggacgcccucgagucuauuaugaccacuaaguccgugagcuuucggcgccugucgcauuuacgaaaacugguaccaggcuucggcaaggcuuauacaaucuuuaauaagacccucauggaggccgaugcgcacuacaaaucuaucagaacguggaacgaaauuauacccuccaaggggugccuuaaagugaggggacggugucauccgcacgucgacgguguguucuucaauggcaucauucuggggccugauggaaacguuuugauccccgagaugcagucaagucuacugcaacagcacguggaacuccuggagagcuccgucauaccacuuaugcauccucuggcagaccccucuaccguguuuaaggauggcgacgaagccgaggauuucguagagguucacuugccagacauucauaaacaggugagcggugucgaucucgggcugcccaauuggggcaaguauuuacugaugucagcuggagcccuagcaacacucaugcugacuaucuuucuuaugaccugcugucgucgcaguaacagaacagaauccauccagagggacccuggcgagagcgggaagaaagugucuauuacuucacaagacggaaaggucaucaguagcugggaauuguacaaauccgguggcgagacccggcuguga

SEQ ID NO: 159373 - RNA, 1575 nt, Artificial Sequence
  derived and/or modified CDS sequence (opt3) from glycoprotein__RABV__JQ685963.1
augauccugcaggcccuccuuuucgugccccuguugauuagcuccuuaugccugggcaaguuuccuauauacaccaucccagacaaacuagggccguggucucccauugauauccaccaucucucauguccuaacaaucuggucguugaggacgaaggaugcacaagucuuagcgguuucuccuauauggagcugaaggugggcuacauuucuucgaucaaaguaaacggguuuacuuguacgggaguggucaccgaagcugagacauauacuaauuucgugggcuacguuaccacaaccuuuaagagaaaacacuucaggccaauacccgaugcaugccgggccgcguauaacuggaagauggcuggugacccucgcuacgaagagucauugcaaaauccauaucccgauuaccauuggcuccgaacugugaagacaaccaaagagagccugaucauuaucaguccuuccgucgccgaccuggauccauacgacaagucucuccacagccguguguuucccgggggaaaauguuuaggcauuacgaucuccucaacuuauugcaguaccaaccaugauuacacaguauggaugccggaagaaccuagacugggcacuuucugugacauauuuaccaauagcaaggggaaaaaggcaucuaagggagguaaaguuugcggcuucguggaugaaagggggcuuuauaaguccuugaaaggagccuguaagcugaaacuaugcggcgucccaggucuccggcugauggacgggacaugggugaccauucagacgucagaggaggugaaguggugucccgcugaucagcuugucaaccugcacgacuuucacagcgacgaaaucgagcauuugguuguggaggagcucgugaaaaagcgcgaagagugccuggaugcauuagagaguauuaugacuacaaagucuguauccuucagaaggcugagcuaccuccggaaacuugucccuggauuuggcaaggccuauaccaucuucaauaaaacucugauggaagcugacgcccacuacaagucggugcgcacauggaacgagaucauuccaucuaaaggcugcuugaagguuaaggaacgaugucauccccacguggauggggucuucuuuaauggaauaauccuagguccggacggcaacgugcugauuccugagaugcaguccucacuccugcaacagcacauggaacuucuggagaguagcguaauccccuugaugcauccacucgcggauccuuccaccguuuucaaagacggggaugaggcagaagacuuuguggagguccaucugcccgaugugcacaagcagauaucuggagucgacuuaggccugccaagcugggguaaauaucuacucaugauugccgggggccuggcugcccuuguguugaucaucuuccugaugguuugcuguagaaggacgaagcggaccgaaucacgucgcagaggaaguggcgaguccgggaaaaaggugagcguaacaccccagacuaggaaggucgugucuucaugggaacucuacaaaagugagggagaugcacggcuguga

SEQ ID NO: 159374 - RNA, 1575 nt, Artificial Sequence
  derived and/or modified CDS sequence (opt3) from glycoprotein__RABV__JQ685964.1
augaucccccaggcccugcucuacgugccucuucugauuagcuccuugugcuucggcggguuuccaauauauaccaucccggacaaguuaggacccuggucuccuauugauauccaccaucugucauguccaaacaaucuagucguugaggacgaagguugcacaagucucagcggcuucuccuacauggagcugaaagugggguauauuucugcuaucaagguaaacggauuuacuuguacgggcguggucaccgaagcagagacauacacuaauuucguggguuauguuaccacaaccuuuaaaagaaagcacuucaggcccaugccugaugccugccgggcggcuuacaacuggaaaauggccggggacccacgcuaugaagagucgcuucaaaaucccuacccugauuacucauggcugcgaacugugaagacaaccaaggagagcuugauaaucauuaguccauccgucgcagaccucgauccguaugacaaaucucugcauagccguguguuucccggaggcaagugucugggcaucacgauuuccucaacuuacugcaguaccaaccacgauuauacaaucuggaugccugaagaggccagacucgggacuagcugugacauauucaccaauucuaggggaaaacgggcuuccaaggguggcaaaacaugcggguuuguagaugaacgcggauuauacaagucacugaagggcgcauguaaacuuaaguugugcgguguuccagggcugagacuaauggacggaaccugggugacgauucagacuagcgaugagacaaaauggugucccagugaccagcucgucaaccugcaugacuuccacucugaugagaucgaacaccuugugguggaggaacuggucaagaaaagggaggaaugcuuggacgcccucgaguccauuaugaccacuaagagcguuucguuucggcgccugucucauuuacgaaaacuggugccuggcuucggcaaggcuuauacaaucuuuaauaagacccucauggaggccgaugcgcacuacaaauccaucagaacguggaacgaaauuauaccaucaaaggggugccuuaaaguaggagguaggugucauccccacguggacggcgucuucuucaaugggaucauucugggaccggauggcaacguguugaucccugagaugcagaguagccuacugcaacagcacguugaacuccuggaguccucugugauaccccuuaugcauccacuggcagacccuagcaccgucuuuaaggauggugacgaagccgaggauuucguggagguacacuugcccgacauucauaaacagguuucagggguggaucucggccugccaaauuggggaaaguauuuacugaugagugcuggcgcccuagcaacacucaugcugaucaucuuucuuauggcuugcugucggcgugccaaccgcacugaauccauucagagagaccccggggagagcggaaagaaagucucuaucccuucacaagacgguaaggugauuaguagcugggaauuguacaaauccggcggggagaccaggcuguga

SEQ ID NO: 159375 - RNA, 1575 nt, Artificial Sequence
  derived and/or modified CDS sequence (opt3) from glycoprotein__RABV__JQ685965.1
augaucccccaggccauucugucggugccucuccuuauauccucucugugcuucggcaaguuuccaaucuacaccauuccggagaaauuggggcccuggucaccuaucgacauucaccauuuaaguuguccaaacaaucuggucguugaagaugagggaugcacaacucuaagcgguuucuccuauaucgaacucaaggugggcuacauaucugcuaucaaaguaaacggguuuacguguaccggaguggucacagaggcagaaacuuauaccaauuucgugggcuacguuacaaccacuuuuaagagaaaacacuucaggcccaugccugacgccugccgggcggcuuauaacuggaagauggccggugauccacgcuacgaggagucgcugcauaaucccuauccugacuaccacuggcuucgaacagugaagaccacgaaagaaucacuggucauuaucagcccaaguguggcagauuuggacccguacgauaagucccuccauucucguguauuucccgggggaaaaugucugggcauuacuaucagcuccaccuauugcucaacaaaccacgacuacacuauauggaugccugaggaagccagacugggcaccaguugugauauuuucacaaauagcagggggaagcgggcuucuaaaggagguagaaccugcggcuuuguugacgagcgcgggcucuauaaguccuuaaagggagcauguaaacugaaacuuugcggcgugccagguuugaggcugauggaugggacgugggucucaauccaagccagcgacgagacuaagugguguagucccgaucagcuagugaacgugcacgacuuccauucugacgaaauugagcaccucgucguugaggagcuggugaagcggcgcgaagagugccuugaugcucuggaguccaucguaacaaccaaaagcaucucguuucgaagauugucucaucucaggaagcuggugccuggauucggcaaagccuacacuauuuuuaauaagacauuaauggaagcggacgcacacuauaaguccguccggaccuggaacgagauaaucccaucaaaaggcugccugaguguugggggacguugucacccccaugugaaugguguguucuucaacggcauuauccucgggccggauggaaauguccuuauaccugaaaugcagagcucccuguugcagcaacacauggagcuacuggaaucuagcgugauuccccucaugcauccacuggccgacccuucaacgguauuuaaggauggcgacgaggcugaggauuucguugaagugcaccuucccgacguccaggaacaggugaguggugucgaucugggguugccaaacuggggcaaauacgugcucauguccgccggagcacuggcuaucuuaauccugaccauuuuucuaaucacaugcugucgcagagccaauaagacuaaaagcauucagcaaggccucgggggaucugguaggaagguuucagugaguccccagaacggcaagguaauaagcuccugggaaucuuauaaaagcgggggagagacccggcuguga

SEQ ID NO: 159376 - RNA, 1575 nt, Artificial Sequence
  derived and/or modified CDS sequence (opt3) from glycoprotein__RABV__JQ685967.1
auggugccccaggcccugcucgucguuccucuucugggcuucagcuugugcuuugggaaguucccaaucuacaccauuccggacaaauuaggacccugguccccuauagauauccaccaucugucuuguccaaacaaucuagugguagaggacgaagguugcacaaaccucucaggcuuuaguuauauggagcugaaggugggguacauuagcgcuaucaaagucaauggauucacuuguacgggcgugguuaccgaagcagagacauauacuaacuuuguggguuacgucaccacaaccuucaagagaaaacacuuuaggcccacuccugaugaaugccgggccgcguauaauuggaagauggcuggggacccacgcuacgaggagucccuucauaaccccuauccugauuaccacuggcugcgaacagugaagaccacgaaagaaucuuugguaauuaucucgccaucaguugccgaccucgauccguacgacaagagccugcauagucguguguuccccuccggaaaauguucuggcauaacugucagcuccaccuauugcucaacaaaucacgauuacacuaucuggaugcuggagaacccuagacucggcaccaguugugacauuuuuacaaauagcagggggaagcgggcaucuaaaggauccaagaccugcgguuucguggaugaacgcggcuuauauaagucacugaaaggggccuguaagcugaaauugugcggagugcugggccuaaagcucauggacgguacgugggucgcuaugcaaacuagcgaugagacaaaaugguguccacccgaccagcugguuaaccuucacgaccugagaagugaugagaucgaacauuuggugguagaggaacucgugaagaaaagggaggaaugccuggacgcauuagagucuauuaugaccacuaaguccgucagcuuucggcgccugucgcaccuccgaaaacuugugccuggguucggaaaggccuacacaaucuuuaauaagacccugauggaggcugaugcccauuauaaaucuguuagaacguggaacgaaauaauuccauccaagggcugcuugaaagugggcgggaggugucacccccacgucaauggaguguucuucaacgguguaauccuaggcccggacgggcauguucugauuccugagaugcagucaagucuccugcagcaacacauggaacuucuggagagcuccgugauccccuugaugcauccacucgcggauccuucuaccgucuuuaaggacggagaugaagcagaggacuucguggagguccaccuucccgaugugcauaagcagguuagcggcguggacuuaggucugccaaauugggggaaauacguaucacuaagugccggcgcucucaucgcccugaugcuuauuauauugcugaucacaugcugucggaaggucaaccgucccgaaccuacucagcgcucccucgagggaaaagaaagaaaggugagcguuaccucucagucaggcaaagugauuaguagcugggaguccuauaagucugggggagaaacaaggcuguga

SEQ ID NO: 159377 - RNA, 1575 nt, Artificial Sequence
  derived and/or modified CDS sequence (opt3) from glycoprotein__RABV__JQ685968.1
auggugcugcaggcccuccuuuucgcccccuuucugaucagcuccuugugcuuaggcaaguucccuauuuacaccauaccagacaaacuggggccguggucucccaucgauauucaccaucuaucauguccuaacaaucucgucguugaggacgaaggaugcaacagucugagcgguaucuccuauauggagcuuaaggugggcuacauuucugcaaucaaaguaaauggguuuacauguacuggaguggucacggaagccgagaccuauacaaacuucgugggcuacguuacuaccacauuuaagagaaaacacuuccauccaaugcccgaugcgugcaggucggcuuauaauuggaagcuggccggugacccucgguacgaagagucauugcacaacccauaucccgauuaccauuggcuccgcaccgugaagacuacaaaagagagccugauaaucauuaguccuuccgucgcagaccuggauccauacgacaagucucuccacagccgaaucuuuccgcgugggaaauguuccggaaugaccauuucaaguacguauugcagcacuaaucacgaauacaccaucuggaugcccgagaaggccggcuuaggcacaucuugugauauauucacuaccuccaaagggaagagagcuucaaagggagguaaaacaugcggcuuuguggacgaaagggggcuguauaagagccuuaaaggagcauguaaguugaaacugugcggcguaaguggucuacggcucauggaugggaccuggguugccauucaaacgucugaggagacuaagugguguccuccagaccagcuggugaaccuucaugaucugcacuccgacgaaaucgagcauuuggucguggaggaacucgugaaaaagcgcgaagagugccugaaugcuuuaaagagcauuaugacaaccaaaucggucucuuucagaaggcugucccaccuccggaaacuuguucccggauuuggcaaggccuacacuaucuucaacaagacacugauggaggcggacgcacacuauaaaucaauccgcaccuggaaugaaauuauaccuaguaagggcugcuugcgaguagggggaaagugucauccacacguggaugguguguuuuucaacggcaucauucuagggcccgacggacauguccugaucccggagaugcagagcucccuccugcagcaacacauggaacuucuggagucuagcgugauaccuuugaugcauccccucgccgaucugucaacgguuuucaaagacggcgaugaagcugaggacuuuguggagguccacuuaccagaugugcacaagcagauuagugguguagaccuggggcuaccuuccuggggcaaauacguucucaugagcgccggagcacuggcuauccuuauguuggugaucucucugaugaagugcuucuggggcgucaauagaaccaaacccauucagcaggggccaagggaaucagagcggaaggugaguaucgcuccccaaagccguaaggucauuuccucuugggaaucguauaaaaacggaggugagacagaacucuga

SEQ ID NO: 159378 - RNA, 1575 nt, Artificial Sequence
  derived and/or modified CDS sequence (opt3) from glycoprotein__RABV__JQ685970.1
auggugagccaggcccuccuguucgucagcccccuuauccugucuuugugcucaggcgaguuuccuauuuacaccauaccagacaaguuagggccguggagucccaucgauauucaccaucugagcuguccuaacaaucuaguuguggaagacgagggaugcacaaaccucuccgguuucucuuauauggaacugaaaguaggcuacaucucggcuauuaaggugaauggguuuacuuguacgggagucgugaccgaggcagaaacauauacuaacuucguuggcuacgugaccacaaccuuuaaaagaaagcacuucaggccaacucccgaugccugccgggcggcuuauaauuggaaaauggccggugacccucgcuacgaggagucacuucauaacccauaucccgauuaccacuggcugcgaacagucaagaccacgaaggaauccuuggugaucauaaguccuuccguagcagaccucgauccauacgacaaaucucugcauagccguguuuuuccguccgggaaguguucaggaaucacugugaguagcaccuauugccugacaaaucacgauuacacuauuuggaugcccgagaaccucagauuaggcaccucuugugacaucuucacaaauuccaggggcaaacgggccucacgcgggagcaagaccugcggauuugucgaugaaagaggucuguauaaaagucuuaagggcgcuuguaaguugaaacugugcggggugcuaggacucaggcugauggacggcacguggguggcaaugcaaacuucugaugagacaaagugguguccuuccgaccagcuugucaaccugcacgacuuccggagcgaugagauugaacauuugguuguggaggaacucgugaaaaagcgcgaggaaugccuggacgccaucgagucgauaaugaccacuaaaucuguauccuuucgaagauuaucacaccugaggaagcucgucccagguuucgggaaggcuuacacaauuuuuaauaaaacccuuauggaggccgaugcgcauuauaagagugugcggacguggaacgaaaucauucccagcaaaggaugccugcguguuggcggccgcugucacccucacgugaauggggucuucuucaacggaaucaucuuggguccagacggccaugugcuaauucccgagaugcaguccucucugcuccagcaacacguagaacugcuugagagcucaguuauaccgcugaugcauccuuuggcagaucccaguaccguguuuaaggacggggaagaggccgaggauuucgucgaagugcaccucccagacguccauaaacagguguccggaguugaucugggcuuaccuaauugggguaaguacgcucuggugagcgccggggcacuaacagcucucaugcugaucgccuuucuuaugacuugcuguagaggcguaaacuugcccaaaucuacccagaggucaccaggaggcacacggcgaaaggucaguguggcgagccaguccgggaagguuauugccucuugggaggcauauaaaucgggaugcgaaacuaagauguga

SEQ ID NO: 159379 - RNA, 1575 nt, Artificial Sequence
  derived and/or modified CDS sequence (opt3) from glycoprotein__RABV__JQ685971.1
augaucccccaggcccuccuguucgugccucuucugauuagcuccuugugcuuuggcaaguucccaauauacaccaucccggagaaauuagggcccuggucuccuauugacauccaccaucugucauguccaaacaaucuagucgcugaagaugagggaugcaacagucucagcgguuuuuccuauauggaacugaagguuggcuacauuucugcaaucaaagugaauggguucacauguacuggaguagugacggaggccgaaaccuauacaaacuuugucggcuacgugacuaccacauucaagagaaaacacuuuaggcccaccccugacgcgugccgggcugccuauaauuggaagauggccggugauccacgcuacgaggagucgcuucauaaccccuauccugacuaccacuggcugcgaacuguuaagacaaccaaagaaucauuggugauaaucagcccaagugucgcagaucucgacccguacgauaagucccugcauucucguguguuccccgacgggaaaugucugggaauuacgaucagcuccacuuauugcucaaccaaucacgauuacacaauuuggaugccugaggaagcuagacucggcaccaguugugacaucuuuacuacaagcaagggcaaaagggcaucuaagggggauaagauaugcggauucguagacgagcgggguuuauauaaaucccugaagggcgccuguaaacuuaaguugugcgggguucugggacuacgccucauggauggcaccugggugucaauucaaacgccaggugagacuaaaugguguagccccgaccagcuggucaaccuucacgacuuucauagugaugaaaucgagcaccugguggcugaagaguuggugaagaaaagagaagagugccucgacgcccuggagucuauuaugacaaccaaguccgucagcuucaggcgguuaucgcaucugcgcaagcucguuccuggguuuggaaaagcguacacuaucuucaauaagacacuuauggaagcagaugcccacuauaaaucugugcgaaccuggaacgagguaaucccauccaagggcugccugucagugggcgggagaugucacccccaugucaauggaguguucuuuaacgguauuauauugggcccggacgggaguguucuaaucccugaaaugcagagcucccugcuccagcaacacauggagcugcuugaaucuagcgugauuccccugaugcauccauuggcugauccuucaacggucuucaaagacggagaugaggccgagaauuuuguggaaguacaccuccccgacguucauaaacaggugaguggcgucgaucuggguuuaccaaacugggggaaguaccugcuaaugaucgcaggcgcucucgccacccugaugcuuacaauauucuugaugacuugcuguaggcggaccaagcgugcggaguccauucaguauggacugggcgaaagcgggcgcaaggugucugucacaccccagucaggaaaagugaucaguagcugggaguccuacaagucugguggcgaaacuagacucuga

SEQ ID NO: 159380 - RNA, 1575 nt, Artificial Sequence; identical to SEQ ID NO: 159316
  derived and/or modified CDS sequence (opt3) from glycoprotein__RABV__JQ685974.1

SEQ ID NO: 159381 - RNA, 1575 nt, Artificial Sequence
  derived and/or modified CDS sequence (opt3) from glycoprotein__RABV__JQ685975.1
auggugccccaggcccuucucuucgucccucuucugguuuuuagcuugugcuucggcaaguuuccaaucuacaccauuccggacaaauuagggcccugguccccuauagauauccaccaucugucuuguccaaacaaucuagugguagaggacgaaggaugcacaaaccucucagguuucaguuauauggagcugaaggugggcuacauuagcgcuaucaaagucaauggguuuacuuguacgggagugguuaccgaagcagagacauauacuaacuucgugggcuacgucaccacaaccuuuaagagaaaacacuucaggcccauuccugaugccugccgggcggcuuauaauuggaagauggccggugacccacgcuacgaagagucccuucauaaccccuauccugauuaccacuggcugcgaacugugaagacaaccaaagagucuuugguaaucauaucgccaucaguugcagaccucgauccguacgacaagagccugcauagucguguguuucccgggggaaaauguuccggcaugacggucuucucuacuuauugcagcaccaaucacgauuacacaaucuggaugccugaaaacccaagacugggcacuuccugugacauuuuugccaauucaagggggaagcgggcuagucgcggaagcaaaaccugcgguuucguggaugagagaggccucuauaagucuuuaaagggggcauguaaacugaagcugugcggaguguugggccugaggcuagucgacgguacauggguugccaugcaaaccuccgaugacacgaaauggugucccccugaccagcucgugaaccugcacgauuuucggucagacgaaaucgaguaccuuguaguggaggaacuggucaagaaacgcgaggaaugcuuggaugcucucgagagcauuaugacuacaaagagugugucuuuccgaagacugucccauuuaaggaaacugguuccaggguucggaaaggccuauaccaucuuuaauaagacucucauggaagcggacgcacacuacaaaagcgugcggacauggaacgagauaauucccucgaagggcugccuucgugucggcgggcgcugucauccgcacgugaauggaguauucuuuaacgguaucauucugggcccugaugggcacguuuugauccccgagaugcagucuucccuacugcagcaacauauggaacuccuggagucaagugugaucccacuuaugcacccucuggccgaccccagcaccgucuucaaagaaggagaugaggcugaagacuuuguggagguccauuugccagaugugcacaagcagguuuccgagguggaccucggccugcccaauugggguaaauauauuuuaaugauagccggggcacugaucgcucuaaugcucauuaucuuccugaugacgugcuguggcagaguaaacaggucugaaagcaagcagcggucacuuggaggcaccgggcgaaaggucagugugacaucccagagcggaaaaguuauaucuucaugggagaguuacaagagcgguggcgaaacucgcuuguga

SEQ ID NO: 159382 - RNA, 1575 nt, Artificial Sequence
  derived and/or modified CDS sequence (opt3) from glycoprotein__RABV__JQ685978.1
augaucagccaggcccuucucuucgugccccuucugauuuccucuuugugcuuuggcgaguucccuauauacaccaucccagaaaaguuagggccguggucacccauugacauccaccaucugaguuguccuaacaaucuagucguugaggaugaaggaugcaacagccucuccgguuuuucuuauauggagcugaaagugggcuacauuucgucaaucaagguaaauggguucacauguacuggaguggucacggaagcugagaccuauacaaacuuugugggcuacguuacuaccacauucaaaagaaagcacuuuaggccaaugcccgacgcaugccgggccgcguauaauuggaaaaugagcggugauccucgcuacgaggaaagucuucauaacccauaucccgacuaccacuggcugcgaaccgugaagacuacaaaggaguccuuggucauaaucucuccuagcguggcugaucucgacccauacgauaaaucccugcauucacguguauucagugggggaaagugucugggcauuaccaucagcucuacguauugcuccacuaaucacgacuacaccauuuggaugccggaagaggccagacucggcacaucaugugauaucuuuacuaacagcaaagggaagaaagcaaguaagggagguaggaccugcggcuucguugacgagcggggguuauauaagucucugaaaggagccuguaagcugaaauugugcggcgugcccggucugcgccuaauggaugggacaugggucuccauacaaaccagcgacgaaacgaagugguguccuccagaucagcucgugaauauucacgacuuuagaucggacgagaucgaacaucugguggucgaggaacuuguuaaaaagagggaggagugccuggaugcuuuggaaucuauuaugacuacaaaauccgugucauuccggcgccucagucaucugcgaaaguuaguacccggauuuggcaaggcauacaccaucuucaacaaaacucugauggaggccgacgcucacuauaagagcgugagaacauggaaugaaaucauuccuuccaaaggcugccucucugucgggggaaggugucacccacacguggaugguguuuucuuuaacggcauaauccuugggcccgacggaagcgugcugauuccggagaugcagucaaguuugcuacagcaacauauggaacugcucgaguccagcgucaucccucugaugcacccccuugccaauccaucuaccguguucaaggauggcgacgaggcggaagauuuuguagagguucaucugccugacgugcaggaacaggucucagguguggauuuggggcuccccaacuggggcaaauacguccugaugagugcaggagccuuagcuauacugcuacucacgauuuuccugaugaccugcugucggcgugccaaucgcacaaagagcaucagacagggcccaggggaguccggaaggaaggugucuguucccccucaaaacggucgggugaucucgagcugggaauccuuuaaaucaggcgacgagacugggcuuuga

SEQ ID NO: 159383 - RNA, 1575 nt, Artificial Sequence; identical to SEQ ID NO: 159382
  derived and/or modified CDS sequence (opt3) from glycoprotein__RABV__JQ685979.1

SEQ ID NO: 159384 - RNA, 1575 nt, Artificial Sequence
  derived and/or modified CDS sequence (opt3) from glycoprotein__RABV__JQ685980.1
auggugccccaggcccugcucuuugucccucuucuggcuuuuccaaugugcuucggcaaguuuccgaucuacaccauucccgacaaauuggggccuuggagcccaauagauauccaccauuuauccugucccaacaaucugguuguggaggacgaaggaugcacaaaccuaucugguuucucauauauggagcucaagguaggcuacauuagugcaaucaaagugaauggguuuacuuguacgggagucgugaccgaagccgagacauauacuaacuucguuggcuacgugaccacaaccuuuagaaggaagcacuuccggccuacuccagaugcgugccgcgcugccuauaauuggaaaauggccggugacccccgauacgaagagagccugcauaacccuuauccagauuaccacuggcuucguacagucaagaccacgaaggagucccugauuaucauaucuccgucgguggcagacuuggaucccuacgacaaaucacuccauagcagaguauuuccuagugggaagugucugggaaucacuauuuccucuaccuauugcagcacaaaucacgauuacacuaucuggaugccagaaaaccugaggcucggcaccuccugugacauuuucacaaauucacggggcaaacgcgcuaguaaggggagcagaaccugcggauuuguugaugagagggguuuauauaaaucucugaagggcgcauguaagcugaaauugugcggggugcugggacuacggcucauggacggcacgugggucgccaugcaaacuuccgaugaaacaaaguggugucccccugaccagcuggugaaccuucacgacuuccgcucagaugagaucgagcaucugguggucgaagaguugguuaaaaagcgagaagagugccucgacgcucuggaaagcauaaugaccacuaaaagugugucuuuuagaagguuaucccaccuucggaagcucguaccagguuucgggaaagccuacacaauuuucaauaagacccuuauggaggcggaugcacauuauaagagcgugcguacguggaacgagaucauucccucgaaaggaugccugcgcgucggcggcagaugucacccgcacgugaaugggguuuucuucaacggaaucaucuuggguccugacggccaugugcuaauucccgaaaugcagucuucccugcuccagcaacacauggagcugcuugaaucaagugucauaccacugaugcauccuuuggccgaucccagcaccguguuuaaggacggggaugaggcugaagacuucguagagguucaccucccagaugugcauaaacagaucuccggagucgaccugggcuuacccaauugggguaaguacgugcugauuaucgccgggguccuaauagcaaugauucucacaaucuuucugaugacuugcuguggcaggggaaaccggccuaaaucuacccagcacagccuuggcgggaucggacgaaaggugucagcuacaagucaguccgguaagguuauuagcucuugggagucauauaaaaacggcggggaaacucgcuuguga

SEQ ID NO: 159385 - RNA, 1575 nt, Artificial Sequence
  derived and/or modified CDS sequence (opt3) from glycoprotein__RABV__JQ685981.1
auggugccccagguccugcuguucguuccucuucugguguuuagcaugugcuucggcaaguuuccaaucuacaccauuccggacaaauuggggcccugguccccuauagauauccaccauuuaucuuguccaaacaaucugguaguggaggacgaaggaugcacaaaccuaucagguuucaguuauauggagcucaaggucggcuacauuagcgccaucaaagugaauggguuuacuuguacgggaguugugaccgaagcugagacauauacuaacuucgucggcuacgugaccacaaccuuuaagagaaaacacuucaggcccacuccugaugcaugccgggccgcguauaauuggaagauggcuggugacccacgcuacgaagagucccugcauaaccccuauccugauuaccacuggcuucgaacaguaaagaccacgaaagagucucugguuauuaucucgccaucaguggccgacuuggauccguacgacaagagccuccauagucgugucuuucccuccgggaaauguucuggaauaacuaucagcuccaccuauugcucaacaaaucacgauuacacuauuuggaugccugaaaacccaagacugggcaccaguugugacaucuucacaaauagcaggggcaagcgggcaucuaaagggggaaagaccugcgguuuuguggaugagcgcggccuguauaagucccucaaaggggccuguaaguuaaaacugugcggagugcuuggcuugagacugauggacgguacgugggucgcuaugcaaacuucagaugaaacaaaguggugucccccugaccagcuaguuaaccuccacgacuucaggagcgaugagauugagcaucuggugguagaggaacuugugaaaaagcgggaagagugccuggacgcauuggaaaguaucaugaccacuaaaucugucuccuuucgccgacucagccaccugagaaaguuagugccaggguucggaaaggccuacacaauauucaauaaaacccugauggaggcugaugcccauuauaagucgguuaggacguggaacgagauuauccccucuaaaggcugccuccgggugggcgggcguugucacccgcacgucaagggaguguuuuucaaugguauuauccuuggcccugacgggcauguacugauccccgaaaugcaguccucauugcuacagcaacacauggagcugcucgaaaguagcguuauuccacugaugcauccucuugcggaucccuccaccguguuuaaagacggagaugaggcagaagacuucgucgaggugcaccucccagauguccauaagcagauaucuggcguggacuugggucuccccagcugggggcgcuacguucuggugucagccggcguauuagucgugcugaugcuaacaaucuuuauuaucacuugcuguggaagaguucacaggccuaagaguacccagcacggccucgggggaacaggucggaaaguguccgucacuagccagucuggcaaggugauaucaaguugggagagcuauaaauccgggggagaaacccgacuguga

SEQ ID NO: 159386 - RNA, 1575 nt, Artificial Sequence
  derived and/or modified CDS sequence (opt3) from glycoprotein__RABV__JQ685982.1
auggugccccaggcccuucucuucgucccucuucuggcuuuuccaaugugcuucggcaaguuuccgaucuacaccauucccgacaaauuggggccuuggagcccaauagauauccaccauuuauccugucccaacaaucugguuguggaggacgaaggaugcacaaaccuaucugguuucucauauauggagcucaagguaggcuacauuagugcaaucaaagugaauggguuuacuuguacgggagucgugaccgaagccgagacauauacuaacuucguuggcuacgugaccacaaccuuuaagagaaaacacuucaggccuacuccagaugcgugccgggcugccuauaauuggaagauggccggugacccccgcuacgaagagagccugcauaacccuuauccagauuaccacuggcuucgaacagucaagaccacgaaagagucccugauuaucauaucuccgucgguggcagacuuggaucccuacgacaagucacuccauagccguguauuuccuagugggaaaugucugggaaucacuauuuccucuaccuauugcagcacaaaucacgauuacacuaucuggaugccagaaaaccugagacucggcaccuccugugacauuuucacaaauucaaggggcaagcgggcuaguaaagggagcaagaccugcggauuuguugaugagcgcgguuuauauaagucucugaaaggcgcauguaagcugaaauugugcggggugcugggacuaagacucauggacggcacgugggucgccaugcaaacuuccgaugaaacaaaguggugucccccugaccagcuggugaaccuucacgacuucaggucagaugagaucgagcaucugguggucgaagaguugguuaaaaagcgggaagagugccucgacgcucuggaaagcauaaugaccacuaaaagugugucuuuucgccgauuaucccaccugagaaagcucguaccagguuucgggaaggccuacacaauuuucaauaaaacccuuauggaggcggaugcacauuauaagagcgugaggacguggaacgagaucauucccucgaaaggaugccugcgggucggcggccguugucacccgcacgugaaugggguguuuuucaacggaaucaucuuggguccugacggccauguucuaauucccgaaaugcagucuucccugcuccagcaacacauggagcugcuugaaucaagugucauaccacugaugcauccuuuggccgaucccagcaccguguuuaaggacggggaugaggcugaagacuucguagagguucaccucccagaugugcauaaacagaucuccggagucgaccugggcuuacccaauugggguaaguacgugcugauuaucgccgggguccuaauagcaaugauucucacaaucuuucugaugacuugcuguggccgcggaaacagaccuaagucuacccagcacagccuuggcgggaucggaaggaaagugucagcuacaagucaguccgguaagguuauuagcucuugggagucauauaaaaguggcggggaaacucgguuguga

SEQ ID NO: 159387 - RNA, 1575 nt, Artificial Sequence
  derived and/or modified CDS sequence (opt3) from glycoprotein__RABV__JQ685983.1
auggugccccaggcccuccuguucgucccucuucugguuuuuccaaugugcuucggcaaguuuccgaucuacaccauucccgacaaauuggggccuuggagcccaauagauauccaccauuuauccugucccaacaaucuggugguagaggacgaaggaugcacaaaccuaucugguuucucauauauggagcucaaggugggcuacauuagugcuaucaaagucaauggguuuacuuguacgggagugguuaccgaagcagagacauauacuaacuucgugggcuacgucaccacaaccuuuaagagaaaacacuucaggccuacuccagaugccugccgggcggcuuauaauuggaagauggccggugacccccgcuacgaagagagccugcauaacccuuauccagauuaccacuggcuucgaacagugaagaccacgaaagagucccugguaauuaucucuccgucgguugcagacuuggaucccuacgacaagucacuccauagccguguguuuccugaugggaaauguaguggaauaacuaucuccucuaccuauugcccaacaaaucacgacuacacuauuuggcugcccgaaaacccuagacugggcaccagcugugauaucuucacaaauuccaggggcaagcgggccucaaaagggaguaagaccugcggauuugucgacgagcgcggucucuauaagagcuuaaaaggcgcuuguaagcugaaacuuugcgggguguugggacugagacuaauggauggcacguggguggcaaugcaaacuucugacgaaacaaagugguguccacccgaccagcucgucaaccugcacgauuucagguccgacgagauugagcaucuuguuguggaggaacuggugaaaaagcgggaagagugcuuggaugcccucgaaucaaucaugaccacuaaaagcguaaguuuucgccgacugucucacuuaagaaagcuggucccggguuucgggaaggcuuacacaauauucaauaaaacccucauggaggccgacgcgcauuauaaguccgugaggacguggaacgagauuaucccuagcaaaggaugccuucggguuggcggccguugucacccccacgugaauggggucuuuuucaacggaauuauccuggguccagauggccauguguugaucccugaaaugcagucgucucuacugcagcaacacauggagcuccuggaauccucaguaauuccccuuaugcauccacuggcagaccccaguaccguuuuuaaggauggggacgaggccgaagauuucguggagguccacuugccugacgugcauaaacagauaagcggagucgaucucggccugccaaauugggguaaguacguguuaguuuccgcuggggugcugaucgcccuaaugcucauuaucuuucugaugacaugcuguggccgcauacacagaccgaagucuacucagugcgaccuuggaggcaccgggaggaaaguaagcgucacaucacagaguggaaaggugauuuccagcugggagucuuauaaaucagguggcgaaacucgguuguga

SEQ ID NO: 159388 - RNA, 1575 nt, Artificial Sequence
  derived and/or modified CDS sequence (opt3) from glycoprotein__RABV__JQ685984.1
auggugccccagguccuccuguucguuccucuucugguguuuagcuugugcuucggcaaguuuccaaucuacaccauuccggacaaauuagggcccugguccccuauagauauccaccaucugucuuguccaaacaaucuaguaguggaggacgaaggaugcacaaaccucucagguuucaguuauauggagcugaaggucggcuacauuagcgccaucaaagugaauggguuuacuuguacgggaguugugaccgaagcugagacauauacuaacuucgucggcuacgugaccacaaccuuuaagagaaaacacuucaggcccacuccugaugcaugccgggccgcguauaauuggaagauggcuggugacccacgcuacgaagagucccuucauaaccccuauccugauuaccacuggcugcgaacaguaaagaccacgaaagagucuuugguuauuaucucgccaucagugacugaccucgauccguacgacaagagccugcauagucgugucuuucccgggggaaaauguuccggcauaaccgugucuagcacauauugcuccacuaaucacgauuacaccaucuggaugccugaaaacccaagacugggcacaucaugugacauuuucaccaauaguagggggaagcgggccagcaaaggaucuaagacgugcgguuuuguggaugagcgcggccucuauaaguccuuaaaaggggcauguaagcugaaacuuugcggagucuugggccugagacuaauggacgguacuuggguugccaugcaaacaucagaugaaaccaaguggugucccccugaccagcucgugaaccugcacgacuucaggagcgaugagaucgagcaucuuguaguggaggaacuggucaaaaagcgggaagagugcuuggacgcucucgaaaguauuaugacuacaaaaucuguguccuuucgccgacugagccacuuaagaaagcugguuccaggguucggaaaggcauacaccaucuucaauaaaacgcucauggaggccgaugcucauuauaagucggugaggaccuggaacgagauaauucccucuaaaggcugccuucgggucggcgggcguugucacccgcacgugaauggaguauuuuucaacgguaucauucugggcccugacgggcauguuuugauccccgaaaugcaguccucacuacugcagcaacacauggagcuccuggaaaguagcgugaucccacuuaugcauccucuggccgaucccuccacagucuuuaaggacggagaugaggcggaagacuucguggagguccacuugccagaugugcauaaacagguuucuggcguggaccucggucugcccaauugggggaaguacguauuaaugauugcaggcgcccugauagcucuaaugcucaucauuuuucugaugacuugcugucgcagagucaacaggccugagagcacccagcggucacuuggaggcacagggcgaaaggugaguaucacuucccagagcggaaaaguuauaucuucaugggaaaguuauaagagcgguggcgagacccgcuuguga

SEQ ID NO: 159389 - RNA, 1575 nt, Artificial Sequence
  derived and/or modified CDS sequence (opt3) from glycoprotein__RABV__JQ685985.1
auggugccccaggcccugcuguucgucccuauccuuguuuuuagccugugcuucggcaaguuuccaauuuacaccauaccggacaaauuggggcccugguccccuaucgauauucaccauuuaucuuguccaaacaaucuggugguagaggacgaaggaugcacaaaccuaucagguuucaguuauauggagcucaaggugggcuacaucagcgcuauuaaagucaauggguuuacuuguacgggagugguuaccgaagcagagacauauacuaacuucgugggcuacgucaccacaaccuuuagaaggaagcacuuccggcccacuccugaugccugccgcgcggcuuauaauuggaaaauggccggugacccacgauacgaagagucccugcauaaccccuauccugauuaccacuggcuucguacagugagaaccacgaaggagucucugguaaucauaucgccaucaguugcagacuuggauccguacgacaagagccuccauaguaggguguuucccuccgggaaauguucuggaaucacugucagcuccaccuauugcucaacaaaucacgauuacacuauuuggaugccugaaaacccacggcugggcaccaguugugacaucuucauuaauagccgcggcaagagagccucuaaaggguccaagacaugcggauuuguggaugagaggggucuguauaaaucacucaagggcgcuuguaaguuaaaacugugcggggugcuuggauugcggcugauggacggcaccugggucgcaaugcaaacgagcgaagagacuaaguggugucccccugaucagcuaguuaaccuccacgacuuccgcagugacgagaucgaacaucuggugguagaggaacuugugaaaaagcgagaggaaugccuggaugccuuggagucuauaaugacaaccaaauccgucagcuuuagaaggcucucgcaccuccggaaguuagugccagguuucgggaaggcuuacacuauuuucaauaaaacacugauggaggccgacgcgcauuauaagucuguucguaccuggaacgaaaucauucccuccaaaggaugccuccgcgugggcggcagaugucacccgcacgucaaugggguguuuuucaacggaaucauccuugguccugauggccauguacugauucccgagaugcagucaaguuugcuacagcaacacauggaacugcucgagagcuccguuauaccacugaugcauccucuugcagaccccucuacgguguuuaaggaaggggaugaggccgaggacuucgucgaagugcaucugccagauguccacaaacaggugagcggaguugacuugggccuccccaauugggguaaguacgugcugaugucagcugggguauuaaucaguaggaugcugcuaauuuuucucaugaccugcugucggcgagucaaccgcccugaguccacacagagaagcccaggcggagccggcaggaaagugucuguuacuucacagagugggaaggugaucagcuccugggaaucuuauaagucgggaggugagacccggcuguga

SEQ ID NO: 159390 - RNA, 1575 nt, Artificial Sequence
  derived and/or modified CDS sequence (opt3) from glycoprotein__RABV__JQ685986.1
auggugcugcagguccuccuuuucgcccccuuucugaucagcuccuugugcuuaggcaaguucccuauuuacaccauaccagacaaacuggggccguggucucccaucgauauucaccaucuaucauguccuaacaaucucguuguggaggacgaaggaugcaacagucugagcgguuuuuccuauauggagcuuaagguaggcuacaucucugcuauuaaagugaauggguucacauguacuggagucgugacggaagcagagaccuauacaaacuuuguuggcuacgugacuaccacauucaagagaaaacacuuuaggccaguccccgaugccugccggucggcguauaauuggaagcuggcuggugacccucgcuacgaagagucauugcauaacccauaucccgaguaccacuggcuccgaaccgugaagacuacaaaagaaagccugaucguaauaaguccuuccguugccgaucuggacccauacgauaagucucuccauagccguaucuucccguccgggaaauguucaggaaugaccgugaguagcacguauugcucuacuaaucacgaguacaccauuuggaugcccgaaaaggcauccuuaggcacaucaugugacaucuuuacuaccagcaaaggcaagagagccaguaaagggggaaggacaugcgguuucgucgaugagcggggccuguauaagucucuuaagggggcuuguaaauugaagcugugcggaguguccggccuacgccucauggacgguaccuggguggcaauucaaacgagcgaugaggccaaaugguguucgccugaccagcuggucaaccuucacgaucugcauucugacgaaaucgagcacuugguuguggaggaacucguaagaaagagggaagagugccuggacgcuuuagaguccauaaugacuacaaaaucagugaguuuucggcgccugagccaucuccgaaaacuugucccaggguucggaaaggccuacaccauuuuuaauaagacucugauggaagcggaugcacacuauaaguccgugagaacauggaacgagaucauucccucuaaaggcugcuugaggguuggcgggaagugucacccucaugugaauggagucuucuucaacgguaucauccuaggcccagacgggcacgugcugauucccgaaaugcagagcucacuccugcagcaacauauagagcuucuggaaaguuccguaaucccguugaugcacccucucgccgaucugagcaccguuuuuaaagacggagaugaggcugaggacuucguggaaguccauuuacccgaugugcacaagcagauuucuggcgucgaccugggucuaccaucaugggggaaguacgugcucaugagugccggcgcacuggcuacgcuuguuuuggugaucagccugaugaaaugcugucgguggguaaauaagaccaaauccauacagcagggaccucgugagucugaacgcaaggucucggugacaccccaaaacggcaaaguuauuagcuccugggagucauauaagaucgggggagaaacuggucucuga

SEQ ID NO: 159391 - RNA, 1575 nt, Artificial Sequence
  derived and/or modified CDS sequence (opt3) from glycoprotein__RABV__JQ685987.1
auggcuccccaggcccuguggguggucccucuccuuggcuucagccugugcuuugggaaguucccaaucuacaccauuccggacaaauugggacccugguccccuauagauauccaccauuuaucuuguccaaacaaucugguuguggaggacgaagguugcacaaaccuaucaggcuuuaguuauauggagcucaagguaggguacauuagcgcaaucaaagugaauggauucacuuguacgggcgucgugaccgaagccgagacauauacuaacuuuguugguuacgugaccacaaccuucaagagaaaacacuuuaggcccacuccugaugcgugccggacagcuuauaauuggaagauggccggggacccacgcuacgaagagucccugcauaaccccuauccugauuaccacuggcuucgaaccgucaagacgacuaaagagucucuggugauuaucucgccaucaguagcagacuuggauccguacgacaagagccuccauagucguguuuuccccuccggaaaauguucuggcauaaccgugagcuccacauauugccugacuaaucacgauuacaccaucuggaugccugaaaacccaagacugggcacaucaugugacauuuuuaccaauaguagggggaagcgggccagcaaaggaucuaagacgugcgguuucgucgaugagcgcggccucuauaaguccuuaaaaggggcuuguaagcugaaacuuugcggaguguugggccugaagcuaauggacgguacuuggguggcaaugcaaacaucagaugaaaccaaauggugucccagcgaccagcucgucaaccugcacgacuuuagaagugaugagaucgagcaucuuguuguggaggaacugguaaagaaaagggaagagugcuuggacgcccucgaaucuauuaugacuacaaaguccgugagcuuccggcgccugucgcacuuacgaaagcuggucccuggguuuggaaaggcuuacaccaucuucaauaagacgcucauggaggccgaugcgcauuauaaaucugugagaaccuggaacgagauaauuccauccaagggcugccuuaggguuggcgggcggugucacccccacgugaauggagucuucuuuaacgguaucauucugggcccggacgggcauaucuugaucccugaaaugcagucaagucuacugcagcaacacauggagcuccuggaaagcuccgugauuccccuuaugcauccacuggcagauccuucuacaguauucaaagacggagaugaggccgaagacuuuguugaggugcacuugcccgauguccauaaacaggugagcggcgucgaccucggucugccaaauugggggcguuacgugucauuaggcgcuggagcccugauagcacuaaugcucaucauuuuccugaugacuugcugucgcagaguuaacaggcccgagccuacccagcggagucuugaaggcaaggggcgaaaaguguccguaacaagccagucuggaaaggucaucucaaguugggagagcuauaaauccgguggcgaaacucgcuuguga

SEQ ID NO: 159392 - RNA, 1575 nt, Artificial Sequence
  derived and/or modified CDS sequence (opt3) from glycoprotein__RABV__JQ685988.1
auggugccccaggcccugcuccuugucccucuguuggcuuucccaaugugcuuuggcaaguucccgaucuacaccauucccgacaaauuagggccuuggagcccaauagauauccaccaucuguccugucccaacaaucuaguuguggaggacgaaggaugcacaaaccucucugguuuuucauauauggagcugaagguaggcuacauuagugcaaucaaagugaauggguucacuuguacgggagucgugaccgaagccgagacauauacuaacuuuguuggcuacgugaccacaaccuucaagagaaaacacuuuaggccuacuccagaugcgugccgggcugccuauaauuggaagauggccggugacccccgcuacgaagagagccuucauaacccuuauccagauuaccacuggcugcgaacagucaagaccacgaaagaguccuugauuaucauaucuccgucgguggcagaccucgaucccuacgacaagucacugcauagccguguauucccuagugggaaaugucugggaaucacuauuuccucuaccuauugcagcacaaaucacgauuacacuaucuggaugccagaaaaccucagauuaggcaccuccugugacauuuuuacaaauucaaggggcaagcgggcuaguaaagggagcaagaccugcggauucguugaugagcgcggucuguauaagucucuuaaaggcgcauguaaguugaaacugugcggggugcuaggacucagacugauggacggcacgugggucgccaugcaaacuuccaacgaaacaaaguggugucccccugaucagcuugugaaucugcacgacuuuaggucagacgagaucgagcauuugguggucgaggaacucguuaaaaagcgggaagagugccuggaugcuuuagaaagcauaaugaccacuaaaagugugucuuuccgccgacugucccaccucagaaagcugguaccagguuuugggaaggccuacacaauuuucaacaaaacccugauggaggcggacgcacauuauaagagcgugaggacguggaaugagaucauucccucgaaaggaugcuugcgggucggcggccguugucacccgcacgugaacgggguuuucuuuaauggaaucauccuagguccugauggccaugugcugauucccgaaaugcagucuucccuccugcagcaacacauggagcuucuggaaucaagugucauaccauugaugcauccucucgccgaccccagcaccguguucaaggauggggacgaggcugaagauuuuguagagguucaccuuccagacgugcauaaacagaucuccggagucgauuuaggccugcccaacugggguaaguacgugcuaauuaucgccgggguccucauagcaaugauucugacaaucuuccuuaugacuugcuguggccgcggaaacagaccuaagucuacccagcacagcuugggcgggaucggaaggaaagugucagcuacaagucaguccgguaagguuauuagcucuugggagucauauaaaaguggcagcgaaacucggcuguga

SEQ ID NO: 159393 - RNA, 1575 nt, Artificial Sequence
  derived and/or modified CDS sequence (opt3) from glycoprotein__RABV__JQ685989.1
auggugccccaggcccugcuguucgucccuauccuuguuuuuagccugugcuucggcaaguuuccaauuuacaccauaccggacaaauuggggcccugguccccuaucgauauucaccauuuaucuuguccaaacaaucuggugguagaggacgaaggaugcacaaaccuaucagguuucaguuauauggagcucaaggugggcuacaucagcgcuauuaaagucaauggguuuacuuguacgggagugguuaccgaagcagagacauauacuaacuucgugggcuacgucaccacaaccuuuagaaggaagcacuuccggcccacuccugaugccugccgcgcggcuuauaauuggaaaauggccggugacccacgauacgaagagucccugcauaaccccuauccugauuaccacuggcuucguacagugagaaccacgaaggagucucugguaaucauaucgccaucaguugcagacuuggauccguacgacaagagccuccauaguaggguguuucccuccgggaaauguucuggaaucacugucagcuccaccuauugcucaacaaaucacgauuacacuauuuggaugccugaaaacccacggcugggcaccaguugugacaucuucauuaauagccgcggcaagagagccucuaaaggguccaagacaugcggauuuguggaugagaggggucuguauaaaucacucaagggcgcuuguaaguuaaaacugugcggggugcuuggauugcggcugauggacggcaccugggucgcaaugcaaacgagcgaagagacuaaguggugucccccugaucagcuaguuaaccuccacgacuuccgcagugacgagaucgaacaucuggugguagaggaacuugugaaaaagcgagaggaaugccuggaugccuuggagucuauaaugacaaccaaauccgucagcuuuagaaggcucucgcaccuccggaaguuagugccagguuucgggaaggcuuacacuauuuucaauaaaacacugauggaggccgacgcgcauuauaagucuguucguaccuggaacgaaaucauucccuccaaaggaugccuccgcgugggcggcagaugucacccgcacgucaaugggguguuuuucaacggaaucauccuugguccugauggccauguacugauucccgagaugcagucaaguuugcuacagcaacacauggaacugcucgagagcuccguuauaccacugaugcauccucuugcagaccccucuacgguguuuaaggaaggggaugaggccgaggacuucgucgaagugcaucugccagauguccacaaacaggugagcggaguugacuugggccuccccaauugggguaaguacgugcugaugucagcugggguauuaaucagucugaugcuacucauuuuucugaugaccugcuguaggcgggucaaccgaccugaguccacacagcgcagcccaggcggagccggcagaaaagugucuguuacuucacagagugggaaggugaucagcuccugggaaucuuauaagucgggaggugagaccaggcuuuga

SEQ ID NO: 159394 - RNA, 1575 nt, Artificial Sequence; identical to SEQ ID NO: 159392
  derived and/or modified CDS sequence (opt3) from glycoprotein__RABV__JQ685990.1

SEQ ID NO: 159395 - RNA, 1575 nt, Artificial Sequence
  derived and/or modified CDS sequence (opt3) from glycoprotein__RABV__JQ685991.1
auggugcugcaggcccuccuuuucgcucccuuucugaucagcuccuucugcuugggcaaguuuccuauuuacaccauaccagacaaauuagggccguggucucccaucgauauucaccaucugucauguccuaacaaucuagucaucgaggacgaaggaugcaacagucucagcgguuucuccuauauggagcugaagguuggcuacauuucugcaaucaaagugaauggguuuacauguacuggaguagugacggaagccgagaccuauacaaacuucgucggcuacgugacuaccacauuuaagagaaaacacuucaggccaaugcccgaugcgugccggucggcuuauaauuggaaacuugccggugacccucgcuacgaagagucacugcauaacccauaucccgaguaccacugguugcgaaccguuaagacuacaaaggaaagccucauagugaucaguccuuccgucgcagaucuggacccauacgauaagucucugcauagccguauuuuuccguccgggaaauguucaggaaugaccgugaguagcacguauugcucuacuaaucacgaguacaccaucuggaugcccgaaaagguaggccucggcacauccugugacauuuucaucacuucaaaagggaagagagccagcaagggagguaggaccugcggcuuuguugaugagcggggguuauauaaaagucugaagggagcuuguaaacuuaaguugugcggcgugucuggucugcgccuaauggacgggacaugggucgcaauacaaaccuccgaugagacgaaaugguguagcccugaccagcucgugaaccugcacgaucuucauucggacgaaauugagcaccugguggucgaagaguugguuagaaagagggaagagugccucgacgcccuggagucuaucaugacuacaaaauccgugucauuccggcgcuuaagucaucugcgaaagcucguaccaggauuuggcaaggcuuacaccauuuucaauaaaacucuuauggaagccgaugcgcacuauaagagcgugagaacauggaacgagaucauccccuccaaaggcugccugagggucgggggaaagugucacccucaugugaaugguguuuucuuuaacggcauuauauuggggccagacggacacgugcuaauccccgaaaugcagucuagccugcuccagcaacauauugagcugcuugaaucaagugucaucccgcugaugcacccuuuggcagaucucuccaccguguucaaagacggcgaugaggccgaggacuuuguagaaguucaucugcccgaugugcacaagcagauaagcggugucgacuuagggcugccaucuuggggcaaguacgugcuaauuucagcuggagcccucgcaacgcugauccuugucaucaguuugaugaaaugcugucggugggugaaucguaccaagagcauucagcagggcccucgcgaguccgaaagaaaaguuucuguggcuccccaaucggggaagguaaucagcuccugggagucauauaaaauuggaggugaaacaggccuguga

SEQ ID NO: 159396 - RNA, 1575 nt, Artificial Sequence
  derived and/or modified CDS sequence (opt3) from glycoprotein__RABV__JQ685992.1
auggugccccaggcccuucucuucgucccucuucugguuuuuagcuugugcuucggcaaguuuccaaucuacaccauuccggacaaauuagggcccugguccccuauagauauccaccaucugucuuguccaaacaaucuagugguagaggacgaaggaugcacaaaccucucagguuucaguuauauggagcugaaggugggcuacauuagcgcuaucaaagucaauggguuuacuuguacgggagugguuaccgaagcagagacauauacuaacuucgugggcuacgucaccacaaccuuuagaaggaagcacuuccggcccacuccugaugccugccgcgcggcuuauaauuggaaaauggccggugacccacgauacgaagagucccuucauaaccccuauccugauuaccacuggcugcguacagugaagaccacgaaggagucuuugguaauuaucucgccaucaguugcagaccucgauccguacgacaaaagccugcauaguagaguguuucccgggggaaaguguuccggcauaacugucucuagcaccuauugcuccacaaaucacgauuacacuaucuggaugccugaaaacccaaggcugggcaccucaugugacauuuucgugaauagucgggggaaacgcgccagcaagggagguaaaacaugcggcuuuguggaugagagagggcucuauaagucuuuaaagggagcuuguaaacugaagcugugcggcguccccgguuugaggcugauggacgggaccuggguugcaauccaaacguccgaugaaacuaaaugguguccuccagaccagcuagugaaccuccacgacuuccggucagaugagauugagcaucugguaguggaggaacuugucaagaaacgcgaagagugccuggacgccuuggaaagcaucaugacaaccaagagugugucuuuucgaagacucucccaccugaggaaauuaguucccggauucggcaaggcuuacacuauauucaauaagacacugauggaggccgaugcgcauuauaaaagcgugcggaccuggaacgagauuaucccgucgaagggcugccuccgugucgggggacgcugucacccucacgugaaugguguauuuuucaacggcauuauccuugggcccgacggacauguucugaucccagaaaugcagucuuccuugcuacagcaacacauggagcugcucgaaucaagugugauuccucugaugcauccccuugcagauccaagcacggucuuuaaagacggcgaugaggccgaagacuucguggagguccaucugcccgaugugcacaaguugauauccgguguugaccucgggcugccuucuuggggcaaauacguguuaaugagcgcuggaauccugaccacacuaaugcucaugauuuuucugaugacuugcuguagaaggguaaaucaggucggcucaaagcagcacgggcuugagggagccggucggaaggugaguguuaccucccagaacggccgagugaucagcucuugggaaucauauaaaagugggggagagacacgcuuguga

SEQ ID NO: 159397 - RNA, 1575 nt, Artificial Sequence
  derived and/or modified CDS sequence (opt3) from glycoprotein__RABV__JQ685993.1
auggugcugcaggcccuccuuuucgcucccuuucugaucagcuccuugugcuuaggcaaguucccuauuuacaccauaccagacaaacuggggccguggucucccaucgauauucaccaucuaucauguccuaacaaucucgucguugaggacgaaggaugcaacagucugagcgguuuuuccuauauggagcuuaaggugggcuacaucucugcaauuaaaguaaauggguucacauguacuggaguggucacggaagccgagaccuauacaaacuuugugggcuacguuacuaccacauucaagagaaaacacuuuaggccaaugcccgaugcgugccggucggcuuauaauuggaagcuggccggugacccucgcuacgaagagucauugcauaacccauaucccgauuaccacuggcuccgaaccgugaagacuacaaaagagagccugaucgucauaaguccuuccguggcagaccuggauccauacgacaagucucuccauagccguaucuuccccgggggaaaauguuccggcaugaccguaucaaguacguauugcagcacuaaucacgaauacaccauuuggaugccggagaaggccggcuuagggacaucuugugauaucuuuacuaccuccaaaggaaagagagcuacaaaggguggcaaaaccugcggguucguugacgaaaggggacuguauaagucacuuaaaggcgcauguaaguugaaacugugcggugugagcgggcuacggcucauggauggaacgugggucgccauucaaaccagugacgagacaaagugguguucuccugaucagcuggugaaccuucacgaccugcauuccgacgagaucgaacacuugguggucgaggaacucguucgcaaaagagaggaaugccuggaugcuuuagagagcauaaugaccacuaagucggugucuuuuaggcggcugucccaucuccgcaaacuuguaccaggcuucggcaaggccuacacaauuuuuaauaagacccugauggaggcggacgcacacuauaaaucagugcgaacguggaacgaaaucauucccaguaaggggugcuugagagucggagguaaaugucacccucaugugaauggcguuuucuucaacgggaucauccuaggaccagauggccacgugcugauucccgagaugcagagcucccuccugcagcaacauauggaacuucuggagucuagcgucauaccguugaugcacccucucgccgaccccucaaccguguuuaaggaugacgaugaagcugaggacuucguagagguucaucugccagaugugcacaagcaggucagugguguggacuuagggcugccuuccuggggcagguacguccuaaugagcgccggagcacucgcuacacugauggugguuaucucucuuaugaaaugcuguaagggcgugaaucggacuaaaucaauuaagcaggggagucgugaaagcgagcgcaaaguauccaucacuccccagucuggaaaggucauaucgagcugggaauccuauaagucagguggcgagacaggguuguga

SEQ ID NO: 159398 - RNA, 1575 nt, Artificial Sequence
  derived and/or modified CDS sequence (opt3) from glycoprotein__RABV__JQ685994.1
auggugcccugggcccuucucuucgucccuuuucuuaucucgucccugugcuucggcaaguuuccaauuuacaccauaccggacaaauuggggcccuggucuccuaucgauauucaccauuuaucauguccaaacaaucugguuguggaggacgaaggaugcaacagucuaagcgguuucuccuauauggagcucaagguaggcuacaucucugcuauuaaagugaauggguuuacauguacuggagucgugacggaagcagagaccuauacaaacuucguuggcuacgugacuaccacauuuaagagaaaacacuucaggcccaugccugaugccugccggucggcguauaauuggaagauggcuggugacccacgcuacgaagagucacugcauaaccccuauccugauuaccacuggcuucgaaccgucaagacuacaaaagagagccugaucauaaucaguccauccguggccgacuuggauccguacgaccguucucuccauagcagaauuuuucccgggggaaaguguaccggccugacgguauccucaacuuauugcaguaccaaucacgauuacacaaucuggaugccugaaaaagcaggccuggggacuagcugugacauuuucaccaacucuaagggaaaaagggccuccaaggguggcaagacaugcggguuuguugaugagcggggacucuauaaaucauuaaagggcgcuuguaaacugaagcugugcggugugagcggguugcgccugauggacggaaccugggucgcaauccagacgcuagaugaaacuaaaugguguaguccagaccaacucgugaaucugcacgacuuccauucugaugagcuugagcaccugguggucgaagaguugguuagaaagagggaagagugccucgacgcccuggaauccauaaugacaaccaaaagcgugucguuucggcgcuuaucucaucugcgaaagcucguacccggcuucggcaaggcuuacacuauuuucaacaaaacacuuauggaggccgaugcgcacuauaaguccgugagaaccuggucagagaucauuccuaguaaagggugccugagggucggaggucggugucacccacaugugaauggcguguuuuucaacgggaucaucuugggacccgacggccacguucuaauuccggaaaugcagagcucccugcuccagcagcaugucgagcugcuugaaucuagcgugauaccucugaugcaccccuuggcagauccaucagccguauuuaaggacggugaugaggcugaagacuucguugaggugcaucucccugauguccacaaacaaaucagugggguggaccugggcuuacccuccuggggaaaguacaugcugaugauugccggcgcacuaacgacccucaugcuguuuaucuuccuuaugacaugcuguaagcgugucaauaaaaaggagagcauacgccagucuccaagagaauuggagucaaaagugaguguuacuccccagaacaggaaggugauuagcuccugggaaucuuauaaaagcgggggagagaccaagcuguga

SEQ ID NO: 159399 - RNA, 1575 nt, Artificial Sequence
  derived and/or modified CDS sequence (opt3) from glycoprotein__RABV__JQ685995.1
auggugccccagguccuucucuucguuccucuucugguguuuagcuugugcuucggcaaguuuccauuauacaccaucccggacaaacuggggcccugguccccuauugauauacaccaucuaucuuguccaaacaaucucguaguggaggacgaaggaugcacaaaccugucagguuucaguuauauggagcuuaaggucggcuacaucagcgccauuaaaguguccggguuuacuuguacgggaguugugaccgaagcugagacauauacuaauuucgucggcuacgugaccacaaccuuuaagagaaggcacuuccggcccacuccugaugcaugccgcgccgcguauaacuggaaaauggcuggugacccacgauacgaagagucucugcauaaucccuauccugauuaccacugguugcguacaguaaagaccacgaaggagucgcucguuaucauuucaccaagcgugacugaccuggauccguacgacaaaagucugcauuccagagucuuucccgggggaaaguguucuggcaucaccgugagcuccacauauugcucaacuaaccacgauuacaccauauggaugccugaaaguccaaggcucggcacaagcugugacaucuucaccaauucucgggggaaacgcgccuccaagggaucaaaaacgugcgguuuuguggaugagagaggcuuauauaagagccugaagggggcauguaaacuuaaguugugcggaguccugggccuaaggcucauggacgguacuuggguugccaugcaaacaagugaugaaaccaaauggugucugcccgaccagcuugugaaccugcacgacuuccggucugaugagauugagcauuugguaguggaggaacucguccgcaagcgagaagagugccuggacgcuuuagaauccaucaugacuacaaaaagcgugucguuuagaaggcugucucaccuccggaagcugguuccuggguucggaaaagcauacaccauuuucaauaagacgcugauggaggccgaugcucauuauaaguccauccguaccuggaacgagauagugccaucaaaaggcugcuugcgcgucggcgggagaugucacccccacgugaauggaguauuuuucaacgguauuauccuaggcccggacgggcagguucugauuccugaaaugcagaguagccuccugcaacagcauauggagcuucuggaauccucugugauccccuugaugcacccacucgccgauccuagcacagucuuuaaggagggagacgaagcggaggauuucguggagguccaucugcccgacgugcacaaacagguuucaggcguggauuuaggucugccaaauugggggaaguacguacuaaugaucgcaggcgcccucauugcucugaugcuuauaaucuuuuugaugacuugcuguaggcgggucaaccgaagugaauccacccagcaucgccugagaggaacaggcaggaaagugagcguuacuucucaaaccgggaaggugauuucaaguugggagagcuauaaguccggaggugaaacacggcucuga

SEQ ID NO: 159400 - RNA, 1575 nt, Artificial Sequence
  derived and/or modified CDS sequence (opt3) from glycoprotein__RABV__JQ685996.1
augaucccccaggcccugcucagcgugccucuucugauuuccucuuugugcuucggcaaguuuccaauauacaccaucccggagaaauuagggcccuggucaccuauugacauccaccaucugaguuguccaaacaaucuagucguugaagaugagggaugcaacagccucuccgguuucucuuauauggaacugaaggugggcuacauuucggcuaucaaaguaaauggguuuacauguacuggaguggucacggaggcagaaaccuauacaaacuucgugggcuacguuacuaccacauuuaagagaaaacacuucaggcccaugccugacgccugccgggcggcuuauaauuggaagaccgccggugauccacgcuacgaggagucacuucauaaccccuauccugacuaccacuggcugcgaacugugaagacaaccaaagaaagccuuauaaucauuaguccauccgucgcagaucucgacccguacgauaagucucugcauagccguaucuuucccgggggaaaaugucugggcauuacgaucuccucaacuuauugcaguaccaaucacgacuacacaauauggaugccugaggaagccagacucggcacuagcugugauauuuucaccaacucuaaggggaaaagggcuuccaagggaggucggacaugcggcuuuguggacgagcgcggguuauauaagucacugaaaggagcauguaaguugaaauugugcggcguacugggucuaagacucauggaugggaccuggguugccauccaaacgccaaaugagacuaagugguguagccccgaccagcuggugaacguccacgauuucaggagugacgaaauugagcaucuugugguggaggaacugauccggaaacgcgaagagugcuuggacgcucucgagucuaucaugacaaccaaguccgucagcuuucgaagacugucgaauuuaaggaaacugguuccuggauucggcaaggccuacacuauuuuuaacaagacacucauggaagcggaugcacacuauaaaucugugcggaccuggaaugagauaaucccaucccguggcugccuuaagguagggggacgcugucauccccacgugaacggugucuucuucaauggcauuauccuggggccggacggacacauauugauuccugaaaugcagucaagucuacugcagcaacauauggagcuccuggaaagcuccgugaucccccuuauccacccacuggccgauccuucuacgguuuuuaaagacggcgaugaggcugaggacuucguggaaguccauuugcccgaugugcaccagcagguaagcgguguugaccucgggcugccagauuggggcaaguacguguuaaugucagccggagcacuggcuaccgucaugcuaacaauuuuucucaucacuugcuguagaagggugaaacggaccgagaguauucagcaaggccugggggaauccggacgaaaggucagcgugacaccccagaacgguaagguuaugucuucaugggaguauuacaaaaguggcgggggaacucgccuuuga

SEQ ID NO: 159401 - RNA, 1575 nt, Artificial Sequence
  derived and/or modified CDS sequence (opt3) from glycoprotein__RABV__JQ685997.1
augaucagccagacccuccuguucgugccccuucugauuuccucugucugcuuuggcgaguucccuauauacacaaucccagaaaaguuggggccguggucacccauugacauccaccauuuaaguuguccuaacaaucugguuguggaggaugaaggaugcaacagccuauccgguuuuucuuauauggagcucaaaguaggcuacauuucgucaaucaaggugaauggguucacuuguacgggagucgugaccgaagccgagacauauacuaacuuuguuggcuacgugaccacaaccuucaaaagaaagcacuuuaggccaaugcccgacgcuugccgggcagccuauaauuggaaaaugagcggugauccucgcuacgaggaaagucugcauaacccauaucccgacuaccacuggcuucgaacugucaagacaaccaaggagucccuggugauaaucucuccuagcguaggggauuuggacccauacgauaaaucccuccauucacguguuuucaguggaggcaagugucugggcauuacgaucagcucuacuuauugcuccaccaaucacgacuacacacuguggaugccggaagaggcgagacucgggacuucaugugauauuuuuaccaacagcaaaggaaagagggcuaguaaagguggccggacaugcggguucguggacgagcgcggauuauauaagucucugaagggcgccuguaaacuuaaguugugcgguguccccgggcugagacuaauggauggaaccuggguguccauccaaacgagcgacgaaacuaaaugguguccuccagaucagcucgugaauauacacgacuuuaggucggacgagauugaacaucuggucguugaggaacuugugaagaaacgggaggagugccuggaugcauuggaaucuaucaugacaaccaaguccguaucauuccgccgacucagucaccugagaaaauuagugcccggcuuuggcaaggccuacacuauuuucaacaagacacugauggaggcugacgcacauuauaaaagcgucaggaccuggaaugaagugaucccuuccaaggggugccucucuguuggaggucggugucacccacacguggauggcgucuucuuuaacgggaucauucuuggacccgacggcagcgugcugauaccggagaugcagucaaguuugcuacagcaacauauggaacugcucgaguccagcguaaucccucugaugcacccccuugccaauccaucuacgguuuucaaagauggugacgaggcugaagauuuuguggagguccaucugccugacgugcaggaacaggucucagggguggauuugggccuccccaacuggggaaaguacguucugaugagugccggcgcguuagcaauucugcuacucaccaucuuccugaugacaugcugucgucgcgccaauagaacuaaaagcauaaggcaggggccagaggaauccggacggaaggugucuguacccccucaaucggguaaggucauuagcuccugggagucauuuaaaaguggcggggagacccgacuuuga

SEQ ID NO: 159402 - RNA, 1575 nt, Artificial Sequence
  derived and/or modified CDS sequence (opt3) from glycoprotein__RABV__JQ685998.1
augaucccccaggcccuacucuuccuuccucuguugauuagcuccuuaugcucuggcaaguuuccaauauacaccaucccggagaaacuggggcccuggucaccuauugacauccaccaucuaaguuguccaaacaaucucguggucgaagaugagggaugcaacagccuguccgguuucucuuauauggaacuuaagguuggcuacauuucggcuaucaaagugaauggguuuacauguacuggaguagugacggaggcagaaaccuauacaaacuucgucggcuacgugacuaccacauuuaagagaaaacacuucaggcccaugccugacgccugccgggcggcuuauaauuggaagauggccggugauccacgcuacgaggagucacugcauaaccccuauccugacuaccacugguugcgaaccguuaagacuacaaaagaaagccucgugauaaucaguccauccgucgcagaucuggacccguacgauaagucucugcauagccguguguuucccgggggaaaaugucucggcauuaccaucuccucaacguauugcaguacuaaucacgacuacaccauuuggaugccugaggaagccagauuaggcacaagcugugauaucuucacuaacucuaaggggaaaagggcuuccaagggaggucggaccugcggcuuuguagacgagcgcgggcuguauaagucacuuaaaggagcauguaaguugaaacugugcggcguuccaggucuaagacucauggaugggacaugggugagcauacaaaccagugaggaaacgaagugguguucuuccgaccagcuggucaauauucacgauuucaggagcgacgagaucgaacaucuugugguggaggaacuggucaaaaagcgggaggagugcuuggacgcccucgaaucgauuaugacuacaaaaucuguuuccuuucgccgacugucacacuuaagaaagcuggugcccggauucggcaaggcuuacaccaucuuuaacaauacucucauggaggccgaugcgcauuauaaaaguguaaagacauggaacgaaaucauuccuagcaaaggcugccuuuccgucgggggaaggugucacccaaaugugaacgguguguucuucaauggcauaauccuggggcccgacggaucuguuuugauuccggagaugcagagcucacuacugcagcaacacauggaacuccuggagaguuccgugaucccucuuaugcauccccuggcaaacccaagcaccgucuuuaaggauggcgacgaggccgaagaguucguggaaguacacuugccugauguuaaagaacaggugucuggugucgaccucgggcugcccaacuggggccgguacguguuaaugucagcuggagcccuggcaauacugguccucacgauuuuucugaugaccugcugucgucgcgcuaauagaacaaagaguauccagcagggccuuggggagagcgugaggaagguuuccgugccauugcaaaacggaaaaguaaucucuucgugggagagcuauaaguccgguggcgagacucggcuguga

SEQ ID NO: 159403 - RNA, 1575 nt, Artificial Sequence
  derived and/or modified CDS sequence (opt3) from glycoprotein__RABV__JQ685999.1
augaucccccaggcccuccuguucgugccucuucugauucccagcuugugcuuaggcgaguuuccgauauacaccauccccgacaagcuggggccuuggacaccaauugauauccaccaucuauccugucccaacaaucucgucgcugaaaacgacggaugcacuucucugucagguuucaguuauauggagcuuaaaguuggcuacauuagcgcaaucaaggugaauggguuuacguguaccggaguagugacagaagccgagacuuauaccaacuucgucggcuacgugacaaccacuuuuaaaagaaagcacuucaggccuaugccagaugcgugccgggcugcccaugacuggaaaauggccggugauccccgcuaugaagacucccugcaaaauccuuacccagauuaucacugguugcgaacaguuaagaccacgaaggagucucucgugauaaucucgccgucagucgccgaccuggaucccuacgacaaaagccugcauagucguguguuuccuuccgggaagugucucggaauuacuguaucuagcaccuacugcuccacaaaccacgauuauacuaucuggaugccaguugagcccagauuaggcaccucaugugacauuuucacaaauaguaggggcaaacgggcuagcaaagggggacgcgugugcgguuuugucgaugaaagaggccuguacaagucucuuaagggggcauguaaguugaaacugugcggagugccuggcaucaggcuaauggacgguaccuggguguccauacagacgucagaggacauuaagugguguccacccgaucggcucgucaaccugcacgacuuccauagcgaugaacuugagcaccugguuguggaggaauugaucaaacgccgagagaauugccucgacgcccuggaaaguauuaugacuacaaagucuguauccuuuagaagguuaagccaucugcggaaacucgugccgggguucggaaaggcuuauaccaucuuuaacaaaacucuuauggaggccgaugcgcacuacaagucggucaagacauggaaugaagugaucccuucuaaaggcugccuggagguuggcgggcguugucacccaccagugaacggagucuucuucaaugguauuauauugggcccugacgggaacgugcuaauccccgagaugcaguccucacugcuccagcaacauauggaacugcuugagaguagcguaauuccacugaugcaccccuuggcagauccuuccaccguuuuuaaggaaggagacgaggccgaagauuucguggagguccaucucccagacgugcacaaacaggucucugauguggaccugggcuuaccgagcugggguaaguaucugcuaaugucagcuggggcccucgcaauccugauacuugcuauuguuuugaucaucugcugucgcagagugaauaaaacgggcaguacccagaggggacaucgggagucccgaggcaagaugagcguagcaccccagaacgggaagauuaucucuucaugggaacuguacaaacgcgagagugaaacaggacucuga

SEQ ID NO: 159404 - RNA, 1575 nt, Artificial Sequence
  derived and/or modified CDS sequence (opt3) from glycoprotein__RABV__JQ686000.1
augaucccccaggcccuguuguucgugccucuucugauuccaagccucugcuuaggcaaguuuccgauauacaccauccccgacaaacuggggccuugguccccaauugauauccaccaucuaucuugucccaacaaucucgucguugaggacgaaggaugcacaucacugagugguuucagcuauauggagcuuaaggugggcuacauuuccgcuaucaaaguaaacggguuuacuuguacgggaguggucaccgaagcagagacauauacuaauuucgugggcuacguuaccacaaccuuuaagagaaaacacuucaggccuaugccagaugccugccgggcggcucaugacuggaagauagccggugauccccgcuaugaagacucucugcaaaacccuuacccagauuaucacugguugcgaacugugaagacaaccaaagagucgcucgucaucauuucaccgagcguggcagagcuggaccccuacgauaagagucugcauucccguguauuuccuucugggaaaugucucggaaucacgguuagcuccacuuacugcucaaccaaucacgacuauacaauuuggaugccaguggaagccagauuaggcacuagcugugauaucuucaccaacagcaggggcaagaaggcuucuaaagggggacggacaugcgguuuugucgacgagcgcggccuguacaagucccuuaaaggggcauguaaguugaaacugugcggagugcccggccuaagacucauggaugguaccugggugucaauacagacgagcgacgacauuaagugguguccuccagaucagcuggucaaucuucacgacuuccauagugaugaaaucgagcaccugguuguggaggaauugauuaaaaagagggaggggugccucgacgcccuggaaucuaucaugacuacaaaauccguaaguuuucggcgcuuaucgcaucugcgaaagcucgugcccggauucggcaaggcuuauaccaucuuuaacaauacucuuauggaggccgaugcgcacuacaaaucugucagaacauggaacgaagugauuccguccaagggcugccugaaaguugggggaaggugucacccucccgugaauggugucuucuucaacggcauaaucuuggggccagacggaaaugugcuaauuccugagaugcagucaagucugcuccaacagcauauggagcugcuugaaagcuccguaaucccccugaugcacccauuggcagaucccucuaccguuuuuaaggacggcgaugaggccgaagacuucguggagguccaucucccugaugugcacaaacaggucagcgacguggaccuggguuuaccaucaugggggaaguaucugcuaaugagugcuggcgcccucgcaacgcugucccuugcuauauuuuugauuaccugcugucggcgugccaaccgcacagaaagcacucagagaggacauagggagucuggcgggaagguuucaguggcgccgcaaaauggaaaaaucaucaguagcugggagcuguacaaguccgaaucugagaccgguauguga

SEQ ID NO: 159405 - RNA, 1575 nt, Artificial Sequence
  derived and/or modified CDS sequence (opt3) from glycoprotein__RABV__JQ686001.1
augaucccccaggcccuccuguucgugccucuucugauuccaaguuugugcuuaggcaaguuuccgauauacaccauccccgacaaacuggggccuugguccccaauugauauccaccaucuaucuugucccaacaaucucgucgcugaggacgaaggaugcacaucacugagugguuucagcuauauggagcuuaagguuggcuacauuuccgcaaucaaagugaacggguuuacuuguacgggaguagugaccgaagccgagacauauacuaauuucgucggcuacgugaccacaaccuuuaagagaaaacacuucaggccuaugccagaugcgugccgggcugcccaugacuggaagauggccggugauccccgcuaugaagacucucugcaaaacccuuacccagauuaucacugguugcgaacuguuaagacaaccaaagagucgcucgugauaaucucaccgagcgucgcagaccuggaucccuacgacaagagucugcauucccguguguuuccuucugggaaaugucucggaauuacgguaagcuccacuuacugcucaaccaaucacgauuauacaaucuggaugccaguugaggcuagauuaggcacuagcugugacauuuucaccaacagcaagggcaaaaaggcaucuaaagggggaaggacaugcgguuuuguggaugaacggggccuguacaagucccuuaagggggccuguaaauugaagcugugcggaguccccggccuacgccucauggacgguaccugggugucaauccagacgagcgacgauauaaaaugguguccuccagaccagcuggugaaucuucacgauuuccauagugacgagauugaacaccuggucguugaggaguugaucaagaaaagagaagggugccucgaugcucuggagucuauuaugacuacaaaguccgugagcuuuaggcgguuaucgcaucugcgcaagcucguacccggauucggcaaagccuauaccaucuuuaacaauacucuuauggaagcggacgcacacuacaagucugugcgaacauggaacgaggucaucccguccaaaggcugccugaagguugggggaagaugucacccucccgugaaugguguguucuucaacggcauuauauuggggccagauggaaauguccuaaucccugaaaugcagucaagucugcuccaacagcauauggagcugcuugagagcuccgugauuccccugaugcacccauuggccgaccccucuaccguauuuaaagauggcgacgaagcugaggauuucguugaagugcaucucccugacguccacaaacaggugagcgagaucgaccuggguuuaccaucaugggggaaguaucugcuaaugagugccggcguccucgcaacgcugauacuugcuaucuuuuugauuaccugcuguaggcgggccaaccguacagaauccacucagcgcggaagaagggagagcggcgggaaggugucuguugcgccgcaaaauggaaagaucauuucaaguugggagcuguacaaaagcgaauccgagaccggucucuga

SEQ ID NO: 159406 - RNA, 1575 nt, Artificial Sequence
  derived and/or modified CDS sequence (opt3) from glycoprotein__RABV__JQ686002.1
augaucccccaggcccuguuguuccuuccuuuucuguucccaagccucugcuuaggcaaguuuccgauuuacaccauacccgagaaacuggggccuugguccccaaucgacauucaccaucuaucuugucccaacaaucucguggucgaagaugagggaugcgacucacugagugguuucagcuauauggaacuuaagguuggcuacaucuccgcuauuaaagugaacggguuuacauguacuggaguagugacggaggcagaaaccuauacaaauuucgucggcuacgugacuaccacauuuaagagaaaacacuucaggccuaugccagaugccugccgggcggcuuauaacuggaagaccgccggugacccccgcuacgaggagucucugcauaauccuuauccagauuaccacugguugcgaacuguuaagacaaccaaagaaucgcucaucauaaucucaccgagcguggcagaccuggaucccuacgacaagagucugcauucccgugucuuuccugggggaaaaugucucggcauuacggugucuagcacuuauugcuccaccaaccacgauuacacaaucuggaugccagaggaagccagauuaggcacuucaugugacauuuucaccaauaguaaggggaaaagggcuagcaagggaggucggacaugcggcuuuguagaugagcgcgggcuguauaagucucuuaaaggagcauguaaguugaaacugugcggcguucccggucuaagacucauggacgggaccuggguggccauccaaacgccuggagagacuaagugguguuccccagaucagcuggucaaccuucacgacuucaggucagacgaaauagagcaucuggugguggaagaguugauuaaaaagcgggaagagugccucgaugcucuggagagcaucaugacaaccaaaagugucucuuuucgccgauuauccaaucugagaaagcucguucccggcuucggcaaggccuacacuauuuucaacaaaacacuuauggaagcggacgcacacuauaagagcgugaggaccugggaugagaucaucccgucgaaagggugccugcggguaggaggucguugucauccucacgugaauggcgucuuuuucaacgggauuauauugggacccgacggccacgugcuaaucccagaaaugcagucuucccugcuccagcaacauauggagcugcuugaaucaaguguuauuccucugauccaccccuuggccgauccaagcacgguguuuaaggacggugaugaggcugaggacuucgucgaagugcaucuccccgauguacacaaacagguuuccgggguggaccugggcuuaccuaauuggggaaaguacguccugaugggcgccggggugcuagcaaccgucauacucacaauucugcuuuugacuugcugucgcagagugaacaggaccaagccaaaacagcagucucuggaggaaagcggacggaagguuucagugacaccgcaaaaugguaaaguaaugaguuccugggaguauuacaagagcgaaggccgaacuucucucuga

SEQ ID NO: 159407 - RNA, 1575 nt, Artificial Sequence; identical to SEQ ID NO: 159342
  derived and/or modified CDS sequence (opt3) from glycoprotein__RABV__JQ686003.1

SEQ ID NO: 159408 - RNA, 1575 nt, Artificial Sequence
  derived and/or modified CDS sequence (opt3) from glycoprotein__RABV__JQ686004.1
augaucccccaggcccuccuguucgugccucuucugauuccaaguuugugcuuaggcaaguuuccgauauacaccauccccgacaaacuggggccuugguccccaauugauauccaccaucuaucuugucccaacaaucucgucgcugaggacgaaggaugcacaucacugagugguuucagcuauauggagcuuaagguuggcuacauuuccgcaaucaaagugaacggguuuacuuguacgggaguagugaccgaagccgagacauauacuaauuucgucggcuacgugaccacaaccuuuaagagaaaacacuucaggccuaugccagaugcgugccgggcugcccaugacuggaagauggccggugauccccgcuaugaagacucucugcaaaacccuuacccagauuaucacugguugcgaacuguuaagacaaccaaagagucgcucgugauaaucucaccgagcgucgcagaccuggaucccuacgacaagagucugcauucccguguguuuccuucugggaaaugucucggaauuacgguaagcuccacuuacugcucaaccaaucacgauuauacaaucuggaugccaguugaggcuagauuaggcacuagcugugacauuuucaccaacagcaagggcaaaaaggcaucuaaagggggaaggacaugcgguuuuguggaugaacggggccuguacaagucccuuaagggggccuguaaauugaagcugugcggaguccccggccuacgccucauggacgguaccugggcuucaauccagacgagcgacgauauaaaaugguguccuccagaccagcuggugaaucuucacgauuuccauagugacgagauugaacaccugguggucgaggaguugaucaagaaaagagaagggugccucgaugcccuggagucuauuaugacuacaaaguccguuagcuuuaggcgguuaucgcaucugcgcaagcucgugcccggauucggcaaagcguauaccaucuuuaacaauacucuuauggaagcagacgcccacuacaagucuguacgaacauggaacgaggugaucccguccaaaggcugccugaaggucgggggaagaugucacccucccgugaaugguguuuucuucaacggcauuauauuggggccagauggaaaugugcuaaucccugaaaugcagucaagucugcuccaacagcauauggagcugcuugagagcuccgucauuccccugaugcacccauuggcugaccccucuaccguguuuaaagauggcgacgaagccgaggauuucguagaaguucaucucccugacgugcacaagcaggucagcgagaucgaccuggguuuaccaucaugggggaaguaucugcuaaugagugcaggcgugcucgcuacgcugauacuugccaucuuuuugauuaccugcuguaggcgggcgaaccguacagaauccacucagcgcggaagaagggagagcggcgggaaagucucuguggccccgcaaaauggaaagaucauuucaaguugggagcuguacaaaagcgaacgggagaccggucucuga

SEQ ID NO: 159409 - RNA, 1575 nt, Artificial Sequence
  derived and/or modified CDS sequence (opt3) from glycoprotein__RABV__JQ686005.1
augaucccccaggcccugcucagccuucuguuguuaauuuccucucugugccuaggcaaguucccuauauacaccaucccagacaaacucgggccguggucacccauugauauccaccaucugaguuguccuaacaaucuuguggucgaggacgaaggaugcacaagccuguccgguuuuucuuauauggaguugaagguuggcuacauuucggcuaucaaagugaacggguucacuuguacgggaguagugaccgaagcagagacauauacuaauuuugucggcuacgugaccacaaccuucaagagaaaacacuuuaggccaaugcccgaugccugccgggcggcucaugaauggaagauggccggugacccucgcuaugaggauucacuccaaaacccauaccccgacuaucacuggcugcgaacuguuaagacaaccaaagagagccugauaaucauuaguccuuccguggcagaucucgacccauacgauaagucuuuacauagccgugucuuccccgggggaaauugucugggcaucacgauuuccucaacuuacugcaguaccaaccacgacuauacaaucuggaugccggaagaggccagacuuggcacuagcugugauauauuuaccaauucuagggggaaacgggcuuccaagggagguaaaauuugcggcuucguggacgaacgcggguuguacaagucacugaagggagcauguaaacuaaagcucugcggcguaccuggucugagacuuauggaugggacauggguuagcauccagaccagugacgagacgaaaugguguccacccgaccagcuggugaacguccacgauuuucauucugacgagauugaacacuugaucguggaggaacucgugaagaaaagggaggaaugccuggaugccuuagaguccaucaugacuacaaagagcgucucguuccggcgccugucucaucuccgaaaacuuguuccuggauuuggcaaggcuuauaccauuuucaauaagacucugauggaggccgacgcgcacuacaaauccgugagaacauggaacgaaauaaucccaucaaagggcugcuugaaaguagggggaaugugucacccccauguggguggcgucuuuuucaaugggauuauccuaggaccggauggcaccgugcugauaccugagaugcagaguagccuccugcaacagcacauggaacuucuggaguccucuguuauucccuugaugcauccacucgcagacccuagcacgguguucaaggaaggugaugaggccgaggacuuugucgaaauccaucugcccgaugugcacaaacagaucucagggguagacuuaggccugccaaguuggggaaaguaucuacucauuuccgcuggcgcccuggcaacccuuaucuugacaauuuuccugauaacuugcuguaggaagguuaaccggaccgagagcgugcagcgugggcaccgcgaaucugagagaaaaguccccgugucaccucaaaauggaagggucaucaguagcugggaacucuacaaguccgguggcgagacaaaccuguga

SEQ ID NO: 159410 - RNA, 1575 nt, Artificial Sequence
  derived and/or modified CDS sequence (opt3) from glycoprotein__RABV__JQ686006.1
augaucccccaggcccuccuguucgugccucuucugauuagcuccuugugcuuuggcaaguucccaauauacaccaucccggagaaauuagggcccuggucuccuauugacauccaccaucugucauguccaaacaaucuagucgcugaagaugagggaugcaacagucucagcgguuuuuccuauauggaacugaagguuggcuacauuucugcaaucaaagugaauggguucacauguacuggaguagugacggaggccgaaaccuauacaaacuuugucggcuacgugacuaccacauucaagagaaaacacuuuaggcccaccccugacgcgugccgggcugccuauaauuggaagauggccggugauccacgcuacgaggagucgcuucauaaccccuauccugacuaccacuggcugcgaacuguuaagacaaccaaagaaucauuggugauaaucagcccaagugucgcagaucucgacccguacgauaagucccugcauucucguguguuccccgacgggaaaugucugggaauuacgaucagcuccacuuauugcucaaccaaucacgauuacacaauuuggaugccugaggaagcuagacucggcaccaguugugacaucuuuacuacaagcaagggcaaaagggcaucuaagggggauaagauaugcggauucguagacgagcgggguuuauauaaaucccugaagggcgccuguaaacuuaaguugugcgggguucugggacuacgccucauggauggcaccugggugucaauucaaacgccaggugagacuaaaugguguagccccgaccagcuggucaaccuucacgacuuucauagugaugaaaucgagcaccugguggcugaagaguuggugaagaaaagagaagagugccucgacgcccuggagucuauuaugacaaccaaguccgucagcuucaggcgguuaucgcaucugcgcaagcucguuccuggguuuggaaaagcguacacuaucuucaauaagacacuuauggaagcagaugcccacuauaaaucugugcgaaccuggaacgagguaaucccauccaagggcugccugucagugggcgggagaugucacccccaugucaauggaguguucuuuaacgguauuauauugggcccggacgggaguguucuaaucccugaaaugcagagcucccugcuccagcaacacauggagcugcuugaaucuagcgugauuccccugaugcauccauuggcugauccuucaacggucuucaaagacggagaugaggccgagaauuuuguggaaguacaccuccccgacguucauaaacaggugaguggcgucgaucuggguuuaccaaacugggggaaguaccugcuaaugaucgcaggcgcucucgccacccugaugcuuacaauauucuugaugacuugcuguaggcggaccaagcgugcggaguccauucagcacggacugggcgaaagcgggcgcaaggugucugucacaccccagucaggaaaagugaucaguagcugggaguccuauaagucugguggcgaaacuagacucuga

SEQ ID NO: 159411 - RNA, 1575 nt, Artificial Sequence
  derived and/or modified CDS sequence (opt3) from glycoprotein__RABV__JQ686007.1
augauccccagagcccuguuguucgugccucuucugauuccaagccucugcuuaggcgaguuuccgauauacaccauccccgacaagcuggggccuugguccccaauugauauccaccaucuaucuugucccaacaaucucgucgcugaaaacgacggaugcacaucacugagugguuucagcuauauggagcuuaaaguuggcuacauuuccgcaaucaaggugaauggguuuacuuguacgggaguagugaccgaagccgagacauauacuaacuucgucggcuacgugaccacaaccuuuaaaaggaagcacuuccggccuacuccagaugcgugccgcgcugcccaugacuggaaaauggcaggggauccccgauaugaagccucucugcagaauccuuacccagacuaucacugguugcguacaguuaagaccacgaaggagucgcucgugauaaucucaccgagcgucgcugaucuggaccccuacgauaaaagucugcauuccagaguguuuccuucugggaagugucucggaauuacuguaagcuccaccuacugcucaacaaaccacgacuauacuaucuggaugccaguugagcccagguuaggcaccaguugugauauuuucacaaauagccggggcaaacgcgcaucuaaggguggaagagugugcgguuuugucgacgaaaggggccuguacaaaucccuuaagggggccugucgguugaagcugugcggagugccuggcauccgccuacucgaugguaccugggugucaauacaaacgagcgaggacauuaaaugguguccacccgaccgacuggucaaccuucacgauuuccauagugacgaaaucgagcaccugguuguggcugaguugauuaagagaagggaaaauugccucgaugcccuggagucuaucaugacuacaaaauccgugagcuuucggcguuuaucgcaucugcgcaagcucguaccgggguucggaaaagcguauaccaucuuuaacaagacucuuauggaagcagacgcccacuacaaaucugucaagacauggaaugaggugauuccuuccaagggcugccuggaaguuggcgggagaugucacccccaugugaacggagucuucuucaaugguauaaucuugggcccagaugggaacgugcuaauuccugagaugcagucaagucugcuccagcagcacauggagcugcuugaaagcuccguaaucccccugaugcauccauuggcugaccccucuaccguuuuuaaagagggagaugaagccgaggacuucguggaaguccaccucccugaugugcauaagcaagucagcgacguggaucugggcuuaccaucaugggguaaauaucugcuaauaagugcaggggcucucgccauucugauccuugcgaucguuuugauuaucugcuguaggcgggugaauaagacgcgauccacccagcgcggccacagagagagcggaggcaaaaugucuguagucccgcagaacgggaagauuauaucaaguugggagcuguacaagagcgaauccgagacaggacucuga

SEQ ID NO: 159412 - RNA, 1575 nt, Artificial Sequence
  derived and/or modified CDS sequence (opt3) from glycoprotein__RABV__JQ686008.1
augaucagccaggccuuccuguuugugcccuuccucauuuccucucuuugcuuuggcaaguucccuauauacaccaucccagacaaaauugggccguggucacccaucgauauucaccaucugaguuguccuaacaauuuggucguugaggacgaaggaugcacaagccuauccgguuuuucuuauauggagcugaaggugggcuacaucucggcuauaaaaguaaacggguucacuuguacgggaguggucaccgaagcagagacauauacuaauuuugugggcuacguuaccacaaccuucaagagaaaacacuuuaggccaaugcccgaugccugccgggcggcuuauaacuggaagauggccggugacccucgcuacgaagagucacuacaaaauccauaucccgauuacaacuggcuccgaacugugaagacaaccaaagagagccugaucauuaucaguccuuccgucgcagaccuugauccauacgacaagucucugcauagccguguguucccgaaugggaaauguuugggaauuacgguauccucaacuuauugcaguaccaaccacgauuacacaaucuggaugcccgaagaggccagacucggcacuagcugugacauauuuaccaauucuaagggcaaaagggcuuccaaagggggaaagacaugcgguuucguugaugaacggggccuguauaagucacugcgcggggcauguaagcucaaauuaugcggagugccuggccugagacuuauggacgguaccugggucagcauucagacgagugaugagacuaagugguguccacccgaccaguuggugaacgugcaugacuuucacucugaugagaucgaacaccuggucguugaggaauuagugaggaaacgggaggaaugccucgacgcccuggaguccauuaugacaaccaagagcguaucguuccgccgacuuucucaucugagaaaauuggugccuggguucggaaaggcuuacacuaucuuuaauaagacacucauggaggccgaugcgcacuauaaauccauccagaccuggaacgaaauuauaccaucaaagggcugccugaaagucggcgggaugugucauccccacuuagacggaguguucuuuaaugguaucauucugggcccggaugggaacguucucaucccugagaugcaaaguagccuucugcagcagcacauggaauugcuagaguccucugugauaccccugaugcauccacucgcagacccuagcacggucuucaaggauggagacgaagccgaggauuuuguggagguacaucugcccgacauucacaaacagguuucaggcaucgaucuuggucugccagacugggggaaguacuugcucaugagugcuggcgcccuggcaaucuuacugcuaaccauuuuccucaugacaugcuguaggcgggugaaucguacugaauccgcucaacgcgaccccggagagagcggcagaaaggucucugugaccccucagaacgggaaagucaucucaaguugggaacuguauaagagcggaggugauacaaggcuuuga

SEQ ID NO: 159413 - RNA, 1575 nt, Artificial Sequence
  derived and/or modified CDS sequence (opt3) from glycoprotein__RABV__JQ686009.1
augaucccccaggcccuccuguucgugccucuucugauuccaaguuugugcuuaggcaaguuuccgauauacaccauccccgacaaacuggggccuugguccccaauugauauccaccaucuaucuugucccaacaaucucgucguugaggacgaaggaugcacaucacugagugguuucagcuauauggagcuuaaggugggcuacauuuccgcuaucaaaguaaacggguuuacuuguacgggaguggucaccgaagcagagacauauacuaauuucgugggcuacguuaccacaaccuuuaagagaaaacacuucaggccuaugccagaugccugccgggcggcucaugacuggaagauagccggugauccccgcuaugaagacucucugcaaaacccuuacccagauuaucacugguugcgaacugugaagacaaccaaagagucgcucgucaucauuucaccgagcguggcagaccuggaucccuacgacaagagucugcauucccguguauuuccuucugggaaaugucucggaaucacgguuagcuccacuuacugcucaaccaaucacgauuauacaauuuggaugccaguggaggccagauuaggcacuagcugugacaucuucaccaacagcaggggcaagaaggcuucuaaagggggacggacaugcgguuuugucgaugaacgcggccuguacaagucccuuaaaggggcauguaaguugaaacugugcggagugcccggccuaagacucauggacgguaccugggugucaauacagacgagcgacgauauuaagugguguccuccagaccagcuggucaaucuucacgauuuccauagugacgagaucgaacaccugguuguggaggaguugauuaaaaagagggaagggugccucgaugcccuggagucuaucaugacuacaaaauccgugagcuuucggcgcuuaucgcaucugcgaaagcucguacccggauucggcaaggcuuauaccaucuuuaacaauacucuuauggaagccgacgcgcacuacaaaucugucagaacauggaacgaggugauuccguccaagggcugccugaaaguugggggaaggugucacccucccgugaauggugucuucuucaacggcauaaucuuggggccagauggaaaugugcuaauuccugaaaugcagucaagucugcuccaacagcauauggagcugcuugagagcuccguaaucccccugaugcacccauuggcagaccccucuaccguuuuuaaggauggcgacgaagccgaggauuucguggaaguccaucucccugacgugcacaaacaggucagcgacguggaucuggguuuaccaucaugggggaaguaucugcuaaugagugcuggcgcccucgcaacgcugauacuugcuaucuuuuugauuaccugcugucggcgugccaaccgcacagaguccacucagagaggacauagggaaagcggcgggaagguuucuguggcgccgcaaaauggaaaaaucauuucaaguugggagcuguacaagagcgaguccgaaaccgguauguga

SEQ ID NO: 159414 - RNA, 1575 nt, Artificial Sequence; identical to SEQ ID NO: 159382
  derived and/or modified CDS sequence (opt3) from glycoprotein__RABV__JQ686011.1

SEQ ID NO: 159415 - RNA, 1575 nt, Artificial Sequence
  derived and/or modified CDS sequence (opt3) from glycoprotein__RABV__JQ699230.1
auggugccccagguccuccuguucguuccucuucugguguuuagcuccugcuucggcaaguuuccaaucuacaccauuccggacaaauuggggcccuggucuccuauagauaucagacacuuaucauguccaaacaaucugguaguggaggacgaaggaugcacaaaccuaagugguuucagcuauauggagcucaaggucggcuacauuuccgccaucaaagugaauggguuuacuuguacgggaguugugaccgaagcugagacauauacuaacuucgucggcuacgugaccacaaccuuuaagaggaaacauuuccggcccaugccugaugcaugccgcgccgcguauaauuggaagauggcuggugacccacgauacgaagagucucugcacaaccccuauccugauuaccauuggcuucguacuguaaagacaaccaaagagucgcugguuauuaucucaccaagcguggccgacuuggauccguacgacaagagucuccacuccagagucuuucccgggggaaaauguucuggcauaacggugagcuccacuugcuguucaaccaaucaugauuauacaaucuggaugccugaaaacccaaggcugggcaccaguugcgacauuuucacuaauagccgggggaagcgcgcaucuaaaggagguaagacauguggcuuuguggaugagagagggcuguacaagucccucaaaggagccugcaaguuaaaacuguguggcguccuugguuugaggcugauggacgggaccuggguugcuauccaaacgucagaugaaauuaaguggugcagccccgaccagcuagugaaccuccacgacuuccacagugaugagaucgagcaucugguaguggaggaacuugucaaaaagcgggaagagugccuggacgcauuggaaacuauaaugacaaccaaaucuguguccuuucgccgacucagccaccugagaaaguuaguuccuggauucggcaaggccuauacuauuuucaauaaaacacugauggaggcugaugcccauuacaagucgaucaggaccuggaacgagauuaucccaucuaaaggcugucuccgggucgggggacguugccacccccacgugaaugguguguuuuucaacggcaucauucuugggccggacggacauguacugauaccugaaaugcaguccucauugcuacaccagcauauggagcugcucgaaaguagcguuaucccccugaugcacccacuugcggauccuuccacgguguuuaaggacggcgaugaggcagaagacuucgucgaggugcaucugcccgauguccacaaacaaauuucugguguggacuuggggcucccaaauuggggcaaguauguucugaucagcgccggagcuuuaaccgcccugaugcuaaugauauuucucaugacauguugccgcaaggcaaacagagcugagucaauucagcacaaccccggcgaaacugggaggaaagugaguguaaccucccauaauggacgggucaucagcucuugggagucauacaagagugguggcgaaacaaaacuguga

SEQ ID NO: 159416 - RNA, 1575 nt, Artificial Sequence
  derived and/or modified CDS sequence (opt3) from glycoprotein__RABV__JQ699231.1
auggugccccagguccugcuguucguuccucuucugguguuuagcuccugcuucggcaaguuuccaaucuacaccauuccggacaaauuggggcccuggucuccuauagauauccaccauuuaucauguccaaacaaucugguaguggaggacgaaggaugcacaaaccuaagugguuucagcuauauggagcucaaggucggcuacauuuccgccaucaaagugaauggguuuacuuguacgggaguugugaccgaagcugagacauauacuaacuucgucggcuacgugaccacaaccuuuaagagaaaacacuucaggcccaugccugaugcaugccgggccgcguauaauuggaagauggcuggugacccacgcuacgaagagucucugcauaaccccuauccugauuaccacuggcuucgaacuguaaagacaaccaaagagucgcugguuauuaucucaccaagcguggccgacuuggauccguacgacaagagucuccauucccgugucuuucccgggggaaaauguucuggcauaacggugagcuccacuugcuguucaaccaaucacgauuauacaaucuggaugccugaaaacccaagacugggcaccaguugcgacauuuucacuaauagcagggggaagcgggcaucuaaaggagguaagacauguggcuuuguggaugagcgcgggcuguacaagucccucaaaggagccugcaaguuaaaacuguguggcguccuugguuugagacugauggacgggaccuggguugcuauccaaacgucagaugaaauuaaguggugcagccccgaccagcuagugaaccuccacgacuuccauagugaugagaucgagcaccugguaguggaggaacuugucaaaaagagggaagagugccuggacgcauuggaaacuauaaugacaaccaaaucuguguccuuucggcgccucagccaucugcgaaaguuaguuccuggauucggcaaggccuauacuauuuucaauaaaacacugauggaggcugaugcccacuacaagucgaucagaaccuggaacgagauuaucccaucuaaaggcugucucagggucgggggacggugccacccccaugugaaugguguguuuuucaacggcaucauucuugggccggacggacacguacugauaccugaaaugcaguccucauugcuacaucagcacauggagcugcucgaaaguagcguuaucccccugaugcauccacuugcggauccuuccacgguguuuaaggacggcgaugaggcagaagacuucgucgaggugcaccuccccgauguccacaaauugauuucugguguggaccucgggcugccaaauuggggcaaguauguuuuaaucagcgccggagcucugaccgcccuaaugcucaugauauuucugaugacauguugccguaaggcaaaccgcgcugagucaauucaacauaaccccggcgaaacugggagaaaagugaguguaaccucccacaauggaagggucaucagcucuugggagucauacaagagugguggcgaaacaaaacuuuga

SEQ ID NO: 159417 - RNA, 1575 nt, Artificial Sequence; identical to SEQ ID NO: 158894
  derived and/or modified CDS sequence (opt3) from glycoprotein__RABV__JQ699255.1

SEQ ID NO: 159418 - RNA, 1575 nt, Artificial Sequence; identical to SEQ ID NO: 158894
  derived and/or modified CDS sequence (opt3) from glycoprotein__RABV__JQ699257.1

SEQ ID NO: 159419 - RNA, 1575 nt, Artificial Sequence
  derived and/or modified CDS sequence (opt3) from glycoprotein__RABV__JQ699258.1
augaucccccaggugcugcuguucgucacccuucugguuuuuagcuccugcuucggcaaguuuccuauuuacacaauaccagacaaauuggggccguggucucccaucgauauucaccauuuaucauguccuaacaaucuggugguagaggacgaaggaugcacuaaccuaagugguuucagcuauauggagcucaaggugggcuacaucuccgccauuaaagucaauggguuuacguguaccggagugguuacagaagcugagacuuauaccaacuucgugggcuacgucacaaccacuuuuaagagaaaacacuucaggccaaugcccgaugcaugccgggccgcguauaauuggaagauggcuggugacccucgcuacgaagagucucugcauaacccauaucccgauuaccacuggcuucgaacagugaagaccacgaaagagucgcugguaaucauaucaccuagcguugccgacuuggauccauacgacaagagucuccauucccguguguuucccgggggaaaauguucuggcaucacugucagcucaaccugcuguuccacaaaucacgauuauacuauuuggaugccggaaaguccuagacugggcaccagcugcgacaucuucacaaacucuagggggaagcgggcauccaaaggagguaagaccuguggcuuuguggaugagcgcgggcuguacaagucacucaaaggagccugcaaguuaaaacuguguggcgugcuugguuugagacugauggacgggacgugggucgcuauucaaacuagcgaugaaaucaaguggugcccacccgaccagcuaguuaaucuccacgacuuccauagugaugagauagagcaccuggugguagaggaacuugugaaaaagagggaagagugccuggacgcauuggaaacaauuaugaccacuaaaucugucuccuuucggcgccucagccaucugcgaaaguuagugccuggauucggcaaggccuauacaaucuucaacaaaacccugauggaggcugaugcccacuacaagucgauuagaacguggaaugagaucaucccaucuaaaggcugucucaggguugggggacggugccacccccaugugaacggugucuuuuucaauggcauuauacuugggccggacggacacgugcugaucccugaaaugcaguccucauugcuacaucagcacauggagcugcucgaaaguagcguaauuccccugaugcauccacuugcggauccuuccaccguuuuuaaggacggcgaugaggcagaagacuucguggagguccaccuccccgaugugcacaaacaaaucucuggugucgacuuggggcucccaaacuggggcaaguaugugcugauaagcgccggagcuuuaacagcccugaugcuaacuauuuuucucaugaccuguugccguaagacaaauggcgcagggucaauccagcauagucccggagagacuggucgcaaaguuuccgugaccagccacaacggcagaguaaucucuucaugggaaaguuacaagagcggguccgagacaaaacuguga

SEQ ID NO: 159420 - RNA, 1575 nt, Artificial Sequence
  derived and/or modified CDS sequence (opt3) from glycoprotein__RABV__JQ699259.1
augaucccccaggcccugcuguucgugccucuucuggucuuuagcuccugcuucggcaaguuuccaauuuacaccauaccggacaaauuggggcccuggucuccuaucgauauucaccauuuaucauguccaaacaaucugguuguggaggacgaaggaugcacaaaccuaagugguuucagcuauauggagcucaagguaggcuacaucuccgcuauuaaagugaauggguuuacuuguacgggagucgugaccgaagcagagacauauacuaacuucguuggcuacgugaccacaaccuuuaagagaaaacacuucaggcccaugccugaugccugccggucugcguauaauuggaagauggcuggugacccacgcuacgaagagucgcugcauaaccccuauccugauuaccacuggcuucgaacugucaagacaaccaaagagucacuggugaucauaagcccaaguguagccgacuuggauccguacgacaagucccuccauucucguguuuuucccagagggaaauguagcggaaucacgguguccucaacuugcuguaguaccaaucacgauuauacaauuuggaugccugaaaacccaaggcugggcacuagcugcgacaucuucaccaauucucggggcaagcgcgcauccaaagggucaaagacauguggauuugucgaugagagaggucuguacaagagccucaaaggcgccugcaaguuaaaacuguguggggugcuuggauugaggcugauggacggcaccuggguggcuauucaaacgaguaacgaaaucaaguggugucccccugaucagcuagucaaucuccacgacuuccauucugacgagauagagcaccugguuguggaggaacuuguaaagaaacgggaagagugccuggaugcauuggaaacuauuaugacaaccaaauccgugagcuuucgccgacucucgcaucugagaaaguuagucccagguuucgggaaggccuauacuaucuucaacaaaacacugauggaggcugacgcccacuacaagucuauuaggaccuggaaugagaucauccccuccaaaggaugccuccgggugggcggccguugccacccgcauguuaacgggguguuuuucaauggaauuauacuugguccugauggccacguccugauccccgaaaugcagucaaguuugcuacaucagcacauggagcugcucgaaagcuccgugauuccacugaugcauccucuugcggaccccucuacgguauuuaaggauggggacgaggcagaagauuucguugaggugcaccucccagacguccacaaacaaaucagcggaguggauuugggccuccccaacugggguaaguauguccugauaucagccggggcuuuaaccgcccugaugcuaacaauuuuucucaucacuuguugccgcaagaccaacagagcaggcaguauccagcauuccccuggagagacaggcaggaaagugagcguuacuucucacaaugggcgggugauuucaaguugggaaagcuacaaguccggaucugagaccaaacuguga

SEQ ID NO: 159421 - RNA, 1575 nt, Artificial Sequence
  derived and/or modified CDS sequence (opt3) from glycoprotein__RABV__JQ699260.1
auggugccccaggccuuccuguuugucccuuuccucgcuguuccacuuugcuuuggcaaguucccgaucuacaccauucccgacaaacuggggccuuggagcccaauagauauccaccauuuguccugucccaacaauuuagugguagaggacgaaggaugcacaaaccugucugguuuuucauauauggagcuaaaggugggcuacauuagugcaaucaaagucacuggguucacguguaccggagugguuacagaagccgagacuuauaccaauuuugugggcuacgucacaaccacuuucaagagaaaacacuuuaggccuacaccagaugcgugccggagcgcuuauaacuggaagauugccggugacccccgcuacgaagagucccuccauaauccuuauccagauuaccacuggcugcgaaccgugaagacgacuaaagagucuuucguaaucauaucgccgucaguugcagaccuugaucccuacgacaagagccugcauagucguguguuuccuagagggaaauguuccggaaucaccgucucuagcacauauugcuccacuaaccacgauuacaccauuuggaugccagaaaaucccagguugggcacaucaugugacaucuucaccaacagucggggcaagcgcgccagcaaagggucuaagacgugcggauuuguggaugagagaggucucuauaagucccugaaaggcgcuuguaagcugaaacucugcgggguguuaggacugaggcuuauggacggcacuugggucgcaauucaaacaucagaugaaaccaagugguguccuccagaccaguugguuaaucugcacgacuuccauagcgaugagaucgagcaccuagugguagaggaacucgugaaaaagcgggaagagugccuggacgcccuugaaaguauaaugacuacaaaaucugucuccuuccgccgacugagccauuugagaaagcucgugcccgguuuugggaaggcuuacaccauuuucaacaaaacgcugauggaggccgaugcgcacuauaagucgguuaggaccuggaaugagaucauuccgucuaaaggaugcuuacgggugggcggccguugucacccucaugucaacgggguguuuuucaauggaaucauccugggucccgacggccacguacucauuccagaaaugcaguccucacuucugcagcaacauauggaguugcuagaaaguagcguuauaccucugaugcacccccucgcagauccauccacaguguuuaaggacggggaugaggccgaagacuucgucgaggugcaucugcccgauguccacaaacaggugucuggaguugaccuuggccugccuagcugggguaaguacguguugaugucagcugggauccucacugcccugauguuaaugauuuuucugaugaccugcugucgcagaacaaacagggcagagaguauccagcacucccuaggcgaaacuggacggaagguaagcgucaccucucagaauggccgagugauaucaaguugggagagcuauaaauccgggggagaaacaaagcucuga

SEQ ID NO: 159422 - RNA, 1575 nt, Artificial Sequence
  derived and/or modified CDS sequence (opt3) from glycoprotein__RABV__JQ699262.1
auggugccccaggcccuucucuucgucccucuucuggcuguuccauugugcuuuggcaaguucccgaucuacaccauucccgacaaauuagggccuuggagcccaauagauauccaccaucuguccugucccaacaaucuagugguagaggacgaaggaugcacaaaccucucugguuuuucauauauggagcugaaggugggcuacauuagugcaaucaaagucacuggguucacguguaccggagugguuacagaagccgagacuuauaccaauuuugugggcuacgucacaaccacuuucaagagaaaacacuuuaggccuacaccagaugcgugccggagcgcuuauaacuggaagauugccggugacccccgcuacgaagagucccuucauaauccuuauccagauuaccacuggcugcgaaccgugaagacgacuaaagagucuuucguaaucauaucgccgucaguugcagacuuggaucccuacgacaagagccuccauagucguguguuuccuagagggaaauguuccggaaucaccgucucuagcacauauugcuccacuaaccacgauuacaccauuuggaugccagaaaaucccaggcugggcacaucaugugacaucuucaccaacagucggggcaagcgcgccagcaaagggucuaagacgugcggauuuguggaugagagaggucuguauaagucccucaaaggcgcuuguaaguuaaaacugugcggggugcuuggauugaggcugauggacggcacuugggucgcaauucaaacaucagaugaaaccaagugguguccuccagaccagcuaguuaaucuccacgacuuccauagcgaugagaucgagcaccuggugguagaggaacuugugaaaaagcgggaagagugccuggacgccuuggaaaguauaaugacuacaaaaucugucuccuuucgccgacucagccaucugagaaaguuagugcccgguuucgggaaggcuuacaccauuuucaacaaaacgcugauggaggccgaugcgcacuauaagucgguuaggaccuggaaugagaucauuccgucuaaaggaugccuccgggugggcggccguugucacccucaugucaacgggguguuuuucaauggaaucauccuuggucccgacggccacguacugauuccagaaaugcaguccucauugcuacagcaacauauggagcugcucgaaaguagcguuauaccucugaugcacccccuugcagauccauccacaguguuuaaggacggggaugaggccgaagacuucgucgaggugcaucugcccgauguccacaaacaggugucuggaguugacuugggccucccuagcugggguaaguacgugcugaugucagcugggaucuuaacugcccugaugcuaaugauuuuucucaugaccugcugucgcagaacaaacagggcagagaguauccagcacucccugggcgaaacuggacggaagguaagcgucaccucucagaauggccgagugauaucaaguugggagagcuauaaauccgggggagaaacaaagcuguga

SEQ ID NO: 159423 - RNA, 1575 nt, Artificial Sequence
  derived and/or modified CDS sequence (opt3) from glycoprotein__RABV__JQ699264.1
auggugccccaggcccuucucuucgucccucuucuggcuguuccauugugcuuuggcaaguucccgaucuacaccauucccgacaaauuagggccuuggagcccaauagauauccaccaucuguccugucccaacaaucuagugguagaggacgaaggaugcacaaaccucucugguuuuucauauauggagcugaaggugggcuacauuagugcaaucaaagucaauggguucacuuguacgggagugguuaccgaagccgagacauauacuaacuuugugggcuacgucaccacaaccuucaagagaaaacacuuuaggccuacuccagaugcgugccggagcgcuuauaauuggaagauggccggugacccccgcuacgaagagucccuucauaacccuuauccagauuaccacuggcugcgaacagugaagaccacgaaagagucuuucguaauuaucucgccgucaguugcagacuuggaucccuacgacaagagccuccauagucguguguuuccuagagggaaauguuccggaauaacugucucuagcaccuauugcuccacaaaucacgauuacacuaucuggaugccagaaaaccccaggcugggcaccucaugugacauuuucacaaauagucggggcaagcgcgccagcaaagggucuaagaccugcggauuuguggaugagagaggucuguauaagucccucaaaggcgcuuguaaguuaaaacugugcggggugcuuggauugaggcugauggacggcacgugggucgcaauccaaacuucagaugaaacaaagugguguccuccagaccagcuaguuaaccuccacgacuuccauagcgaugagauugagcaccuggugguagaggaacuugugaaaaagcgggaagagugccuggacgccuuggaaaguaucaugaccacuaaaucugucuccuuucgccgacucagccaucugagaaaguuagugcccgguuucgggaaggcuuacacaauauucaauaaaacccugauggaggccgaugcgcacuauaagucgauuaggacguggaacgagaucauuccgucuaaaggaugccuccggguuggcggccguugucacccucaugugaauggggucuuuuucaacggaaucauccuuggucccgacggccacgugcugauuccagaaaugcaguccucauugcuacagcaacauauggagcugcucgaaaguagcguaauaccucugaugcacccccuugcagauccauccaccguuuuuaaggacggggaugaggccgaagacuucguggagguccaucugcccgaugugcacaaacaggucucuggaguggacuugggccucccuagcugggguaaguacguucugaugucagcugggaucuuaacagcccugaugcuaaugauuuuucucaugacuugcugucgcagaaccaauagggcagagaguauccagcacucccugggcgaaacaggacggaaggugagcguaacuucucagaacggccgagucauaucaaguugggagagcuauaaauccgggggagaaaccaagcuguga

SEQ ID NO: 159424 - RNA, 1575 nt, Artificial Sequence; identical to SEQ ID NO: 159101
  derived and/or modified CDS sequence (opt3) from glycoprotein__RABV__JQ699267.1

SEQ ID NO: 159425 - RNA, 1575 nt, Artificial Sequence; identical to SEQ ID NO: 158575
  derived and/or modified CDS sequence (opt3) from glycoprotein__RABV__JQ699272.1

SEQ ID NO: 159426 - RNA, 1575 nt, Artificial Sequence
  derived and/or modified CDS sequence (opt3) from glycoprotein__RABV__JQ730682.1
augaucccccagacccugcuguucgugccucuucuggucuuuagcuugugcuucggcaaguuuccaauuuacacaauaccggacaaauuagggcccugguccccuaucgauauucaccaucugucuuguccaaacaaucuaguuguggaggacgaaggaugcacuaaccucucagguuucaguuauauggagcugaagguaggcuacaucagcgccauuaaagugaauggguuuacguguaccggagucgugacagaagcugagacuuauaccaacuucguuggcuacgugacaaccacuuuuaagagaaaacacuucaggcccacaccugaugcaugccgggccgcguauaauuggaagauggcuggugacccacgcuacgaagagucccuucauaaccccuauccugauuaccacuggcugcgaaccgucaagacgacuaaagagucuuuggugaucauaucgccaucaguaagcgaccucgauccguacgacaagagucugcauucccguguuuuucccucugggaaauguagcggaaucaccguguccucaacauauugcccuacuaaucacgauuacaccauuuggaugccagaaaaccccagacugggcacaaguugugacaucuucaccaauagcaggggcaagcgggccucuaaaggguccaagacgugcggauuugucgaugagcgcggucucuauaagucauuaaaaggcgcauguaagcugaaacuuugcgggguguugggacugagacuaauggacggcacuugggccgcuauucaaacaagcgaugaagcaaagugguguccuccagaccagcucgugaacauccacgacuucaggagugaugagauagagcaucuggucguugaggaacuugugaaaaagcgggaagagugccuggacgccuuggaaucuauuaugaccacuaaauccgugagcuuucgccgacucucgcaccugagaaaguuaguacccgguuucgggaaggcuuacacaaucuucaauaaaacccugauggaggccgaugcgcauuauaagucugucaggacguggaacgagauuaucccguccaaaggaugccuccgggugggcggccguugucacccucacguuaaugggguguuuuucaacggaaucauucuuggucccgacggccauguccugauaccagaaaugcagucaaguuugcuacagcaacacauggagcugcucgaaagcuccgugaucccucugaugcauccccuugcagauccaucuaccguauuuaaggacggggaugaggccgaagacuucguugaggugcaccuccccgauguccauaaacaggugagcggagucgacuugggccucccuucaugggguaaguacgugcugaugaguguugggacauuaauugcucugaugcuaaugauccuccugacuaccugcugucgcaaggccaauggcgcagaguccauacagcacagacuuggagaaacaggcaggaaagugagcguaacuucucagaacgggcgggucauuucaaguugggagagcuauaaguccggaggugaaaccaaauuguga

SEQ ID NO: 159427 - RNA, 1575 nt, Artificial Sequence
  derived and/or modified CDS sequence (opt3) from glycoprotein__RABV__JQ824889.1
augaucccccacgcccugcucagcgugccucuucugauuuccucuuugugcuucggcaaguuuccaauauacaccaucccggagaaauuagggcccuggucaccuauugacauccaucaccugaguuguccaaacaaucuagucguugaagaugagggaugcaacagccucuccgguuucucuuauauggaacugaaggugggcuacauuucggcuaucaaaguaaauggguuuacauguacuggaguggucacggaggcagaaaccuauacaaacuucgugggcuacguuacuaccacauuuaagagaaaacauuucaggcccaugccugacgccugccgggcggcuuauaauuggaagaccgccggugauccacgcuacgaggagucacuucacaaccccuauccugacuaccauuggcugcgaacugugaagacaaccaaagagagcuugauaaucauuaguccauccgucgcagaucucgacccguacgauaagucucugcacagccguaucuuucccgggggaaaaugucugggcauuacgaucuccucaacuuauugcaguaccaaucacgacuacacaauauggaugccugaggaagccagacucggcacuagcugugauauuuucaccaacucuaaggggaaaagggcuuccaagggaggucggacaugcggcuuuguggacgagcgcggguuauauaagucacugaaaggagcauguaagcugaaauugugcggcguaccaggucugagacuaauggaugggaccuggguugccauccagacgcccaaugagacuaagugguguagcccugaccaacucgugaacguccaugauuucaggagugacgaaauugagcaccuggugguggaagaacuuauccggaaacgcgaagagugccuggacgcuuuggagucuaucaugacaaccaaguccgucagcuuucgaagacucucgaaucugaggaaauuaguuccaggauucggcaaggccuacacuauuuuuaacaagacacugauggaagcggaugcacauuauaaaucugugcggaccuggaaugagauaauccccucccguggcugccucaagguagggggacgcugucacccgcacgugaacggugucuucuucaauggcauuauccuugggccugacggacauauacugauucccgaaaugcagucaaguuugcuacagcagcacauggagcugcucgaaagcuccgugaucccacugauccauccucuugccgaucccucuacgguuuuuaaagacggcgaugaggcugaggacuucguggaaguccaccuuccagaugugcaucaacagguaagcgguguugacuuggggcuccccgauuggggcaaguacgugcugaugucagccggagcauuagcuaccgucaugcugacaauuuuucuaaucacuugcuguagaagggugaaacggaccgagaguguccagcagggccucggggaauccggacgaaaggugagcguugccccucaaaacgguaaggugaugucuucaugggaguauuacaaaaguggcgggggaacacgccuguga

SEQ ID NO: 159428 - RNA, 1575 nt, Artificial Sequence
  derived and/or modified CDS sequence (opt3) from glycoprotein__RABV__JQ944704.1
auggacccccaggcccugcuccuugugccucuguugggcuucagcuuaugcuuugggaaguucccaaucuacaccauuccggauaaacugggacccuggauaccuaucgacauucaccaucuauccuguccaaacaaucucgucguugaggaugaagguugcacaaaccugucuggcuuuucauauauggagcuuaaggugggguacaucaguagcauuaaaguaaauggauucacuuguacgggcguggucaccgaagcugagacauauacuaacuuuguggguuacguuaccacaaccuucagaaggaagcacuuucggcccacuccugacgcaugccgcgccgcguauaauuggaaaauggcuggggauccacgauacgaagagucccugcauaaccccuauccugacuaccacugguugcguacagugaagaccacgaaggagucucucgucaucauaucgccaucaguggccgaucuggacccguacgauaaaagccugcauaguagaguauuccccuccggaaaguguucuggcaucacuguuagcuccaccuauugcucaacaaaucacgacuacacuauuuggaugccugaaaaccucagguuaggcaccaguugugauaucuuuacaaauagccgggggaaacgcgcaucuaagggauccaaaaccugcgguuucguggacgagagaggccuguauaagucacuuaagggggccuguaaauugaagcugugcggaguccuaggccucaggcugauggaugguacguggguggcuaugcaaacuagcgacgaaacaaaaugguguccacccgaccagcuugugaaccugcacgauuuucggagugacgagauugagcauuuggucguugaggaacucgugaagaaacgcgaagagugccuggaugcauuagaaucuaucaugaccacuaaguccgugagcuuccgaagacugucgcaccucaggaaacuuguaccuggguuuggaaaggccuacacaauauucaauaagacccugauggaggcugacgcccauuauaaaucuguccggacguggaacgaggugauuccaucccguggcugcuugcgcguuggcgggagaugucacccccacgugaauggagucuucuuuaacgguaucauucuaggcccggaugggcaugugcugaucccugaaaugcagucaagucuccugcagcaacacaucgagcuucuggaaagcuccguaauucccuugaugcauccacucgcggacccuucuaccguuuucaaggauggagacgaggcagaagauuuuguggagguccaucugcccgacgugcacaaacaggucagcggcguggauuuaggucugccaaauugggggaaguacguucuacucucagccggcgcucugauagcccuuauguugaucauuuuccugaucacaugcuguaggcgggugaaccgacccgagaguacucagcgcucccucagaggagcaggcaggaaaguaagcauaaccucucagucagggaaggucauuaguagcugggaauccuauaagucuggaggugagacacggcuguga

SEQ ID NO: 159429 - RNA, 1575 nt, Artificial Sequence
  derived and/or modified CDS sequence (opt3) from glycoprotein__RABV__JQ944705.1
auggugccccaggucuuccuguuuguuccucuccuuguguucccacugugcagcggcaaguuuccgaucuacaccauucccgacaaauuggggccuugguccccaauagauauccaccauuuaucuugucccaacaaucugguaguggaggacgaaggaugcacaaaccuaucagguuucaguuauauggagcucaaggucggcuacauuagcgccaucaaagugaauggguuuacuuguacgggaguugugaccgaagcugagacauauacuaacuucgucggcuacgugaccacaaccuuuagaaggaagcacuuccggccuacuccagaugcaugccgcgccgcguauaauuggaaaauggcuggugacccccgauacgaagagucccugcauaacccuuauccagauuaccacuggcuucguacaguaaagaccacgaaggagucucugguuauuaucucgccgucaguggccgacuuggaucccuacgacaaaagccuccauaguagagucuuuccuuccgggaagugucugggaauaacugugucuagcacccacugcuccacaaaucacgauuauacuaucuggaugccagaaaaccccaggccuggcaccucaugugacauuuucacaaauagucggggcaaacgcgcaagcaaggggucuaaaaccugcggauuuguggaugagagaggucuguacaagucccucaagggcgccuguaaauuaaagcugugcgggguccuuggauugaggcugauggacggcacguggguugcuaugcaaacuucagaugaaacaaaaugguguccacccgaccagcuagugaaccuccaugacuuccggagcgaugagaucgagcaccugguaguggaggaacuugucaagaaacgcgaagagugccuggacgcauuggaaaguauuaugaccacuaagucuguguccuuucgaagacucagccaucugaggaaauuaguuccggguuucgggaaggccuauacaaucuucaauaagacccugauggaggcugaugcccacuacaaaucggugcggacguggaacgagauaauuccuucuaagggaugccuccgugucggcggccgcugucacccccaugugaaugggguauuuuucaacggaaucauucuugguccagacggccacguucugaucccugaaaugcaguccucauugcuacagcaacauauggagcugcucgaaaguagcgugaucccccugaugcacccacuugcggaucccuccaccgucuuuaaagacggggaugaggcagaagacuucguggagguccaucugccugaugugcacaagcagguuucuggaguggacuugggccucccaaauugggguaaauauguacuguuaagcgccggggcucugauugcccuaaugcucaugauauuucugaugacaugcuguagaaaggucaacaggccggagucaacucagcggagucuuggcggaaccggccgaaagguguccaucacaagccagucugggaaaguuauuucaaguugggaaagcuacaaguccggaggugagacucgcuuguga

SEQ ID NO: 159430 - RNA, 1575 nt, Artificial Sequence
  derived and/or modified CDS sequence (opt3) from glycoprotein__RABV__JQ944706.1
auggcaccccaggcucuccuguucgugccucuucuggucuuuccauugugcuucggcaaguuuccgaucuacaccauucccgacaaauuagggccuuggagcccaauagauauccaccaucuguccugucccaacaaucuaguuguggaggacgaaggaugcacaaaccucucugguuucucauauauggagcugaagguaggcuacauuagugcaaucaaagugaauggguuuacuuguacgggagucgugaccgaagccgagacauauacuaacuucguuggcuacgugaccacaaccuuuaagagaaaacacuucaggccuauuccagaugcgugccgggcugccuauaauuggaagauggccggugacccccgcuacgaagagagccuucauaacccuuauccagauuaccacuggcugcgaacugucaagacaaccaaagaguccuuggugaucauaucuccgucgguagccgaccucgaucccuacgacaagucacugcauagccguguuuuuccuagugggaaauguuccggaaucacggugucuagcacuuauugcuccaccaaucacgauuacacaauuuggaugccagaaaaccccagacugggcacuucaugugacaucuucgcuaauaguaggggcaagcgggcaagcaaagggucuaagaccugcggauuugucgaugagcgcggucucuauaaguccuuaaaaggcgccuguaagcugaaacuuugcgggguguugggacugagacuaauggacggcacauggguggcuaugcaaaccucagaugaaacgaagugguguccuccagaccagcucgucaaccugcacgacuucaggagcgaugagauugagcaucuuguuguggaggaacuggugaaaaagcgggaagagugcuuggacgcccucgaaaguaucaugacuacaaaaucuguauccuuucgccgacugagccacuuaagaaagcugguccccgguuucgggaaggcguacaccauauucaauaaaacucucauggaggcagaugcccauuauaagucggugaggacauggaacgagauuaucccgucuaaaggaugccuucggguuggcggccguugucacccucacgugaauggggucuuuuucaacggaauuauccugggucccgacggccauguguugaucccagaaaugcaguccucacuacugcagcaacacauggagcuccuggaaaguagcguaauuccucuuaugcauccccuggcugauccauccaccguuuuuaaggacggggaugaggccgaagacuucguggagguccacuugcccgaugugcauaaacaggucucuggaguggaccucggccugccuaauugggguaaguacguuuuacugagcgcaggggcucuaauagcccucaugcugaucauuuuucuuaugacgugcugucgcagagugaacaggccagagucaacccagcggugcuugggcggaacaggccgaaagguaagugucacuucccagagcgggaaagugaucucuucaugggaaaguuauaagagcggaggugagacccgccuguga

SEQ ID NO: 159431 - RNA, 1575 nt, Artificial Sequence
  derived and/or modified CDS sequence (opt3) from glycoprotein__RABV__JQ944707.1
augaucccccaggcccuucucuucgugccucuucuggcuuuuccaaugugcuucggcaaguuuccgauuuacaccauacccgacaaauuggggccuuggagcccaaucgauauucaccauuuauccugucccaacaaucuggucguugaggacgaaggaugcacaaaccuaucugguuucucauauauggagcucaaggugggcuacaucagugcaauuaaaguaaauggguuuacuuguacgggagugaucaccgaagccgagacauauacuaacuucgucggcuacgugaccacaaccuuuaagagaaaacacuucaggccuacuccagaugcgugccgggcugccuauaauuggaagauggccggugacccccgcuacgaagagagccugcauaacccuuauccagauuaccacuggcuucgaacaguuaagaccacgaaagagucccugauaaucauuucuccgucgguggcagacuuggaucccuacgacaagucacuccauagccgugucuuuccuagugggaaaugucugggaaucacuauuuccucuaccuauugcagcacaaaucacgauuacacuaucuggaugccagaaaaccugagacucggcaccuccugugacauauucacaaauucaaggggcaagcgggcuaguaaagggagcaagaccugcggauuuguggaugagcgcgguuuauauaagucucugaaaggcgcauguaagcugaaauugugcgggguacugggacuaagacucauggacggcacguggguugccaugcaaacuuccgaugaaacaaaguggugucccccugaccagcuggugaaccuucacgacuucaggucagaugagauugagcaucuggucguggaagaguuggugaaaaagcgggaagagugccucgacgcucuggaaagcaucaugaccacuaaaagugucucuuuucgccgauuaucccaccugagaaagcucguuccagguuucgggaaggccuacacaauuuucaauaaaacccuuauggaggcggaugcacauuauaagagcgugaggacguggaacgagaucauccccucgaaaggaugccugcggguaggcggccguugucacccgcacgugaauggggucuuuuucaacggaauuauauuggguccugacggccaugugcuaauccccgaaaugcagucuucccugcuccagcaacacauggagcugcuugaaucaaguguuauuccacugaugcauccuuuggccgaucccagcaccguguuuaaggacggggaugaggcugaagacuucgucgaggugcaccucccagauguacauaaacagaucuccggaguugaccugggcuuacccaauugggguaaguacgugcugauaauugccgggguccuaaucgcaaugauccucacaauuuuucugaugacuugcuguggccgcggaaacagaccuaagucuacccagcacagccuuggcgggaucggaaggaaagugucagcuacaagucaguccgguaaggucauuagcucuugggagucauauaaaaguggcggggaaacucgguuguga

SEQ ID NO: 159432 - RNA, 1575 nt, Artificial Sequence
  derived and/or modified CDS sequence (opt3) from glycoprotein__RABV__JQ944708.1
auggugccccaggcccuccuguucgucccucuucugguuuuuccauugugcuucggcaaguuuccgaucuacaccauucccgacaaauuagggccuuggagcccaauagauauccaccaucuguccugucccaacaaucuagugguagaggacgaaggaugcacaaaccucucugguuucucauauauggagcugaaggugggcuacauuagugcuaucaaagucaauggguuuacuuguacgggagugguuaccgaagcagagacauauacuaacuucgugggcuacgucaccacaaccuuuaagagaaaacacuucaggccuacuccagaugccugccgggcggcuuauaauuggaagacagccggugacccccgcuacgaagagagccuucauaacccuuauccagauuaccacuggcugcgaaccgugaagacgacuaaagaguccuugguaauuaucucuccgucgguugcagaccucgaucccuacgacaagucacugcauagccguguguuuccuagugggaaauguuccggaauaaccgucucuagcacauauugcuccacuaaucacgauuacaccaucuggaugccagaaaaccugagacucggcacaucaugugacauuuucaucaauaguaggggcaagcgggccagcaaagggucucaaaccugcggauuuauugaugagcgcgguuuauauaagucccugaagggcgcuuguaaacuuaaguugugcggggugcugggacuaagacucauggacggcacguggguggcaaugcagacuucacacgaaacaaaauggugucccccugaucagcuggucaaccuucaugacuucaggagcgacgagaucgagcaccugguuguggaagaguugguaaagaaacgggaagagugccucgaugcccuggaaaguauaaugaccacuaagucuguguccuuucgccgauuaagccaucugagaaaacucgucccagguuucgggaaggcuuacacaauuuucaauaagacccuuauggaggccgacgcgcacuauaaaucggugaggacguggaacgagaucauucccucuaagggaugccugcggguuggcggccguugucacccgcaugugaauggggucuuuuucaacggaaucaucuuggguccugaaggccacgugcuaauucccgagaugcaguccucacugcuccaacagcauauggaacugcuugagaguagcguaauaccacugaugcacccuuuggcagaucccuccaccguuuuuaaagaaggggacgaggccgagaauuucguggaaguccaucucccagaugugcacaagcaggucucuggaguggaccugggcuuacccaacugggguaaauacguucugcuaagcucaggggcucucaucgcccugaugcuuauuaucuuuuugcugacaugcugucgcagagugaacaggccugagaguacucagcacucccucggcggaaagcggcgaaagguaagcauaaccucucaaucaggcaaagucauuaguagcugggaauccuauaagucugggggagagacacgccuguga

SEQ ID NO: 159433 - RNA, 1575 nt, Artificial Sequence
  derived and/or modified CDS sequence (opt3) from glycoprotein__RABV__JQ944709.1
auggugccccagguccugcucuuuguuccucuucugggcuuuagcuugugcuucgggaaguuuccaaucuacaccauuccggacgaguuaggacccugguccccuauagauauccaccaccugucuuguccaaacaaucuagugguagaagacgaggguugcacaaaccucucagaguucaguuauauggagcugaaagugggcuacauuagcgccaucaaggucaauggguuuacuuguacgggagugguuaccgaagcugagacauauacuaacuucgugggcuacgucaccacaaccuuuaaaagaaagcacuucaggcccacuccugaugcaugccgggccgcguauaauuggaaaauggcuggugacccacgcuacgaggaaucccuucauaaccccuauccugauuaccacuggcugcaaacagugcgaaccacgaaggagucuuugauuaucauaucgccaucaguaacugaccucgauccguacgacaagagccugcauagucguguuuuucccgggggaaaauguuccggcaucaccgugucuagcacauauugcuccacuaaucacgauuacaccauuuggaugccugaaaacccaagacccaggacaccuugugacaucuucaccaauucacggggcaagcgcgccaguaaagggaacaagacgugcggauuugucgaugagagaggucuguauaaaagccucaagggcgcauguagguuaaagcugugcggggugcuuggauugcggcugauggacggcacuuggguggccaugcagacaucugaugagaccaaaugguguccacccgaccagcuagucaaucuccacgacuuccgcuccgaugaaauugagcaucugguuguggaagaacuuguaaagaaacgagaagagugccuggacgcuuuggagucaaucaugacuacaaagagcgugaguuuuagaaggcucucucaucugcggaaauuagucccggguuucgggaaggcauacaccauauucaacaaaacgcugauggaagccgaugcucacuauaaguccgugcguaccuggaaugagauuaucccuagcaagggaugccucaaaguuggcggccgcugucacccccacgugaacggggucuuuuucaauggaauuauccuugguccagacggccaugugcugaucccugaaaugcagucgucuuugcuacaacagcacauggagcugcucgaauccucaguaauuccccugaugcauccacuugccgaucccaguacaguuuuuaaggagggggacgaggcggaagauuucguggagguccaucugccugacguguacaaacagauaagcggagucgauuugggccucccaaacugggguaaguaugugcugaugacugcaggggccaugaucggcuuaguucugauuuucucccuaaugaccuggugcagaagggcuaaccggccggaaucuaaacagcgaaguuucggaggcacagggcgcaaugugucaguaacuagccaauccggaaaggucauccccagcugggagucuuacaagucagguggcgaaauaagacucuga

SEQ ID NO: 159434 - RNA, 1575 nt, Artificial Sequence
  derived and/or modified CDS sequence (opt3) from glycoprotein__RABV__JQ950447.1
augaucccccaggccuuccuguuugugccucuccuugucguuccacugugcuucggcaaguuuccgauuuacaccauacccgacaaauuggggccuuggagcccaaucgauauucaccauuuauccugucccaacaaucuggugguagaggacgaaggaugcacaaaccuaucugguuucucauauauggagcucaaggugggcuacaucagugcuauuaaagucaauggguuuacuuguacgggagugguuaccgaagcagagacauauacuaacuucgugggcuacgucaccacaaccuuuaagagaaaacacuucaggccuacuccagaugccugccggagcgcguauaauuggaagauggcuggugacccccgcuacgaagagucccugcauaacccuuauccagauuaccacuggcuucgaacagugaagaccacgaaagagucuuuuguaaucauaucgccgucaguugccgaccuggaucccuacgacaagagcuugcauagucguguguucccuagagggaaauguuccggaaucacugucucuagcaccuauugcccaacaaaucacgauuacacuauuuggaugcccgaaaacccuaggcucggcaccuccugugacaucuuuacaaauucacggggcaagcgcgcauucaaagggaguaagaccugcggauuuguggaugagagaggucuguauaagagccugaaaggcgccuguaagcucaaauuaugcggggugcugggacuuagguugauggacggcacgugggucgcuauucaaacuucugaugaaacaaagugguguccacccgaccagcugguuaaccuacacgacuuccauuccgaugagaucgagcaccucgugguagaggaacuggugaaaaagcgggaagagugccuugacgcacuggaaucaauaaugaccacuaaaagcgucaguuuccgccgauugucucaucucagaaagcuggugccggguuuugggaaggccuacacaauuuucaauaaaaccuuaauggaggcugaugcccacuauaaguccguuaggacguggaacgagaucauuccuagcaaaggaugccugcgggugggcggccguugucacccccaugucaaugggguguuuuucaacggaaucauccucgguccagacggccacguacuuauuccugaaaugcagucgucucuguugcagcaacauauggagcuacuggaauccucaguuauaccccucaugcacccacuggcggaucccaguaccguguuuaagaauggggacgaggcagaagauuucgucgaggugcaucuuccugacguccacaaacaggugagcggaguugaucugggcuugccauccugggguaaguacgugcucaugucugccgggauccugacagcuuuaaugcugaugauuuuucuaaugacuugcugucgcagaaccaacaggagcgagucaauccagcacagucucggcgaaacaggacggaagguauccgucacuagccagucuggccgagugauaucaaguugggagagcuauaaauccgggggagaaaccaagcuguga

SEQ ID NO: 159435 - RNA, 1575 nt, Artificial Sequence
  derived and/or modified CDS sequence (opt3) from glycoprotein__RABV__JQ950449.1
augaucccccaggccuuccuguuugugccucuccuugucguuccacugugcuucggcaaguuuccgauuuacaccauacccgacaaauuggggccuuggagcccaaucgauauucaccauuuauccugucccaacaaucuggugguagaggacgaaggaugcacaaaccuaucugguuucucauauauggagcucaaggugggcuacaucagugcuauuaaagucaauggguuuacuuguacgggagugguuaccgaagcagagacauauacuaacuucgugggcuacgucaccacaaccuuuaagagaaaacacuucaggccuacuccagaugccugccggagcgcguauaauuggaagauggcuggugacccccgcuacgaagagucccugcauaacccuuauccagauuaccacuggcuucgaacagugaagaccacgaaagagucuuuuguaaucauaucgccgucaguugccgaccuggaucccuacgacaagagcuugcauagucguguguucccuagagggaaauguuccggaaugacugucucuagcaccuauugcccaacaaaucacgauuacacuaucuggaugcccgaaaacccuaggcucggcaccuccugugacauuuuuacaaauucacggggcaagcgcgcauucaaagggaguaagaccugcggauuuguggaugagagaggucuguauaagagccugaaaggcgccuguaagcucaaauuaugcggggugcugggacuuagguugauggacggcacgugggucgcuauccaaacuucugaugaaacaaagugguguccacccgaccagcugguuaaccuacacgacuuccauuccgaugagauugagcaccucgugguagaggaacuggugaaaaagcgggaagagugccuugacgcacuggaaucaaucaugaccacuaaaagcgucaguuuccgccgauugucucaucucagaaagcuggugccggguuuugggaaggccuacacaauauucaauaaaaccuuaauggaggcugaugcccacuauaaguccguuaggacguggaacgagauuaucccuagcaaaggaugccugcgggugggcggccguugucacccccaugucaaugggguguuuuucaacggaauuauccucgguccagacggccacguacuuaucccugaaaugcagucgucucuguugcagcaacauauggagcuacuggaauccucaguuauuccccucaugcacccacuggcggaucccaguaccguguuuaagaauggggacgaggcagaagauuucgucgaggugcaucuuccugacguccacaaacaggugagcggaguugaucugggcuugccauccugggguaaguacgugcucaugucugccgggauacugacagcuuuaaugcugaugaucuuucuaaugacuugcugucgcagaaccaacaggagcgagucaauucagcacagucucggcgaaacaggacggaagguauccgucacuagccagucuggccgagugaucucaaguugggagagcuauaaauccgggggagaaaccaagcuguga

SEQ ID NO: 159436 - RNA, 1575 nt, Artificial Sequence
  derived and/or modified CDS sequence (opt3) from glycoprotein__RABV__JX088694.1
auggugccccaggcccuucucuucgucccucuucuggcuguuccauugugcuuuggcaaguucccgaucuacaccauucccgacaaauuagggccuuggagcccaauagauauccaccaucuguccugucccaacaaucuagugguagaggacgaaggaugcacaaaccucucugguuuuucauauauggagcugaaggugggcuacauuagugcaaucaaagucaauggguucacuuguacgggagugguuaccgaagccgagacauauacuaacuuugugggcuacgucaccacagcguucaagagaaaacacuuuaggccuaccccagaugcuugccggagcgccuauaauuggaagauggccggugacccccgcuacgaagagucccuucauaacccuuauccagauuaccacuggcugcgaacugugaagacaaccaaagagucuuucguaauuaucucgccgucaguugcagacuuggaucccuacgacaagagccuccauagucguguguuuccuagagggaaauguuccggaauaacggucucuagcacuuauugcuccaccaaucacgauuacacaaucuggaugccagaaaaccccaggcugggcacuucaugugacauuuucaccaauagucggggcaagcgcgcuagcaaagggucuaagacaugcggauuuguggaugagagaggucuguauaagucccucaaaggcgcauguaaguuaaaacugugcggggugcuuggauugaggcugauggacggcaccugggucgccauccaaacgucagaugaaacuaagugguguccuccagaccagcuaguuaaccuccacgacuuccauagcgaugagauugagcaccuggugguagaggaacuugugaaaaagcgggaagagugccuggacgcuuuggaaaguaucaugacaaccaaaucugucuccuuucgccgacucagccaucugagaaaguuagugcccgguuucgggaaggccuacacuauauucaauaaaacacugauggaggcggaugcacacuauaagucgguuaggaccuggaacgagauuaucccgucuaaaggaugccuccgggugggcggccguugucacccucaugucaaugggguguuuuucaacggaauuauccuuggucccgacggccacguacugaucccagaaaugcaguccucauugcuacagcaacauauggagcugcucgaaaguagcguuauuccucugaugcacccccuugccgauccauccacgguguuuaaggacggggaugaggcugaagacuucgucgaggugcaucugcccgauguccacaaacaggugucuggaguugacuugggccucccuagcugggguaaguacgugcugaugucagccgggauauuaaccgcacugaugcuaaugaucuuucucaugacaugcugucgcagaacuaauagggcugagaguauucagcacucccugggcgaaaccggacggaagguaagcgucacaucucagaacggccgagugaucucaaguugggagagcuauaaauccgggggagaaacuaagcuguga

SEQ ID NO: 159437 - RNA, 1575 nt, Artificial Sequence
  derived and/or modified CDS sequence (opt3) from glycoprotein__RABV__JX473838.1
auggugccccaggcccuccuguucaucccucuucuggucuuuccauugugcuuaggcaaguucccgauuuacaccauacccgacaaacuggggccuuggagcccaaucgauauucaccaucuauccugucccaacaaucucguuguggaggacgaaggaugcacaaaccugucugguuuuucauauauggagcuuaagguaggcuacaucagugcuauuaaagugaauggguucacuuguacgggagucgugaccgaagcagagacauauacuaacuuuguuggcuacgugaccacaaccuucaagagaaaacacuuuaggccuaucccagaugccugccgggcggcuuauaauuggaagauggccggugacccccgcuacgaagagagccugcauaacccuuauccagauuaccacugguugcgaacugucaagacaaccaaagagucccucgugauaaucucuccgucgguagcagaccuggaucccuacgacaagucacugcauagccguauuuucccuagugggaaauguuccggaaucacgguuucuagcacuuauugcuccaccaaucacgauuacacaauuuggaugccagaaaaccccagacucggcacuucaugugacaucuuugccaauaguaggggcaagcgggcuagcaaagggggaaagaccugcgguuuaguggaugagcgcggccuguauaagucucuuaaaggggcauguaaguugaaacugugcggaguccuaggccucagacugauggacgguacauggguggccaugcaaaccuccgaugaaacgaagugguguccuccagaccagcuugugaacaugcacgacuucaggucagaugagauagagcaucuggucguugaagaguuggugaaaaagcgggaagagugccucgacgcucuggaaagcauuaugacuacaaaaaguguaucuuuucgccgauuaucccaccugagaaagcucgugcccggguucggaaaggccuacaccaucuuuaauaaaacucuuauggaggcggaugcacauuauaagagcgucaggacauggaacgagauuaucccgucgaaaggcugccugcgggugggcgggcguugucacccucacguuaauggaguguucuucaacgguaucauuuugggccccgacgggcauguccuaauaccagaaaugcagucuucccugcuccagcaacacauggagcugcuugaaucaagugugaucccucugaugcaucccuuggccgauccaagcaccguauuuaaggacggagaugaggcugaagacuucguugaggugcaccuccccgauguccauaaacagguguccggcgucgaccuggguuuaccuaauugggggaaguacgugcugcuaucugccggcacgcucauugcacugaugcuuaucauauuuuugaugaccugcugucgcagaguuaacaggccagagagcacacagcggucacugggaggcgcugggcgacgcgugaguguaacuucccagagcggaaaggucauuucuucaugggaaaguuauaaaagcgguggcgagaccagacucuga

SEQ ID NO: 159438 - RNA, 1575 nt, Artificial Sequence; identical to SEQ ID NO: 159437
  derived and/or modified CDS sequence (opt3) from glycoprotein__RABV__JX473839.1

SEQ ID NO: 159439 - RNA, 1575 nt, Artificial Sequence
  derived and/or modified CDS sequence (opt3) from glycoprotein__RABV__JX473840.1
auggugcccagagcccuucucuucaucccucuucuggucuuuagcuugugcuucggcaaguuuccaauuuacaccauaccggacaaauuagggcccuggaacccuaucgauauucaccaucuguccuguccaaauaaccuaguuguggaggacgaaggaugcacaaaucucucugguuucucauauauggagcugaagguaggcuacaucagugcuauuaaagugaacggguuuacuuguacgggagucgugaccgaagcagagacauauacuaauuucguuggcuacgugaccacaaccuuuaagaggaaacacuuccggcccaucccugauacuugccgcgccgcguauaacuggaagauggcuggugacccacgauacgaagagagccuucauaaucccuauccugauuaccacuggcugcguacagucaagaccacgaaagaguccuuggugauaaucucuccaucgguagccgaccucgauccguacgacaagucacugcauagcagaauuuuucccagugggaaauguuccggaaucacuguuucuagcaccuauugcuccacaucacacgauuacacuauuuggaugccugaaaacccaaggcugggcaccaguugugacaucuucgcaaauagccggggcaagcgcgccucuaaagggggaaagacaugcggucucguggaugagagaggcuuauauaagucccugaaaggggcuuguaagcugaaauugugcggaguccugggccuaaggcucauggacgguaccuggguggcaaugcagacgucagaugaaacuaaguggugucccccugaccaacuggugaacaugcacgacuuucggagcgaugagauagagcaucuugucguugaggaacuggugaaaaagcgcgaagagugcuuggacgcccucgaaaguauuaugacaaccaaaucuguauccuuccgaagacugagccacuuaaggaagcuggugccaggguuuggaaaggcuuacacuaucuucaauaaaacacucauggaggccgaugcgcauuauaagucgguccggaccuggaacgagauuauccccucuaaaggcugccuucgugugggcgggcgcugucacccgcacguuaauggaguguucuuuaacgguaucauucugggcccugacgggcaugucuugauacccgaaaugcaguccucacuacugcagcagcacauggagcuccuggaaaguagcgugaucccacuuaugcauccucuggcagaucccuccacgguauucaaggacggagaugaggccgaagacuuuguugaggugcacuugccagauguccauaaacaagugucuggcgucgaccucggucugcccaauugggggaaguacguguuacugagcgcuggcacccuaauugcccucaugcugaugaucuuccuuaugacaugcuguagaaggguuaaccggccugagucaacucagcgaaguuugggaggcgcagggcgcagaguguccguaaccagccagucuggaaaggucauaucaaguugggaaagcuauaaauccgguggcgagacaaggcuguga

SEQ ID NO: 159440 - RNA, 1575 nt, Artificial Sequence
  derived and/or modified CDS sequence (opt3) from glycoprotein__RABV__JX473841.1
auggugccccaggcccuucucuucaucccucuucuggucuuuagcuugugcuucggcaaguuuccaauuuacaccauaccggacaaauuagggcccuggaacccuaucgauauucaccaucuguccuguccaaauaaccuaguuguggaggacgaaggaugcacaaaucucucugguuucucauauauggagcugaagguaggcuacaucagugcuauuaaagugaacggguuuacuuguacgggagucgugaccgaagcagagacauauacuaauuucguuggcuacgugaccacaaccuuuaagagaaaacacuucaggcccaucccugauacuugccgggccgcguauaacuggaagauggcuggugacccacgcuacgaagagagccuucauaaucccuauccugauuaccacuggcugcgaacagucaagaccacgaaagaguccuuggugauaaucucuccaucgguagccgaccucgauccguacgacaagucacugcauagccguauuuuucccagugggaaauguuccggaaucacuguuucuagcaccuauugcuccacaucacacgauuacacuauuuggaugccugaaaacccaagacugggcaccaguugugacaucuucgcaaauagcaggggcaagcgggccucuaaagggggaaagacaugcggucucguggaugagcgcggcuuauauaagucccugaaaggggcuuguaagcugaaauugugcggaguccugggccuaagacucauggacgguaccuggguggcaaugcaaacgucagaugaaacuaaguggugucccccugaccagcuggugaacaugcacgacuuuaggagcgaugagauagagcaucuugucguugaggaacuggugaaaaagcgggaagagugcuuggacgcccucgaaaguauuaugacaaccaaaucuguauccuuccgccgacugagccacuuaagaaagcuggugccaggguuuggaaaggcuuacacuaucuucaauaaaacacucauggaggccgaugcgcauuauaagucggucaggaccuggaacgagauuauccccucuaaaggcugccuucgggugggcgggcguugucacccgcacguuaauggaguguucuuuaacgguaucauucugggcccugacgggcaugucuugauacccgaaaugcaguccucacuacugcagcaacacauggagcuccuggaaaguagcgugaucccacuuaugcauccucuggcagaucccuccacgguauucaaggacggagaugaggccgaagacuuuguugaggugcacuugccagauguccauaaacaggugucuggcgucgaccucggucugcccaauugggggaaguacguguuacugagcgcuggcacccuaauugcccucaugcugaugaucuuccuuaugacaugcugucgcagaguuaacaggccugagucaacucagcggaguuugggaggcgcagggcgacgcguguccguaaccagccagucuggaaaggucauaucaaguugggaaagcuauaaauccgguggcgagacaagacuguga

SEQ ID NO: 159441 - RNA, 1575 nt, Artificial Sequence
  derived and/or modified CDS sequence (opt3) from glycoprotein__RABV__JX871837.1
augaucccccaggcccuccuguucgugccucuucugauuccaaguuugugcuuaggcaaguuuccgauauacaccauccccgacaaacuggggccuugguccccaauugauauccaccaucuaucuugucccaacaaucucgucguugaggacgaaggaugcacaucacugagugguuucagcuauauggagcuuaaggugggcuacauuuccgcuaucaaaguaaacggguuuacuuguacgggaguggucaccgaagcagagacauauacuaauuucgugggcuacguuaccacaaccuuuaagagaaaacacuucaggccuaugccagaugccugccgggcggcucaugacuggaagauagccggugauccccgcuaugaagacucucugcaaaacccuuacccagauuaucacugguugcgaacugugaagacaaccaaagagucgcucgucaucauuucaccgagcguggcagagcuggaccccuacgauaagagucugcauucccguguauuuccuucugggaaaugucucggaaucacgguuagcuccacuuacugcucaaccaaucacgacuauacaauuuggaugccaguggaagccagauuaggcacuagcugugauaucuucaccaacagcaggggcaagaaggcuucuaaagggggacggacaugcgguuuugucgacgagcgcggccuguacaagucccuuaaaggggcauguaaguugaaacugugcggagugcccggccuaagacucauggaugguaccugggugucaauacagacgagcgacgacauuaagugguguccuccagaucagcuggucaaucuucacgacuuccauagugaugaaaucgagcaccugguuguggaggaauugauuaaaaagagggaggggugccucgacgcccuggaaucuaucaugacuacaaaauccgugagcuuucggcgcuuaucgcaucugcgaaagcucguacccggauucggcaaggcuuauaccaucuuuaacaauacucuuauggaggccgaugcgcacuacaaaucugucagaacauggaacgaagugauuccguccaagggcugccugaaaguugggggaaggugucacccucccgugaauggugucuucuucaacggcauaaucuuggggccagacggaaaugugcuaauuccugagaugcagucaagucugcuccaacagcauauggagcugcuugaaagcuccguaaucccccugaugcacccauuggcagaucccucuaccguuuuuaaggacggcgaugaggccgaagacuucguggagguccaucucccugaugugcacaaacaggucagcgacguggaccuggguuuaccaucaugggggaaguaucugcuaaugagugcuggcguucucgccacgcugauacuugcaaucuuuuugauuaccugcugucggcgugcuaaccgcacagaauccacucagagaggacauagggagagcggcgggaaggugucuguagccccgcaaaauggaaaaaucauuucaaguugggagcuguacaagagcgaauccgagaccgguauguga

SEQ ID NO: 159442 - RNA, 1575 nt, Artificial Sequence; identical to SEQ ID NO: 159297
  derived and/or modified CDS sequence (opt3) from glycoprotein__RABV__JX871838.1

SEQ ID NO: 159443 - RNA, 1575 nt, Artificial Sequence; identical to SEQ ID NO: 159297
  derived and/or modified CDS sequence (opt3) from glycoprotein__RABV__JX871839.1

SEQ ID NO: 159444 - RNA, 1575 nt, Artificial Sequence
  derived and/or modified CDS sequence (opt3) from glycoprotein__RABV__JX871840.1
augaucagccagacccuccuguucgugccccuucugauuuccucuuugugcuuuggcgaguucccuauauacacaaucccagaaaaguuagggccguggucacccauugacauccaccaucugaguuguccuaacaaucuagucguugaggaugaaggaugcaacagccucuccgguuuuucuuauauggagcugaaagugggcuacauuucgucaaucaagguaaauggguucacuuguacgggaguggucaccgaagccgagacauauacuaacuuugugggcuacguuaccacaaccuucaaaagaaagcacuuuaggccaaugcccgacgcuugccgggcagccuauaauuggaaaaugagcggugauccucgcuacgaggaaagucuucauaacccauaucccgacuaccacuggcugcgaacugugaagacaaccaaggaguccuuggucauaaucucuccuagcguggcggaucucgacccauacgauaaaucccugcauucacguguauucagugggggaaagugucugggcauuacgaucagcucuacuuauugcuccaccaaucacgacuacacacucuggaugccggaagaggcuagauuaggcacuucaugugauauuuuuaucaacagcaaagggaagagggccaguaaaggaggucggaccugcggcuucguugacgagcgcgggcuguauaagucucuuaagggagcauguaaauugaagcugugcggcgugcccggucuaagacucauggaugggacaugggucuccauacaaaccagcgacgaaacgaaaugguguccuccagaucagcuggugaauauucacgacuuuaggucggacgagaucgaacaucuuguggucgaggaacugguuaagaaacgggaggagugcuuggaugcccucgacucuauuaugacuacaaaguccgugucauuccgccgacugagucacuuaagaaaacugguacccggauuuggcaaggcuuacaccaucuucaacaagacucucauggaagcagaugcccauuauaaaagcgugaggacauggaaugaggucaucccuuccaagggcugccuuucuguugggggacggugucacccacacguggacgguguguucuuuaacggcauuauacuggggcccgauggaagcgucuugaucccggaaaugcagucaagucuacugcagcaacauauggagcuccuggaauccagcgugauuccucuuaugcacccccuggcuaauccaucuaccguauucaaagacggcgaugaggccgaggacuuuguugaagugcauuugccugauguccaggaacaggugucaggugucgaccucgggcugcccaacuggggcaaguacauguuaaugagugcgggagcacuggccauccuacuccugacgauauuccuuaugaccugcugucgucgcgcuaauagaacaaaaagcauuaggcagggcccagaggagucccggcgaaaggugucuguucccccucaaucggggaaggugaucagcuccugggaaucauuuaaaaguggaggugagacuggcuuguga

SEQ ID NO: 159445 - RNA, 1575 nt, Artificial Sequence
  derived and/or modified CDS sequence (opt3) from glycoprotein__RABV__JX871841.1
augaucccccaggcccuguuguucgugccucuucugauuccaagccucugcuuaggcgaguuuccgauauacaccauccccgacaagcuggggccuugguccccaauugauauccaccaucuaucuugucccaacaaucucgucgcugaaaacgacggaugcacaucacugagugguuucagcuauauggagcuuaaaguuggcuacauuuccgcaaucaaggugaauggguuuacuuguacgggaguagugaccgaagccgagacauauacuaacuucgucggcuacgugaccacaaccuuuaaaagaaagcacuucaggccuacuccagaugcgugccgggcugcccaugacuggaaaauggcaggggauccccgcuaugaagccucucugcaaaauccuuacccagacuaucacugguugcgaacaguuaagaccacgaaggagucgcucgugauaaucucaccgagcgucgcugaucuggaccccuacgauaaaagucugcauucccguguguuuccuucugggaagugucucggaauuacuguaagcuccaccuacugcucaacaaaccacgacuauacuaucuggaugccaguugagcccagauuaggcaccaguugugauauuuucacaaauagcaggggcaaacgggcaucuaaggguggacgcgugugcgguuuugucgacgaaagaggccuguacaaaucccuuaagggggccuguagguugaagcugugcggagugccuggcauccggcuacucgaugguaccugggugucaauacagacgagcgaggacauuaaaugguguccacccgaccgccuggucaaccuucacgauuuccauagugacgaaaucgagcaccugguuguggcugaguugauuaagcgaagagaaaauugccucgaugcccuggagucuaucaugacuacaaaauccgugagcuuuaggcgguuaucgcaucugcguaagcucguaccgggguucggaaaagcguauaccaucuuuaacaagacucuuauggaagcagacgcccacuacaaaucugucaagacauggaaugaggugauuccuuccaagggcugccuggaaguuggcgggcgcugucacccccaugugaacggagucuucuucaaugguauaaucuugggcccagaugggaacgugcuaauuccugagaugcagucaagucugcuccagcaacacauggagcugcuugaaagcuccguaaucccccugaugcauccauuggcugaccccucuaccguuuuuaaagagggagaugaagccgaggacuucguggaaguccaccucccugaugugcauaagcaggucagcgacguggaucugggcuuaccaucaugggguaaauaucugcuaauaagugcaggggcucucgccauucugauccuugcgaucguuuugauuaucugcuguagaaaggugaauaaaacgggcuccacccagaggggacaccgggagagcggcgggaagaugucuguagucccgcagaacggaaagauuauaucaaguugggagcuguacaaaagcgaauccgagacaggucucuga

SEQ ID NO: 159446 - RNA, 1575 nt, Artificial Sequence
  derived and/or modified CDS sequence (opt3) from glycoprotein__RABV__JX871842.1
augaucccccaggcccuucucuucgugccuuuucuuuucccaagccugugcuugggcaaguuuccgauuuacaccauacccgagaaauuagggccuugguccccaaucgacauucaccaucugucuugucccaacaaucuagucguugaagaugagggaugcgacucacucagugguuucagcuauauggaacugaaggugggcuacaucuccgcuauuaaaguaaacggguuuacauguacuggaguggucacggaggcagaaaccuauacaaauuucgugggcuacguuacuaccacauuuaagagaaaacacuucaggccuaugccagaugccugccgggcggcuuauaacuggaagaccgccggugacccccgcuacgaggagucucuucauaauccuuauccagauuaccacuggcugcgaacugugaagacaaccaaagaaucguugaucauaaucucaccgagcgucgcagaccucgaucccuacgacaagagucugcauucccguguguuuccugggggaaaaugucugggcauuacgguaucuagcacuuauugcuccaccaaccacgauuacacaaucuggaugccagaggaagccagacucggcacuucaugugacauuuucaccaauaguaaggggaaaagggcuagcaagggaggucggacaugcggcuuuguugaugagcgcggguuauauaagucucugaaaggagcauguaagcugaaauugugcggcgugcccggucugagacuaauggacgggaccugggucgccauccaaacgccuggagagacuaagugguguuccccagaucagcucgugaaccugcacgacuucaggucagacgaaauagagcaucuuguggucgaggaacugauuaaaaagcgggaagagugcuuggaugcucucgacagcaucaugacaaccaaaagucugucuuuuggccgcuuauccaaucugcgaaagcucguucccggcuucgggaaggccuacacuauuuucaacaaaacacuuauggaggcggaugcacacuauaagagcuuuagaaccugggacgaaaucaucccgucgaaaggaugccugaggguggguggccggugucauccucacguaaaugggguguucuuuaacggaauuauauugggccccgauggucacguccuaaucccagagaugcagucuucccugcuccagcaacauauggaacugcuugagucaagugugauuccucugauccaccccuuggccgacccaagcacgguuuucaaggauggggacgaagcugaggauuuuguggagguccaucuccccgacgugcacaaacagguauccggcguugaucugggauuaccuaauuggggcaaguacgugcugaugggggccggaguccuagcaaccgugauacucacaauuuuccugcuuacuugcugucgucgcgucaacagaaccaagccaaaacagcagucuuuggaagagagcgguaggaaggugucaguuacaccgcaaaauggcaaagugaugaguuccugggaauauuacaagagcgaggggcggacuucucuguga

SEQ ID NO: 159447 - RNA, 1575 nt, Artificial Sequence
  derived and/or modified CDS sequence (opt3) from glycoprotein__RABV__JX871844.1
augaucccccaggcccuguuguucgugccucuucugauuccaagccucugcuuaggcaaguuuccgauauacaccauccccgacaaacuggggccuugguccccaauugauauccaccaucuaucuugucccaacaaucucgucguugaggacgaaggaugcacaucacugagugguuucagcuauauggagcuuaaggugggcuacauuuccgcuaucaaaguaaacggguuuacuuguacgggaguggucaccgaagcagagacauauacuaauuucgugggcuacguuaccacaaccuuuaagagaaaacacuucaggccuaugccagaugccugccgggcggcucaugacuggaagauagccggugauccccgcuaugaagacucucugcaaaacccuuacccagauuaucacugguugcgaacugugaagacaaccaaagagucgcucgucaucauuucaccgagcguggcagaccuggaucccuacgacaagagucugcauucccguguauuuccuucugggaaaugucucggaaucacgguuagcuccacuuacugcucaaccaaucacgauuauacaauuuggaugccaguggaggccagauuaggcacuagcugugacaucuucaccaacagcaggggcaagaaggcuucuaaagggggacggacaugcgguuuugucgaugaacgcggccuguacaagucccuuaaaggggcauguaaguugaaacugugcggagugcccggccuaagacucauggacgguaccugggugucaauacagacgagcgacgauauuaagugguguccuccagaccagcuggucaaucuucacgauuuccauagugacgagaucgaacaccugguuguggaggaguugauuaaaaagagggaagggugccucgaugcccuggagucuaucaugacuacaaaauccguaaguuuucggcgcuuaucgcaucugcgaaagcucgugcccggauucggcaaggcuuauaccaucuuuaacaauacucuuauggaagccgacgcgcacuacaaaucugucagaacauggaacgaggugauuccguccaagggcugccugaaaguugggggaaggugucacccucccgugaauggugucuucuucaacggcauaaucuuggggccagauggaaaugugcuaauuccugaaaugcagucaagucugcuccaacagcauauggagcugcuugagagcuccguaaucccccugaugcacccaucugcagaccccagcaccguuuuuaaggauggcgacgaagccgaggauuucguggaaguccauuugccugacgugcacaaacaggucucagacguggaucucggucugccaaguugggggaaguauuuacugauguccgcuggcgcccuagcaacgcucauacuggcuauuuuucuuauuaccugcugucggcgugccaaccgcacagagagcacucagagaggacauagggaaucuggcgggaagguuucaguggcgccgcaaaauggaaaaaucaucaguagcugggaguuguacaaguccgagucugaaaccgguauguga

SEQ ID NO: 159448 - RNA, 1575 nt, Artificial Sequence; identical to SEQ ID NO: 159327
  derived and/or modified CDS sequence (opt3) from glycoprotein__RABV__JX871846.1

SEQ ID NO: 159449 - RNA, 1575 nt, Artificial Sequence
  derived and/or modified CDS sequence (opt3) from glycoprotein__RABV__JX871847.1
augaucccccaggcccuccuguucgugccucuucugauucccagcuugugcuuaggcgaguuuccgauauacaccauccccgacaagcuggggccuuggacaccaauugauauccaccaucuauccugucccaacaaucucgucgcugaaaacgacggaugcacuucucugucagguuucaguuauauggagcuuaaaguuggcuacauuagcgcaaucaaggugaauggguuuacguguaccggaguagugacagaagccgagacuuauaccaacuuccugggcuacgucacaaccacuuuuaaaagaaagcacuucaggccuaugccagaugcgugccgggcugcccaugacuggaaaauggccggugauccccgcuaugaagacuccuugcaaaauccuuacccagauuaucacuggcuccgaacagugaagaccacgaaggagucucugguuauaaucucgccgucaguggccgaccuggaucccuacgacaaaagccuccauagucgugucuuuccuuccgggaaguguuuaggaauuacugugucuagcaccuacugcuccacaaaccacgauuauacuaucuggaugccaguagagcccagacugggcaccucaugugacauuuucacaaauaguaggggcaaacgggcuagcaaagggggacgcguuugcgguuuuguggaugaaagaggccuuuacaagucuuugaagggggcauguaagcugaaacuaugcggagucccuggcaucaggcucauggacgguaccuggguguccauacagacgucagaggacauuaagugguguccacccgaucggcuggugaaccuucacgacuuccauagcgaugaacuggagcacuuggucguugaggaacucaucaaacgccgagagaauugccuggacgccuuagaaaguauuaugacuacaaagucuguguccuuuagaaggcugagccaucuccggaaacuuguaccgggguucggaaaggcuuauaccaucuuuaacaaaacucugauggaggccgaugcgcacuacaagucggugaagacauggaaugaagucaucccuucuaaaggcugcuuggaggugggcgggaagugucacccaccaguuaacggaguguucuucaaugguauuauacuaggcccugacgggaacguccugauccccgagaugcaguccucacuccugcagcaacauauggaacuucuggagaguagcgugauuccauugaugcacccccucgcagauccuuccaccguauuuaaagaaggagacgaggccgaagauuucguugaggugcaucugccagacguccacaaacaggugucugaugucgacuuaggccugccgagcugggguaaguaucuacucaugucagcuggggcccuggcaauccuuauauuggcuauugugcugaucaucugcuguggccguguuaauaagacgggaaguacccagcgcggccauagagaguccagggggaagaugagcguggcaccccagaacggaaaaauuaucucuucaugggaacucuacaagagugagagcgaaacaggucuguga

SEQ ID NO: 159450 - RNA, 1575 nt, Artificial Sequence
  derived and/or modified CDS sequence (opt3) from glycoprotein__RABV__JX871848.1
augaucccccaggcccuccuguucgugccucuucugauuagcuccuugugcuuaggcgaguuuccaauauacaccaucccggaaaagcuggggcccuggucuccuauugacauccaccaucuaucauguccaaacaaucucgucguugaggaugaaggaugcaacagucugagcgguuucuccuauauggagcuuaaagugggcuacauuucuucgaucaagguaaauggguuuacauguacuggaguggucacggaagcugagaccuauacaaacuucgugggcuacguuacuaccacauuuaaaagaaagcacuucaggcccaugccugacgcaugccgggccgcguauaauuggaaaaugucaggugauccacgcuacgaggaaagccugcauaaccccuauccugacuaccacugguugcgaaccgugaagacuacaaaggagagucucgucauaaucuccccaucuguggcugaucuggacccguacgauaaaagccugcauucccguguauuuucagggggaaagugucucggcauuaccguuaguagcacguauugcucuacuaaucacgacuacaccaucuggaugcccgaagaggccagauuaggcacauccugugauauuuucacuaacucaaaagggaagagggcaagcaaaggagguaagaccugcggcuuuguggacgagcgggggcuguauaagagucuuaaaggagccuguaaguugaaacugugcggcgucccuggucuacgccucauggaugggacaugggugucuauccaaaccuccgacgaaacgaagugguguccacccgaucagcuggugaauauacacgacuucagaagcgacgagauugaacaucuugucguugaggaacuggugaaaaagagggaggagugcuuggaugcucucgaaucgaucaugacuacaaaaucuguauccuuucggcgccugucacacuuacgaaagcuggugccuggauucggcaaggcauacaccauuuuuaacaaaacucucauggaggccgacgcucauuauaagagugucagaacauggaaugaagugaucccaagcaaaggcugccuuuccguugggggaaggugucacccccacguggauggugucuucuucaacggcaucauucuggggccggacggaucuguguugauaccugagaugcagagcucacuacugcagcaacauauggaacuccuggagaguuccguaaucccccuuaugcacccacuggccaauccuagcaccguuuuuaaggauggcgacgaggcggaagauuucguggagguccauuugcccgacgugcaggaacaggucucugguguggaucucgggcugccaaacuggggcaaauacguuuuaaugucagcaggagcccuggcugugcuacuccugacgauuuuucuuaugaccugccggcgucgcgccaauagaacaaacaguauccagcaaggccccggggagagcggaaggaagauauccguaccuccacagaacgguaaggucauuucuucgugggagagcuucaaauccggcggggaaacuggauuguga

SEQ ID NO: 159451 - RNA, 1575 nt, Artificial Sequence
  derived and/or modified CDS sequence (opt3) from glycoprotein__RABV__JX871849.1
augaucccccaggcccugcucagcgugccucuucugauuuccucuuugugcuucggcaaguuuccaauauacaccaucccggagaaauuagggcccuggucaccuauugacauccaccaucugaguuguccaaacaaucuagucguugaagaugagggaugcaacagccucuccgguuucucuuauauggaacugaaggugggcuacauuucggcuaucaaaguaaauggguuuacauguacuggaguggucacggaggcagaaaccuauacaaacuucgugggcuacguuacuaccacauuuaagagaaaacacuucaggcccaugucagacgccugccgggcggcuuauaauuggaagaccgccggugauccucgcuacgaggagagccuucauaacccauaucccgacuaccacuggcugcgaacugugaagacaaccaaagaaaguuugauaaucauuuccccuucugucgcagaucucgacccauacgauaagagccugcauucccguaucuuucccgggggaaaaugucugggcauuacgaucucaaguacuuauugcagcaccaaucacgacuacacaauauggaugccggaggaagccagacucggcacuucuugugauauuuucaccaacuccaaggggaaaagggcuucaaagggaggucggacaugcggcuuuguggacgagcgcggguuauauaagagccugaaaggagcauguaaacuuaaguugugcggcguaccuggucugagacuaauggaugggaccuggguugccauccaaacgccaaaugagacuaagugguguagucccgaccagcucgugaacguccacgauuucaggucugacgaaauugagcaucuggugguggaggaacuuauccggaaacgcgaagagugccuggacgcuuuggaguccaucaugacaaccaagagcgucucguuucgaagacucucuaaucugaggaaauuaguuccuggauucggcaaggccuacacuauuuuuaacaagacacugauggaagcggaugcacacuauaaauccgugcggaccuggaaugagauaaucccaucacguggcugccucaagguagggggacgcugucauccccacgugaacggugucuucuucaauggcauuauccuugggccggacggacacauacugauuccugaaaugcagaguagcuugcuacagcaacauauggagcugcucgaauccucugugaucccccugauccacccacuugccgauccuagcacgguuuuuaaagacggcgaugaggcugaggacuucguggaaguccaucugcccgaugugcaccagcagguaucagguguugacuuggggcucccagauuggggcaaguacgugcugaugagugccggagcauuagcuaccgucaugcugacaauuuuucuaaucacuugcuguagaagggugaaacggaccgaguccauucagcaaggccucggggaaagcggacgaaaggucucugugacaccccagaacgguaagguuaugucaaguugggaguauuacaaaagcggcgggggaacucgccuguga

SEQ ID NO: 159452 - RNA, 1575 nt, Artificial Sequence
  derived and/or modified CDS sequence (opt3) from glycoprotein__RABV__JX871853.1
augaucagccaggcccuguuguucgugccccuucugauuccuuccuugugcuuaggcaaguuuccaauauacaccaucccggacaaacuggggcccuggucuccuauugauauccaccaucuaucauguccaaacaaucucgucguugaggacgaaggaugcacaagucugagcgguuucuccuauauggagcuuaaggugggcuacauuucugcuaucaaaguaaacggguuuacuuguacgggaguggucaccgaagcagagacauauacuaauuucgugggcuacguuaccacaaccuuuaagagaaaacacuucaggcccaugccugaugccugccgggcggcucaugacuggaagauagccggugauccacgcuaugaagacucgcugcaaacucccuacccugauuaucacugguugcgaacagugaagaccacgaaagagucacucgucaucauuagcccaaguguggcagaccuggauccguacgacaagucccugcauucucguguauuucccagcgggaaaugucucggaaucacuguuuccucaaccuacugcaguacaaaccacgauuauacuauuuggaugccuguggaggccagauuaggcaccagcugugacaucuucacaaauucuaggggcaagaaggcuuccaaagggggacggaccugcgguuuugucgaugaacgcggccuguacaagucacuuaaaggggcauguaaguugaaacugugcggagugccaggccuaagacucauggacgguacgugggugagcauacagacaagugacgauauuaaguggugucccccugaccagcuggucaaccuucacgauuuccauucugacgagaucgaacaccugguuguggaggaguugauuaaaaagagggaagggugccucgaugcccuggaguccaucaugacuaccaaaagcguaucguuucggcgcuuaucucaucugcgaaagcucgugccaggauucggcaaggcuuauacuaucuuuaauaacacacuuauggaagccgacgcgcacuacaaauccgucagaaccuggaaugaggugauucccucaaagggcugccugaaaguugggggaaggugucacccgccugugaacggugucuucuucaauggcauaaucuuggggcccgauggaaacgugcuaauuccagaaaugcagaguagccugcuccaacagcauauggagcugcuugaguccucuguaaucccucugaugcaccccuuggcagacccaagcacgguuuuuaaggauggcgacgaagccgaggauuucguggaaguccaucuccccgacgugcacaaacaggucucagacguggaucuggguuuaccuaguugggggaaguaucugcuaauguccgcuggcgcccucgcaacccugauacuugcuauuuuucucaucacaugcugucggcgugccaaucgcacugagagcacccagagaggacauagggaaucuggcgggaagguuucaguggcgccacaaaacggaaaaaucauuaguagcugggagcuguacaaguccgagucugaaacagguauguga

SEQ ID NO: 159453 - RNA, 1575 nt, Artificial Sequence
  derived and/or modified CDS sequence (opt3) from glycoprotein__RABV__JX871854.1
augaucccccaggcccuucucuucgugccuuuucuuuucccaagccugugcuugggcaaguuuccgauuuacaccauacccgagaaauuagggccuugguccccaaucgacauucaccaucugucuugucccaacaaucuagucguugaagaugagggaugcgacucacucagugguuucagcuauauggaacugaaggugggcuacaucuccgcuauuaaaguaaacggguuuacauguacuggaguggucacggaggcagaaaccuauacaaauuucgugggcuacguuacuaccacauuuaagagaaaacacuucaggccuaugccagaugccugccgggcggcuuauaacuggaagaccgccggugacccccgcuacgaggagucucuucauaauccuuauccagauuaccacuggcugcgaacugugaagacaaccaaagaaucguugaucauaaucucaccgagcgucgcagaccucgaucccuacgacaagagucugcauucccguguguuuccugggggaaaaugucugggcauuacgaucucuagcacuuauugcuccaccaaccacgauuacacaauuuggaugccagaggaagccagacucggcacuucaugugacaucuucaccaauaguaaggggaaaagggcuagcaagggaggucggacaugcggcuuuguagaugagcgcggguuauauaagucucugaaaggagcauguaagcugaaauugugcggcguucccggucugagacuaauggacgggaccuggguggccauacaaacgccuggagagacuaagugguguuccccagaucagcucgucaaccugcacgacuucaggucagacgaaauugagcaucuugugguggaggaacugaucaaaaagcgggaagagugcuuggaugcucucgagagcauuaugacaaccaaaagugucucuuuucgccgacuguccaauuuaagaaagcugguucccggcuucggcaaggccuacacuaucuucaacaaaacacucauggaagcggacgcacacuauaagagcaucaggaccugggaugagauuauaccgucgaaagggugccuucgggugggaggucguugucauccucacguaaauggcguguuuuucaacgggaucauucugggacccgacggccacgucuugaucccagaaaugcagucuucccuacugcagcaacauauggagcuccuggaaucaagugugauaccucuuauucacccccuggccgauccaagcacgguuuuuaaggacggugaugaggcugaggacuucguggaaguccauuugcccgaugugcacgagcagguauccgggguugaccucggccugccuaauuggggaaaauacguguuaaucucugccggcguccuggcaaccgugauccuaacaauuuuucuccugacuugcugucgcagagucaacaggaccaagccaaagcagcagagccuuggggaaucaggacggaaagugaguguuacaccgcaaaaugguaaggugauguccagcugggaguauuacaaaucugaaggccgaacuucauuguga

SEQ ID NO: 159454 - RNA, 1575 nt, Artificial Sequence; identical to SEQ ID NO: 159297
  derived and/or modified CDS sequence (opt3) from glycoprotein__RABV__JX871855.1

SEQ ID NO: 159455 - RNA, 1575 nt, Artificial Sequence
  derived and/or modified CDS sequence (opt3) from glycoprotein__RABV__JX871856.1
augaucccccaggcccuucucuucgugccuuuucuuuucccaagccugugcuugggcaaguuuccgauuuacaccauacccgagaaauuagggccuugguccccaaucgacauucaccaucugucuugucccaacaaucuagucguugaagaugagggaugcgacucacucagugguuucagcuauauggaacugaaggugggcuacaucuccgcuauuaaaguaaacggguuuacauguacuggaguggucacggaggcagaaaccuauacaaauuucgugggcuacguuacuaccacauuuaagagaaaacacuucaggccuaugccagaugccugccgggcggcuuauaacuggaagaccgccggugacccccgcuacgaggagucucuucauaauccuuauccagauuaccacuggcugcgaacugugaagacaaccaaagaaucguugaucauaaucucaccgagcgucgcagaccucgaucccuacgacaagagucugcauucccguguguuuccugggggaaaaugucugggcauuacgguaucuagcacuuauugcuccaccaaccacgauuacacaaucuggaugccagaggaagccagacucggcacuucaugugacauuuucaccaauaguaaggggaaaagggcuagcaagggaggucggacaugcggcuuuguugaugagcgcggguuauauaagucucugaaaggagcauguaagcugaaauugugcggcgugcccggucugagacuaauggacgggaccugggucgccauccaaacgccuggagagacuaagugguguuccccagaucagcucgugaaccugcacgacuucaggucagacgaaauagagcaucuuguggucgaggaacugauuaaaaagcgggaagagugcuuggaugcucucgagagcaucaugacaaccaaaaguguuucuuuucgccgacuguccaauuuaagaaagcuggugcccggcuucggcaaggccuacacuauuuucaacaaaacacucauggaagcggacgcacacuauaagagcguaaggaccugggaugagaucaucccgucgaaagggugccuucgggugggaggucguugucauccucacgucaauggcguguuuuucaacgggauuauacugggacccgacggccacguuuugaucccagaaaugcagucuucccuacugcagcaacauauggagcuccuggaaucaagugugauuccucuuauccacccccuggccgauccaagcacggucuuuaaggacggugaugaggcugaggacuucguggaaguacauuugcccgauguucacaaacagguguccggggucgaccucggccugccuaauuggggaaaguacguguuaaugucugccggcguccuggcaaccgugauacuaacaauuuuucuccugacuugcugucgcagaguuaacaggaccaagccaaaacagcagagccuuggggagucaggacggaaggugaguguaacaccgcaaaaugguaaagucauguccagcugggaauauuacaagucugagggccgaacuucauuguga

SEQ ID NO: 159456 - RNA, 1575 nt, Artificial Sequence; identical to SEQ ID NO: 159297
  derived and/or modified CDS sequence (opt3) from glycoprotein__RABV__JX871857.1

SEQ ID NO: 159457 - RNA, 1575 nt, Artificial Sequence
  derived and/or modified CDS sequence (opt3) from glycoprotein__RABV__JX871858.1
augaucccccaggcccuguuguucgugccucuucugauuccaagccucugcuuaggcaaguuuccgauauacaccauccccgacaaacuggggccuugguccccaauugauauccaccaucuaucuugucccaacaaucucgucguugaggacgaaggaugcacaucacugagugguuucagcuauauggagcuuaaggugggcuacauuuccgcuaucaaaguaaacggguuuacuuguacgggaguggucaccgaagcagagacauauacuaauuucgugggcuacguuaccacaaccuuuaagagaaaacacuucaggccuaugccagaugccugccgggcggcucaugacuggaagauagccggugauccccgcuaugaagacucucugcaaaacccuuacccagauuaucacugguugcgaacugugaagacaaccaaagagucgcucgucaucauuucaccgagcguggcagagcuggaccccuacgauaagagucugcauucccguguauuuccugggggaaaaugucucggcaucacgguuucuagcacuuacugcuccaccaaucacgacuauacaauuuggaugccaguggaagccagauuaggcacuucaugugauaucuucaccaacaguagggggaagaaagcuagcaagggaggucggacaugcggcuuugucgacgagcgcgggcuguacaagucucuuaaaggagcauguaaguugaaacugugcggcgugcccggucuaagacucauggaugggaccuggguguccauacagacgucagacgacauuaagugguguccuccagaucagcuggucaaucuucacgacuuccauagcgaugaaaucgagcaccugguuguggaggaauugauuaaaaagagggagggaugccucgacgcccuggaaaguaucaugacuacaaaaucuguauccuuucggcgcuuaagccaucugcgaaagcucgugcccggcuucggcaaggcuuauaccaucuuuaacaauacucuuauggaggccgaugcgcacuacaaaucggucagaacauggaacgaagugauuccgucuaaggggugccugaaaguuggagguaggugucacccucccgugaauggcgucuucuucaacgggauaaucuugggaccagacggcaaugugcuaauuccugagaugcaguccucacugcuccaacagcauauggagcugcuugaaaguagcguaaucccccugaugcacccauuggcagaucccuccaccguuuuuaaggacggugaugaggccgaagacuucguggagguccaucucccugaugugcacaaacaggucucugacguggaccugggguuaccaagcuggggcaaguaucugcuaaugucagcuggagcccucgcaacgcugauacuugcuaucuuuuugauuaccugcugucggcgugccaaccgcacagaaaguacucagagaggccauagggaguccgggggaaagguuagcguggcgccgcaaaaugguaaaaucauuucuucaugggagcuguacaagagugaaagcgagaccggcauguga

SEQ ID NO: 159458 - RNA, 1575 nt, Artificial Sequence
  derived and/or modified CDS sequence (opt3) from glycoprotein__RABV__JX871859.1
augaucccccaggcccugcucagcgugccucuucugauuuccucuuugugcuucggcaaguuuccaauauacaccaucccggagaaauuagggcccuggucaccuauugacauccaccaucugaguuguccaaacaaucuagucguugaagaugagggaugcaacagccucuccgguuucucuuauauggaacugaaggugggcuacauuucggcuaucaaaguaaauggguuuacauguacuggaguggucacggaggcagaaaccuauacaaacuucgugggcuacguuacuaccacauuuaagagaaaacacuucaggcccaugccugacgccugccgggcggcuuauaauuggaagaccgccggugauccacgcuacgaggagucacuucauaaccccuauccugacuaccacuggcugcgaacugugaagacaaccaaagaaagccuuauaaucauuaguccauccgucgcagaucucgacccguacgauaagucucugcauagccguaucuuucccgggggaaaaugucugggcauuacgaucuccucaacuuauugcaguaccaaucacgacuacacaauauggaugccugaggaagccagacucggcacuagcugugauauuuucaccaacucuaaggggaaaagggcuuccaagggaggucggacaugcggcuuuguggacgagcgcggguuauauaagucacugaaaggagcauguaaguugaaauugugcggcguaccaggucugagacuaauggaugggaccuggguugccauccaaacgcccaaugagacuaagugguguagcccugaccagcucgugaacguccacgauuucaggagugacgaaauugagcaucuggugguggaggaacuuauccggaaacgcgaagagugccuggacgcuuuggagucuaucaugacaaccaaguccgucagcuuucgaagacucucgaaucugaggaaauuaguuccaggauucggcaaggccuacacuauuuuuaacaagacacugauggaagcggaugcacacuauaaaucugugcggaccuggaaugagauaauccccucccguggcugccucaagguagggggacgcugucauccgcacgugaacggugucuucuucaauggcauuauccuugggccugacggacacauacugauucccgaaaugcagucaaguuugcuacagcaacauauggagcugcucgaaagcuccgugaucccacugauccacccucuugccgaucccucuacgguuuuuaaagacggcgaugaggcugaggacuucguggaaguccaucugccagaugugcaccagcagguaagcgguguugacuuggggcuccccgauuggggcaaguacgugcugaugucagccggagcauuagcuaccgucaugcugacaauuuuucuaaucacuugcuguagaagggugaaacggaccgagaguauucagcaaggccucggggaauccggacgaaaggucagcgugacaccucagaacgguaagguuaugucuucaugggaguauuacaaaaguggcgggggaacucgccuguga

SEQ ID NO: 159459 - RNA, 1575 nt, Artificial Sequence; identical to SEQ ID NO: 159405
  derived and/or modified CDS sequence (opt3) from glycoprotein__RABV__JX871860.1

SEQ ID NO: 159460 - RNA, 1575 nt, Artificial Sequence; identical to SEQ ID NO: 159320
  derived and/or modified CDS sequence (opt3) from glycoprotein__RABV__JX871862.1

SEQ ID NO: 159461 - RNA, 1575 nt, Artificial Sequence
  derived and/or modified CDS sequence (opt3) from glycoprotein__RABV__JX871863.1
augaucccccaggcccuccuguucgugccucuucugauuagcuccuugugcuuuggcaaguucccaauauacaccaucccggagaaauuagggcccuggucuccuauugacauccaccaucugucauguccaaacaaucuagucgcugaagaugagggaugcaacagucucagcgguuuuuccuauauggaacugaagguuggcuacauuucugcaaucaaagugaauggguucacauguacuggaguagugacggaggccgaaaccuauacaaacuuugucggcuacgugacuaccacauucaagagaaaacacuuuaggcccaccccugacgcgugccgggcugccuauaauuggaagauggccggugauccacgcuacgaggagucgcuucauaaccccuauccugacuaccacuggcugcgaacuguuaagacaaccaaagaaucauuggugauaaucagcccaagugucgcagaucucgacccguacgauaagucccugcauucucguguguuccccgacgggaaaugucugggaauuacgaucagcuccacuuauugcucaaccaaucacgauuacacaauuuggaugccugaggaagcuagacucggcaccaguugugacaucuuuacuacaagcaagggcaaaagggcaucuaagggggauaagauaugcggauucguagacgagcgggguuuauauaaaucccugaagggcgccuguaaacuuaaguugugcgggguucugggacuacgccucauggauggcaccugggugucaauucaaacgccaggugagacuaaaugguguagccccgaccagcuggucaaccuucacgacuuucauagugaugaaaucgagcaccugguggcugaagaguuggugaagaaaagagaagagugccucgacgcccuggagucuauuaugacaaccaaguccgucagcuucaggcgguuaucgcaucugcgcaagcucguuccuggguuuggaaaagcguacacuaucuucaauaagacacuuauggaagcagaugcccacuauaaaucugugcgaaccuggaacgagguaaucccauccaagggcugccugucagugggcgggagaugucacccccaugucaauggaguguucuuuaacgguauuauauugggcccggacgggaguguucuaaucccugaaaugcagagcucccugcuccagcaacacauggagcugcuugaaucuagcgugauuccccugaugcauccauuggcugauccuucaacggucuucaaagacgaugacgaggccgagaauuuuguggaaguacaccuccccgauguucauaaacaggugaguggagucgaccugggcuuaccaaacugggguaaguaccugcuaaugaucgcaggggcucucgccacccugaugcuuacaauauucuugaugacuugcuguaggcggaccaagcguacagaguccauucagcagggccugggagaaagcggccgcaaggugucugucacuccccaaucagggaaagugaucaguagcugggaguccuauaagucuggaggugaaaccagacucuga

SEQ ID NO: 159462 - RNA, 1575 nt, Artificial Sequence
  derived and/or modified CDS sequence (opt3) from glycoprotein__RABV__JX871864.1
augaucccccaggcccuguuguucgugccucuucugauuccaagccucugcuuaggcgaguuuccgauauacaccauccccgacaagcuggggccuugguccccaauugauauccaccaucuaucuugucccaacaaucucgucgcugaaaacgacggaugcacaucacugagugguuucagcuauauggagcuuaaaguuggcuacauuuccgcaaucaaggugaauggguuuacuuguacgggaguagugaccgaagccgagacauauacuaacuucgucggcuacgugaccacaaccuuuaaaagaaagcacuucaggccuacuccagaugcgugccgggcugcccaugacuggaaaauggcaggggauccccgcuaugaagccucucugcaaaauccuuacccagacuaucacugguugcgaacaguuaagaccacgaaggagucgcucgugauaaucucaccgagcgucgcugaucuggaccccuacgauaaaagucugcauucccguguguuuccuucugggaagugucucggaauuacuguaagcuccaccuacugcucaacaaaccacgacuauacuaucuggaugccaguugagcccagauuaggcaccaguugugauauuuucacaaauagcaggggcaaacgggcaucuaaggguggacgcgugugcgguuuugucgacgaaagaggccuguacaaaucccuuaagggggccuguagguugaagcugugcggagugccuggcauccggcuacucgaugguaccugggugucaauacagacgagcgaggacauuaaaugguguccacccgaccgccuggucaaccuucacgauuuccauagugacgaaaucgagcaccugguuguggcugaguugauuaagcgaagagaaaauugccucgaugcccuggagucuaucaugacuacaaaauccgugagcuuuaggcgguuaucgcaucugcguaagcucguaccgggguucggaaaagcguauaccaucuuuaacaagacucuuauggaagcagacgcccacuacaaacuggucaagacauggaaugaguucauuccuucuaagggcugcuuggaagugggcgggcgcugucacccccauguuaacggaguguucuuuaaugguauaauccuaggcccagaugggaacguccugauuccugagaugcaguccucacuccugcagcaacacauggagcuucuggaaaguagcgugauccccuugaugcauccacucgcugaccccuccaccguauucaaagagggagaugaagccgaggacuuuguugaagugcaucugccugauguccacaaacaggugucugacgucgauuuaggccugccaagcugggguaaguaucuacucauaucagcaggggcucuggccauucuuaucuuggcgaucgugcugauuaucugcuguagaaggguuaauaagacgggcaguacccagcggggacaccgagaguccggcgggaaaaugagcgugguaccgcagaacggaaagauuauaucuucaugggagcucuacaagagugaaagcgagacaggucuguga

SEQ ID NO: 159463 - RNA, 1575 nt, Artificial Sequence
  derived and/or modified CDS sequence (opt3) from glycoprotein__RABV__JX871865.1
augaucccccaggcccugcucagcgugccucuucugauuuccucuuugugcuucggcaaguuuccaauauacaccaucccggagaaauuagggcccuggucaccuauugacauccaccaucugaguuguccaaacaaucuagucguugaagaugagggaugcaacagccucuccgguuucucuuauauggaacugaaggugggcuacauuucggcuaucaaaguaaauggguuuacauguacuggaguggucacggaggcagaaaccuauacaaacuucgugggcuacguuacuaccacauuuaagagaaaacacuucaggcccauggccgacgcgugccgggcugccuauaauuggaagaccgcaggggauccucgcuacgaggagucacuucauaacccauaucccgacuaccacuggcugcgaacugugaagacaaccaaagaaagccuuauaaucauuaguccuuccgucgccgaucucgacccauacgauaagucucugcauagccguaucuuuccggguggaaaaugucugggcauuacgaucuccucaacuuauugcaguaccaaucacgacuacacaauauggaugcccgaggaagcuagacucggcacuagcugugauauuuucaccaacucuaaggggaaaagggcauccaagggaggucggacaugcggcuuuguggacgagcgcggguuauauaagucacugaaaggagccuguaaguugaaauugugcggcguaccuggucugagacuaauggaugggaccuggguugcuauccaaacgccaaaugagacuaagugguguagccccgaccagcucgugaacguccacgauuucaggagugacgaaauugagcaucuggugguggaggaacuuauccggaaacgcgaagagugccuggacgccuuggagucuaucaugacaaccaaguccgucagcuuucgaagacucucgaaucugaggaaauuaguuccuggauucggcaaggcguacacuauuuuuaacaagacacugauggaagcagaugcccacuauaaaucugugcggaccuggaaugagauaaucccaucccguggcugccucaagguagggggacgcugucauccccacgugaacggugucuucuucaauggcauuauccuugggccggacggacacauacugauuccugaaaugcagucaaguuugcuacagcaacauauggagcugcucgaaagcuccgugaucccccugauccacccacuugcugauccuucuacgguuuuuaaagacggcgaugaggccgaggacuucguggaaguccaucugcccgaugugcaccagcagguaagcgguguugacuuggggcucccagauuggggcaaguacgugcugaugucagcaggagcuuuagccaccgucaugcugacaauuuuucuaaucacuugcuguagaagggugaaacggaccgagaguauucagcaaggccccggggaauccggacgaaaggucagcgugacaccucagaacgguaagguuaugucuucaugggaguauuacaaaaguggcgggggaacucgccucuga

SEQ ID NO: 159464 - RNA, 1575 nt, Artificial Sequence
  derived and/or modified CDS sequence (opt3) from glycoprotein__RABV__JX871866.1
augaucccccaggccauucuguucgugccucuccuuauaccaagccugugcuugggcgaguuuccgaucuacaccauucccgacaaguuagggccuugguccccaaucgauauucaccaucugucuugucccaacaaucuagucgcugaaaacgacggaugcacaucacucagugguuucagcuauauggagcugaaaguuggcuacaucuccgcaauaaaggugaauggguuuacuuguacgggaguagugaccgaagccgagacauauacuaacuucgucggcuacgugaccacaaccuuuaaaagaaagcacuucaggccuacuccagaugcgugccgggcugcccaugacuggaaaauggcaggggauccccgcuaugaagccucucuucaaaauccuuacccagacuaucacuggcugcgaacaguuaagaccacgaaggagucguuggugaucauuucaccgagcgucgcugaucucgaccccuacgauaaaagucugcauucccguguguuuccuucugggaagugucugggaaucacuguaagcuccaccuacugcucaacaaaccacgacuauacuauuuggaugccaguugagcccagacucggcaccaguugugauaucuucacaaauagcaggggcaaacgggcaucuaaggguggacgcgugugcgguuuugucgacgaaagaggcuuauacaaaucccugaagggggccuguaggcuuaaguugugcggagugccuggcauacggcugcuagaugguaccugggugucaauucagacgagcgaggacaucaaaugguguccacccgaccgccucgucaaccugcacgauuuccauagugacgaaauugagcaccuuguuguggcugagcugaucaagcgaagagaaaauugcuuggaugcccucgagucuaucaugacuacaaaauccgugagcuuuaggcggcugucgcauuuacguaagcugguaccgggguucggaaaagcguauaccauuuuuaacaagacucucauggaagcagacgcccacuacaaaucugucaagacauggaaugaggugauaccuuccaagggcugccuugaaguuggcgggcgcugucacccccaugugaacggagucuucuucaaugguaucauucugggcccagaugggaacguguugaucccugagaugcagucaagucuacugcagcaacacauggagcuccuggaaagcuccguaauaccccuuaugcauccacuggcugaccccucuaccguuuuuaaagagggagaugaagccgaggacuucguggaaguccacuugccugaugugcauaagcaggucagcgacguggaucucggccugccaucaugggguaaauauuuacugauuagugcaggggcucuagccauccucauccuggcgauuguucuuaucauuugcuguagaagggugaauaagacgggcuccacccagcggggacaccgagagagcggcgggaaaaugucuguagucccgcagaacggaaagauaaucucaaguugggaguuguacaagagcgaauccgagacaggucuguga

SEQ ID NO: 159465 - RNA, 1575 nt, Artificial Sequence; identical to SEQ ID NO: 159297
  derived and/or modified CDS sequence (opt3) from glycoprotein__RABV__JX871867.1

SEQ ID NO: 159466 - RNA, 1575 nt, Artificial Sequence
  derived and/or modified CDS sequence (opt3) from glycoprotein__RABV__JX871868.1
augaucccccaggccuuccuguuugugccucuccuuauuccaagccugugcuugggcaaguucccgauauacaccauccccgacaaauuagggccuugguccccaauugauauccaccaucugucuugucccaacaaucuagucguugaggacgaaggaugcacaucacucagugguuuuagcuauauggagcugaaggugggcuacauuuccgcuaucaaaguaaacggguucacuuguacgggaguggucaccgaagcagagacauauacuaauuuugugggcuacguuaccacaaccuucaagagaaaacacuuuaggccuaugccagaugccugccgggcggcucaugacuggaagauagccggugauccccgcuaugaagacucucuucaaaacccuuacccagauuaucacuggcugcgaacugugaagacaaccaaagagucguuggucaucauuucaccgagcguggcagaccucgaucccuacgacaagagucugcauucccguguauucccuucugggaaaugucugggaaucacgguuagcuccacuuacugcccaaccaaucacgauuauacaauuuggaugcccguggaggccagacucggcacuucaugugacaucuuuaccaacaguaggggcaagaaagcuagcaaagggggacggacaugcgguuucgucgaugaacgcggcuuauacaagucucugaagggggcauguaaacuuaaguugugcggagugccuggccugagacuaauggacgguaccuggguguccauacagacgucagacgaugucaagugguguccacccgaccagcucguuaaucugcacgauuuucauagcgacgagauugaacaccuugugguagaggagcugaucaaaaagagggaagggugcuuggaugcccucgagaguauuaugacuacaaaaucuguguccuuccggcgccugagccauuuacgaaagcuggucccgggauuuggcaaggcuuauaccaucuucaacaauacucucauggaagccgacgcgcacuacaaaucggugagaacauggaacgagguuaucccuucuaagggcugccuuaaagucgggggaaggugucaucccccagugaaugguguguucuuuaacggcauuauacuggggccugauggaaauguauugauccccgaaaugcaguccucacuacugcaacagcacauggagcuccuggagaguagcguuauuccacuuaugcacccccuggcagacccuuccaccguguucaaggauggcgacgaagccgaggauuuugucgaagugcauuugccagacguccacaaacaggugucugacguugaucucggucugccgagcugggggaaguauuuacugaugucagcuggcgcccuagcaacgcucauccuggcuauauuccuuauuaccugcugucggcgugccaaccgcacaaagaguacucagagaggacauagggaguccggcgggaaagugagcguagcgccccaaaauggaaagaucaucucuucaugggaauuguacaaaagugagagcgagaccgguauguga

SEQ ID NO: 159467 - RNA, 1575 nt, Artificial Sequence; identical to SEQ ID NO: 159458
  derived and/or modified CDS sequence (opt3) from glycoprotein__RABV__JX871869.1

SEQ ID NO: 159468 - RNA, 1575 nt, Artificial Sequence
  derived and/or modified CDS sequence (opt3) from glycoprotein__RABV__JX871870.1
augaucuuccaggcccugcucuuugugccccuucugauuagcuccuugugcuuaggcaaguucccuauauacaccaucccagacaaacuggggccguggucucccauugauauccaccaucuaucauguccuaacaaucucgucguugaggacgaaggaugcacaagucugagcgguuuuuccuauauggagcuuaaggugggcuacauuucugcuaucaaaguaaacggguucacuuguacgggaguggucaccgaagcagagacauauacuaauuuugugggcuacguuaccacaaccuucaagagaaaacacuuuaggccaauacccgaugccugccgggcggcuuauaacuggaagaucgccggugacccucgcuacgaagagucgcugcaaaauccauaucccgauuaccauugguugcgaacugugaagacaaccaaagagucacucauuaucauuagcccuagugucgcagaccuggauccauacgacaagucccugcacucucgucucuuccccgggggaaaauguuuaggcaucacgauaagcuccacuuauugcucaaccaaccaugauuacacaauuuggaugccggaggaaccuagacugggcaccaguugugacaucuuuacuaauagcaaggggaaaaaggccucuaagggagguaaagugugcggcuucguagaugaaagggggcuuuauaaguccuugaaaggagcuuguaagcugaaacuaugcggcguuucaggucuccggcugauggacgggacaugggugaccauucagacgagcgaugagaucaagugguguccacccgaccagcuugucaaccugcacgacuuucacagugaugagaucgaacauuuggugguggaggaacucgucaaaaagcgcgaggaaugccuggacgcauuagagucuauuaugacuacaaaguccguuagcuucagaaggcugucguaccuccggaaacuugugccuggauuuggcaaggccuauaccauauucaauaaaacucugauggaggcugaugcccacuacaagucuguacgcacauggaacgaaaucauuccauccaaaggcugcuugaaggugucagaccgaugucauccccacgucgaugggguguucuuuaauggaaucauacuagguccggacggcaacguucugauuccugagaugcagaguagccuccugcaacagcacauggaacuucuggaguccucugugauccccuugaugcauccacucgcggauccuagcaccgucuucaaggacggggaugaagcagaggacuuuguggagguacaucugcccgauguucacaaacagaucucaggaguggacuuaggccugccaaguugggguaaguaucuacucaugauugccgggggccuggcuacgcuugucuugaucauuuuccugauggccugcuguagaaggaccaaacggacagaaucccgucgcagaggaagcggcgagucuggggaaaaggugcucgcaacuccccagccuaaaaaggucgugucaaguugggagcuguacaagagggaaggagacgcucggcuuuga

SEQ ID NO: 159469 - RNA, 1575 nt, Artificial Sequence
  derived and/or modified CDS sequence (opt3) from glycoprotein__RABV__JX871871.1
augaucccccaggcccuguuguucgugccucuucugauuccaagccucugcuuaggcgaguuuccgauauacaccauccccgacaagcuggggccuugguccccaauugauauccaccaucuaucuugucccaacaaucucgucgcugaaaacgacggaugcacaucacugagugguuucagcuauauggagcuuaaaguuggcuacauuuccgcaaucaaggugaauggguuuacuuguacgggaguagugaccgaagccgagacauauacuaacuucgucggcuacgugaccacaaccuuuaaaagaaagcacuucaggccuacuccagaugcgugccgggcugcccaugacuggaaaauggcaggggauccccgcuaugaagccucucugcaaaauccuuacccagacuaucacugguugcgaacaguuaagaccacgaaggagucgcucgugauaaucucaccgagcgucgcugaucuggaccccuacgauaaaagucugcauucccguguguuuccuucugggaagugucucggaauuacuguaagcuccaccuacugcucaacaaaccacgacuauacuaucuggaugccaguugagcccagauuaggcaccaguugugauauuuucacaaauagcaggggcaaacgggcaucuaaggguggacgcgugugcgguuuugucgacgaaagaggccuguacaaaucccuuaagggggccuguagguugaagcugugcggagugccuggcauccggcuacucgaugguaccugggugucaauacagacgagcgaggacauuaaaugguguccacccgaccgccuggucaaccuucacgauuuccauagugacgaaaucgagcaccugguuguggcugaguugauuaagcgaagagaaaauugccucgaugcccuggagucuaucaugacuacaaaauccgugagcuuuaggcgguuaucgcaucugcguaagcucguaccgggguucggaaaagcguauaccaucuuuaacaagacucuuauggaagcagacgcccacuacaaaucugucaagacauggaaugaggugauuccuuccaagggcugccuggaaguuggcgggcgcugucacccccaugugaacggagucuucuucaaugguauaaucuugggcccagaugggaacgugcuaauuccugagaugcagucaagucugcuccagcaacacauggagcugcuugaaagcuccguaaucccccugaugcauccauuggcugaccccucuaccguuuuuaaagagggagaugaagccgaggacuucguggaaguccaccucccugaugugcauaagcaggucagcgacguggaucugggcuuaccaucaugggguaaauaucugcuaauaagugcaggggcucucgccauucugauccuugcgaucguuuugauuaucugcuguagaagggugaauaagacgcgguccacccagcgaggccaccgcgagagcggaggcaaaaugucuguagucccgcagaacgggaagauuauaucaaguugggagcuguacaagagcgaauccgagacaggacucuga

SEQ ID NO: 159470 - RNA, 1575 nt, Artificial Sequence; identical to SEQ ID NO: 159297
  derived and/or modified CDS sequence (opt3) from glycoprotein__RABV__JX871872.1

SEQ ID NO: 159471 - RNA, 1575 nt, Artificial Sequence; identical to SEQ ID NO: 159469
  derived and/or modified CDS sequence (opt3) from glycoprotein__RABV__JX871873.1

SEQ ID NO: 159472 - RNA, 1575 nt, Artificial Sequence
  derived and/or modified CDS sequence (opt3) from glycoprotein__RABV__JX871874.1
augauccugcaggcccuccuuuucgugcccuuucuguucccuagcuugugcuuaggcaaguuuccaauuuacaccauaccggagaaacuggggcccugguccccuaucgacauucaccaucuaucuuguccaaacaaucucgucguugaagaugagggaugcgacucacugagugguuucagcuauauggaacuuaaggugggcuacaucuccgcuauuaaaguaaacggguuuacauguacuggaguggucacggaggcagaaaccuauacaaauuucgugggcuacguuacuaccacauuuaagagaaaacacuucaggcccaugccugaugccugccgggcggcuuauaacuggaagaccgccggugacccacgcuacgaggagucucugcauaaucccuauccugauuaccacugguugcgaacugugaagacaaccaaagaaucgcucaucauaaucucaccaagcgucgcagaccuggauccguacgacaagagucugcauucccguguguuucccgggggaaaaugucucggcauuacgguaucuagcacuuauugcuccaccaaccacgauuacacaaucuggaugccugaggaagccagauuaggcacuucaugugacauuuucaccaauaguaaggggaaaagggcuagcaagggaggucggacaugcggcuuuguugaugagcgcgggcuguauaagucucuuaaaggagcauguaaguugaaacugugcggcgugccaggucuaagacucauggacgggaccugggucgccauccaaacgcccggagagacuaagugguguuccccugaucagcuggugaaccuucacgacuucaggucagacgaaauagagcaucugguggucgaagaguugauuaaaaagcgggaagagugccucgaugcucuggagagcaucaugacaaccaaaaguguuucuuuucgccgauuauccaaucugagaaagcucgugccaggcuucggcaaggccuacacuauuuucaacaaaacacuuauggaagcggacgcacacuauaagagcguaaggaccugggaugagaucauccccucgaaagggugccugcgggugggaggucguugucauccgcacgucaauggcguguuuuucaacgggauuauauugggaccugacggccacguucuaauccccgaaaugcagucuucccugcuccagcaacauauggagcugcuugaaucaagugugauuccacugauccacccuuuggccgaucccagcacggucuuuaaggacggugaugaggcugaggacuucguggaaguacaucucccagauguucacaaacagguguccggggucgaccugggcuuacccaauuggggaaaguacgugcugaugggcgccgggguccuagcaaccgugauacucacaauuuuucugcuuacuugcugucgcagaguuaacaggaccaagccuaaucagcagucuuugggagagagcggucggaaagugucaguaacaccacaaaacggcaaggucaugaguuccugggaauauuacaaaagcgaggggcgaacuucucuguga

SEQ ID NO: 159473 - RNA, 1575 nt, Artificial Sequence
  derived and/or modified CDS sequence (opt3) from glycoprotein__RABV__JX871875.1
augaucccccaggcccugcucuacgugccucuucugauuccaaguuugugcuucggcggguuuccgauauauaccauccccgacaaguuaggaccuugguccccaauugauauccaccaucugucuugucccaacaaucuagucguugaggacgaagguugcacaucacucaguggcuucagcuacauggagcugaaagugggguauauuuccgcuaucaagguaaacggauuuacuuguacgggcguggucaccgaagcagagacauacacuaauuucguggguuauguuaccacaaccuuuaaaagaaagcacuucaggccuaugccagaugccugccgggcggcuuacaacuggaaaauggccggggacccccgcuaugaagagucucuucaaaauccuuacccagauuacucguggcugcgaacugugaagacaaccaaggagucauugauaaucauuagcccgagugucgcagaccucgaucccuaugacaaaucccugcauucucguguguuuccuggaggcaagugucugggcaucacgauuagcuccacuuacugcucaaccaaccacgauuauacaaucuggaugccagaagaggccagacucgggacuagcugugacauauucaccaauagcaggggaaaacgggcuucuaaggguggcaaaacaugcggguuuauggaugaacgcggauuauacaagucccugaagggcgcauguaaacuuaaguugugcgguguacccgggcugagacuaauggacggaaccuggguuacgauucagacuucagaugagacaaaaugguguccuagcgaccagcucgugaaccugcaugacuuccacagugaugagaucgaacaccuugucguggaggaacuggugaagaaaagggaggaaugcuuggacgcccucgagucuauuaugaccacuaaguccgucagcuuucggcgccugucgcauuuacgaaaacugguuccaggcuucggcaaggcuuauacaaucuuuaauaagacccucauggaggccgaugcgcacuacaaaucuaucagaacguggaacgaaauuauacccuccaaggggugccuuaaagugggagguaggugucauccgcacguagacggcguguucuucaaugggaucauucugggaccugauggcaacgucuugauccccgagaugcagucaagucuacugcaacagcacguggaacuccuggagagcuccguuauaccacuuaugcauccucuggcagaccccucuaccguguuuaaggauggugacgaagccgaggauuucgucgaggugcacuugccagacauucauaaacagguaagcgggguugaucucggccugcccaauuggggaaaguauuuacugaugucagcuggcgcccuagcaacacucaugcugaucauccuuuugaugacuugcugucggcgugcuaaccgcaccgaaaguauucagagagacccuggggaguccggaaggaaggugagcaucacaucuccagacgguaaagucauuucaaguugggaacuguacaagagcggcggggagacucggcucuga

SEQ ID NO: 159474 - RNA, 1575 nt, Artificial Sequence; identical to SEQ ID NO: 159316
  derived and/or modified CDS sequence (opt3) from glycoprotein__RABV__JX871876.1

SEQ ID NO: 159475 - RNA, 1575 nt, Artificial Sequence; identical to SEQ ID NO: 159468
  derived and/or modified CDS sequence (opt3) from glycoprotein__RABV__JX871877.1

SEQ ID NO: 159476 - RNA, 1575 nt, Artificial Sequence; identical to SEQ ID NO: 159297
  derived and/or modified CDS sequence (opt3) from glycoprotein__RABV__JX871879.1

SEQ ID NO: 159477 - RNA, 1575 nt, Artificial Sequence
  derived and/or modified CDS sequence (opt3) from glycoprotein__RABV__JX871880.1
augaucccccaggcccuucucuucgugccuuuucuuuucccaagccugugcuugggcaaguuuccgauuuacaccauacccgagaaauuagggccuugguccccaaucgacauucaccaucugucuugucccaacaaucuagucguugaagaugagggaugcgacucacucagugguuucagcuauauggaacugaaggugggcuacaucuccgcuauuaaaguaaacggguuuacauguacuggaguggucacggaggcagaaaccuauacaaauuucgugggcuacguuacuaccacauuuaagagaaaacacuucaggccuaugccagaugccugccgggcggcuuauaacuggaagaccgccggugacccccgcuacgaggagucucuucauaauccuuauccagauuaccacuggcugcgaacugugaagacaaccaaagaaucguugaucauaaucucaccgagcgucgcagaccucgaucccuacgacaagagucugcauucccguguguuuccugggggaaaaugucugggcauuacgaucucuagcacuuauugcuccaccaaccacgauuacacaauuuggaugccagaggaagccagacucggcacuucaugugacaucuucaccaauaguaaggggaaaagggcuagcaagggaggucggacaugcggcuuuguagaugagcgcggguuauauaagucucugaaaggagcauguaagcugaaauugugcggcguucccggucugagacuaauggacgggaccuggguggccauacaaacgccuggagagacuaagugguguuccccagaucagcucgucaaccugcacgacuucaggucagacgaaauugagcaucuugugguggaggaacugaucaaaaagcgggaagagugcuuggaugcucucgagagcauuaugacaaccaaaagugucucuuuucgccgacuguccaauuuaagaaagcugguucccggcuucggcaaggccuacacuaucuucaacaaaacacucauggaagcggacgcacacuauaagagcaucaggaccugggaugagauuauaccgucgaaagggugccuucgggugggaggucguugucauccucacguaaauggcguguuuuucaacgggaucauucugggacccgacggccacgucuugaucccagaaaugcagucuucccuacugcagcaacauauggagcuccuggaaucaagugugauaccucuuauucacccccuggccgauccaagcacgguuuuuaaggacggugaugaggcugaggacuucguggaaguccauuugcccgaugugcacgagcagaucuccgggguagaccucggccugccuaauuggggaaaauacguuuuaaugucugccggcgugcuggcaaccgucauccuaacaauuuuucuccugacuugcugucgcagagugaacaggaccaagccaaagcagcagagccuuggggaaucaggacggaaagucagugugacaccgcaaaaugguaagguuauguccagcugggaguauuacaaaucugaaggccgaacuucauuguga

SEQ ID NO: 159478 - RNA, 1575 nt, Artificial Sequence
  derived and/or modified CDS sequence (opt3) from glycoprotein__RABV__JX871881.1
augaucccccaggcccugcucagcgugccucuucugauuuccucuuugugcuucggcaaguuuccaauauacaccaucccggagaaauuagggcccuggucaccuauugacauccaccaucugaguuguccaaacaaucuagucguugaagaugagggaugcaacagccucuccgguuucucuuauauggaacugaaggugggcuacauuucggcuaucaaaguaaauggguuuacauguacuggaguggucacggaggcagaaaccuauacaaacuucgugggcuacguuacuaccacauuuaagagaaaacacuucaggcccaugccugacgccugccgggcggcuuauaauuggaagaccgccggugauccacgcuacgaggagucacuucauaaccccuauccugacuaccacuggcugcgaacugugaagacaaccaaagaaagccuuauaaucauuaguccauccgucgcagaucucgacccguacgauaagucucugcauagccguaucuuucccgggggaaaaugucugggcauuacgaucuccucaacuuauugcaguaccaaucacgacuacacaauauggaugccugaggaagccagacucggcacuagcugugauauuuucaccaacucuaaggggaaaagggcuuccaagggaggucggacaugcggcuuuguggacgagcgcggguuauauaagucacugaaaggagcauguaaguugaaauugugcggcguaccaggucugagacuaauggaugggaccuggguugccauccaaacgcccaaugagacuaagugguguagcccugaccagcucgugaacguccacgauuucaggagugacgaaauugagcaucuggugguggaggaacuuauccggaaacgcgaagagugccuggacgcuuuggagucuaucaugacaaccaaguccgucagcuuucgaagacucucgaaucugaggaaauuaguuccaggauucggcaaggccuacacuauuuuuaacaagacacugauggaagcggaugcacacuauaaaucugugcggaccuggaaugagauaauccccucccguggcugccucaagguagggggacgcugucauccgcacgugaacggugucuucuucaauggcauuauccuugggccugacggacacauacugauucccgaaaugcagucaaguuugcuacagcaacauauggagcugcucgaaagcuccgugaucccacugauccacccucuugccgaucccucuacgguuuuuaaagacggcgaugaggcugaggacuucguggaaguccaucugccagaugugcaccagcagguaagcgguguugacuuggggcuccccgauuggggcaaguacgugcugaugucagccggagcauuagcuaccgucaugcugacaauuuuucuaaucacuugcuguagaagggugaaacggaccgagaguauucagcaagaccucggcgaauccgggcgaaaggucagcgugacaccucagaacggaaagguuaugucuucaugggaguauuacaaaagugguggcgggacucgccuguga

SEQ ID NO: 159479 - RNA, 1575 nt, Artificial Sequence
  derived and/or modified CDS sequence (opt3) from glycoprotein__RABV__JX944575.1
auggugccccaggcccuucucuucgucccucuucugguuuuuccauugugcuucggcaaguuuccgaucuacaccauucccgacaaauuagggccuuggagcccaauagauauccaccaucuguccugucccaacaaucuagugguagaggacgaaggaugcacaaaccucucugguuucucauauauggagcugaaggugggcuacauuagugcuaucaaaaugaauggguuuacuuguacgggagucgugaccgaagcagagacauauacuaacuucguuggcuacgugaccacaaccuuuaagagaaaacacuucaggccuacuccagaugccugccgggcggcuuauaauuggaagauggccggugacccccgcuacgaagagagccuucauaacccuuauccagauuaccacuggcugcgaacagucaagaccacgaaagaguccuuggugauuaucucuccgucgguagcagaccucgaucccuacgaccguucacugcauagcagaguuuuuccugggggaaauuguaguggcguggccgucuccucuacuuauugcagcaccaaccacgauuacacaauauggaugccagaaaaucccaggcugggcauguccugugacaucuucacuaacucacgggggaagcgcgcuaguaaaggaagcgagaccugcgguuuuguggaugaaagaggccucuauaagucuuuaaaaggggcauguaagcugaagcugugcggaguguugggccugaggcuaauggacgguacaugggucgccaugcaaaccuccaaugagacgaaaugguguccuccagggcagcucguuaaccugcacgauuuccggucagacgagauugaacaucuugugguagaggaacuggugaagaaacgcgaggaaugcuuggacgcucucgagagcaucaugacuacaaagagugucucuuuucgaagacugucccacuuaaggaaacuggugcccggauucggcaaggccuacaccauuuucaauaaaacucucauggaggcggaugcacauuauaagagcguucggacauggaacgaaaucauaccgucgaagggcugccuucgugucgggggacgcugucacccucacgugaaugguguguuuuucaacggcauuauccuggggcccgacggaaacguauugauuccagagaugcagucuucccuacugcagcaacauauggaacuccugguuucaagugugaucccucuuaugcacccccuggccgauccaagcaccgucuuuaaaaauggcgacgaggcugaagauuucguggagguccauuugcccgacgugcacgagagaaucuccgguguugaucucgggcugccuaacuggggcaaguacguguuacugucugccggagcacuaacggcucucaugcugauuauauuucuuaugaccugcuggaggcggguaaaucgaagcgaaccaacacagcauaacuugcgcggcacugggagagaggucucagugaccccgcagaguggaaaaaucauuuccagcugggaaucuuauaagucagguggcgagacagggcuguga

SEQ ID NO: 159480 - RNA, 1575 nt, Artificial Sequence
  derived and/or modified CDS sequence (opt3) from glycoprotein__RABV__JX944576.1
auggugcaccagguccuccuguucguuccccuucugguguuuagcuugugcuucggcaaguuuccuaucuacaccauuccagacaaauuagggccguggucccccauagauauccaucaccugucuuguccuaacaaucuaguaguggaggacgaaggaugcacaaaccucucagguuucaguuauauggagcugaaggucggcuacauuagcgccaucaaagugaauggguuuacuuguacgggaguugugaccgaagcugagacauauacuaacuucgucggcuacgugaccacaaccuuuagaaggaagcauuuccggccaacucccgaugcaugccgcgccgcguauaauuggaaacuugcuggugacccucgauacgaagagucccugcacaacccauaucccgauuaccauugguugcguacaguaaagaccacgaaggagucucucguuauuaucucgccuucaguggccgaccuggauccauacgacaaaagccugcacaguagagucuuucccgggggaaaguguuccggcauaacugugucuagcaccuauugcuccacaaaucacgauuacacuaucuggaugccggaaaacccuaggcucggcaccucaugugacauuuucgugaauagucgggggaaacgcgcaagcaagggagguaaaacaugcggcuuugucgaugagagaggguuauauaagucucugaagggagccuguaaacuuaaguugugcggcguuccaggucugaggcuaauggacgggaccugggcugcaauccaaacguccgaugaaacuaaauggugucccccugaccagcucgugaaccugcaugacuaccggucagaugagauugagcaccuuguaguggaggaacuggucaagaaacgcgaagagugcuuggacgcccucgaaagcaucaugacaaccaagagugugucuuuccgaagacugucccauuuaaggaaacugguuccaggauuuggcaaggcuuauacuauauucaauaagacacucauggaggccgaugcgcacuacaaaagcgugcggaccuggaacgagauuauccccucgaagggcugccuucgugucgggggacgcugucacccgcaugugaaugguguauucuuuaacggcauuauccuggggccugacggacacguuuugauccccgaaaugcagucuucccuacugcagcaacauauggagcuccuggaaucaagugugauuccacuuaugcacccucuggcagaucccagcacggucuucaaagacggcgaugaggccgaagacuuuguggagguccauuugccagaugugcacaagcucauauccgguguugaccugggguuacccucuuggggcaaauaugugcugaugagcgcuugcguacuaaccgcccucaugcugaugaucuuccuuaugacauguugcagaaggggaaaucaggcaggcucaaagcagcacggguuggagggaacuggucggaaggucagugugaccucccagaacggcaaaguuauuagcucuugggaaucauacaagagugggggagagacacgacuguga

SEQ ID NO: 159481 - RNA, 1575 nt, Artificial Sequence; identical to SEQ ID NO: 158947
  derived and/or modified CDS sequence (opt3) from glycoprotein__RABV__JX944577.1

SEQ ID NO: 159482 - RNA, 1575 nt, Artificial Sequence
  derived and/or modified CDS sequence (opt3) from glycoprotein__RABV__JX944578.1
auggugccccagguccuccuguucguuccucuucugguguuuagcuugugcuucggcaaguuuccaaucuacaccauuccggacaaauuagggcccugguccccuauagauauccaccaucugucuuguccaaacaaucuaguaguggaggacgaaggaugcacaaaccucucagguuucaguuauauggagcugaaggucggcuacauuagcgccaucaaagugaauggguuuacuuguacgggaguugugaccgaagcugagacauauacuaacuucgucggcuacgugaccacaaccuuuagaaggaagcacuuccggcccacuccugaugcaugccgcgccgcguauaauuggaaacuugcuggugacccacgauacgaagagucccugcauaaccccuauccugauuaccacugguugcguacaguaaagaccacgaaggagucucucguuauuaucucgccaucaguggccgaccuggauccguacgacaaaagccugcauaguagagucuuucccgggggaaaguguuccggcauaacuaucucuagcaccuauugcuccacaaaucacgauuacacuauuuggaugccugaaaacccaaggcucggcaccucaugugacaucuucgugaauagucgggggaaacgcgcaagcaagggagguaaaacaugcggcuuuguggaugagagaggguuauauaagucucugaagggagccuguaaacuuaaguugugcggcguccccggucugaggcuaauggacgggaccugggcugcaauucaaacguccgaugaaacuaaaugguguccuccagaccagcucguuaaccugcacgacuuccggucagaugagaucgagcaucuugugguagaggaacuggugaagaaacgcgaagagugcuuggacgcccucgaaagcauaaugacaaccaagagugucucuuuucgaagacugucccacuuaaggaaacuggugcccggauucggcaaggcuuacacuauuuucaauaagacacucauggaggccgaugcgcauuauaaaagcguucggaccuggaacgagaucauuccgucgaagggcugccuucgugucgggggacgcugucacccucacgugaaugguguguuuuucaacggcaucauccuggggcccgacggacauguauugauuccagaaaugcagucuucccuacugcagcaacacauggagcuccuggaaucaaguguuauaccucuuaugcauccccuggcagauccaagcacgguguuuaaagacggcgaugaggccgaagacuucgucgaggugcacuugcccgauguccauaagcucaucuccgguguggaccugggguuaccuucuuggggcaaauacguucugaugagcgcuggagugcuaaccgcccucaugcugaugauuuuucuuaugacaugcuguagaaggggcaaucaggcagggucaaagcagcacggauuggaggguacuggccggaagguaagugucaccucccagaacgggaaagugaucagcucuugggaaucauauaagaguggaggcgagacacgacuguga

SEQ ID NO: 159483 - RNA, 1575 nt, Artificial Sequence; identical to SEQ ID NO: 158947
  derived and/or modified CDS sequence (opt3) from glycoprotein__RABV__JX944579.1

SEQ ID NO: 159484 - RNA, 1575 nt, Artificial Sequence; identical to SEQ ID NO: 158947
  derived and/or modified CDS sequence (opt3) from glycoprotein__RABV__JX944580.1

SEQ ID NO: 159485 - RNA, 1575 nt, Artificial Sequence; identical to SEQ ID NO: 158947
  derived and/or modified CDS sequence (opt3) from glycoprotein__RABV__JX944581.1

SEQ ID NO: 159486 - RNA, 1575 nt, Artificial Sequence
  derived and/or modified CDS sequence (opt3) from glycoprotein__RABV__JX944582.1
auggugccccagguccugugguucguuccucuccuuguguuuagcaugugcuucggcaaguuuccaaucuacaccauuccggacaaacuggggcccugguccccuauagauauccaccauuugucuuguccaaacaauuuaguaguggaggacgaaggaugcacaaaccugucagguuucaguuauauggagcuaaaggucggcuacauuagcgccaucaaagugaauggguuuacuuguacgggaguugugaccgaagcugagacauauacuaaccucgucggcuacgugaccacaaccuucaagagaaaacacuuuaggcccacuccugaugcaugccgggccgcguauaauuggaagauggcuggugacccacgcuacgaagagucccugcauaaccccuauccugauuaccacuggcuucgaacaguaaagaccacgaaagagucucugguuauuaucucgccaucaguggccgacuuggauccguacgacaagagccuccauagucgugucuuccccuccgggaaauguucuggaauaacuaucagcuccaccuauugcucaacaaaucacgauuacacuauuuggaugccugaaaacccaagacugggcaccaguugugacaucuuuacaaauagcaggggcaagcgggcaucuaaaggguccaagaccugcggauucguggaugagcgcggucuguauaagucacucaaaggcgccuguaaguuaaaacugugcggggugcuuggauugagacugauggacggcacgugggucgcuaugcaaacuagcgaugaaacaaaguggugucccccugaccagcuaguuaaccuccacgacuuuaggagugaugagauugagcaucuggugguagaggaacuugugaaaaagcgggaagagugccuggacgcauuggaaucuaucaugaccacuaaauccgucagcuuccgccgacucucgcaccugagaaaguuagugccagguuuugggaaggccuacacaauauucaauaaaacccugauggaggcugaugcccauuauaagucuguuaggacguggaacgagauuauccccuccaaaggaugccuccgggugggcggccguugucacccgcacgucaaugggguguucuuuaacggaauuauccuugguccugacggccauguacugauccccgaaaugcagucaaguuugcuacagcaacacauggagcugcucgaaagcuccguuauuccacugaugcauccucuugcggaucccucuaccguguucaaggacggggaugaggcagaagacuuugucgaggugcaucugccagauguccacaaacagauaagcggaguggacuugggccuccccaauugggguaaguacguucuggugucagccgggguauuagucgugcugaugcuagcuauccucauuaugacaugcuguggccgcguuaacagaccuaagaguacucagcacucccuggagggaaccggcaggaaagugagcgucacaucucagucagggaaggugaucaguagcugggaauccuauaaaucuggaggugagacucggcuuuga

SEQ ID NO: 159487 - RNA, 1575 nt, Artificial Sequence
  derived and/or modified CDS sequence (opt3) from glycoprotein__RABV__JX944583.1
augaucccccaggugcugugguucgucccucuccuuguuuuuagcaugugcuucggcaaguuuccaauuuacaccauaccggacaaacuggggcccugguccccuaucgauauucaccauuugucuuguccaaacaauuuagugguagaggacgaaggaugcacaaaccugucagguuucaguuauauggagcuaaaggugggcuacaucagcgccauuaaagucaauggguuuacuuguacgggagugguuaccgaagcugagacauauacuaacuucgugggcuacgucaccacaaccuuuaagagaaaacacuucaggcccacuccugaugcaugccgggccgcguauaauuggaagauggcuggugacccacgcuacgaagagucccuccauaaccccuauccugauuaccacuggcugcgaacagugaagaccacgaaagagucucuuguaaucauaucgccaucaguugccgaccuggauccguacgacaagagcuugcauagucguguguuucccuccgggaaauguucuggaaucacuauuagcuccaccuauugcucaacaaaucacgauuacacuaucuggaugccugaaaacccaagacucggcaccaguugugacauuuucacaaauagcaggggcaagcgggcaucuaaaggguccaagaccugcggauuugucgaugagcgcggucuguauaagucacugaaaggcgccuguaagcucaaauuaugcggggugcugggacuuagauugauggacggcacguggguggcuaugcaaacuagcgaugaaacaaaguggugucccccugaccagcuggucaaccuacacgacuucaggagugaugagaucgagcaucucguuguggaggaacugguaaagaaacgggaagagugccuugacgcacuggaaucuauaaugaccacuaaauccgugagcuuucgccgauugucgcaccucagaaagcuggucccagguuucgggaaggccuacacaauuuucaauaaaaccuuaauggaggcugaugcccauuauaagucugugaggacguggaacgagaucauucccuccaaaggaugccugcggguuggcggccguugucacccgcacgugaauggggucuuuuucaacggaaucauccucgguccugacggccaugugcuuauucccgaaaugcagucaagucuguugcagcaacacauggagcuacuggaaagcuccguaauaccacucaugcauccucuggcggaucccucuaccguuuuuaaggacggggaugaggcagaagacuucguggagguccaccuuccagaugugcauaaacagaucagcggagucgaccugggcuugcccaauugggguaaguacgugcucguuucagccggggugcugguagucuuaaugcuggcuauuuuuaucaugacaugcuguggccgcgugaacagaccuaagaguacucagcacucccuagagggaaccggcaggaaaguuagcgugacaucucagucagggaaggucauaaguagcugggaauccuauaaaucuggaggugagacucggcucuga

SEQ ID NO: 159488 - RNA, 1575 nt, Artificial Sequence; identical to SEQ ID NO: 158947
  derived and/or modified CDS sequence (opt3) from glycoprotein__RABV__JX944584.1

SEQ ID NO: 159489 - RNA, 1575 nt, Artificial Sequence
  derived and/or modified CDS sequence (opt3) from glycoprotein__RABV__JX944586.1
auggugccccagguccugcuguucguuccucuucugguguuuagcaugugcuucggcaaguuuccaaucuacaccauuccggacaaauuggggcccugguccccuauagauauccaccauuuaucuuguccaaacaaucugguaguggaggacgaaggaugcacaaaccuaucagguuucaguuauauggagcucaaggucggcuacauuagcgccaucaaagugaauggguuuacuuguacgggaguugugaccgaagcugagacauauacuaacuucgucggcuacgugaccacaaccuuuaagagaaaacacuucaggcccacuccugaugcaugccgggccgcguauaauuggaagauggcuggugacccacgcuacgaagagucccugcauaaccccuauccugauuaccacuggcuucgaacaguaaagaccacgaaagagucucugguuauuaucucgccaucaguggccgacuuggauccguacgacaagagccuccauagucgugucuuucccuccgggaaauguucuggaauaacuaucagcuccaccuauugcucaacaaaucacgauuacacuauuuggaugccugaaaacccaagacugggcaccaguugugacaucuucacaaauagcaggggcaagcgggcaucuaaagggggaaagaccugcgguuuuguggaugagcgcggccuguauaagucccucaaaggggccuguaaguuaaaacugugcggagugcuuggcuugagacugauggacgguacgugggucgcuaugcaaacuucagaugaaacaaaguggugucccccugaccagcuaguuaaccuccacgacuucaggagcgaugagauugagcaucuggugguagaggaacuugugaaaaagcgggaagagugccuggacgcauuggaaaguaucaugaccacuaaaucugucuccuuucgccgacucagccaccugagaaaguuagugccaggguucggaaaggccuacacaauauucaauaaaacccugauggaggcugaugcccauuauaagucgauuaggacguggaacgagaucauucccucuaaaggcugccuccggguuggcgggcguugucacccgcacgugaauggagucuuuuucaacgguaucauccuuggcccugacgggcaugugcugauucccgaaaugcaguccucauugcuacagcaacacauggagcugcucgaaaguagcguaauaccacugaugcauccucuugcggaucccuccaccguuuuuaaggacggagaugaggcagaagacuucguggagguccaccucccagaugugcauaaacagaucucuggcgucgacuugggucuccccagcugggggaaguacgugcugguuucagccggcguguuaguaguccugaugcuaacaauuuuuaucaugacuugcuguggacgcgugagaaggccuaagaguacccagcacucccucggcgagacagggcggaaaguuagcgugacuucucagucaggaaaggucauaaguagcugggaauccuauaaaucugguggcgagacccgacuguga

SEQ ID NO: 159490 - RNA, 1575 nt, Artificial Sequence; identical to SEQ ID NO: 158947
  derived and/or modified CDS sequence (opt3) from glycoprotein__RABV__JX944587.1

SEQ ID NO: 159491 - RNA, 1575 nt, Artificial Sequence
  derived and/or modified CDS sequence (opt3) from glycoprotein__RABV__JX944588.1
auggugccccagguccuccuguucguuccucuucugguguuuagcuugugcuucggcaaguuuccaaucuacaccauuccggacaaauuagggcccugguccccuauagauauccaccaucugucuuguccaaacaaucuaguaguggaggacgaaggaugcacaaaccucucagguuucaguuauauggagcugaaggucggcuacauuagcgccaucaaagugaauggguuuacuuguacgggaguugugaccgaagcugagacauauacuaacuucgucggcuacgugaccacaaccuuuagaaggaagcacuuccggcccacuccugaugcaugccgcgccgcguauaauuggaaacuugcuggugacccacgauacgaagagucccugcauaaccccuauccugauuaccacugguugcguacaguaaagaccacgaaggagucucucguuauuaucucgccaucaguggccgaccuggauccguacgacaaaagccugcauaguagagucuuucccgggggaaaguguuccggcauaacuaucucuagcaccuauugcuccacaaaucacgauuacacuauuuggaugccugaaaacccaaggcucggcaccucaugugacaucuucgugaauagucgggggaaacgcgcaagcaagggagguaaaacaugcggcuuuguggaugagagaggguuauauaagucucugaagggagccuguaaacuuaaguugugcggcguccccggucugaggcuaauggacgggaccugggcugcaauucaaacguccgaugaaacuaaaugguguccuccaaaccagcucguuaaucugcacgacuuccggucagacgagaucgagcaucuugugguagaggaacuggugaagaaacgcgaagagugcuuggaugcccucgaaagcauaaugacaaccaagagugucucuuuucgaagacugucccacuuaaggaaacuggugcccggauucggcaaggcuuacacuauuuucaacaagacacucauggaggccgacgcgcauuauaaaagcguucggaccuggaaugagaucauuccgucgaagggcugccuucgugucgggggacgcugucacccucacgugaacgguguguuuuucaauggcaucauccuggggcccgauggacauguauugauuccagaaaugcagucuucccuacugcagcaacacauggagcuccuggaaucaaguguuauaccucuuaugcauccccuggcagacccaagcacgguguuuaaagauggcgacgaggccgaagauuucgucgaggugcacuugcccgacguccauaagcucaucuccgguguggaucugggguuaccuucuuggggcaaauacguucugaugagcgcuggagugcuaaccgcccucaugcugaugauuuuucuuaugacaugcuguagaaggggcaaccaggcagggucaaagcagcacggauuggaggguacuggccggaagguaagugucaccucccagaacgggaaagugaucagcucuugggaaucauauaagaguggaggcgagacacgacuguga

SEQ ID NO: 159492 - RNA, 1575 nt, Artificial Sequence
  derived and/or modified CDS sequence (opt3) from glycoprotein__RABV__JX944593.1
auggugccccagguccugcuguucguuccucuucuggccuuuagcaugugcuucggcaaguuuccaaucuacaccauuccggacaaauuggggcccugguccccuauagauauccaccauuuaucuuguccaaacaaucuggugguagaggacgaaggaugcacaaaccuaucagguuucaguuauauggagcucaaggugggcuacauuagcgcuaucaaagucaauggguuuacuuguacgggagugguuaccgaagcagagacauauacuaacuucgugggcuacgucaccacaaccuuuaagagaaaacacuucaggcccacuccugaugccugccgggcggcuuauaauuggaagauggccggugacccacgcuacgaagagucccugcauaaccccuauccugauuaccacuggcuucgaacagugaagaccacgaaagagucucugguaauuaucucgccaucaguugcagacuuggauccguacgacaagagccuccauagucguguguuucccuccgggaaauguucuggaauaacuaucagcuccaccuauugcucaacaaaucacgauuacacuauuuggaugccugaaaacccaagacugggcaccaguugugacaucuucacaaauagcaggggcaagcgggccucuaaagggggaaagaccugcgguuuugucgaugagcgcggccuguauaagucccucaaaggggcuuguaaguuaaaacugugcggagugcuuggcuugagacugauggacgguacguggguggcaaugcaaacuucagaugaaacaaaguggugucccccugaccagcuagucaaccuccacgacuucaggagcgaugagauugagcaucugguuguggaggaacuugugaaaaagcgggaagagugccuggacgccuuggaaaguaucaugaccacuaaaucuguauccuuucgccgacucagccaccugagaaaguuagucccaggguucggaaaggcuuacacaauauucaauaaaacccugauggaggccgaugcgcauuauaagucggugaggacguggaacgagauuauccccucuaaaggcugccuccggguuggcgggcguugucacccgcacgugaagggagucuuuuucaaugguauuauccuuggcccugacgggcaugugcugauccccgaaaugcaguccucauugcuacagcaacacauggagcugcucgaaaguagcguaauuccacugaugcauccucuugcagaucccuccaccguuuuuaaagacggagaugaggccgaagacuucguggagguccaccucccagaugugcauaagcagauaucuggcgucgacuugggucuccccagcugggggaaguacgugcugguuucagcuggcguguuaguaguccugaugcuaacaaucuuuauuaucacuugcuguggacgcgugcacagaccuaaaaguacccagcacggccucgggggaacagguaggaagguuuccgugacuagccagucuggcaaagucauaucaaguugggagagcuauaaguccgggggagaaacccggcuguga

SEQ ID NO: 159493 - RNA, 1575 nt, Artificial Sequence
  derived and/or modified CDS sequence (opt3) from glycoprotein__RABV__JX987718.1
auggugccccagguccuccuguucguuccucuucugguguuuagcaugugcuucggcaaguuuccaaucuacaccauuccggacaaauuggggcccugguccccuauagauauccaccauuuaucuuguccaaacaaucugguaguggaggacgaaggaugcacaaaccuaucagguuucaguuauauggagcucaaggucggcuacauuagcgccaucaaagugaauggguuuacuuguacgggaguugugaccgaagcugagacauauacuaacuucgucggcuacgugaccacaaccuuuaagagaaaacacuucaggcccacuccugaugcaugccgggccgcguauaauuggaagauggcuggugacccacgcuacgaagagucccugcauaaccccuauccugauuaccacuggcuucgaacaguaaagaccacgaaagagucucugguuauuaucucgccaucaguggccgacuuggauccguacgacaagagccuccauagucgugucuuucccuccgggaaaugucugggaauaacuaucucuagcaccuauugcuccacaaaucacgauuacacuauuuggaugccugaaaacccaagacugggcaccucaugugacaucuucacaaauaguaggggcaagcgggcaagcaaagggucuaagaccugcggauuuguggaugagcgcggucucuauaaguccuuaaaaggcgccuguaagcugaaacuuugcgggguguugggacugagacuaauggacggcacgugggucgcuaugcaaacuucagaugaaacaaaguggugucccccugaccagcucguuaaccugcacgacuucaggagcgaugagauugagcaucuugugguagaggaacuggugaaaaagcgggaagagugcuuggacgcacucgaaaguaucaugaccacuaaaucugucuccuuucgccgacugagccacuuaagaaagcuggugccagguuucgggaaggccuacacaauauucaauaaaacccucauggaggcugaugcccauuauaagucgguuaggacguggaacgagauuauccccucuaaaggaugccuucgggugggcggccguugucacccgcacgucaaugggguguuuuucaacggaauuauccuggguccugacggccauguauugauccccgaaaugcaguccucacuacugcagcaacacauggagcuccuggaaaguagcguuauuccacuuaugcauccucuggcggaucccuccaccguguuuaaggagggggacgaagcagaggauuucgucgaggugcacuugccagacguccauaaacagauaucuggaguggaucucggccugcccagcugggguaaguacguuuuagugucagccgggguacuggucgugcuaaugcucacaaucuuuauuaugacuugcuguggccgcguucacagaccuaagaguacccagcacucccugggaggcacagggaggaaagugagcgucacuucucagucaggaaaggugaucaguagcugggaauccuauaaaucugguggcgagacccggcuuuga

SEQ ID NO: 159494 - RNA, 1575 nt, Artificial Sequence
  derived and/or modified CDS sequence (opt3) from glycoprotein__RABV__JX987719.1
auggugccccagguccuucucuucguuccucuucugguguuuagcaugugcuucggcaaguuuccaaucuacaccauuccggacaaauuggggcccugguccccuauagauauccaccauuuaucuuguccaaacaaucugguaguggaggacgaaggaugcacaaaccuaucagguuucaguuauauggagcucaaggucggcuacauuagcgccaucaaagugaauggguuuacuuguacgggaguugugaccgaagcugagacauauacuaacuucgucggcuacgugaccacaaccuuuaagagaaaacacuucaggcccacuccugaugcaugccgggccgcguauaauuggaagcuggcuggugacccacgcuacgaagagucccuucauaaccccuauccugauuaccacuggcugcgaacaguaaagaccacgaaagagucuuugguuauuaucucgccaucaguggccgaccucgauccguacgacaagagccugcauagucgugucuuucccuccgggaaaugucugggaauaacuaucucuagcaccuauugcuccacaaaucacgauuacacuauuuggaugccugaaaacccaagacucggcaccucaugugacaucuucacaaauaguaggggcaagcgggcaagcaaagggucuaagaccugcggauuuguggaugagcgcgguuuauauaagucccugaaaggcgccuguaagcugaaauugugcggggugcugggacuaagacucauggacggcacgugggucgcuaugcaaacuucagaugaaacaaaguggugucccccugaccagcugguuaaccuucacgacuucaggagcgaugagauugagcaucuggugguagaagaguuggugaaaaagcgggaagagugccucgacgcacuggaaaguaucaugaccacuaaaucugucuccuuucgccgauuaagccaccugagaaagcucgugccagguuucgggaaggccuacacaauauucaauaaaacccuuauggaggcugaugcccauuauaagucgauuaggacguggaacgagaucauucccucuaaaggaugccugcggguuggcggccguugucacccgcacgugaauggggucuuuuucaacggaaucaucuuggguccugacggccaugugcuaauucccgaaaugcaguccucacugcuccagcaacacauggagcugcuugaaaguagcguaauaccacugaugcauccuuuggcggaucccuccaccguuuuuaaggacggggaugaggcagaagacuucguggagguccaccucccagaugugcauaaacagaucucuggagucgaccugggcuuacccagcugggguaaguacgugcugguuucagccggggugcuaguaguccucaugcugacaauuuuuaucaugacuugcuguggccgcgugagaaggccuaagaguacccagcacucccuuggaggcacagggcggaaaguuagcgugacuucucagucaggaaaggucauaaguagcugggaguccuauaaaucugguggcgaaacccgauuguga

SEQ ID NO: 159495 - RNA, 1575 nt, Artificial Sequence; identical to SEQ ID NO: 159493
  derived and/or modified CDS sequence (opt3) from glycoprotein__RABV__JX987720.1

SEQ ID NO: 159496 - RNA, 1575 nt, Artificial Sequence
  derived and/or modified CDS sequence (opt3) from glycoprotein__RABV__JX987721.1
auggugccccagguccuucucuucguuccucuucugguguuuagcuugugcuucggcaaguuuccaaucuacaccauuccggacaaauuagggcccugguccccuauagauauccaccaucugucuuguccaaacaaucuaguaguggaggacgaaggaugcacaaaccucucagguuucaguuauauggagcugaaggucggcuacauuagcgccaucaaagugaauggguuuacuuguacgggaguugugaccgaagcugagacauauacuaacuucgucggcuacgugaccacaaccuuuagaaggcggcacuuccgccccacuccugauacaugccgagcagccuauaauuggaagcuggcgggugacccacguuacgaagagucccugcauaaccccuauccugauuaccacugguugagaaccguaaaaacgacuaaggagucucucguuauuaucucgccaucaguggcugaccuggauccguacgacaagagccugcauaguagggucuuucccgggggaaaauguuccggcauaaccgugucuagcacauauugcuccacuaaucacgauuacaccaucuggaugccugaaaacccacggcucggcacaucaugugacauuuucgugaauagucgcgggaagagagccagcaaaggagguaagaccugcggcuuugucgaugagaggggguuauauaaaucucugaagggagcauguaaacuuaaguugugcggcguucccggucugcggcuaauggacgggacgugggccgcuauccaaacuuccgaugaaacaaagugguguccuccagaccagcucgugaaccugcacgacuuccgcucagaugagauugagcaucuuguaguggaggaacuggucaaaaagcgagaagagugcuuggacgcacucgaaagcaucaugaccacuaaaagugugucuuuuagaaggcugucccacuuacggaagcugguucccggauucggcaaagccuacacaauauucaauaagacccucauggaggcugaugcccauuauaagagcgugcguacguggaacgagauuaucccgucgaaaggcugccuucgcgucgggggaagaugucacccucacgugaaugguguauuuuucaacggcauuauccuggggcccgacggacauguuuugaucccagaaaugcagucuucccuacugcagcaacacauggagcuccuggaaucaagugugauuccucuuaugcauccccuggcggauccaagcaccgucuuuaaggacggcggugaggcagaagauuucguggagguccacuugcccgacgugcauaaacucauauccgggguugaucugggcuuaccuucuuggggaaaguacgugcugaugagcgccggcguacuaacagcucucaugcugaugaucuuucuuaugacuugcuguaggcgggggaaucaggccggaucaaaacagcacgguuuggagggcaccgggcgaaaggucagugugacaucccagaacggaaagguuauuagcucuugggaaucauauaaaaguggcggugagacucgccuguga

SEQ ID NO: 159497 - RNA, 1575 nt, Artificial Sequence; identical to SEQ ID NO: 159493
  derived and/or modified CDS sequence (opt3) from glycoprotein__RABV__JX987723.1

SEQ ID NO: 159498 - RNA, 1575 nt, Artificial Sequence
  derived and/or modified CDS sequence (opt3) from glycoprotein__RABV__JX987724.1
auggugccccagguccuccuguucguuccucuucugguguuuagcuugugcuucggcaaguuuccaaucuacaccauuccggacaaauuagggcccugguccccuauagauauccaccaucugucuuguccaaacaaucuaguaguggaggacgaaggaugcacaaaccucucagguuucaguuauauggagcugaaggucggcuacauuagcgccaucaaagugaauggguuuacuuguacgggaguugugaccgaagcugagacauauacuaacuucgucggcuacgugaccacaaccuuuagaaggaagcacuuccggcccacuccugaugcaugccgcgccgcguauaauuggaaacuugcuggugacccacgauacgaagagucccugcauaaccccuauccugauuaccacugguugcguacaguaaagaccacgaaggagucucucguuauuaucucgccaucaguggccgaccuggauccguacgacaaaagccugcauaguagagucuuucccgggggaaaguguuccggcauaacugugucuagcaccuauugcuccacaaaucacgauuacacuaucuggaugccugaaaacccaaggcucggcaccucaugugacauuuucgugaauagucgggggaaacgcgcaagcaagggagguaaaacaugcggcuuugucgaugagagaggguuauauaagucucugaagggagccuguaaacuuaaguugugcggcguucccggucugaggcuaauggacgggaccugggcugcaauccaaacguccgaugaaacuaaaugguguccuccagaccagcucgugaaccugcacgacuuccggucagaugagauugagcaucuuguaguggaggaacuggucaagaaacgcgaagagugcuuggacgcccucgaaagcaucaugacaaccaagagugugucuuuucgaagacugucccacuuaaggaaacugguucccggauucggcaaggcuuacacuauauucaauaagacacucauggaggccgaugcgcauuauaaaagcgugcggaccuggaacgagauuaucccgucgaagggcugccuucgugucgggggacgcugucacccucacgugaaugguguauuuuucaacggcauuauccuggggcccgacggacauguuuugaucccagaaaugcagucuucccuacugcagcaacacauggagcuccuggaaucaagugugauuccucuuaugcauccccuggcagauccaagcacggucuuuaaagacggcgaugaggccgaagacuucguggagguccacuugcccgaugugcauaagcucauauccgguguugaccugggguuaccuucuuggggcaaauacgugcugaugagcgcuggaguacuaaccgcccucaugcugaugaucuuucuuaugacaugcuguagaaggggcaaucaggcagggucaaagcagcacggauuggagcggacuggucgaaaggucagugugaccucccagaacggcaaaguuauuagcucuugggaaucauauaagagugggggagagacacgccuguga

SEQ ID NO: 159499 - RNA, 1575 nt, Artificial Sequence
  derived and/or modified CDS sequence (opt3) from glycoprotein__RABV__JX987725.1
auggugccccagguccugugguucguuccucuccuuguguuuagcaugugcuucggcaaguuuccaaucuacaccauuccggacaaacuggggcccugguccccuauagauuugcaccauuuaucuuguccaaacaaucugguaguggaggacgaaggaugcacaaaccuaucagguuucaguuauauggagcucaaggucggcuacaucagcgccauuaaagugaauggguuuacuuguacgggaguugugaccgaagcugagacauauacuaacuucgucggcuacgugaccacaaccuuuaagagaaaacacuucaggcccacuccugaugcaugccgggccgcguauaauuggaagauggcuggugacccacgcuacgaagagucccugcauaaccccuauccugauuaccacuggcuucgaacaguaaagaccacgaaagagucucugguuaucauuucgccaucaguggccgacuuggauccguacgacaagagccuccauagucgugucuuucccuccgggaaauguucuggaaucacuauaagcuccaccuauugcucaacaaaucacgauuacacuaucuggaugccugaaaacccaagacugggcaccaguugugacauuuucacaaauagcaggggcaagcgggcaucuaaaggguccaagaccugcggauuuguggaugagcgcggucuguauaagucacucaaaggcgccuguaaguuaaaacugugcggggugcuuggauugagacugauggacggcacgugggucgcuaugcaaacuagcgaugaaacaaaguggugucccccugaccagcuaguuaaccuccacgacuucaggagugaugagaucgagcaucuggugguagaggaacuugugaaaaagcgggaagagugccuggacgcauuggaaucuauuaugaccacuaaauccgucagcuuucgccgacucucgcaccugagaaaguuagugccagguuucgggaaggccuacacaaucuucaauaaaacccugauggaggcugaugcccauuauaagucuguuaggacguggaacgagauaauucccuccaaaggaugccuccgggugggcggccguugucacccgcacgucaaugggguguuuuucaacggaaucauucuugguccugacggccauguacugauccccgaaaugcagucaaguuugcuacagcaacacauggagcugcucgaaagcuccguuaucccacugaugcauccucuugcggaucccucuaccguguuuaaggacggggaugaggcagaagacuucgucgaggugcaucugccagauguccacaaacagauuagcggaguggacuugggccuccccaauugggguaaguacguucuggugucagccgggguauuagucgugcugaugcuagcuauauuuaucaugacaugcuguggccgcguuaacagaccuaagaguacucagcacucccucgagggaaccggcaggaaagugagcgucacaucucagucagggaaggugauuaguagcugggaauccuauaaaucuggaggugagacucggcuguga

SEQ ID NO: 159500 - RNA, 1575 nt, Artificial Sequence; identical to SEQ ID NO: 158947
  derived and/or modified CDS sequence (opt3) from glycoprotein__RABV__JX987727.1

SEQ ID NO: 159501 - RNA, 1575 nt, Artificial Sequence
  derived and/or modified CDS sequence (opt3) from glycoprotein__RABV__JX987728.1
auggugccccaggcccuccuguucgucccucuucugguuuuuagcuugugcuucggcaaguuuccaaucuacaccauuccggacaaauuagggcccugguccccuauagauauccaccaucugucuuguccaaacaaucuagugguagaggacgaaggaugcacaaaccucucagguuucaguuauauggagcugaaggugggcuacauuagcgcuaucaaagucaauggguuuacuuguacgggagugguuaccgaagcagagacauauacuaacuucgugggcuacgucaccacaaccuuuaagagaaaacacuucaggcccacuccugaugccugccgggcggcuuauaauuggaagauggccggugacccacgcuacgaagagucccuucauaaccccuauccugauuaccacuggcugcgaacagugaagaccacgaaagagucuuugguaauuaucucgccaucaguugcagaccucgauccguacgacaagagccugcauagucguguguuucccuccgggaaauguucuggaauaacugucagcuccaccuauugcucaacaaaucacgauuacacuaucuggaugccugaaaacccaagacugggcaccaguugugacauuuucacaaauagcaggggcaagcgggccucuaaaggguccaagaccugcggauuuguggaugagcgcggucucuauaagucauuaaaaggcgcuuguaagcugaaacuuugcgggguguugggacugagacuaauggacggcacgugggucgcaaugcaaacuagcgaugaaacaaaguggugucccccugaccagcucguuaaccugcacgacuucaggagugaugagaucgagcaucuugugguagaggaacuggugaaaaagcgggaagagugcuuggacgcccucgaaucuauuaugaccacuaaauccgucagcuuucgccgacugucgcacuuaagaaagcuggugccagguuucgggaaggcuuacacaaucuucaauaaaacccucauggaggccgaugcgcauuauaagucuguuaggacguggaacgagauaauucccuccaaaggaugccuucgggugggcggccguugucacccgcacgucaaugggguguuuuucaacggaaucauucuggguccugacggccauguauugauccccgaaaugcagucaagucuacugcagcaacacauggagcuccuggaaagcuccguuaucccacuuaugcauccucuggcagaucccucuaccguguuuaaggacggggaugaggccgaagacuucgucgaggugcacuugccagauguccauaaacaggugagcggaguugaccucggccugcccaauugggguaaguacguguuacugucagcuggggcccuaauugcacucaugcugaugauauuucuuaugacaugcugucgcagaguaaacaggccugagaguacucagccauccuugggcggaaccggccggaaggucagcaucacaucucagucagggaaagugauuaguagcugggaauccuauaagucuggaggugagacucgacuguga

SEQ ID NO: 159502 - RNA, 1575 nt, Artificial Sequence
  derived and/or modified CDS sequence (opt3) from glycoprotein__RABV__JX987729.1
auggugccccagguccuucucuucguuccucuucugguguuuccauugugcagcggcaaguucccgaucuacaccauucccgacaaauuagggccuugguccccaauagauauccaccaucugucuugucccaacaaucuaguaguggaggacgaaggaugcacaaaccucucagguuuuaguuauauggagcugaaggucggcuacauuagcgccaucaaagugaauggguucacuuguacgggaguugugaccgaagcugagacauauacuaacuuugucggcuacgugaccacaaccuucagaaggaagcacuuucggccuacuccagaugcaugccgcgccgcguauaauuggaaaauggcuggugacccccgauacgaagagucccuucauaacccuuauccagauuaccacuggcugcguacaguaaagaccacgaaggagucuuugguuauuaucucgccgucaguggccgaccucgaucccuacgacaaaagccugcauaguagagucuucccuuccgggaaguguucuggaauaacugugagcuccaccuauugcucaacaaaucacgauuacacuaucuggaugccagaaaaccccaggcugggcaccaguugugacauuuuuacaaauagccggggcaaacgcgcaucuaagggguccaaaaccugcggauucguggaugagagaggucucuauaagucauuaaagggcgccuguaaacugaagcugugcggggucuugggacugaggcuaauggacggcacguggaucgcuaugcaaacuagcgaugaaacaaaaugguguccuccagaccagcucguuaaccugcacgacuuucggagugaugagauugagcaucuugugguagaggaacuggugaagaaacgcgaagagugcuuggacgcacucgaaucuaucaugaccacuaaguccgucagcuuccgaagacugucgcacuuaaggaaacuggugcccgguuuugggaaggccuacacaauauucaauaagacccucauggaggcugaugcccauuauaaaucuguucggacguggaacgagauuaucccguccaagggaugccuucgugugggcggccgcugucacccucacgucaaugggguguucuuuaacggaauuauccugggucccgacggccauguauugaucccagaaaugcagucaagucuacugcagcaacacauggagcuccuggaaagcuccguuauuccucuuaugcauccccuggcggauccaucuaccguguucaaagacggggaugaggcagaagacuuugucgaggugcacuugcccgauguccauaaacaggugagcggaguugaccucggccugccuaauugggguaaguacguguuacugucagccggggcucuaauagcccucaugcugaugaucuuccuuaugacaugcuguagaaagguaaacaggccagagaguacucagcgguccuugggcggaaccggccgaaaggucagcauuacaucucagucagggaaagugaucaguagcugggaauccuauaagucuggaggugagacucgccuguga

SEQ ID NO: 159503 - RNA, 1575 nt, Artificial Sequence
  derived and/or modified CDS sequence (opt3) from glycoprotein__RABV__JX987730.1
auggugccccaggcccuucucuucgucccucuucuggcuuuuccaaugugcuucggcaaguuuccgaucuacaccauucccgacaaauuggggccuuggagcccaauagauauccaccauuuauccugucccaacaaucugguuguggaggacgaaggaugcacaaaccuaucugguuucucauauauggagcucaagguaggcuacauuagugcaaucaaagugaauggguuuacuuguacgggagucgugaccgaagccgagacauauacuaacuucguuggcuacgugaccacaaccuuuaagagaaaacacuucaggccuacuccagaugcgugccgggcugccuauaauuggaagauggccggugacccccgcuacgaagagagccugcauaacccuuauccagauuaccacuggcuucgaacagucaagaccacgaaagagucccugauuaucauaucuccgucgguggcagacuuggaucccuacgacaagucacuccauagccguguauuuccuagugggaaaugucugggaaucacuauuuccucuaccuauugcagcacaaaucacgauuacacuaucuggaugccagaaaaccugagacucggcaccuccugugacauuuucacaaauucaaggggcaagcgggcuaguaaagggagcaagaccugcggauuuguugaugagcgcgguuuauauaagucucugaaaggcgcauguaagcugaaauugugcggggugcugggacuaagacucauggacggcacgugggucgccaugcccacuuccgaugaaacaaagugguguccuccagaccaacuggugaaccuucacgacuucaggucagaugagaucgagcaucugguggucgaagaguugguuaaaaagcgggaagagugccucgacgcucuggaaagcauaaugaccacuaaaagugugucuuuucgccgauuaucccaccugagaaagcucguacccgguuucgggaaggccuacacaauuuucaauaaaacccuuauggaggcggaugcacauuauaagagcgugaggacguggaacgagaucauuccgucgaaaggaugccugcgggucggcggccguugucacccucacgugaaugggguguuuuucaacggaaucaucuugggucccgacggccauguucuaauuccagaaaugcagucuucccugcuccagcagcacauggagcugcuugaaucaagugucauaccucugaugcaucccuuggccgauccaagcaccguguuuaaggacggggaugaggcugaagacuucguagagguucaccuccccgaugugcauaaacaaaucuccggagucgaccugggcuuaccuaauugggguaaguacgugcugauuaucgccgggguccuaauagcaaugauucucacaaucuuucugaugacuugcuguggccgcggaaacagaccaaagucuacccagcacagccuuggcgggaucggaaggaaagugucaaguacaucccagagcgguaagguuauuucuucaugggagaguuauaaaagcggcggggaaacucgguuguga

SEQ ID NO: 159504 - RNA, 1575 nt, Artificial Sequence; identical to SEQ ID NO: 159503
  derived and/or modified CDS sequence (opt3) from glycoprotein__RABV__JX987731.1

SEQ ID NO: 159505 - RNA, 1575 nt, Artificial Sequence
  derived and/or modified CDS sequence (opt3) from glycoprotein__RABV__JX987732.1
auggugccccaggcccuccuguucgucccucuucugguuuuuccauugugcuucggcaaguuuccgaucuacaccauucccgacaaauuagggccuuggagcccaauagauauccaccaucuguccugucccaacaaucuagugguagaggacgaaggaugcacaaaccucucugguuucucauauauggagcugaaggugggcuacauuagugcuaucaaagucaauggguuuacuuguacgggagugguuaccgaagcagagacauauacuaacuucgugggcuacgucaccacaaccuuuaagagaaaacacuucaggccuacuccagaugccugccgggcggcuuauaauuggaagauggccggugacccccgcuacgaagagagccuucauaacccuuauccagauuaccacuggcugcgaacagugaagaccacgaaagaguccuugguaauuaucucuccgucgguugcagaccucgaucccuacgacaagucacugcauagccguguguuuccuagugggaaauguuccggaauaacugucucuagcaccuauugcuccacaaaucacgauuacacuaucuggaugccagaaaaccccagacugggcaccucaugugacauuuucacaaauaguaggggcaagcgggccagcaaagggucuaagaccugcggauuuguggaugagcgcggucucuauaaguccuuaaaaggcgcuuguaagcugaaacuuugcgggguguugggacugagacuaauggacggcacgugggucgcaaugcaaacuucagaugaaacaaagugguguccuccagaccagcucguuaaccugcacgacuucaggagcgaugagaucgagcaucuugugguagaggaacuggugaaaaagcgggaagagugcuuggacgcccucgaaaguauuaugaccacuaaaucugucuccuuucgccgacugagccacuuaagaaagcuggugcccgguuucgggaaggcuuacacaaucuucaauaaaacccucauggaggccgaugcgcauuauaagucgguuaggacguggaacgagauaauuccgucuaaaggaugccuucgggugggcggccguugucacccucacgucaaugggguguuuuucaacggaaucauucugggucccgacggccauguauugaucccagaaaugcaguccucacuacugcagcaacacauggagcuccuggaaaguagcguuaucccucuuaugcauccccuggcagauccauccaccguguuuaaggacggggaugaggccgaagacuucgucgaggugcacuugcccgauguccauaaacaggugucuggaguugaccucggccugccuaauugggguaaguacguguuacugagcgcuggggcccuaauugcacucaugcugauaaucuuucuuaugacaugcugucgcagaguaaacaggccagagucaacucagcggaguuugggcggaaccggccgaaaggucuccgugacaagccagucugggaaaguuauuucaaguugggaaagcuauaaguccggaggugagacucgccuguga

SEQ ID NO: 159506 - RNA, 1575 nt, Artificial Sequence
  derived and/or modified CDS sequence (opt3) from glycoprotein__RABV__JX987733.1
auggugccccaggcccuucucuucgucccucuucuggcuuuuccaaugugcuucggcaaguuuccgaucuacaccauucccgacaaauuggggccuuggagcccaauagauauccaccauuuauccugucccaacaaucugguuguggaggacgaaggaugcacaaaccuaucugguuucucauauauggagcucaagguaggcuacauuagugcaaucaaagugaauggguuuacuuguacgggagucgugaccgaagccgagacauauacuaacuucguuggcuacgugaccacaaccuuuaagagaaaacacuucaggccuacuccagaugcgugccgggcugccuauaauuggaagauggccggugacccccgcuacgaagagagccugcauaacccuuauccagauuaccacuggcuucgaacagucaagaccacgaaagagucccugauuaucauaucuccgucgguggcagacuuggaucccuacgacaagucacuccauagccguguauuuccuagugggaaaugucugggaaucacuauuuccucuaccuauugcagcacaaaucacgauuacacuaucuggaugccagaaaaccugagacucggcaccuccugugacauuuucacaaauucaaggggcaagcgggcuaguaaagggagcaagaccugcggauuuguugaugagcgcgguuuauauaagucucugaaaggcgcauguaagcugaaauugugcggggugcugggacuaagacucauggacggcacgugggucgccaugcaaacuuccgaugaaacaaaguggugucccccugaccagcuggugaaccuucacgacuucaggucagaugagaucgagcaucugguggucgaagaguugguuaaaaagcgggaagagugccucgacgcucuggaaagcauaaugaccacuaaaagugugucuuuucgccgauuaucccaccugagaaagcucguaccagguuucgggaaggccuacacaauuuucaauaaaacccuuauggaggcggaugcacauuauaagagcgugaggacguggaacgagaucauucccucgaaaggaugccugcgggucggcggccguugucacccgcacgugaaugggguguuuuucaacggaaucaucuuggguccugacggccauguucuaauucccgaaaugcagucuucccugcuccagcaacacauggagcugcuugaaucaagugucauaccacugaugcauccuuuggccgaucccagcaccguguuuaaggacggggaugaggcugaagacuucguagagguucaccucccagaugugcauaaacagaucuccggagucgaccugggcuuacccaauugggguaaguacgugcugauuaucgccgggguccuaauagcaaugauucucacaaucuuucugaugacuugcuguggccgcggaaacagaccugagucuacccagcacagccuuggcgggaucggaaggaaggugucagcuacaagucaguccgguaaaguuauuagcucuugggaaucauauaagaguggcggggagacucgguuguga

SEQ ID NO: 159507 - RNA, 1575 nt, Artificial Sequence
  derived and/or modified CDS sequence (opt3) from glycoprotein__RABV__JX987734.1
auggugccccaggcccugagcuucgucccucuccuuguuuuuccacugugcuucggcaaguuuccgaucuacaccauucccgacaaauuggggccuugguccccaauagauauccaccauuuaucuugucccaacaaucuggugguagaggacgaaggaugcacaaaccuaucagguuucaguuauauggagcucaaggugggcuacauuagcgcuaucaaagucaauggguuuacuuguacgggagugguuaccgaagcagagacauauacuaacuucgugggcuacgucaccacaaccuuuaagagaaaacacuucaggccuacuccagaugccugccgggcggcuuauaauuggaagauggccggugacccccgcuacgaagagucccugcauaacccuuauccagauuaccacuggcuucgaacagugaagaccacgaaagagucucugguaauuaucucgccgucaguugcagacuuggaucccuacgacaagagccuccauagucguguguuuccuuccgggaaaugucugggaauaacugucucuagcaccuauugcuccacaaaucacgauuacacuaucuggaugccagaaaaccccagacugggcaccucaugugacauuuucacaaauaguaggggcaagcgggccagcaaagggucuaagaccugcggauuuguggaugagcgcggucucuauaaguccuuaaaaggcgcuuguaagcugaaacuuugcgggguguugggacugagacuaauggacggcacgugggucgcaaugcagacuucagaugaaacaaagugguguccuccagaccagcucguuaacauccacgacuucaggagcgaugagauugagcaucuggugguagaggaacuugugaaaaagcgggaagagugccuggacgccuuggaaaguaucaugaccacuaaaucugucuccuuucgccgacucagccaccugagaaaguuagugcccgguuucgggaaggcuuacacaauauucaauaaaacccugauggaggccgaugcgcauuauaagucgguuaggacguggaacgagauuaucccgucuaaaggaugccuccgggugggcggccguugucacccucacgucaaugggguguuuuucaacggaauuauccuuggucccgacggccauguacugaucccagaaaugcaguccucauugcuacagcaacacauggagcugcucgaaaguagcguuauuccucugaugcauccccuugcagauccauccaccguguuuaaggacggggaugaggccgaagacuucgucgaggugcaucugcccaauguccacaaacaggugucuggaguugauuugggccucccuaacugggguaaguacgugcuguuaagcgcuggggcccugauagcacuaaugcucaucauuuuucugaugacaugcugucgcagaguaaacaggucagagaguacucagcggucccuuggcggagcuggccgaaaggucagcaucaccucucaagggggaaaagugauaucaaguugggaaagcuauaaguccgguggcgagacacgcuuguga

SEQ ID NO: 159508 - RNA, 1575 nt, Artificial Sequence; identical to SEQ ID NO: 159386
  derived and/or modified CDS sequence (opt3) from glycoprotein__RABV__JX987749.1

SEQ ID NO: 159509 - RNA, 1575 nt, Artificial Sequence
  derived and/or modified CDS sequence (opt3) from glycoprotein__RABV__KC169986.1
augaucccccaggugcugcuguucgucccucuucugguuuuuagcuccugcuucggcaaguuuccaauuuacaccauaccggacaaauuggggcccuggucuccuaucgauauucaccauuuaucauguccaaacaaucuggugguagaggacgaaggaugcacaaaccuaagugguuucagcuauauggagcucaaggugggcuacaucuccgccauuaaagucaauggguuuacuuguacgggagugguuaccgaagcugagacauauacuaacuucgugggcuacgucaccacaaccuuuaagagaaaacacuucaggcccaugccuggugcaugccgggccgcguauaauuggaagauggcuggggauccacgcuacgaagagucucugcauaaccccuauccugacuaccacuggcuucgaacugugaagacaaccaaagagucgcugguaaucauaucacaaagcguugccgauuuggacccauacgauaagagucuccauucccguguguuuccgggaggcaaauguucuggcaucacggucagcuccacuugcuguucaaccaaucacgacuauacaauuuggaugcccgaaaacccuagacuggggaccaguugcgauaucuucacuaauagcaggggaaagcgggcaucuaaagguggcaagacauguggguuuguggacgagcgcggacuguacaagucccucaaaggcgccugcaaguuaaaacuguguggugugcuuggguugagacugauggauggaaccugggucgcuauucagacgucagacgaaaucaaguggugcagcccagaucagcuaguuaaccuccacgacuuccauagugacgagauagagcaccuggugguagaggaacuugugaaaaagagggaagagugccuggaugcauuggaaacuauuaugacaaccaaaucugucuccuuucggcgccucagccaucugcgaaaguuagugcccggcuucggcaaggccuauacuaucuucaauaaaacacugauggaggcugacgcccacuacaagucgauuagaaccugggaugagaucaucccuucuaaagggugucucaggguuggaggucggugccacccacaugugaacggcgucuuuuucaaugggauuauacuuggacccgacggccacgugcugaucccggaaaugcaguccucauugcuacaucaacacauggagcugcucgaaaguagcguaauuccucugaugcauccccuugcggauccauccgcaguuuuuaaggacggugaugaggccgaagacuucguggagguccaccucccugaugugcacaaacagaucucuggggucgacuugggccuccccaacuggggaaaguaugugcugauaagcgcuggcgccuuaacggcaucaaugcugaugauuuuucuaaugaccuguugccguaaggcuaaucgcgccgagaguauccagcauaacccaggggaaacaggaagaaaaguuuccgugacuagccacaacgguaggguaaucucuucaugggagaguuacaagagcggcggggaaaccaaacucuga

SEQ ID NO: 159510 - RNA, 1575 nt, Artificial Sequence
  derived and/or modified CDS sequence (opt3) from glycoprotein__RABV__KC171643.1
auggugccccaggcccuccuguucgucccucuucugguuuuuagcaugugcuucggcaaguuuccaaucuacaccauuccggacaaauuggggcccugguccccuauagauauccaccauuuaucuuguccaaacaaucuggugguagaggacgaaggaugcacaaaccuaucagguuucaguuauauggagcucaaggugggcuacauuagcgcuaucaaagucaauggguuuacuuguacgggagugguuaccgaagcagagacauauacuaacuucgugggcuacgucaccacaaccuuuaagagaaaacacuucaggcccacuccugaugccugccgggcggcuuauaauuggaagauggccggugacccacgcuacgaagagucccugcauaaccccuauccugauuaccacuggcuucgaacagugaagaccacgaaagagucucugguaauuaucucgccaucaguugcagacuuggauccguacgacaagagccuccauagucguguguuucccaaugggaaauguuccggaauaacuaucucuagcaccuauugcccuacaaaccacgauuacacuauuuggcugccagaaaaucccagacugggcaccuccugugacaucuucacaaacucaaggggcaagcgggccaguaaagggagcaagaccugcggauuugucgaugagcgcggucucuauaagucuuuaaaaggcgcuuguaagcugaaacuuugcgggguguugggacugagacuaauggacggcacguggguggcaaugcaagccuccgaugaaacuaagugguguccuccagaccagcucgucaaucugcacgacuucaggucagaugagauugagcaucuuguuguggaggaacuggugaaaaagcgggaagagugcuuggacgcucucgaaagcaucaugacaaccaaaaguguaucuuuucgccgacugucccacuuaagaaagcugguccccgguuucgggaaggccuacacuauauucaacaaaacacucauggaggcggaugcacauuauaagagcgugaggaccuggaaugagauuaucccgucgaaaggaugccuucggguuggcggccguugucacccucacgugaacggggucuuuuucaauggaauuauccugggucccgacggccauguguugaucccagaaaugcagucuucccuacugcagcaacacauggagcuccuggaaucaaguguaguuccucuuaugcauccccuggccgauccaagcacgguguugaaggacggggaugaggcugaaaacuuugucgaggugcaccuccccgacguccauaaacagauuuccggaguggaucugggcuuaccuaacugggguaaguacguucuggugucugccgggguacuaauagcacucaugcugaucauuuuccuuaugaccugcuguggccgcgucaauagaccaaagagcacacagcacaacuugggaggcacugggaggaaagugucaguuaccccgcagaguggaaaggugaucuccagcugggagucuuauaaaucagguggcgggacacggcuguga

SEQ ID NO: 159511 - RNA, 1575 nt, Artificial Sequence; identical to SEQ ID NO: 158862
  derived and/or modified CDS sequence (opt3) from glycoprotein__RABV__KC171644.1

SEQ ID NO: 159512 - RNA, 1575 nt, Artificial Sequence; identical to SEQ ID NO: 158867
  derived and/or modified CDS sequence (opt3) from glycoprotein__RABV__KC171645.1

SEQ ID NO: 159513 - RNA, 1575 nt, Artificial Sequence
  derived and/or modified CDS sequence (opt3) from glycoprotein__RABV__KC252633.1
auggugccccugguccuccuuuucguuccucuguugguguuuccauuaugcagcggcaaguucccgaucuacaccauucccgacaaacuggggccuugguccccaauagauauccaccaucuaucuugucccaacaaucucguaguggaggacgaaggaugcgccaaccugucagguuuuaguuauauggagcuuaaggucggcuacauuagcgcuaucaaagugaauggguucacauguacuggaguugugacggaagcagagaccuauacaaacuuugucggcuacgugacuaccacauucagaaggaagcacuuucggccuaccccagaugccugccgcgcggcuuauaauuggaaaauggccggugacccccgauacgaagagucccugcauaacccuuauccagauuaccacugguugcguacuguaaagacaaccaaggagucucucguuauuaucucgccgucaguggcagaccuggaucccuacgacaaaagccugcauaguagagucuucccuuccgggaaguguucuggaauaacggugagcuccacuuauugcucaaccaaucacgauuacacaaucuggaugccagaaaaccucagguuaggcaccaguugugacauuuuuacuaauagccggggcaaacgcgccucuaagggguccaaaacaugcggauucguggaugagagaggucuguauaagucacuuaagggcgcuuguaaauugaagcugugcgggguccuaggacucaggcugauggacggcaccuggguugcaaugcagacgagcggugaaacuaaauggugucccccugaucaacuugugaaccugcacgacuuucggagugacgagaucgagcauuugguaguggaggaacucgucaagaaacgcgaagagugccuggaugccuuagaaucuauuaugacaaccaaguccgugagcuuccgaagacugucgcaccucaggaaacuuguuccaggguuuggaaaggcuuacacuaucuucaauaagacacugauggaggccgacgcgcauuauaaaucugugcggaccuggaacgagauaauucccuccaagggcugcuugcgugucggcgggcgcugucacccgcacgugaauggaguauucuuuaacgguaucauucuaggcccugaugggcauguucugauccccgaaaugcagucaagucuccugcagcagcacauggagcuucuggaaagcuccgugaucccauugaugcauccucucgcagaccccucuacggucuucaaagauggagacgaggccgaagauuuuguggagguccaucugccagacgugcacaagcaaguuagcggcguggauuuaggucugcccaauugggggaaauacauucuacucucagcuggcgcccugauagcacuuauguugaugaucuuccugaugaccugcuguagaaaguuuaacaggccugagaguacacagcggucccucggaggcacugggcgaaagguaagcauuaccucucagggagguaaagucaucucaaguugggaaagcuauaaguccggcggggagacacgccuguga

SEQ ID NO: 159514 - RNA, 1575 nt, Artificial Sequence
  derived and/or modified CDS sequence (opt3) from glycoprotein__RABV__KC737850.1
auggugccccaggcccuccuguucgucccucuucuggcuguuagcuuuugcuucggcaaguuuccaaucuacaccauuccggacaaauuggggcccugguccccuauagauauccaccauuuaucuuguccaaacaaucuggugguagaggacgaaggaugcacaaaccuaucagguuucaguuauauggagcucaaggugggcuacauuagcgcaaucaaagucaauggguuuacuuguacgggagugguuaccgaagccgagacauauacuaacuucgugggcuacgucaccacaaccuuuaagagaaaacacuucaggcccacuccugaugcgugccgguccgcuuauaauuggaagauggccggugacccacgcuacgaagagucucugcauaaccccuauccugauuaccacuggcuucgaacagugaagaccacgaaagagucgcugguaauuaucucaccaagcguugcagacuuggauccguacgacaagagucuccauucccguguguuucccucugggaaauguagcggaauaacugucuccucaaccuauugcaguacaaaucacgauuacacuaucuggcugccugaaaacccaagacugggcaccagcugugacauuuucacaaauucuaggggcaagcgggccuccaaagggucaaagaccugcggauuuguggaugagcgcggucucuauaagagcuuaaaaggcgcuuguaagcugaaacuuugcgggguguugggacugagacuaauggacggcacgugggucgcaaugcaaacaagugaugaaacuaaguggugucccccugaccagcucguuaaccugcacgacuucaggucugaugagaucgagcaucuugugguagaggaacuggugaaaaagcgggaagagugcuuggacgcccucgaauccauuaugaccacuaaaagcgucucguuucgccgacugucucacuuaagaaagcuggugccagguuucgggaaggcuuacacaaucuucaauaaaacccucauggaggccgaugcgcauuauaaguccguuaggacguggaacgagauaauucccucaaaaggaugccuucgggugggcggccguugucacccgcacgucaaugggguguuuuucaacggaaucauucuggguccugacggccauguauugauccccgaaaugcagaguagccuacugcagcaacacauggagcuccuggaauccucuguuaucccacuuaugcauccucuggcagaucccagcaccguguuuaaggacggggaugaggccgaagacuucgucgaggugcacuugccagauguccauaaacaggugucaggaguugaccucggccugcccaauugggguaaguacguguuaacaagugcugggguacugauugcccuaaugcucauaaucuuucugaugacuugcugucgcagagucaacagguccgauagcacccagcggucucuuggccgaacaggacgcaaggugucaguuaccagucagagcggcaaagugauuuccucuugggagucguauaagagcgggggagaaacuagauuguga

SEQ ID NO: 159515 - RNA, 1575 nt, Artificial Sequence
  derived and/or modified CDS sequence (opt3) from glycoprotein__RABV__KC762941.1
augauccugcagauucuccuuuucgugccccuguuggucuuuagcuccugcuucggcaaguuuccuauauacaccaucccagacaaauuagggccguggucucccauugauauccaccaucugucauguccuaacaaucuaguuguggaggacgaaggaugcacaaaccucagugguuucagcuauauggagcugaagguaggcuacauuuccgccaucaaagugaauggguuuacuuguacgggagucgugaccgaagcugagacauauacuaacuucguuggcuacgugaccacaaccuuuaagagaaaacacuuccauccaaugcccgaugcaugcagggccgcguauaauuggaagauggcuggugacccucgguacgaagagucucuucacaacccauaucccgauuaccauuggcugcgcacugucaagacaaccaaagagucguuggugauaaucucaccuagcguagccgaccucgauccauacgacaagagucugcacucccgaguuuuucccgggggaaaauguucuggcauuacggugagcuccacuugcuguucaaccaaucacgauuauacaaucuggaugccggaaaacccucgucugggcaccaguugcgacauuuucacuaauagcagagggaagagggcaucuaaaggagguaagacauguggcuuugucgaugagcgggggcucuacaaguccuuaaaaggagccugcaagaugaaacuguguggcgugcuugguuugcgccugauggacgggaccuggguggcuauccaaacgucagaugaagucaaguggugcagcccagaccagcuaguuaaccuccaugacuuccacagugaugagauagagcaucuggugguagaggaacuugugaaaaagagagaagagugccuggacgcauuggaaacuauuaugacaaccaaaucugucuccuuuaggcggcucagccaucugcgcaaguuagugcccggauucggcaaggccuauacuaucuucaauaaaacacugauggaggcugaugcccacuacaagucgauucagaccuggaacgagaucaucccuucuaaaggcugucuccgaguugggggaagaugccacccacacgugaauggugucuuuuucaacggcauuauacuugggcccgacggacaugugcugaucccggaaaugcaguccucauugcuacaccaacauauggagcugcucgaaaguagcguaauuccucugaugcacccccuugcggauccauccacgguuuuuaaggacggcgaugaggcagaagacuucguggagguccaucugccugaggugcacaaacagaucucuggugucgauuuggggcuccccaauuggggcaaguaugugcugauaagcgccggagcuuuaaccgcccugaugcuaaugauuuuucucaugacauguugcaggaagacuaaccggccagaaucaauccagcacagucccggcgagaccgaacguaaaguuuccgugacaagccauaacgggcgcguaaucucuucaugggagaguuacaagagcggaggugaaacuaaacuguga

SEQ ID NO: 159516 - RNA, 1575 nt, Artificial Sequence
  derived and/or modified CDS sequence (opt3) from glycoprotein__RABV__KC792172.1
auggugccccaggcccuucucuucgucccucuucuggcuuuuccaaugugcuucggcaaguuuccgaucuacaccauucccgacaaauuggggccuuggagcccaauagauauccaccauuuauccugucccaacaaucugguuguggaggacgaaggaugcacaaaccuaucugguuucucauauauggagcucaagguaggcuacauuagugcaaucaaagugaauggguuuacuuguacgggagucgugaccgaagccgagacauauacuaacuucguuggcuacgugaccacaaccuuuaagagaaaacacuucaggccuacuccagaugcgugccgggcugccuauaauuggaagauggccggugacccccgcuacgaagagagccugcauaacccuuauccagauuaccacuggcuucgaacagucaagaccacgaaagagucccugauuaucauaucuccgucgguggcagacuuggaucccuacgacaagucacuccauagccguguauuuccuagugggaaaugucugggaaucacuauuuccucuaccuauugcagcacaaaucacgauuacacuaucuggaugccagaaaacguuagacugggcaccuccugugacauuuucacaaauucaaggggcaagaaagcuaguaaggggagcaagaccugcggauuuguggaugagcggggucucuauaaaucuuuaaagggcgcauguaaacugaagcugugcggggucuugggacugcgccuaauggacggcacguggguggccaugcccacuuccgaugaaacaaaaugguguccuccagaccaacucgugaaccugcacgacuucagaucagaugagaucgagcaucuugucguugaggaacuggugaggaagcgggaagagugcuuggacgcucucgaaagcauaaugaccacuaaaaguguaucuuuucgccgacugucccacuuaagaaagcuggugcccgguuucgggaaggccuacacaauuuucaauaaaacccucauggaggcggaugcacauuauaagagcgucaggacguggaacgagaucauuccgucgaaaggaugccuucgggugggcggccguugucacccucacguuaaugggguguuuuucaacggaaucauccugggucccgacggccaugucuugauuccagaaaugcagucuucccuacugcagcagcacauggagcuccuggaaucaagugugauaccucuuaugcauccccuggccgauccaagcaccguauuuaaggacggggaugaggcugaagacuucguugaggugcacuugcccgauguccauaaacaaaucuccggaguggaccucggccugccuaauugggguaaguacgucuuaauuaucgccggggugcugauagcaaugauucuaacaaucuuucucaugacuugcuguggccgcggaaacagaccaaagucuacccagcacagccugggcgggaucggaaggaaaguuucaaguacaucccagagcgguaaggugauuucuucaugggagaguuauaaaagcggcggggaaacucggcuuuga

SEQ ID NO: 159517 - RNA, 1575 nt, Artificial Sequence
  derived and/or modified CDS sequence (opt3) from glycoprotein__RABV__KC792173.1
auggugccccaggcccuucucuucgucccucuucuggcuuuuccaaugugcuucggcaaguuuccgaucuacaccauucccgacaaauuggggccuuggagcccaauagauauccaccauuuauccugucccaacaaucugguuguggaggacgaaggaugcacaaaccuaucugguuucucauauauggagcucaagguaggcuacauuagugcaaucaaagugaauggguuuacuuguacgggagucgugaccgaagccgagacauauacuaacuucguuggcuacgugaccacaaccuuuaagagaaaacacuucaggccuacuccagaugcgugccgggcugccuauaauuggaagauggccggugacccccgcuacgaagagagccugcauaacccuuauccagauuaccacuggcuucgaacagucaagaccacgaaagagucccugauuaucauaucuccgucgguggcagacuuggaucccuacgacaagucacuccauagccguguauuuccuagugggaaaugucugggaaucacuauuuccucuaccuauugcagcacaaaucacgauuacacuaucuggaugccagaaaaccugagacucggcaccuccugugacauuuucacaaauucaaggggcaagcgggcuaguaaagggagcaagaccugcggauuuguugaugagcgcgguuuauauaagucucugaaaggcuccuguaagcugaaauugugcggggugcugggacuaagacucauggacggcacgugggucgcaaugcaaacuucagaugaaacaaaguggugucccccugaccagcuggugaaccuucacgacuucaggagcgaugagaucgagcaucugguggucgaagaguugguuaaaaagcgggaagagugccucgacgcccuggaaaguauaaugaccacuaaaucuguguccuuucgccgauuaagccaccugagaaagcucguaccagguuucgggaaggcuuacacaauuuucaauaaaacccuuauggaggccgaugcgcauuauaagucggugaggacguggaacgagaucauucccucuaaaggaugccugcgggucggcggccguugucacccgcacgugaaugggguguuuuucaacggaaucaucuuggguccugacggccauguucuaauucccgaaaugcaguccucacugcuccagcaacacauggagcugcuugaaaguagcgucauaccacugaugcauccuuuggcagaucccuccaccguguuuaaggacggggaugaggccgaagacuucguagagguucaccucccagaugugcauaaacagaucucuggagucgaccugggcuuacccaauugggguaaguacgugcugauuaucgcugggguccuaauagccaugauucucacaauccugcuuaugacuugcuguggccgcggaaacagaccuaagagcacccagcacucauugggcgggaucggaaggaaagugagugcaacaucccagagcgguaagguuauuucuucaugggagaguuauaaaagcggcggggaaacucggcuguga

SEQ ID NO: 159518 - RNA, 1575 nt, Artificial Sequence
  derived and/or modified CDS sequence (opt3) from glycoprotein__RABV__KC792174.1
auggugccccaggcccuucucuucgucccucuucuggcuuuuccaaugugcuucggcaaguuuccgaucuacaccauucccgacaaauuggggccuuggagcccaauagauauccaccauuuauccugucccaacaaucugguuguggaggacgaaggaugcacaaaccuaucugguuucucauauauggagcucaagguaggcuacauuagugcaaucaaagugaauggguuuacuuguacgggagucgugaccgaagccgagacauauacuaacuucguuggcuacgugaccacaaccuuuaagagaaaacacuucaggccuacuccagaugcgugccgggcugccuauaauuggaagauggccggugacccccgcuacgaagagagccugcauaacccuuauccagauuaccacuggcuucgaacagucaagaccacgaaagagucccugauuaucauaucuccgucgguggcagacuuggaucccuacgacaagucacuccauagccguguauuuccuagugggaaaugucugggaaucacuauuuccucuaccuauugcagcacaaaucacgauuacacuaucuggaugccagaaaaccugagacucggcaccuccugugacauuuucacaaauucaaggggcaagcgggcuaguaaagggagcaagaccugcggauuuguugaugagcgcgguuuauauaagucucugaaaggcuccuguaagcugaaauugugcggggugcugggacuaagacucauggacggcacgugggucgcaaugcaaacuucagaugaaacaaaguggugucccccugaccagcuggugaaccuucacgacuucaggagcgaugagaucgagcaucugguggucgaagaguugguucggaaacgcgaagagugccucgacgcccuggaaaguauaaugaccacuaagucuguguccuuucgaagauuaagccaccugaggaaacucguaccagguuucgggaaggcuuacacaauuuucaauaagacccuuauggaggccgaugcgcauuauaaaucggugcggacguggaacgagaucauucccucuaagggaugccugcgugucggcggccgcugucacccgcacgugaaugggguguuuuucaacggaaucaucuuggguccugacggccauguucuaauucccgaaaugcaguccucacugcuccagcaacacauggagcugcuugaaaguagcgucauaccacugaugcauccuuuggcagaucccuccaccguguuuaaagacggggaugaggccgaagacuucguagagguucaccucccagaugugcauaagcagaucucuggagucgaccugggcuuacccaauugggguaaauacgugcugauuaucgcugggguccuaauagccaugauucucacaaucuuucugaugacuugcuguggcagaggaaacaggccuaagagcacccagcacucacuuggcgggaucggacggaaggugagugcaacaucccagagcgguaaaguuauuucuucaugggagaguuauaagagcggcggggaaacucgauuguga

SEQ ID NO: 159519 - RNA, 1575 nt, Artificial Sequence
  derived and/or modified CDS sequence (opt3) from glycoprotein__RABV__KC792175.1
auggugccccaggcccuucucuucgucccucuucuggcuuuuccaaugugcuucggcaaguuuccgaucuacaccauucccgacaaauuggggccuuggagcccaauagauauccaccauuuauccugucccaacaaucugguuguggaggacgaaggaugcacaaaccuaucugguuucucauauauggagcucaagguaggcuacauuagugcaaucaaagugaauggguuuacuuguacgggagucgugaccgaagccgagacauauacuaacuucguuggcuacgugaccacaaccuuuaagagaaaacacuucaggccuacuccagaugcgugccgggcugccuauaauuggaagauggccggugacccccgcuacgaagagagccugcauaacccuuauccagauuaccacuggcuucgaacagucaagaccacgaaagagucccugauuaucauaucuccgucgguggcagacuuggaucccuacgacaagucacuccauagccguguauuuccuagugggaaaugucugggaaucacuauuuccucuaccuauugcagcacaaaucacgauuacacuaucuggaugccagaaaaccugagacucggcaccuccugugacauuuucacaaauucaaggggcaagcgggcuaguaaagggagcaagaccugcggauuuguugaugagcgcgguuuauauaagucucugaaaggcuccuguaagcugaaauugugcggggugcugggacuaagacucauggacggcacgugggucgcaaugcaaacuucagaugaaacaaaguggugucccccugaccagcuggugaaccuucacgacuucaggagcgaugagaucgagcaucugguggucgaagaguugguuaaaaagcgggaagagugccucgacgcccuggaaaguauaaugaccacuaaaucuguguccuuucgccgauuaagccaccugagaaagcucguaccagguuucgggaaggcuuacacaauuuucaauaaaacccuuauggaggccgaugcgcauuauaagucggugaggacguggaacgagaucauucccucuaaaggaugccugcgggucggcggccguugucacccgcacgugaaugggguguuuuucaacggaaucaucuuggguccugacggccauguucuaauucccgaaaugcaguccucacugcuccagcaacacauggagcugcuugaaaguagcgucauaccacugaugcauccuuuggcagaucccuccaccguguuuaaggacggggaugaggccgaagacuucguagagguucaccucccagaugugcauaaacagaucucuggagucgaccugggcuuacccaauugggguaaguacgugcugauuaucgcugggguccuaauagccaugauucucacaaucuuucugaugacuugcugucgcagaggcaacaggccuaagagcacccagcacucacuuggaggcaucgggcggaaagugagugcaacaucccagagcggaaagguuauuucuucaugggagaguuauaaaagcgguggcgaaacucgauuguga

SEQ ID NO: 159520 - RNA, 1575 nt, Artificial Sequence
  derived and/or modified CDS sequence (opt3) from glycoprotein__RABV__KC792176.1
auggugccccaggcccuucucuucgucccucuucuggcuuuuccaaugugcuucggcaaguuuccgaucuacaccauucccgacaaauuggggccuuggagcccaauagauauccaccauuuauccugucccaacaaucugguuguggaggacgaaggaugcacaaaccuaucugguuucucauauauggagcucaagguaggcuacauuagugcaaucaaagugaauggguuuacuuguacgggagucgugaccgaagccgagacauauacuaacuucguuggcuacgugaccacaaccuuuaagagaaaacacuucaggccuacuccagaugcgugccgggcugccuauaauuggaagauggccggugacccccgcuacgaagagagccugcauaacccuuauccagauuaccacuggcuucgaacagucaagaccacgaaagagucccugauuaucauaucuccgucgguggcagacuuggaucccuacgacaagucacuccauagcaaaguauuuccuagugggaagugucugggaaucacuauuuccucuaccuauugcagcacaaaucacgauuacacuaucuggaugccagaaaacguucgucugggcaccuccugugacauuuucacaaauucaagaggcaaaagggcuaguaaggggagcaagaccugcggauuuguggaugagcggggucucuauaaaucuuuaaagggcgcauguaaacugaagcugugcggggucuugggacugcgccuaauggacggcacguggguggccaugcccacuuccgaugaaacaaaaugguguccuccagaccaacucgugaaccugcacgacuucagaucagaugagaucgagcauauagucguugaggaacuugugaggaagcgggaagagugccuggacgcuuuggaaagcauuaugaccacuaaaaguguaucuuuucgccgacucucccaccugagaaaguuagugcccgguuucgggaaggccuacacaaucuucaauaaaacccugauggaggcggaugcacauuauaagagcgucaggacguggaacgagauuaucccgucgaaaggaugccuccgggugggcggccguugucacccucacguuaaugggguguuuuucaacggaaucauucuuggucccgacggccauguccugauaccagaaaugcagucuuccuugcuacagcagcacauggagcugcucgaaucaagugugaucccucugaugcauccccuugccgauccaagcaccguauuuaaggacggggaugaggcugaagacuucguugaggugcaucugcccgauguccacaaacaaauuuccggaguggacuugggccucccuaauugggguaaguacguccugaucauagccgggguguuaauugcaaugauccugacaaucuuucuaaugacuugcuguggccgcggaaacagaccaaagucuacccagcacagccucggcgggauuggaaggaaaguuucaaguacaucccagagcgguaaggugaucucuucaugggagaguuauaaaagcggcggggaaacucggcuguga

SEQ ID NO: 159521 - RNA, 1575 nt, Artificial Sequence
  derived and/or modified CDS sequence (opt3) from glycoprotein__RABV__KC792177.1
auggugccccaggcccuccuguucgucccucuucuggcuuuuccaaugugcuucggcaaguuuccgaucuacaccauucccgacaaauuggggccuuggagcccaauagauauccaccauuuauccugucccaacaaucugguuguggaggacgaaggaugcacaaaccuaucugguuucucauauauggagcucaagguaggcuacauuagugcaaucaaagugaauggguuuacuuguacgggagucgugaccgaagccgagacauauacuaacuucguuggcuacgugaccacaaccuuuaagagaaaacacuucaggccuacuccagaugcgugccgggcugccuauaauuggaagauggccggugacccccgcuacgaagagagccugcauaacccuuauccagauuaccacuggcuucgaacagucaagaccacgaaagagucccugauuaucauaucuccgucgguggcagacuuggaucccuacgacaagucacuccauagccguguauuuccuagugggaaaugucugggaaucacuauuuccucuaccuauugcagcacaaaucacgauuacacuaucuggaugccagaaaacguuagacugggcaccuccugugacauuuucacaaauucaaggggcaagcgggcuaguaaagggagcaagaccugcggauuuguggaugagcgcggucucuauaagucuuuaaaaggcgcauguaagcugaaacuuugcggggucuugggacugagacuaauggacggcacguggguggccaugcccacuuccgaugaaacaaagugguguccuccagaccaacucgugaaccugcacgacuucaggucagaugagaucgagcaucuugucguugaggaacuggugcggaaacgcgaagagugcuuggacgcucucgaaagcauaaugaccacuaagaguguaucuuuucgaagacugucccacuuaaggaaacuggugcccgguuucgggaaggccuacacaauuuucaauaagacccucauggaggcggaugcacauuauaaaagcguccggacguggaacgagaucauuccgucgaagggaugccuucgugugggcggccgcugucacccucacguuaaugggguguuuuucaacggaaucauccugggucccgacggccaugucuugauuccagaaaugcagucuucccuacugcagcagcacauggagcuccuggaaucaagugugauaccucuuaugcauccccuggccgauccaagcaccguauuuaaagacggggaugaggcugaagacuucguugaggugcacuugcccgauguccauaagcaaaucuccggaguggaccucggccugccuaauugggguaaauacgucuuaauuaucgccggggugcugauagcaaugauucuaacaaucuuucucaugacuugcuguggcagaggaaaccagccaaggucuacccagcacagccugggcgggaucggacggaagguuucaaguacaucccagagcgguaaggugauuucuucaugggagaguuauaaaagcggcggggaaacucgacuuuga

SEQ ID NO: 159522 - RNA, 1575 nt, Artificial Sequence
  derived and/or modified CDS sequence (opt3) from glycoprotein__RABV__KC792178.1
auggugccccaggcccuccuguucgucccucuucuggcuuuuccaaugugcuucggcaaguuuccgaucuacaccauucccgacaaauuggggccuuggagcccaauagauauccaccauuuauccugucccaacaaucugguuguggaggacgaaggaugcacaaaccuaucugguuucucauauauggagcucaagguaggcuacauuagugcaaucaaagugaauggguuuacuuguacgggagucgugaccgaagccgagacauauacuaacuucguuggcuacgugaccacaaccuuuaagagaaaacacuucaggccuacuccagaugcgugccgggcugccuauaauuggaagauggccggugacccccgcuacgaagagagccugcauaacccuuauccagauuaccacuggcuucgaacagucaagaccacgaaagagucccugauuaucauaucuccgucgguggcagacuuggaucccuacgacaagucacuccauagccguguauuuccuagugggaaaugucugggaaucacuauuuccucuaccuauugcagcacaaaucacgauuacacuaucuggaugccagaaaacguuagacugggcaccuccugugacauuuucacaaauucaaggggcaagcgggcuaguaaagggagcaagaccugcggauuuguggaugagcgcggucucuauaagucuuuaaaaggcgcauguaagcugaaacuuugcggggucuugggacugagacuaauggacggcacguggguggccaugcccacuuccgaugaaacaaagugguguccuccagaccaacucgugaaccugcacgacuucaggucagaugagaucgagcaucuugucguugaggaacuggugcggaaacgcgaagagugcuuggacgcucucgaaagcauaaugaccacuaagaguguaucuuuucgaagacugucccacuuaaggaaacuggugcccgguuucgggaaggccuacacaauuuucaauaagacccucauggaggcggaugcacauuauaaaagcguccggacguggaacgagaucauuccgucgaagggaugccuucgugugggcggccgcugucacccucacguuaaugggguguuuuucaacggaaucauccugggucccgacggccaugucuugauuccagaaaugcagucuucccuacugcagcagcacauggagcuccuggaaucaagugugauaccucuuaugcauccccuggccgauccaagcaccguauuuaaagacggggaugaggcugaagacuucguugaggugcacuugcccgauguccauaagcaaaucuccggaguggaccucggccugccuaauugggguaaauacgucuuaauuaucgccggggugcugauagcaaugauucuaacaaucuuucucaugacuugcuguggcagaggaaacaggccaaagucuacccagcacagccugggcgggaucggacggaagguuucaaguacaucccagagcgguaaagugauuucuucaugggagaguuauaagagcggcggggaaacucgacuuuga

SEQ ID NO: 159523 - RNA, 1575 nt, Artificial Sequence
  derived and/or modified CDS sequence (opt3) from glycoprotein__RABV__KC792179.1
auggugccccaggcccugcucuuugucccucuucuggcuuuuccaaugugcuucggcaaguuuccgaucuacaccauucccgacaaauuggggccuuggagcccaauagauauccaccauuuauccugucccaacaaucugguuguggaggacgaaggaugcacaaaccuaucugguuucucauauauggagcucaagguaggcuacauuagugcaaucaaagugaauggguuuacuuguacgggagucgugaccgaagccgagacauauacuaacuucguuggcuacgugaccacaaccuuuagaaggaagcacuuccggccuacuccagaugcgugccgcgcugccuauaauuggaaaauugccggugacccccgauacgaagagagccugcauaacccuuauccagauuaccacuggcuucguacagucaagaccacgaaggagucccugaucauaaucucuccgucgguggcagacuuggaucccuacgacaaaucacuccauagcagaguauuuccuagugggaagugucugggaauuacuaucuccucuaccuauugcagcacaaaucacgauuacacuauuuggaugccagaaaaccugaggcucggcaccuccugugacaucuucacaaauucacggggcaaacgcgcuaguaaggggagcagaaccugcggauuuguugaugagagggguuuauauaaaucucugaagggcgcauguaagcugaaauugugcggggugcugggacuacggcucauggacggcacgugggucgccaugcaaacuuccgaugaaacaaaguggugucccccugaccagcuggugaaccuucacgacuuccgcucagaugagauagagcaucugguggucgaagaguugguuaaaaagcgagaagagugccucgacgcucuggaaagcauuaugaccacuaaaagugugucuuuuagaagguuaucccaccuucggaagcucguaccagguuucgggaaagccuacacaaucuucaauaagacccuuauggaggcggaugcacauuauaagagcgugcguacguggaacgagauuauccccucgaaaggaugccugcgcgucggcggcagaugucacccgcacgugaaugggguuuucuucaacggaaucauuuuggguccugacggccaugugcuaauacccgaaaugcagucuucccugcuccagcaacacauggagcugcuugaaucaagugucaucccacugaugcauccuuuggccgaucccagcaccguguuuaaggacggggaugaggcugaagacuucguagagguucaccucccagaugugcauaaacagauuuccggagucgaccugggcuuacccaauugggguaaguacgugcugaucauagccgggguccuaauugcaaugauccucacaaucuuucugaugacuugcuguggcaggggaaaccggccuaaaucuacccagcacagccuuggcgggauuggacgaaaggugucagcuacaagucaguccgguaagguuaucagcucuugggagucauauaaaaacggcggggaaacucgcuuguga

SEQ ID NO: 159524 - RNA, 1575 nt, Artificial Sequence; identical to SEQ ID NO: 159520
  derived and/or modified CDS sequence (opt3) from glycoprotein__RABV__KC792180.1

SEQ ID NO: 159525 - RNA, 1575 nt, Artificial Sequence; identical to SEQ ID NO: 159522
  derived and/or modified CDS sequence (opt3) from glycoprotein__RABV__KC792181.1

SEQ ID NO: 159526 - RNA, 1575 nt, Artificial Sequence; identical to SEQ ID NO: 159523
  derived and/or modified CDS sequence (opt3) from glycoprotein__RABV__KC792182.1

SEQ ID NO: 159527 - RNA, 1575 nt, Artificial Sequence; identical to SEQ ID NO: 159522
  derived and/or modified CDS sequence (opt3) from glycoprotein__RABV__KC792183.1

SEQ ID NO: 159528 - RNA, 1575 nt, Artificial Sequence; identical to SEQ ID NO: 159517
  derived and/or modified CDS sequence (opt3) from glycoprotein__RABV__KC792184.1

SEQ ID NO: 159529 - RNA, 1575 nt, Artificial Sequence
  derived and/or modified CDS sequence (opt3) from glycoprotein__RABV__KC792185.1
auggugccccaggcccuucucuucgucccucuucuggcuuuuccaaugugcuucggcaaguuuccgaucuacaccauucccgacaaauuggggccuuggagcccaauagauauccaccauuuauccugucccaacaaucugguuguggaggacgaaggaugcacaaaccuaucugguuucucauauauggagcucaagguaggcuacauuagugcaaucaaagugaauggguuuacuuguacgggagucgugaccgaagccgagacauauacuaacuucguuggcuacgugaccacaaccuuuaagagaaaacacuucaggccuacuccagaugcgugccgggcugccuauaauuggaagauggccggugacccccgcuacgaagagagccugcauaacccuuauccagauuaccacuggcuucgaacagucaagaccacgaaagagucccugauuaucauaucuccgucgguggcagacuuggaucccuacgacaagucacuccauagccguguauuuccuagugggaaaugucugggaaucacuauuuccucuaccuauugcagcacaaaucacgauuacacuaucuggaugccagaaaaccugagacucggcaccuccugugacauuuucacaaauucaaggggcaagcgggcuaguaaagggagcaagaccugcggauuuguugaugagcgcgguuuauauaagucucugaaaggcuccuguaagcugaaauugugcggggugcugggacuaagacucauggacggcacgugggucgcaaugcaaacuucagaugaaacaaaguggugucccccugaccagcuggugaaccuucacgacuucaggagcgaugagaucgagcaucugguggucgaagaguugguuaaaaagcgggaagagugccucgacgcccuggaaaguauaaugaccacuaaaucuguguccuuucgccgauuaagccaccugagaaagcucguaccagguuucgggaaggcuuacacaauuuucaauaaaacccuuauggaggccgaugcgcauuauaagucggugaggacguggaacgagaucauucccucuaaaggaugccugcgggucggcggccguugucacccgcacgugaaugggguguuuuucaacggaaucaucuuggguccugacggccauguucuaauucccgaaaugcaguccucacugcuccagcaacacauggagcugcuugaaaguagcgucauaccacugaugcauccuuuggcagaucccuccaccguguuuaaggacggggaugaggccgaagacuucguagagguucaccucccagaugugcauaaacagaucucuggagucgaccugggcuuacccaauugggguaaguacgugcugauuaucgcugggguccuaauagccaugauucucacaaucuuucugaugacuugcuguggccgcggaaacagaccuaagagcacccagcacucacuuggcgggaucggaaggaaagugagugcaacaucccagagcgguaagguuauuucuucaugggagaguuauaaaagcggcggggaaacucgguuguga

SEQ ID NO: 159530 - RNA, 1575 nt, Artificial Sequence; identical to SEQ ID NO: 159522
  derived and/or modified CDS sequence (opt3) from glycoprotein__RABV__KC792186.1

SEQ ID NO: 159531 - RNA, 1575 nt, Artificial Sequence; identical to SEQ ID NO: 159523
  derived and/or modified CDS sequence (opt3) from glycoprotein__RABV__KC792187.1

SEQ ID NO: 159532 - RNA, 1575 nt, Artificial Sequence
  derived and/or modified CDS sequence (opt3) from glycoprotein__RABV__KC792188.1
auggugccccaggcccuccuguucgucccucuucuggcuuuuccaaugugcuucggcaaguuuccgaucuacaccauucccgacaaauuggggccuuggagcccaauagauauccaccauuuauccugucccaacaaucugguuguggaggacgaaggaugcacaaaccuaucugguuucucauauauggagcucaagguaggcuacauuagugcaaucaaagugaauggguuuacuuguacgggagucgugaccgaagccgagacauauacuaacuucguuggcuacgugaccacaaccuuuaagagaaaacacuucaggccuacuccagaugcgugccgggcugccuauaauuggaagauggccggugacccccgcuacgaagagagccugcauaacccuuauccagauuaccacuggcuucgaacagucaagaccacgaaagagucccugauuaucauaucuccgucgguggcagacuuggaucccuacgacaagucacuccauagccguguauuuccuagugggaaaugucugggaaucacuauuuccucuaccuauugcagcacaaaucacgauuacacuaucuggaugccagaaaacguuagacugggcaccuccugugacauuuucacaaauucaaggggcaagcgggcuaguaaagggagcaagaccugcggauuuguggaugagcgcggucucuauaagucuuuaaaaggcgcauguaagcugaaacuuugcggggucuugggacugagacuaauggacggcacguggguggccaugcccacuuccgaugaaacaaagugguguccuccagaccaacucgugaaccugcacgacuucaggucagaugagaucgagcaucuugucguugaggaacuggugcggaaacgcgaagagugcuuggacgcucucgaaagcauaaugaccacuaagaguguaucuuuucgaagacugucccacuuaaggaaacuggugcccgguuucgggaaggccuacacaauuuucaauaagacccucauggaggcggaugcacauuauaaaagcguccggacguggucggagaucauuccgucuaagggaugccuucgugugggcggccgcugucacccucacguuaacgggguguuuuucaauggaaucauccugggucccgacggccaugucuugauuccagaaaugcaguccucacuacugcagcagcacauggagcuccuggaaaguagcgugauaccucuuaugcauccccuggccgauccauccaccguauuuaaagacggggaugaggcugaagacuucguugaggugcacuugcccgauguccauaagcaaaucucuggaguggaccucggccugccuaacugggguaaauacgucuuaauuaucgccggggugcugauagcaaugauucuaacaaucuuucucaugacuugcuguggcagaggaaauaggccaaagagcacccagcacucacugggcgggaucggacggaagguuaguuccacaagccagucugguaaagugauuucaaguugggagagcuauaaguccggcggggaaacucgacuuuga

SEQ ID NO: 159533 - RNA, 1575 nt, Artificial Sequence
  derived and/or modified CDS sequence (opt3) from glycoprotein__RABV__KC977995.1
augaucccccaggugcugcuguucgucccucuucugguuuuuagcuccugcuucggcaaguuuccaauuuacaccauaccggacaaauuggggcccuggucuccuaucgauauucaccauuuaucauguccaaacaaucuggugguagaggacgaaggaugcacaaaccuaagugguuucagcuauauggagcucaaggugggcuacaucuccgccauuaaagucaauggguuuacuuguacgggagugguuaccgaagcugagacauauacuaacuucgugggcuacgucaccacaaccuuuaagagaaaacacuucaggcccaugccugaugcaugccgggccgcguauaauuggaagauggcuggugacccacgcuacgaagagucucugcauaaccccuauccugauuaccacuggcuucgaacugugaagacaaccaaagagucgcugguaaucauaucaccaagcguugccgacuuggauccguacgacaagagucuccauucccguguguuucccgggggaaaauguucuggcaucacggucagcuccacuugcuguucaaccaaucacgauuauacaauuuggaugccugaaaacccaagacugggcaccaguugcgacaucuucacuaauagcagggggaagcgggcaucuaaaggagguaagacauguggcuuuguggaugagcgcgggcuguacaagucccucagaggagccugcaaauuaaagcuguguggcgugcuugguuugaggcugauggacgggaccugggucgcuauucaaacgucagaugaaaucaaauggugcagccccgaccagcuaguuaaccuccacgacuuccauagugaugagauagagcaccuggugguagaggaacuugugaagaaacgggaagagugccuggacgcauuggaaacuauuaugacaaccaagucugucuccuuucgccgacucagccaucugagaaaauuagugccuggauucggcaaggccuauacuaucuucaauaagacacugauggaggcugaugcccacuacaaaucgauuaggaccuggaacgagaucaucccaucuaagggcugucuccggguugggggacguugccacccccaugugaauggugucuuuuucaacggcauuauacuugggccggacggacacgugcugaucccugaaaugcaguccucauugcuacaucagcacauggagcugcucgaaaguagcguaauuccccugaugcauccacuugcggauccuuccacgguuuuuaaagacggcgaugaggcagaagacuucguggagguccaccuccccgaugugcacaagcaaaucucuggugucgacuuggggcucccaaauuggggcaaauaugugcugauaagcgccggagcuuuaaccgcccugaugcuaaugauuuuucucaugacauguugccgcaagacuaacagagcagagucaauccagcauagucccggcgaaaccgggaggaagguuuccgugacaagccacaacggacggguaacuucuucaugggagaguuacaaaagcgguuccgaaaccaagcuguga

SEQ ID NO: 159534 - RNA, 1575 nt, Artificial Sequence
  derived and/or modified CDS sequence (opt3) from glycoprotein__RABV__KF154996.1
auggugccccagguccugcuguucguuccucuucugguguuuagcaugugcuucggcaaguuuccaaucuacaccauuccggacaaauuggggcccugguccccuauagauauccaccauuuaucuuguccaaacaaucugguaguggaggacgaaggaugcacaaaccuaucagguuucaguuauauggagcucaaggucggcuacacuagcgccauuaaagugaauggguuuacguguaccggaguugugacagaagcugagacuuauaccaacuucgucggcuacgugacaaccacuuuuaagagaaaacacuucaggcccacaccugaugcaugccgggccgcguauaauuggaagauggcuggugacccacgcuacgaagagucccugcauaaccccuauccugauuaccacuggcuucgaaccguaaagacgacuaaagagucucugguuaucauuucgccaucaguggccgacuuggauccguacgacaagagccuccauagucgugucuuucccuccgggaaauguucuggaaucaccauaagcuccacauauugcucaacuaaucacgauuacaccaucuggaugccugaaaacccaagacugggcacaaguugugacauuuucaccaauagcaggggcaagcgggcaucuaaagggggaaagacgugcgguuuuguggaugagcgcggccuguauaagucccucaaaggggccuguaaguuaaaacugugcggagugcuuggcuugagacugauggacgguacuugggucgcuaugcaaacaucagaugaaaccaaguggugucccccugaccagcuaguuaaccuccacgacuucaggagcgaugagaucgagcaucuggugguagaggaacuugugaaaaagcgggaagagugccuggacgcauuggaaaguauuaugacuacaaaaucugucuccuuucgccgacucagccaccugagaaaguuagugccaggguucggaaaggccuacaccaucuucaauaaaacgcugauggaggcugaugcccauuauaagucgguuaggaccuggaacgagauaauucccucuaaaggcugccuccgggugggcgggcguugucacccgcacgucaagggaguguuuuucaaugguaucauucuuggcccugacgggcauguacugauccccgaaaugcaguccucauugcuacagcaacacauggagcugcucgaaaguagcguuaucccacugaugcauccucuugcggaucccuccacaguguuuaaagacggagaugaggcagaagacuucgucgaggugcaucugccagauguccacaagcagauuucuggcguggacuugggucuccccagcugggggcgcuacguucuggugucagccggcguauuagucgugcugaugcuaacuauacucaucauuaccugcuguggaagaguucacaggccuaagaguacacagcacggccucgggggaacuggucggaaaguguccgucaccagccagucuggcaaggugaucucaaguugggagagcuauaaauccgggggagaaacacgacuuuga

SEQ ID NO: 159535 - RNA, 1575 nt, Artificial Sequence
  derived and/or modified CDS sequence (opt3) from glycoprotein__RABV__KF154997.1
auggugccccaggcccugcuccuugucccucuguugggcuucagcuuaugcuuugggaaguucccaaucuacaccauuccggacaaacugggacccugguccccuauagauauccaccaucuaucuuguccaaacaaucucguuguggaggacgaagguugcacaaaccugucaggcuuuaguuauauggagcuuaagguaggguacauuagcuccaucaaagugaauggauucacuuguacgggcgucgugaccgaagcugagacauauacuaacuuuguugguuacgugaccacaaccuucagaaggaagcacuuucggcccacuccugaugcaugccgcgccgcguauaauuggaaaauggcuggggacccacgauacgaagagucucugcauaaccccuauccugauuaccacugguugcguacagucaagaccacgaaggagucgcucgugauuaucucaccaagcguagccgaccuggauccguacgacaaaagucugcauuccagaguuuuccccucuggaaaguguagcggcauaacuguguccucaaccuauugcaguacaaaucacgauuacacuaucuggaugccugaaaaccucagguuaggcaccagcugugacauuuuuacaaauucucgggggaaacgcgcauccaagggaucaaaaaccugcgguuucgucgaugagagaggccuguauaagagccuuaagggggccuguaaauugaagcugugcggagugcuaggccucaggcugauggacgguacguggguggcuaugcaaacaagugaugaaacuaaaugguguccacccgaccagcuugucaaccugcacgacuuucggucugaugagaucgagcauuugguuguggaggaacucguaaagaaacgcgaagagugccuggacgcauuagaauccauuaugaccacuaagagcgugucguuccgaagacugucucaccucaggaaacuugucccuggguuuggaaaggccuacacaaucuucaauaagacccugauggaggcugaugcccauuauaaauccgugcggacguggaacgagguuauaccaucacguggcugcuugcgcgugggcgggagaugucacccccacgucaauggaguguucuuuaacgguauuauccuaggcccggacgggcauguacugauuccugaaaugcagaguagccuccugcagcaacacaucgagcuucuggaauccucuguuauccccuugaugcauccacucgcggauccuagcaccguguucaaggacggagaugaggcagaagacuuugucgaggugcaucugcccgauguccacaaacaggugucaggcguugacuuaggucugccaaauugggggaaguacgugcuacucagugccggcgcucugauugcccuuauguugauaguauuccugaucacaugcuguaggcgggucaaccgacccgaguccacucagcgcagccucagaggagcaggcaggaaagugucuauuaccucacagagugggaagguuaucagcuccugggaaucuuauaagucgggaggugagacacggcuguga

SEQ ID NO: 159536 - RNA, 1575 nt, Artificial Sequence
  derived and/or modified CDS sequence (opt3) from glycoprotein__RABV__KF154998.1
auggugccccaggcccugcucuuugucccucuucuggcuuuuagcuugugcuucggcaaguuuccaaucuacaccauuccggacaaauuagggcccugguccccuauagauauccaccaucugucuuguccaaacaaucuaguuguggaggacgaaggaugcacaaaccucucagaguucaguuauauggaacugaagauggguuacauuagcgcaaucaaaguaaauggcuuuacuuguacggggguggucaccgaggccgaaacauauacuaacuucgugggauacguuaccacaaccuuuaagagaaaacacuucaggcccacuccugaugcgugccgggcugccuauaauuggaagauggcaggcgacccacgcuacgaggagucccuucauaaccccuauccugauuaccacuggcugcgaacagugaagaccacgaaagaaucuuugauuaucauaucgccaucagucgccgaccucgauccguacgacaagagccugcauagucguguguuucccuccgguaaauguucugggaucacuguaagcuccaccuauugcucaacaaaucacgauuacacuauuuggaugccugagaacccaagacccggaaccaguugugacaucuucgcuagcucuaggggcaagcgggcauccaaaggcgggaagacaugcggauuuguugaugaacgcggucuguauaagucacucaaaggcgccuguaaguuaaaacugugcggggugcuuggauugagacugauggacggcaccugggucgcuaugcaaacgagcgaugagacuaagugguguccuccagaccagcuagugaaucuccacgacuucaggagugaugagauugaacaucugguggucgaggaacuuguuaaaaagcgggaggaaugccuggacgccuuggagucuaucaugacaaccaaauccgugagcuuucgccgacucucgcaccugagaaaguuaguacccgguuucgggaaggcguacacuauauucaacaaaacacugauggaggcagaugcccauuauaagucugugcagaccuggaaugaaauuaucccguccaaaggaugccucagggucggcgagcggugucacccucacgugaacggcguuuucuucaaugggauuauccuuggacccgacggucaugugcugaucccagaaaugcagucaaguuugcuacaacagcacauggagcugcucgaaagcuccgucauuccucugaugcauccccuugcugauccaucuacgguguuuaaggacggcgaugaggccgaggacuucguagaaguucaucugcccgaugugcacaaacaggucagcgggguggacuugggacucccuaacuggggcaaguacguccuggugucagcaggggcuuuaauagcccugaugcuaaucauuuuucucauaaccugcugucgucgcguuaauagaccagaguauacacagaggagucuggguggcacuggacggaagguguccguaaccagccaaucuggcaaagucaucucaaguugggaaagcuacaaguccgggggagagacacgacuuuga

SEQ ID NO: 159537 - RNA, 1575 nt, Artificial Sequence; identical to SEQ ID NO: 158805
  derived and/or modified CDS sequence (opt3) from glycoprotein__RABV__KF154999.1

SEQ ID NO: 159538 - RNA, 1575 nt, Artificial Sequence
  derived and/or modified CDS sequence (opt3) from glycoprotein__RABV__KF155000.1
auggugccccaggcccuccuguucgucccucuucugguuuuuagcuugugcuucggcaaguuuccaaucuacaccauuccggacaaauuagggcccugguccccuauagauauccaccaucugacauguccaaacaaucuagugguagaggacgaaggaugcacuaaccucucugguuucucauauauggagcugaaggugggcuacauuagugcuaucaaagucaauggguuuacguguaccggagugguuacagaagcagagacuuauaccaacuucgugggcuacgucacaaccacuuuuaagagaaaacacuucaggcccacaccugaugccugccgggcggcuuauaauuggaagauggccggugacccacgcuacgaagagagccuucauaaccccuauccugauuaccacuggcugcgaaccgugaagacgacuaaagaguccuugguaauuaucucuccaucgguugcaaaucucgacccguacgauaagucacugcauagccguguguuucccagugggaaauguuccggaauaaccgucucuagcacauauugcuccacuaaccacgacuacaccaucuggaugccugaaaauccaagacugggcacaucaugugauauuuucaccaacaguaggggcaagcgggccagcaaagggucuaagacgugcggauuuguggacgagcgcggucucuauaaguccuuaaaaggcgcuuguaagcugaaacuuugcgggguguugggacugagacuaauggauggcacuugggucgcaaugcaaacaucagacgaaaccaaguggugucccccugaucagcucguuaaucugcacgacuucaggagcgacgagaucgagcaucuugugguagaggaacuggugaaaaagcgggaagagugcuuggaugcccucgaaaguauuaugacuacaaaaucugucuccuuucgccgacugagccacuuaagaaagcuggugccagguuucgggaaggcuuacaccaucuucaacaaaacgcucauggaggccgacgcgcauuauaagucgguuaggaccuggaaugagauaauucccucuaaaggaugccuucgggugggcggccguugucacccgcacgucaacgggguguuuuucaauggaaucauucuggguccugauggccauguauugauccccgaaaugcaguccucacuacugcagcaacacauggagcuccuggaaaguagcguuaucccacuuaugcauccucuggcagaccccuccacaguguuuaaggauggggacgaggccgaagauuucgucgaggugcacuugccagacguccauaaacaggugucuggaguugaucucggccugcccaacugggguaaguacguguuacugagcgcuggggcccuaauugcacucaugcugauaaucuuucuuaugacuugcugucgcagaguaaacaggccugagucaacccagcggaguuugggcggaacaggccgaaaggucuccgugacuagccagucugggaaaguuauuucaaguugggaaagcuauaaguccggaggugagacccgccuguga

SEQ ID NO: 159539 - RNA, 1575 nt, Artificial Sequence
  derived and/or modified CDS sequence (opt3) from glycoprotein__RABV__KF155001.1
auggugccccaggcccuccuguucgucccucuucugguuuuuagcuugugcuucggcaaguuuccaaucuacaccauuccggacaaauuagggcccugguccccuauagauauccaccaucugucuuguccaaacaaucuagugguagaggacgaaggaugcacaaaccucucagguuucaguuauauggagcugaaggugggcuacauuagcgcuaucaaagucaauggguuuacuuguacgggagugguuaccgaagcagagacauauacuaacuucgugggcuacgucaccacaaccuuuaagagaaaacacuucaggcccacuccugaugccugccgggcggcuuauaauuggaagauggccggugacccacgcuacgaagagucccuucauaaccccuauccugauuaccacuggcugcgaacagugaagaccacgaaagagucuuugguaauuaucucgccaucaguugcagaccucgauccguacgacaagagccugcauagucguguguuucccuccgggaaauguucuggaauaacugucagcuccaccuauugcucaacaaaucacgauuacacuaucuggaugccugaaaacccaagacugggcaccaguugugacauuuucacaaauagcaggggcaagcgggccucuaaaggguccaagaccugcggauuuguggaugagcgcggucucuauaagucauuaaaaggcgcuuguaagcugaaacuuugcgggguguugggacugagacuaauggacggcacgugggucgcaaugcaaacuagcgaugaaacaaaguggugucccccugaccagcucguuaaccugcacgacuucaggagugaugagaucgagcaucuugugguagaggaacuggugaaaaagcgggaagagugcuuggacgcccucgaaucuauuaugaccacuaaauccgucagcuuucgccgacugucgcacuuaagaaagcuggugccagguuucgggaaggcuuacacaaucuucaauaaaacccucauggaggccgaugcgcauuauaagucuguuaggacguggaacgagauaauucccuccaaaggaugccuucgggugggcggccguugucacccgcacgucaaugggguguuuuucaacggaaucauucuggguccugacggccauguauugauccccgaaaugcagucaagucuacugcagcaacacauggagcuccuggaaagcuccguuaucccacuuaugcauccucuggcagaucccucuaccguguuuaaggacggggaugaggccgaagacuucgucgaggugcacuugccagauguccauaaacaggugagcggaguugaccucggccugcccaauugggguaaguacguguuacugucagcugggacacuaauugcccucaugcugauaaucuuucuuaugacuugcugucgcagaguaaacaggccuaagaguaugcagcgguccuugggcgagaccggacgaaaagucagcgugacaucucagucaggcaagguuauuaguagcugggaauccuauaaaucugggggagagacucgccuguga

SEQ ID NO: 159540 - RNA, 1575 nt, Artificial Sequence
  derived and/or modified CDS sequence (opt3) from glycoprotein__RABV__KF155002.1
auggugccccaggccagacuguucgucccucuccuuguuuuuccacugugcuucggcaaguuuccgaucuacaccauucccgacaaauuggggccuuggagcccaauagauauccaccauuuauccugucccaacaaucuggugguagaggacgaaggaugcacaaaccuaucugguuucucauauauggagcucaaggugggcuacauuagugcuaucaaagucaauggguuuacuuguacgggagugguuaccgaagcagagacauauacuaacuucgugggcuacgucaccacaaccuuuaagaggaaacacuuccggccuauuccagaugccugccgcgcggcuuauaauuggaagauggccggugacccccgauacgaagagagccugcauaacccuuauccagauuaccacuggcuucguacugugaagacaaccaaagagucccugguaaucauaucuccgucgguugcagacuuggaucccuacgacagaucacuccauagcaggguguuuacugggggaaaguguaguggcaucacggucuccucuaccuauugcagcacaaaucacgauuacacuauuuggaugccugaaaacccacggcugggcaccuccuguaauaucuucgccaacucaaaagggaagcgcgcuaguaaaggagguaagacaugcggcuuuguggacgagagagggcuguauaagagccucaaaggagcauguaaguuaaaacugugcggcgugcuugguuugaggcugauggaugggaccugggucgccaugcaaacgucugacgaaacuaaguggugucccccugaucagcuaguuaauaugcacgacuuccgguccgacgagauugagcaucucgugguagaggaacuggugaaaaagcgcgaagagugccuugaugcucuggaaucaaucaugacaaccaaaagcgucaguuuucgaagauugucucaccucaggaagcuggugccaggauucggcaaggccuacacuauauucaacaaaacauuaauggaggcggacgcacauuauaaguccguucggaccuggaaugagauuauccccagcaaaggcugccugcgugucgggggacgcugucacccgcacgugaacgguguguuuuucaauggcauuauccucgggccugauggacauguacuuauccccgaaaugcagucgucucuguugcagcaacacauggagcuacuggaauccucaguuauuccacucaugcauccucuggccgaccccaguacgguguuuaaggauggcgacgaggcugaagauuucgucgaggugcaccuuccagacguccauaaacaggugagcgguguugaucugggguugcccaacuggggcaaguacgugcuccuguccgccggaaccuuaauagcacugaugcuaaucauuuuucucaugacaugcuguagaaggguaucucggccugagagcacucagcgaucacugggccgcaccgggagaaaggucagugugacaucccagagcggaaaaguuaucucuucaugggaaaguuauaagagcgguggcgagacuaggcuuuga

SEQ ID NO: 159541 - RNA, 1575 nt, Artificial Sequence
  derived and/or modified CDS sequence (opt3) from glycoprotein__RABV__KF437644.1
auggugccccaggcccuccuguucgucccucuucugguuuuuagcaugugcuucggcaaguuuccaaucuacaccauuccggacaaauuggggcccugguccccuauagauauccaccauuuaucuuguccaaacaaucuggugguagaggacgaaggaugcacaaaccuaucagguuucaguuauauggagcucaaggugggcuacauuagcgcuaucaaagucaauggguuuacuuguacgggagugguuaccgaagcagagacauauacuaacuucgugggcuacgucaccacaaccuuuaagagaaaacacuucaggcccacuccugaugccugccgggcggcuuauaauuggaagauggccggugacccacgcuacgaagagucccugcauaaccccuauccugauuaccacuggcuucgaacagugaagaccacgaaagagucucugguaauuaucucgccaucaguugcagacuuggauccguacgacaagagccuccauagucguguguuucccaaugggaaauguuccggaauaacuaucucuagcaccuauugcccuacaaaccacgauuacacuauuuggcugccagaaaaucccagacugggcaccuccugugacaucuucacaaacucaaggggcaagcgggccaguaaagggagcaagaccugcggauuugucgaugagcgcggucucuauaagucuuuaaaaggcgcuuguaagcugaaacuuugcgggguguugggacugagacuaauggacggcacguggguggcaaugcaagccuccgaugaaacuaagugguguccuccagaccagcucgucaaucugcacgacuucaggucagaugagauugagcaucuuguuguggaggaacuggugaaaaagcgggaagagugcuuggacgcucucgaaagcaucaugacaaccaaaaguguaucuuuucgccgacugucccacuuaagaaagcugguccccgguuucgggaaggccuacacuauauucaacaaaacacucauggaggcggaugcacauuauaagagcgugaggaccuggaaugagauuaucccgucgaaaggaugccuucggguuggcggccguugucacccucacgugaacggggucuuuuucaauggaauuauccugggucccgacggccauguguugaucccagaaaugcagucuucccuacugcagcaacacauggagcuccuggaaucaaguguaauuccucuuaugcauccccuggccgauccaagcacgguuuuuaaggacggggaugaggcugaaaacuucguggagguccacuugcccgacgugcauaaacagauauccggagucgaucucggccugccuaacugggguaaguacguguuaguuucugccggggugcugaucgcacuaaugcucauuaucuuucugaugaccugcuguggccgcguaaauagaccagagagcacacagcacaaccuuggaggcacugggagggaagucucagugaccccgcagaguggaaagguuauauccagcugggagucuuauaaaucagguggcgggacacgguuguga

SEQ ID NO: 159542 - RNA, 1575 nt, Artificial Sequence; identical to SEQ ID NO: 159541
  derived and/or modified CDS sequence (opt3) from glycoprotein__RABV__KF437645.1

SEQ ID NO: 159543 - RNA, 1575 nt, Artificial Sequence; identical to SEQ ID NO: 159541
  derived and/or modified CDS sequence (opt3) from glycoprotein__RABV__KF437646.1

SEQ ID NO: 159544 - RNA, 1575 nt, Artificial Sequence
  derived and/or modified CDS sequence (opt3) from glycoprotein__RABV__KF437648.1
auggugccccaggcccuccuguucgucccucuucugguuuuuagcaugugcuucggcaaguuuccaaucuacaccauuccggacaaauuggggcccugguccccuauagauauccaccauuuaucuuguccaaacaaucuggugguagaggacgaaggaugcacaaaccuaucagguuucaguuauauggagcucaaggugggcuacauuagcgcuaucaaagucaauggguuuacuuguacgggagugguuaccgaagcagagacauauacuaacuucgugggcuacgucaccacaaccuuuaagagaaaacacuucaggcccacuccugaugccugccgggcggcuuauaauuggaagauggccggugacccacgcuacgaagagucccugcauaaccccuauccugauuaccacuggcuucgaacagugaagaccacgaaagagucucugguaauuaucucgccaucaguugcagacuuggauccguacgacaagagccuccauagucgugugcugcccaaugggaaauguuccggaacuaccacaucuagcacuuauugcccuaccaaccacgauuacacaauauggcugccagaaaaucccagacucggcaccuccugugacaucuuuacgaacucaaggggcaagcgggccaguaaagggggaaagacuugcgguuucgucgaugagcgcggcuuauauaagagccugaaaggggcuuguaaacuuaaauugugcggagugcugggccuaagacucauggacgguacauggguggcaaugcaagccucugaugaaaccaagugguguccuccagaccagcuggucaaucuucacgacuuuagguccgaugagauugagcaucugguuguggaagaguugguaaagaagcgggaagagugccucgacgcucuggaaucaaucaugacuacaaaaagcgugaguuuccgccgauuaucucaccugagaaagcucguccccggguuuggaaaggccuacaccauuuucaacaaaacgcuuauggaggcggaugcacauuauaaguccgugaggaccuggaaugagaucauaccgagcaaaggcugccugcggguuggcgggcguugucacccucacgugaacggagucuucuuuaaugguauuaucuugggccccgacgggcaugugcuaauuccagaaaugcagucgucucugcuccagcaacacauggagcugcuugaauccucaguaaucccucugaugcaucccuuggccgauccaaguacaguuuucaaggacggagaugaggcugaaaacuuuguggagguccaccuccccgacgugcauaaacagaucagcggcgucgaucuggguuuaccuaacugggggaaguacgugcugguuuccgccggcgugcuaauugcacucaugcugauaaucuuccuuaugacuugcuguggacgcguaaauagaccagagucuacccagcacaacuugggcgggacaggaagggaagucagcgugacuccgcagucagguaagguuauuaguuccugggagagcuauaaaucuggcggggaaacccggcuguga

SEQ ID NO: 159545 - RNA, 1575 nt, Artificial Sequence
  derived and/or modified CDS sequence (opt3) from glycoprotein__RABV__KF437649.1
auggugccccaggcccuccuguucgucccucuucugguuuuuagcaugugcuucggcaaguuuccaaucuacaccauuccggacaaauuggggcccugguccccuauagauauccaccauuuaucuuguccaaacaaucuggugguagaggacgaaggaugcacaaaccuaucagguuucaguuauauggagcucaaggugggcuacauuagcgcuaucaaagucaauggguuuacuuguacgggagugguuaccgaagcagagacauauacuaacuucgugggcuacgucaccacaaccuuuaagagaaaacacuucaggcccacuccugaugccugccgggcggcuuauaauuggaagauggccggugacccacgcuacgaagagucccugcauaaccccuauccugauuaccacuggcuucgaacagugaagaccacgaaagagucucugguaauuaucucgccaucaguugcagacuuggauccguacgacaagagccuccauagucguguguuucccaaugggaaauguuccggaauaacuaucucuagcaccuauugcccuacaaaccacgauuacacuauuuggcugccagaaaaucccagacugggcaccuccugugacaucuucacaaacucaaggggcaagcgggccaguaaagggagcaagaccugcggauuugucgaugagcgcggucucuauaagucuuuaaaaggcgcuuguaagcugaaacuuugcgggguguugggacugagacuaauggacggcacguggguggcaaugcaagccuccgaugaaacuaagugguguccuccagaccagcucgucaaucugcacgacuucaggucagaugagauugagcaucuuguuguggaggaacuggugaaaaagcgggaagagugcuuggacgcucucgaaagcaucaugacaaccaaaaguguaucuuuucgccgacugucccacuuaagaaagcugguccccgguuucgggaaggccuacacuauauucaacaaaacacucauggaggcggaugcacauuauaagagcgugaggaccuggaaugagauuaucccgucgaaaggaugccuucggguuggcggccguugucacccucacgugaacggggucuuuuucaauggaauuauccugggucccgacggccauguguugaucccagaaaugcagucuucccuacugcagcaacacauggagcuccuggaaucaaguguaauuccucuuaugcauccccuggccgauccaagcacgguuuuuaaggacggggaugaggcugaaaacuucguggagguccacuugcccgacgugcauaaacagauauccggagucgaucucggccugccuaacugggguaaguacguguuaguuucugccggggugcugaucgcacuaaugcucauuaucuuucugaugaccugcuguggccgcguaaauagaccagagagcacacagcacaaccuuggaggcacugggagggaagucucagugaccccgcagaguggaaagguuauauccagcugggagucuugcaaaucagguggcgggacacgguuguga

SEQ ID NO: 159546 - RNA, 1575 nt, Artificial Sequence; identical to SEQ ID NO: 159541
  derived and/or modified CDS sequence (opt3) from glycoprotein__RABV__KF437650.1

SEQ ID NO: 159547 - RNA, 1575 nt, Artificial Sequence
  derived and/or modified CDS sequence (opt3) from glycoprotein__RABV__KF437652.1
auggugccccaggcccuccuguucgucccucuucugguuuuuagcaugugcuucggcaaguuuccaaucuacaccauuccggacaaauuggggcccugguccccuauagauauccaccauuuaucuuguccaaacaaucuggugguagaggacgaaggaugcacaaaccuaucagguuucaguuauauggagcucaaggugggcuacauuagcgcuaucaaagucaauggguuuacuuguacgggagugguuaccgaagcagagacauauacuaacuucgugggcuacgucaccacaaccuuuaagagaaaacacuucaggcccacuccugaugccugccgggcggcuuauaauuggaagauggccggugacccacgcuacgaagagucccugcauaaccccuauccugauuaccacuggcuucgaacagugaagaccacgaaagagucucugguaauuaucucgccaucaguugcagacuuggauccguacgacaagagccuccauagucguguguuucccaaugggaaauguuccggaauaacuaucucuagcaccuauugcccuacaaaccacgauuacacuauuuggcugccagaaaaucccagacugggcaccuccugugacaucuucacaaacucaaggggcaagcgggccaguaaagggagcaagaccugcggauuugucgaugagcgcggucucuauaagucuuuaaaaggcgcuuguaagcugaaacuuugcgggguguugggacugagacuaauggacggcacguggguggcaaugcaagccuccgaugaaacuaagugguguccuccagaccagcucgucaaucugcacgacuucaggucagaugagauugagcaucuuguuguggaggaacuggugaaaaagcgggaaaaaugcuuggacgcucucgagagcaucaugacaaccaagaguguaucuuuucgccgacugucccacuuaagaaagcugguccccgguuucgggaaagccuacacuauauucaacaagacacucauggaagcggaugcacauuauaaaagcgugaggaccuggaaugagauuaucccgucgaagggaugccuucggguuggcggccguugucacccucacgugaacggggucuuuuucaauggaauuauccugggucccgacggccauguguugaucccagagaugcagucuucccuacugcagcaacacauggaacuccuggagucaaguguaauuccucuuaugcauccccuggccgauccaagcacgguuuuuaaagacggggaugaagcugagaacuucguggaaguccacuugcccgacgugcauaagcagauauccggagucgaucucggccugccuaacugggguaaguacguguuaguuucugccggggugcugaucgcacuaaugcucauuaucuuucugaugaccugcuguggccgcguaaauagaccagagagcacacagcacaaccuuggaggcacugggagggaggucucagugaccccgcagaguggaaaaguuauauccagcugggaaucuuauaagucagguggcgggacacgguuguga

SEQ ID NO: 159548 - RNA, 1575 nt, Artificial Sequence
  derived and/or modified CDS sequence (opt3) from glycoprotein__RABV__KF437653.1
auggugccccaggcccuccuguucgucccucuucugguuuuuagcaugugcuucggcaaguuuccaaucuacaccauuccggacaaauuggggcccugguccccuauagauauccaccauuuaucuuguccaaacaaucuggugguagaggacgaaggaugcacaaaccuaucagguuucaguuauauggagcucaaggugggcuacauuagcgcuaucaaagucaauggguuuacuuguacgggagugguuaccgaagcagagacauauacuaacuucgugggcuacgucaccacaaccuuuaaggguaaacacuucagacccacuccugaugccugcagggcggcuuauaauuggaagauggccggggacccacgguacgaagagucccugcauaaccccuauccugauuaccacuggcuucgcacagugaagaccacgaaagagucucugguaauuaucucgccaucaguugcagacuuggauccguacgacaagagccuccauagucgaguguuucccaauggaaaauguuccggcauaacuaucucuagcaccuauugcccuacaaaccacgauuacacuauuuggcugccagaaaauccccgucugggcaccuccugugacaucuucacaaacucaagagggaagagggccaguaaaggaagcaagaccugcgguuuugucgaugagcggggccucuauaagucuuuaaaaggggcuuguaagcugaaacuuugcggaguguugggccugcgccuaacggacgguacuuggguggcaaugcaagccuccgaugaaacaaagugguguccuccagaccagcucgucaaucugcacgacuucagaucagaugagauugagcaucuuguuguggaggaacuggugaaaaagagggaagagugcuuggacgcucucgaaagcaucaugaccacuaaaaguguaucuuuucggcgccugucccacuuacgaaagcugguccccggguucggaaaggccuacacaauauucaacaaaacccucauggaggcggaugcacauuauaagagcgugagaacguggaaugagauuaucccgucgaaaggcugccuuaggguuggcgggcggugucacccucacgugaacggagucuuuuucaaugguauuauccugggccccgacgggcauguguugaucccagaaaugcagucuucccuacugcagcaacacauggagcuccuggaaucaaguguaauuccucuuaugcauccccuggccgauccaagcaccguuuuuaaggacggagaugaggcugaaaacuucguggagguccacuugcccgacgugcauaaacagauauccggcgucgaucucggucugccuaacugggggaaguacguguuaguuucugccggcgugcugaucgcacuaaugcucauuaucuuucugaugacaugcuguggacguguaaaucgcccagagagcacucagcacaaccuuggcgggaccggaagagaagucucagugacaccgcagagugguaagguuauauccagcugggagucuuauaaaucaggcgggggaacuagguuguga

SEQ ID NO: 159549 - RNA, 1575 nt, Artificial Sequence
  derived and/or modified CDS sequence (opt3) from glycoprotein__RABV__KF437654.1
auggugccccaggcccuccuguucgucccucuucugguuuuuagcaugugcuccggcaaguucccaaucuacaccauuccggacaaauuggggcccuggucuccuauagauauccaccauuuaucauguccaaacaaucuggugguagaggacgaaggaugcacaaaccuaagugguuuuagcuauauggagcucaaggugggcuacauuuccgcuaucaaagucaauggguucacuuguacgggagugguuaccgaagcagagacauauacuaacuuugugggcuacgucaccacaaccuucaagagaaaacacuuuaggcccacuccugaugccugccgggcggcuuauaauuggaagauggccggugacccacgcuacgaagagucucugcauaaccccuauccugauuaccacuggcuucgaacagugaaggcaaccaaagagucgcugguaauuaucucaccaagcguugccgacuuggauccguacgacaagagucuccauucccguguguuccccaaugggaaauguucuggaauaacgaucagcuccacuugcuguccuaccaaccacgauuauacaauuuggcugccagaaaaucccagacugggcacuucaugcgacaucuuuaccaacaguaggggcaagcgggcuagcaaagggucuaagacauguggauucgucgaugagcgcggucucuacaaguccuuaaaaggcgcaugcaagcugaaacuuugugggguguugggacugagacuaauggacggcgccuggguggcuaugcaagccucagaugaaaccaaguggugcccuccagaccagcucgucaaucugcacgacuuuaggagcgaugagauugagcaucuuguuguggaggaacuggugaaaaagcgggaagagugcuuggacgcgcucgaaaguaucaugacgacuaaaucuguauccuuccgccgacugagccacuuaagaaagcugguccccgguuuugggaaggcauauacaauauucaacaaaacccucauggaggccgaugcucauuacaagucggugaggacuuggaaugagauuaucccgucuaaaggaugucuucggguuggcggccguugccacccucacgugaacggggucuucuuuaauggaauuauccugggucccgacggccauguguugaucccagaaaugcaguccucacuacugcagcaacacauggagcuccuggaaaguagcguaauuccucuuaugcauccccuggccgauccauccacaguuuucaaggacggggaugaggcagaaaacuuuguggagguccacuugcccgacgugcauaaacagauaucuggagucgaucucggccugccuaacugggguaaguauguguuaguuagcgcuggggugcugaucgcccuaaugcucauuaucuuccugaugaccuguugcggccgcguaaauagaccagagucaacgcagcacaaccuuggaggcaccgggagggaagucagugugacaccgcaguccggaaagguuauaagcucuugggagucauacaaaagugguggcgggacucgguuguga

SEQ ID NO: 159550 - RNA, 1575 nt, Artificial Sequence
  derived and/or modified CDS sequence (opt3) from glycoprotein__RABV__KF484518.1
auggugcugcaggcccuccuuuucgcucccuuucugaucagcuccuugugcuucggcaaguuuccuauuuacaccauaccagacaaauuagggccguggucucccaucgauauucaccaucugucauguccuaacaaucuagucguugaggacgaaggaugcaacagucucagcgguuucuccuauauggagcugaaggugggcuacaucucugcaauuaaaguaaauggguuuacauguacuggaguggucacggaagccgagaccuauacaaacuucgugggcuacguuacuaccacauuuaagagaaaacacuucaggccaaugcccgaugcgugccggucggcuuauaauuggaagguggccggugacccucgcuacgaagagucacuucauaacccauaucccgauuaccacuggcugcgaaccgucaagacuacaaaagagagcuugaucauaaucaguccuuccguggcagaccucgauccauacgacaagucucugcauagccguauuuuucccgggggaaaauguuccggcaugaccaucucaaguacguauugcagcacuaaucacgauuacaccauuuggaugccggaaaagacaggccuggggacuucuugugacaucuucauaaccuccaaaggaaagagagccucaaaggguggcaggacaugcggguuuguagaugagcggggacucuauaagagcuuaaagggcgcuuguaaacugaaacuuugcgguguuaguggguugcgccugauggacggaaccugggcagccauucaaacgucugaugaaacuaaaugguguuccccugaccagcuagugaaccuccacgaccugcauagcgaugagaucgagcaccuugucguggaggaacuggugagaaggcgggaagagugcuuggacgcucucgaaucgauuaugacaaccaagucugucuccuuccgccgacugucacauuuaagaaaacugguuccaggcuuuggcaaggccuacacuaucuucaauaagacacucauggaggcggaugcacacuauaaaagugugaggaccuggaacgagaucauucccagcaaggggugccuucggguaggagguaaaugucacccucaugugaauggcgucuucuuuaacgggauaauccugggaccagacggccacguguugauucccgaaaugcaguccucucuacugcagcaacauauggagcuccuggaaagcucaguuaucccgcuuaugcacccucuggccgauuugaguacgguguucaaggacggugaugaggcugaagacuuugucgaggugcaucuccccgauguacacaaacacguuuccgggguggaccugggcuuaccaagcuggggaaaguacaugcugaugucugccggcgcacuagcuacccucaugcuggucauaccucuuaugaagugcugucgucgcgugaauagaacaaaaucaauucagcaggggcccagggagagugaucggaaggucagcgugacuccacagaacggaaaaguuaucuccucuugggaaucguauaagagcgguggcgggaccggauuguga

SEQ ID NO: 159551 - RNA, 1575 nt, Artificial Sequence
  derived and/or modified CDS sequence (opt3) from glycoprotein__RABV__KF484519.1
auggugcugcaggcccuccuuuucgcucccuuucugaucagcuccuugugcuuaggcaaguucccuauuuacaccauaccagacaaacuggggccguggucucccaucgauauucaccaucuaucauguccuaacaaucucgucaucgaggacgaaggaugcaacagucugagcgguuuuuccuauauggagcuuaagguuggcuacauuucugcaaucaaagugaauggguucacauguacuggaguagugacggaagccgagaccuauacaaacuuugucggcuacgugacuaccacauucaagagaaaacacuuuaggccaaugcccgaugcgugccggucggcuuauaauuggaagcuggccggugacccucgcuacgaagagucauugcauaacccauaucccgaguaccacuggcuccgaaccguuaagacuacaaaagaaagccugauagugaucaguccuuccgucgcagaucuggacccauacgauaagucucuccauagccguauuuucccguccgggaaauguucaggaaugaccgugaguagcacguauugcucuacuaaucacgaguacaccaucuggaugcccgaaaagguaggcuuaggcacauccugugacauuuuuaucacuucaaaagggaagagagccagcaagggagguaaaaccugcggcuucguugaugagagggggcuguauaagagucuuaaaggagcuuguaaguugaaacugugcggcgugucuggucuacggcucauggacgggacaugggucgcaauacaaaccuccgaugagacgaagugguguagcccugaccagcuggugaaccuucacgaucugcauucggacgaaauugagcacuugguggucgaggaacucguucgcaaaagagaagagugccuggacgccuuagagucuaucaugacuacaaaguccgugucauuuaggcggcugagucaucuccgcaaacuuguaccaggauucggcaaggcuuacaccauuuuuaauaagacucugauggaagccgaugcgcacuauaaaagcgugcgaacauggaacgagaucauccccuccaagggcugcuugagagucgggggaaaaugucacccucaugugaaugguguuuucuucaacggcauuauacuagggccagacggacacgugcugauccccgaaaugcagucuagccuccugcagcaacauauugagcuucuggaaucaagugucaucccguugaugcacccucucgcagaucuguccaccguguuuaaggacggcgaugaggccgaggacuucguagaaguucauuuacccgaugugcacaagcagauaagcggugucgaccuggggcuaccaucuuggggcaaauacgugcucaugucagcuggagcccuggcaacgcuuauuuuggucaccagucugaugaagugcuguaggugggugaaucggacaaaaagcauccagcagggcccucgugaguccgaacgcaagguuucugugacuccccaaucggggaaaguaaucagcuccugggagucauauaagauuggaggugaaaccggccucuga

SEQ ID NO: 159552 - RNA, 1575 nt, Artificial Sequence
  derived and/or modified CDS sequence (opt3) from glycoprotein__RABV__KF484520.1
auggugcugcaggcccuccuuuucgcccccuuucugaucagcuccuugugcuuaggcaaguucccuauuuacaccauaccagacaaacuggggccguggucucccaucgauauucaccaucuaucauguccuaacaaucucgucguugaggacgaaggaugcaacagucugagcgguaucuccuauauggagcuuaaggugggcuacauuucugcaaucaaaguaaauggguuuacauguacuggaguggucacggaagccgagaccuauacaaacuucgugggcuacguuacuaccacauuuaagagaaaacacuuccauccaaugcccgaugcgugcaggucggcuuauaauuggaagcuggccggugacccucgguacgaagagucauugcacaacccauaucccgauuaccauuggcuccgcaccgugaagacuacaaaagagagccugauaaucauuaguccuuccgucgcagaccuggauccauacgacaagucucuccacagccgaaucuuuccguccgggaaauguucaggaaugaccauuaguagcacguauugcucuacuaaucacgaauacaccaucuggaugcccgagaaggccggcuuaggcacauccugugauauauucacuaccucaaaagggaagcgugcuagcaagggagguaaaacaugcggcuuuguggacgaaagagggcuguauaagagucuuaaaggagcauguaaguugaaacugugcggcguaucuggucuaaggcucauggaugggaccuggguugccauucaaacguccgaggagacuaagugguguccuccagaccagcuggugaaccuucaugaucugcacagcgacgaaaucgagcauuuggucguggaggaacucgugaaaaagcgggaagagugccuggacgcuuuagagucgauuaugacaaccaagucugucuccuuccgcagacugucacaccucaggaaacuuguucccggauuuggcaaggccuacacuaucuucaauaaaacacugauggaagcggaugcacacuauaagaguauccggaccuggaacgagauuauaccuagcaaaggcugcuugcgcguagggggaaagugucauccacacgugaaugguguguuuuucaacggcaucauucuagggcccgacggacauguccugaucccggaaaugcaguccucucuccugcagcaacacauggagcuucuggaaagcucagugauaccuuugaugcauccccucgccgaucugaguacgguuuucaaggacggcgaugaggcugaggacuuuguggaaguccacuuaccagaugugcacaaacagauuuccgguguagaccuggggcuaccuagcuggggcaaguacguucucaugucugccggagcacuggcuauccuuauguuggugaucucacugaugaaaugcuucuggggcgucaaucgaaccaagcccauucagcaggggccaagagagagugaaaggaaagugagcaucgcuccccaaucccggaaggucauuucuucgugggagagcuauaaguccggaggugaaacagagcucuga

SEQ ID NO: 159553 - RNA, 1575 nt, Artificial Sequence
  derived and/or modified CDS sequence (opt3) from glycoprotein__RABV__KF484521.1
auggugcugcaggcccuccuuuucgcucccuuucugaucagcuccuugugcuuaggcaaguucccuauuuacaccauaccagacaaacuggggccguggucucccaucgauauucaccaucuaucauguccuaacaaucucgucguugaggacgaaggaugcaacagucugagcgguuuuuccuauauggagcuuaaggugggcuacaucucugcaauuaaaguaaauggguucacauguacuggaguggucacggaagccgagaccuauacaaacuuugugggcuacguuacuaccacauucaagagaaaacacuuuaggccaaugcccgaugcgugccggucggcuuauaauuggaagcuggccggugacccucgcuacgaagagucauugcauaacccauaucccgauuaccacuggcuccgaaccgugaagacuacaaaagagagccugaucgucauaaguccuuccguggcagaccuggauccauacgacaagucucuccauagccguaucuuccccgggggaaaauguuccggcaugaccguaucaaguacguauugcagcacuaaucacgaauacaccauuuggaugccggagaaggccggcuuagggacaucuugugauaucuuuacuaccuccaaaggaaagagagcuacaaaggguggcaaaaccugcggguucguugacgaaaggggacuguauaagucacuuaaaggcgcauguaaguugaaacugugcggugugagcgggcuacggcucauggauggaacgugggucgccauucaaaccagugacgagacaaagugguguucuccugaucagcuggugaaccuucacgaccugcauuccgacgagaucgaacacuugguggucgaggaacucguucgcaaaagagaggaaugccuggaugcuuuagagagcauaaugaccacuaagucggugucuuuuaggcggcugucccaucuccgcaaacuuguaccaggcuucggcaaggccuacacaauuuuuaauaagacccugauggaggcggacgcacacuauaaaucagugcgaacguggaacgaaaucauucccaguaaggggugcuugagagucggagguaaaugucacccucaugugaauggcguuuucuucaacgggaucauccuaggaccagauggccacgugcugauucccgagaugcagagcucccuccugcagcaacauauggaacuucuggagucuagcgucauaccguugaugcacccucucgccgaccccucaaccguguuuaaggaugacgaugaagcugaggacuucguagagguucaucugccagaugugcacaagcaggucagugguguggacuuagggcugccuuccuggggcagguacguccuaaugagcgccggagcacucgcuacacugaugcuugugaucucuuugaugaaaugcuguaagggcguuaaucggacuaaaucaauuaagcaggggagucgugaaagcgagcgcaaaguguccaucacuccccagucuggaaagguaauaucgagcugggaauccuauaagucagguggcgagacagggcuguga

SEQ ID NO: 159554 - RNA, 1575 nt, Artificial Sequence
  derived and/or modified CDS sequence (opt3) from glycoprotein__RABV__KF484522.1
auggugcugcaggcccuccuuuucgcucccuuucugaucagcuccuugugcuuaggcaaguucccuauuuacaccauaccagacaaacuggggccguggucucccaucgauauucaccaucuaucauguccuaacaaucucgucaucgaggacgaaggaugcaacagucugagcgguuuuuccuauauggagcuuaagguuggcuacauuucugcaaucaaagugaauggguucacauguacuggaguagugacggaagccgagaccuauacaaacuuugucggcuacgugacuaccacauucaagagaaaacacuuuaggccaaugcccgaugcgugccggucggcuuauaauuggaagcuggccggugacccucgcuacgaagagucauugcauaacccauaucccgaguaccacuggcuccgaaccguuaagacuacaaaagaaagccugauagugaucaguccuuccgucgcagaucuggacccauacgauaagucucuccauagccguauuuucccguccgggaaauguucaggaaugaccgugaguagcacguauugcucuacuaaucacgaguacaccaucuggaugcccgaaaagguaggcuuaggcacauccugugacauuuuuaucacuucaaaagggaagagagccagcaagggagguaaaaccugcggcuucguugaugagagggggcuguauaagagucuuaaaggagcuuguaaguugaaacugugcggcgugucuggucuacggcucauggacgggacaugggucgcaauacaaaccuccgaugagacgaagugguguagcccugaccagcuggugaaccuucacgaucugcauucggacgaaauugagcacuugguggucgaggaacucguucgcaaaagagaagagugccuggacgccuuagagucuaucaugacuacaaaguccgugucauuuaggcggcugagucaucuccgcaaacuuguaccaggauucggcaaggcuuacaccauuuuuaauaagacucugauggaagccgaugcgcacuauaaaagcgugcgaacauggaacgagaucauccccuccaagggcugcuugagagucgggggaaaaugucacccucaugugaaugguguuuucuucaacggcauuauacuagggccagacggacacgugcugauccccgaaaugcagucuagccuccugcagcaacauauugagcuucuggaaucaagugucaucccguugaugcacccucucgcagaucuguccaccguguuuaaggacggcgaugaggccgaggacuucguagaaguucauuuacccgaugugcacaagcagauaagcggugucgaccuggggcuaccaucuuggggcaaauacgugcucaugucagcuggagcccuggcaacgcuuauuuuggucaucagucugaugaagugcuguaggugggugaaucggaccaaaagcauccagcagggcccucgugaguccgaacgcaagguuucugugacaccccaaucggggaaaguaauuagcuccugggagucauauaagaucggaggugaaacuggccucuga

SEQ ID NO: 159555 - RNA, 1575 nt, Artificial Sequence
  derived and/or modified CDS sequence (opt3) from glycoprotein__RABV__KF484523.1
augauccugcacgcccuccuuuucgcucccuuucugauuagcccuuugugcuuaggcaaguucccaauauacaccaucccggacaaacuggggcccugguccccuauugauauccaucaccuaucuuguccaaacaaucucguggucgaggacgaaggaugcaacucacugagugguuuuagcuauauggagcuuaagguuggcuacauuuccgcaaucaaagugaauggguucacauguacuggaguagugacggaagccgagaccuauacaaacuuugucggcuacgugacuaccacauucaagagaaaacauuuuaggcccaugccugaugcgugccggucugcuuauaauuggaagcuggccggugacccacgcuacgaagagucguugcacaaccccuauccugaguaccauuggcuccgaaccguuaagacuacaaaagaaucacugauagugaucagcccaagugucgcagaucuggacccguacgauaagucccuccacucucguauuuuccccagcgggaaauguuccggaaugaccgugucaaguacguauugcagcacuaaucacgaguacaccaucuggaugccugaaaagguaggcuuaggcacaucuugugacauuuuuacuaccuccaaagggaagagagccucaaagggagguaggaucugcggcuucguugaugagcgggggcuguauaaaagccuuaagggagcuuguaaauugaagcugugcggcgugaguggucuacgccucauggacgggacaggauuugcaauacagaccucugaugagacgaaaugguguuccccagaccaacuggucaaccuucaugaucugcacagcgacgaaauugagcauuuggugguggaggaacucgucagaaagagggaagagugccuggacgccuuagagucgaucaugacuacaaaaucuguuuccuuccggcgccugucacaccuccgaaaacuugugcccggcuuuggcaaggcuuacaccauuuucaauaagacucugauggaagccgaugcgcacuauaagaguguaagaacauggaacgagaucaucccuagcaaagggugcuugagggugggagguaagugucauccacacgucaauggcguguucuuuaacgggauuauacuaggacccgacggccauguucugaucccggaaaugcaguccucucuccugcagcagcacauggagcuucuggaaagcucagugauuccuuugaugcauccccucgcagaucugaguaccgucuucaaagacgauggugaggccgaggacuuuguggaaguacacuuaccagauguucacaagcaaaucuccgggguggaccugggccuaccuagcuggggaaaguacgcucucaugucugccggcgcacuggcuacgcuuauauugaugauuuuccugaugaaaugcugucggugggucaaucguaccgagucaauccagcaggggccccgcgaaagugagagaaaggugagcgucacaccacagaacggaaaagugaucuccucuugggaaucguauaagauugguggcgagacugggcucuga

SEQ ID NO: 159556 - RNA, 1575 nt, Artificial Sequence
  derived and/or modified CDS sequence (opt3) from glycoprotein__RABV__KF484524.1
auggugcugcaggcccuccuuuucgcucccuuucugaucagcuccuugugcuuaggcaaguucccuauuuacaccauaccagacaaacuggggccguggucucccaucgauauucaccaucuaucauguccuaacaaucucgucaucgaggacgaaggaugcaacagucugagcgguuuuuccuauauggagcuuaagguuggcuacauuucugcaaucaaagugaauggguucacauguacuggaguagugacggaagccgagaccuauacaaacuuugucggcuacgugacuaccacauucaagagaaaacacuuuaggccaaugcccgaugcgugccggucggcuuauaauuggaagcuggccggugacccucgcuacgaagagucauugcauaacccauaucccgaguaccacuggcuccgaaccguuaagacuacaaaagaaagccugauagugaucaguccuuccgucgcagaucuggacccauacgauaagucucuccauagccguauuuucccguccgggaaauguucaggaaugaccgugaguagcacguauugcucuacuaaucacgaguacaccaucuggaugcccgaaaagguaggcuuaggcacauccugugacauuuuuaucacuucaaaagggaagagagccagcaagggagguaaaaccugcggcuucguugaugagagggggcuguauaagagucuuaaaggagcuuguaaguugaaacugugcggcgugucuggucuacggcucauggacgggacaugggucgcaauacaaaccuccgaugagacgaagugguguagcccugaccagcuggugaaccuucacgaucugcauucggacgaaauugagcacuugguggucgaggaacucguucgcaaaagagaagagugccuggacgccuuagagucuaucaugacuacaaaguccgugucauuuaggcggcugagucaucuccgcaaacuuguaccaggauucggcaaggcuuacaccauuuuuaauaagacucugauggaagccgaugcgcacuauaaaagcgugcgaacauggaacgagaucauccccuccaagggcugcuugagagucgggggaaaaugucacccucaugugaaugguguuuucuucaacggcauuauacuagggccagacggacacgugcugauccccgaaaugcagucuagccuccugcagcaacauauggagcuucuggaaucaagugucauuccguugaugcacccucucgcagaucuguccaccguguuuaaggagggcgacgaggccgaagauuucguagagguucauuuacccgacgugcacaagcagaucagcggugucgaucuggggcuaccaucuuggggcaaauacgugcucaugucagcuggagcccuggcaacgcuuauauuggucauuagucugaugaagugcuguaggugggugaaucggaccaaaagcauccagcagggcccucgugaauccgagcgcaagguuucugugacaccccaaucggggaaaguaaucagcuccugggaaccauauaagauuggaggugagacuggccucuga

SEQ ID NO: 159557 - RNA, 1575 nt, Artificial Sequence
  derived and/or modified CDS sequence (opt3) from glycoprotein__RABV__KF484525.1
auggugcugcaggcccuccuuuucgcccccuuucugaucagcuccuugugcuuaggcaaguucccuauuuacaccauaccagacaaacuggggccguggucucccaucgauauucaccaucuaucauguccuaacaaucucgucguugaggacgaaggaugcaacagucugagcgguaucuccuauauggagcuuaaggugggcuacauuucugcaaucaaaguaaauggguuuacauguacuggaguggucacggaagccgagaccuauacaaacuucgugggcuacguuacuaccacauuuaagagaaaacacuuccauccaaugcccgaugcgugcaggucggcuuauaauuggaagcuggccggugacccucgguacgaagagucauugcacaacccauaucccgauuaccauuggcuccgcaccgugaagacuacaaaagagagccugauaaucauuaguccuuccgucgcagaccuggauccauacgacaagucucuccacagccgaaucuuuccguccgggaaauguucaggaaugaccauuaguagcacguauugcucuacuaaucacgaauacaccaucuggaugcccgagaaggccggcuuaggcacauccugugauauauucacuaccucaaaagggaagcgugcuagcaagggagguaaaacaugcggcuuuguggacgaaagagggcuguauaagagucuuaaaggagcauguaaguugaaacugugcggcguaucuggucuaaggcucauggaugggaccuggguugccauucaaacguccgaggagacuaagugguguccuccagaccagcuggugaaccuucaugaucugcacagcgacgaaaucgagcauuuggucguggaggaacucgugaaaaagcgggaagagugccuggacgcuuuagagucgauuaugacaaccaagucugucuccuuccgcagacugucacaccucaggaaacuuguucccggauuuggcaaggccuacacuaucuucaauaaaacacugauggaagcggaugcacacuauaagaguauccggaccuggaacgagauuauaccuagcaaaggcugcuugcgcguagggggaaagugucauccacacguggacgguguguuuuucaauggcaucauucuagggcccgauggacauguccugaucccggaaaugcaguccucucuccugcagcaacacauggagcuucuggaaagcucagugauaccuuugaugcauccccucgccgaccugaguacgguuuucaaggauggcgacgaggcugaggauuuuguggaaguccacuuaccagacgugcacaaacagauuuccgguguagaucuggggcuaccuagcuggggcaaguacguucucaugucugccggagcacuggcuauccuuauguuggugaucucacugaugaaaugcuucuggggcgucaaccgaaccaagcccauucagcaggggccaagagagagugaaaggaaagugagcaucgcuccccaaucccggaaggucauuucuucgugggagagcuauaagaauggaggugaaacagagcucuga

SEQ ID NO: 159558 - RNA, 1575 nt, Artificial Sequence
  derived and/or modified CDS sequence (opt3) from glycoprotein__RABV__KF484526.1
auggugcugcaggcccuccuuuucgcucccuuucugaucagcuccuugugcuuaggcaaguucccuauuuacaccauaccagacaaacuggggccguggucucccaucgauauucaccaucuaucauguccuaacaaucucgucguugaggacgaaggaugcaacagucugagcgguuuuuccuauauggagcuuaaggugggcuacaucucugcaauuaaaguaaauggguucacauguacuggaguggucacggaagccgagaccuauacaaacuuugugggcuacguuacuaccacauucaagagaaaacacuuuaggccaaugcccgaugcgugccggucggcuuauaauuggaagcuggccggugacccucgcuacgaagagucauugcauaacccauaucccgaguaccacuggcuccgaaccgugaagacuacaaaagaaagccugaucauaaucaguccuuccgucgcagaucuggacccauacgauaagucucuccauagccguauuuuccccgggggaaaauguuccggcaugaccgugucaaguacguauugcagcacuaaucacgaguacaccaucuggaugccggaaaagguaggcuuagggacaucuugugacauuuuuacuaccuccaaaggaaagagagccucaaaggguggcaaaacaugcggguucguugaugagaggggacuguauaagagccuuaaaggcgcuuguaaguugaaacugugcggugugagugggcuacggcucauggacggaaccugggucgcaaugcaaacgucugaugagacuaagugguguuccccugaccagcuggugaaccuucacgaucugcauagcgacgaaaucgagcacuugguggucgaggaacucguucgcaaaagagaagagugccuggacgccuuagagucgauaaugacaaccaagucuguguccuuuaggcggcugucacaucuccgcaaacuuguaccaggcuucggcaaggcuuacacuauuuuuaauaagacacugauggaagccgaugcgcacuauaaaagugugcgaaccuggaacgagaucauucccagcaaggggugcuugagagucggagguaaaugucacccucaugugaauggcguuuucuucaacgggaucauccuaggaccagacggccacgugcugauucccgaaaugcaguccucucuccugcagcaacauauggagcuucuggaaagcucagucauaccguugaugcacccucucgcagaucugagugccguguuuaaggagggugacgaggcugaagauuucguagagguucauuuacccgacgugcacaagcagaucuccgaagucgaucuggggcuaccaagcuggggcaaauacgugcucaugucugccggagcacuggcuacgcuuauuuuggucaucucacugaugaagugcuguaggugggugaaucggaccaaaaguauacagcagggcccucgugagagcgaacgcaagguuuccgugacaccccaaaacgggaaaguaauuucuucgugggagagcuauaagaucagaggagagacuggucucuga

SEQ ID NO: 159559 - RNA, 1575 nt, Artificial Sequence
  derived and/or modified CDS sequence (opt3) from glycoprotein__RABV__KF484527.1
auggugcugcaggcccuccuuuucgcucccuuucugaucagcuccuugugcuuaggcaaguucccuauuuacaccauaccagacaaacuggggccguggucucccaucgauauucaccaucuaucauguccuaacaaucucgucguugaggacgaaggaugcaacagucugagcgguuuuuccuauauggagcuuaaggugggcuacaucucugcaauuaaaguaaauggguucacauguacuggaguggucacggaagccgagaccuauacaaacuuugugggcuacguuacuaccacauucaagagaaaacacuuuaggccaaugcccgaugcgugccggucggcuuauaauuggaagcuggccggugacccucgcuacgaagagucauugcauaacccauaucccgaguaccacuggcuccgaaccgugaagacuacaaaagaaagccugaucgucauaaguccuuccguggcagaucuggacccauacgauaagucucuccauagccguaucuuccccgggggaaaauguuccggcaugaccguaucaaguacguauugcagcacuaaucacgaguacaccauuuggaugccggaaaagguuggcuuagggacaucuugugacaucuuuacuaccuccaaaggaaagagagccucaaaggguggcaggacaugcggguucguggaugagcggggacuguauaaaagccuuaagggcgcuuguaaauugaagcugugcggugucagugggcuacgccucauggacggaaccuggguggcaaugcaaacgucugaugagacuaaaugguguuccccugaccagcuggugaaccuucacgaucugcauagcgacgaaauugagcacuuggucguugaggaacucgugagaaagagggaagagugccuggacgccuuagagucgaucaugacaaccaaaucuguauccuuucggcgccugucacaucuccgaaaacuugugccaggcuucggcaaggcuuacacuauauuuaauaagacacugauggaagccgaugcgcacuauaagagugucagaaccuggaacgagauuauccccagcaaagggugcuugagggugggagguaagugucacccucauguuaauggcguguucuucaacgggauuauccuaggaccagacggccacguccugauccccgaaaugcaguccucucuccugcagcaacauauggagcuucuggaaagcucagugauuccguugaugcacccucucgcagaucugaguacgguauuuaaagagggugacgaggccgaagauuucguugaggugcauuuacccgacguccacaagcagauauccgggguggaucugggccuaccaagcuggggaaaguacguccucaugggcgcuggggcccuggcaacccuuaucuuggugauuucucugaugaaaugcugucgguggguuaaucguacaaagucaauccagcagggaccucgcgguagugaaagaaaagugagcguaacuccccaaaacggcaaggucauauccucuugggagucguauaaaauugggggagaaaccggccucuga

SEQ ID NO: 159560 - RNA, 1575 nt, Artificial Sequence
  derived and/or modified CDS sequence (opt3) from glycoprotein__RABV__KF484528.1
auggugcugcaggcccuccuuuucgcucccuuucugaucagcuccuugugcuuaggcaaguucccuauuuacaccauaccagacaaacuggggccguggucucccaucgauauucaccaucuaucauguccuaacaaucucgucguugaggacgaaggaugcaacagucugagcgguuuuuccuauauggagcuuaaggugggcuacaucucugcaauuaaaguaaauggguucacauguacuggaguggucacggaagccgagaccuauacaaacuuugugggcuacguuacuaccacauucaagagaaaacacuuuaggccaaugcccgaugcgugccggucggcuuauaauuggaagcuggccggugacccucgcuacgaagagucauugcauaacccauaucccgaguaccacuggcuccgaaccgugaagacuacaaaagaaagccugaucauaaucaguccuuccgucgcagaucuggacccauacgauaagucucuccauagccguauuuuccccgggggaaaauguuccggcaugaccgugucaaguacguauugcagcacuaaucacgaguacaccaucuggaugccggaaaagguaggcuuagggacaucuugugacauuuuuacuaccuccaaaggaaagagagccucaaaggguggcaaaacaugcggguucguugaugagaggggacuguauaagagccuuaaaggcgcuuguaaguugaaacugugcggugugagugggcuacggcucauggacggaaccugggucgcaaugcaaacgucugaugagacuaagugguguuccccugaccagcuggugaaccuucacgaucugcauagcgacgaaaucgagcacuugguggucgaggaacucguucgcaaaagagaagagugccuggacgccuuagagucgauaaugacaaccaagucuguguccuuuaggcggcugucacaucuccgcaaacuuguaccaggcuucggcaaggcuuacacuauuuuuaauaagacacugauggaagccgaugcgcacuauaaaagugugcgaaccuggaacgagaucauucccagcaaggggugcuugagagucggagguaaaugucacccucaugugaauggcguuuucuucaacgggaucauccuaggaccagacggccacgugcugauucccgaaaugcaguccucucuccugcagcaacauauggagcuucuggaaagcucagucauaccguugaugcacccucucgcagaucugaguacgguguuuaaggagggugacgaggccgaagauuucguagagguucauuuacccgacgugcacaagcagaucuccgaagucgaucuggggcuaccaagcuggggcaaauacgugcucaugucugcuggagcccuggcaacccuuauuuuggucaucucacugaugaagugcuguaggugggugaaucggacaaaaaguauacagcagggcccucgugagagcgaacgcaagguuuccgugacuccccaaaacgggaaaguaauuucuucgugggagagcuauaagaucggaggugagaccggccucuga

SEQ ID NO: 159561 - RNA, 1575 nt, Artificial Sequence
  derived and/or modified CDS sequence (opt3) from glycoprotein__RABV__KF484529.1
auggugcugcaggcccuccuuuucgcucccuuucugaucagcuccuugugcuuaggcaaguucccuauuuacaccauaccagacaaacuggggccguggucucccaucgauauucaccaucuaucauguccuaacaaucucgucguugaggacgaaggaugcaacagucugagcgguuuuuccuauauggagcuuaaggugggcuacaucucugcaauuaaaguaaauggguucacauguacuggaguggucacggaagccgagaccuauacaaacuuugugggcuacguuacuaccacauucaagagaaaacacuuuaggccaaugcccgaugcgugccggucggcuuauaauuggaagcuggccggugacccucgcuacgaagagucauugcauaacccauaucccgaguaccacuggcuccgaaccgugaagacuacaaaagaaagccugaucgucauaaguccuuccguggcagaucuggacccauacgauaagucucuccauagccguaucuuccccgggggaaaauguuccggcaugaccguaucaaguacguauugcagcacuaaucacgaguacaccauuuggaugcccgaaaagguuggcuuagggacaucuugugacaucuuuacuaccuccaaaggaaagagagccucaaaggguggcaggacaugcggguucguggaugagcggggacuguauaaaagccuuaagggcgcuuguaaauugaagcugugcggugucagugggcuacgccucauggacggaaccuggguggcaaugcaaacgucugaugagacuaaaugguguuccccugaccagcuggugaaccuucacgaucugcauagcgacgaaauugagcacuuggucguugaggaacucgugagaaagagggaagagugccuggacgccuuagagucgaucaugacaaccaaaucuguauccuuucggcgccugucacaucuccgaaaacuugugccaggcuucggcaaggcuuacacuauauuuaauaagacacugauggaagccgaugcgcacuauaagagugucagaaccuggaacgagauuauccccagcaaagggugcuugagggugggagguaagugucacccucauguuaauggcguguucuucaacgggauuauccuaggaccagacggccacguccugauccccgaaaugcaguccucucuccugcagcaacauauggagcuucuggaaagcucagugauuccguugaugcacccucucgcagaucugaguacgguauuuaaagaggacgaugaggccgaagacuucguugaggugcauuuacccgauguccacaagcagauauccgguguggaccuggggcuaccaagcuggggcaaguacguccucaugggagcuggcgcccuggcaacccuuacauuggugaucucucugauuaaaugcugucgguggguuaaucguacuaagucaauccagcaggggccucgcgaaagugagagaaaagugagcguaaccccgcaaaacggaaaggucauauccucuugggaaucguauaaaauugguggcgagacagggcucuga

SEQ ID NO: 159562 - RNA, 1575 nt, Artificial Sequence
  derived and/or modified CDS sequence (opt3) from glycoprotein__RABV__KF484530.1
auggugcugcaggcccuccuuuucgcucccuuucugaucagcuccuugugcuucggcaaguuuccuauuuacaccauaccagacaaauuagggccguggucucccaucgauguccaccaucugucauguccuaacaaucuaguuauugaggacgaaggaugcaacagucucagcgguuucuccuauauggagcugaaggugggcuacaucucugcaauuaaaguaaauggguuuacauguacuggaguggucacggaagccgagaccuauacaaacuucgugggcuacguuacuaccacauuuaagagaaaacacuucaggccaaugcccgaugcgugccggucggcuuauaauuggaagguggccggugacccucgcuacgaagagucacuucauaacccauaucccgauuaccacuggcugcgaaccgucaagacuacaaaagagagcuugaucauaaucaguccuuccguggcagaccucgauccauacgacaagucucugcauagccguauuuuucccgggggaaaauguuccggcaugaccaucucaaguacguauugcagcacuaaucacgauuacaccauuuggaugccggaaaagacaggccuggggacuucuugugacaucuucaccacauccaaaggaaagagagccucaaaggguggcaggaccugcggguuuguagaugagcggggacucuauaagagcuuaaagggcgcuuguaaacugaaacuuugcgguguuaguggguugcgccugauggacggaacgugggcagccauacaaacuucugaugaaacaaaaugguguuccccugaccagcuagugaaccuccacgaccugcauagcgaugagauugagcaccuugucguggaggaacuggugagaaggcgggaagagugcuuggacgcucucgaaucgaucaugaccacuaagucugucuccuuccgccgacugucacauuuaagaaaacugguuccaggcuuuggcaaggccuacacaauuuucaauaagacccucauggaggcggaugcacacuauaaaagugugaggacguggaacgagaucauccccagcaaggggugccuucggguaggagguaaaugucacccucaugugaauggcgucuucuuuaacgggauuauacugggaccagacggccacguguugauccccgaaaugcaguccucucuacugcagcaacauauggagcuccuggaaagcucaguuauuccgcuuaugcacccucuggccgauuugaguaccguguucaaggacggugaugaggcugaagacuuugucgaggugcaucuccccgauguacacaaacagguuuccgggguggaccugggcuuaccaagcuggggaaaguacaugcugaugucugccggcgcacuagcuacacucaugcuggucaucccucuuaugaagugcugucgucgcgugaauagaacuaaaucaacccagcaggggcccagggagagugaucggaaggucagcgugacaccacaaaacggaaaaguuauauccucuugggaaucguauaagagcgguggcgggacuggauuguga

SEQ ID NO: 159563 - RNA, 1575 nt, Artificial Sequence
  derived and/or modified CDS sequence (opt3) from glycoprotein__RABV__KF484531.1
auggugcugcaggcccuccuuuucgcucccuuucugaucagcuccuugugcuuaggcaaguucccuauuuacaccauaccagacaaacuggggccguggucucccaucgauauucaccaucuaucauguccuaacaaucucgucguugaggacgaaggaugcaacagucugagcgguuuuuccuauauggagcuuaaggugggcuacaucucugcaauuaaaguaaauggguucacauguacuggaguggucacggaagccgagaccuauacaaacuuugugggcuacguuacuaccacauucaagagaaaacacuuuaggccaaugcccgaugcgugccggucggcuuauaauuggaagcuggccggugacccucgcuacgaagagucauugcauaacccauaucccgaguaccacuggcuccgaaccgugaagacuacaaaagaaagccugaucgucauaaguccuuccguggcagaucuggacccauacgauaagucucuccauagccguaucuuccccgggggaaaauguuccggcaugaccguaucaaguacguauugcagcacuaaucacgaguacaccauuuggaugccggaaaagguuggcuuagggacaucuugugacaucuuuacuaccuccaaaggaaagagagccucaaaggguggcaggacaugcggguucguggaugagcggggacuguauaaaagccuuaagggcgcuuguaaauugaagcugugcggugucagugggcuacgccucauggacggaaccuggguggcaaugcaaacgucugaugagacuaaaugguguuccccugaccagcuggugaaccuucacgaucugcauagcgacgaaauugagcacuuggucguugaggaacucgugagaaagagggaagagugccuggacgccuuagagucgaucaugacaaccaaaucuguauccuuucggcgccugucacaucuccgaaaacuugugccaggcuucggcaaggcuuacacuauauuuaauaagacacugauggaagccgaugcgcacuauaagagugucagaaccuggaacgagauuauccccagcaaagggugcuugagggugggagguaagugucacccucauguuaauggcguguucuucaacgggauuauccuaggaccagacggccacguccugauccccgaaaugcaguccucucuccugcagcaacauauggagcuucuggaaagcucagugauuccguugaugcacccucucgcagaucugaguacgguauuuaaagaggacgaugaggccgaagacuucguugaggugcauuuacccgauguccacaagcagauauccgguguggaccuggggcuaccaagcuggggcaaguacguccucaugggagcuggcgcccuggcaacccuuaucuuggugauuucucugaucaaaugcugucgguggguuaaucguacaaagucaauacagcaggggccucgcgaaagugagagaaaagugagcgcuacuccccaaaacggaaagguaauuuccucuugggaaucguauaaaaucgguggcgagaccgggcucuga

SEQ ID NO: 159564 - RNA, 1575 nt, Artificial Sequence
  derived and/or modified CDS sequence (opt3) from glycoprotein__RABV__KF484532.1
augauccugcacgcccuccuuuucgcucccuuucugauuagcuccuugugcuuaggcaaguucccuauauacaccaucccagacaaacuggggccguggucucccauugauauccaucaccuaucauguccuaacaaucucguggucgaggacgaaggaugcaacagucugagcgguuuuuccuauauggagcuuaagguuggcuacauuucugcaaucaaagugaauggguucacauguacuggaguagugacggaagccgagaccuauacaaacuuugucggcuacgugacuaccacauucaagagaaaacauuuuaggccaaugcccgaugcgugccggucggcuuauaauuggaagcuggccggugacccucgcuacgaagagucauugcacaacccauaucccgaguaccauuggcuccgaaccguuaagacuacaaaagaaagccugauagugaucaguccuuccgucgcagaucuggacccauacgauaagucucuccacagccguauuuucccguccgggaaauguucaggaaugaccgugaguagcacguauugcucuacuaaucacgaguacaccaucuggaugcccgaaaagguaggcuuaggcacauccugugacauuuuuacuaccucaaaagggaagagagccagcaagggagguaggaucugcggcuucguugaugagcgggggcuguauaaaagucuuaagggagcuuguaaauugaagcugugcggcgugucuggucuacgccucauggacgggacaugggucgcaauacagaccuccgaugagacgaaaugguguagcccugaccaacuggugaaccuucaugaucugcacucggacgaaauugagcauuugguggucgaggaacucguuagaaagagggaagagugccuggacgccuuagagucuaucaugacuacaaaauccgugucauuucggcgccugagucaccuccgaaaacuuguaccaggauucggcaaggcuuacaccauuuuuaauaagacucugauggaagccgaugcgcacuauaagagcgugagaacauggaacgagaucauccccuccaaaggcugcuugagggucgggggaaagugucauccucacgugaaugguguuuucugcaacggcauuauacuagggccagacggacaugugcugauccccgaaaugcagucuagccuccugcagcagcacauggagcuucuggaaucaagugucauuccguugaugcauccucucgcagaucuguccaccguguucaaagacgauggcgaggccgaggacuuuguagaaguucacuuacccgaugugcacaagcaaaucagcggugucgaccuggggcuaccaucuuggggcaaguacgcucucaugucagccggagcacuggcuacgcuuauauugaugauuagucugaugaaauguugccggugggugaaucguaccgagagcauccgccagggcccuagagaauccgagaggaaggucucugugacaccccagaacgggaaaguuaucucgagcugggaauccuauaagauuggaggugagacuggccucuga

SEQ ID NO: 159565 - RNA, 1575 nt, Artificial Sequence
  derived and/or modified CDS sequence (opt3) from glycoprotein__RABV__KF484533.1
auggugcugaaggcccuccuuuucgcucccuuucugaucagcuccuugugcuuaggcaaauucccuauuuacaccauaccagacaagcuggggccguggucucccaucgauauucaccaucuaucauguccuaacaaucucgucguugaggacgaaggaugcaacagucugagcgguuuuuccuauauggagcuuaaagugggcuacaucucugcaauuaagguaaauggguucacauguacuggaguggucacggaagccgagaccuauacaaacuuugugggcuacguuacuaccacauucaaaagaaagcacuuuaggccaaugcccgaugcgugccggucggcuuauaauuggaagcuggccggugacccucgcuacgaagagucauugcauaacccauaucccgauuaccacuggcuccgaaccgugcguacuacaaaagagagccugaucgucauaaguccuuccguggcagaccuggauccauacgacaagucucuccauagcagaaucuuccccgggggaaaauguuccggcaugaccguaucaaguacguauugcagcacuaaucacgaauacaccauuuggaugccggagaaggccggcuuagggacaucuugugauaucuuuacuaccuccaaaggaaagagggcuucaaaggguggccggacaugcggguucguugacgaacgcggacuguauaaaagccuuaagggcgcauguaaauugaagcugugcggugugagugggcuaagacucauggauggaaccugggucgccauucagacgucugacgagacuaaaugguguuccccugaucaacuggugaaccuucacgaccugcauagcgacgagaucgaacacuugguggucgaggaacucguuaggaagcgggaggaaugccuggaugcuuuagagucgauaaugacaaccaaaucuguguccuuucgccgacugucacaucucagaaaacuuguaccaggcuucggcaaggccuacacuauuuuuaauaagacacugauggaggcggacgcacacuauaagagugugaggaccuggaacgaaaucauucccagcaaagggugcuugcgggucggagguaagugucacccucauguguccggcguuuucuucaaugggaucauccuaggaccagauggccacgugcugauucccgagaugcagucuagccuccugcagcagcauauggaacuucuggagucaagugucauaccguugaugcacccucucgccgaccccuccacgguguuuaaagaugacgaugaagcugaggacuucguagagguucaucugccagaugugcacaagcaagucagcgguguggacuuagggcugccuucuuggggcaaguacguccuaaugucagccggagcacucgcuacccugaugcuugugaucaguuugaugaaaugcugucguggcuuuaaccgcacaaagagcauuagacagggguccagggaaucugagcagaaaguuucggugacuccccagaauggaaagguaaucagcuccugggaaucauauaaaagugguggcgagaccgggcuguga

SEQ ID NO: 159566 - RNA, 1575 nt, Artificial Sequence
  derived and/or modified CDS sequence (opt3) from glycoprotein__RABV__KF484534.1
auggugcugcaggcccuccuuuucgcccccuuucugaucagcuccuugugcuuaggcaaguucccuauuuacaccauaccagacaaacuggggccguggucucccaucgauauucaccaucuaucauguccuaacaaucucgucguugaggacgaaggaugcaacagucugagcgguaucuccuauauggagcuuaaggugggcuacauuucugcaaucaaaguaaauggguuuacauguacuggaguggucacggaagccgagaccuauacaaacuucgugggcuacguuacuaccacauuuaagagaaaacacuucaggccaauggcggaugcuugccggucggccuauaauuggaagcugaccggugacccccgcuacgaagagucauugcauaacccuuauccagauuaccacuggcuccgaacugugaagacaaccaaagagagccugauagucaucagucccuccguggcagaccuggauccuuacgacaagucucuccauagccguauuuuuccauccgggaaauguucaggaaugacgaucaguagcacuuauugcucuaccaaucacgaauacacaauuuggaugccggagaaggccggcuuaggcacuuccugugauaucuucaccacaucaaaagggaagagagcuagcaagggagguaaaaccugcggcuuuguagacgaaagggggcuguauaagagucuuaaaggagcauguaaguugaaacugugcggcguuucuggucuacggcucauggaugggacguggguggccauacaaacuuccgacgagacaaagugguguagccccgaucagcuggucaaccuucacgaccugcauucggacgagauugaacacuuggugguggaggaacucgucaaaaagcgcgaggaaugccuggaugcuuuagagucuaucaugaccacuaaguccguuucauucagaaggcugagucaucuccggaaacuugugccuggauuuggcaaggccuacacaauuuucaauaaaacccugauggaggcggacgcacacuauaagagcauccgcacguggaacgaaaucauuccauccaaaggcugcuugcgaguagggggaaagugucacccccaugugaauggugucuuuuucaacggcauaauccuagggccugauggacacgugcugauuccagagaugcagucuagccuccugcagcaacauauggaacuucuggagucaaguguuauccccuugaugcacccgcucgccgaccuguccaccguguucaaggauggcgacgaagcugaggauuuugucgaggugcauuuaccugacauacacaaacagauuagcgguguagaucuggggcuacccucuuggggcaaguacguucucaugucagccggagcacuggcuauccuuauguugguguucagucugaugaaaugcuuuuggggcgucaauagaacaaagccaauccagaggagcccucgggaauccgagcguaaagugucugucgcuccccagucggggaaggugauuagcuccugggaaucauauaagaguggaggugagacuggccucuga

SEQ ID NO: 159567 - RNA, 1575 nt, Artificial Sequence
  derived and/or modified CDS sequence (opt3) from glycoprotein__RABV__KF484535.1
auggugcugcaggcccuccuuuucgcccccuuucugaucagcuccuugugcuuaggcaaguucccuauuuacaccauaccagacaaacuggggccguggucucccaucgauauucaccaucuaucauguccuaacaaucucgucguugaggacgaaggaugcaacagucugagcgguaucuccuauauggagcuuaaggugggcuacauuucugcaaucaaaguaaauggguuuacauguacuggaguggucacggaagccgagaccuauacaaacuucgugggcuacguuacuaccacauuuaagagaaaacacuuccauccaaugcccgaugcgugcaggucggcuuauaauuggaagcuggccggugacccucgguacgaagagucauugcacaacccauaucccgauuaccauuggcuccgcaccgugaagacuacaaaagagagccugauaaucauuaguccuuccgucgcagaccuggauccauacgacaagucucuccacagccgaaucuuuccguccgggaaauguucaggaaugaccauuaguagcacguauugcucuacuaaucacgaauacaccaucuggaugcccgagaaggccggcuuaggcacauccugugauauauucacuaccucaaaagggaagcgugcuagcaagggagguaaaacaugcggcuuuguggacgaaagagggcuguauaagagucuuaaaggagcauguaaguugaaacugugcggcguaucuggucuaaggcucauggaugggaccuggguugccauucaaacguccgacgagacuaagugguguccuccagaucagcuggugaaccuucaugaccugcacagcgacgagaucgaacauuuggucguggaggaacucgugaaaaagcgggaggaaugccuggaugcuuuagagucgauuaugacaaccaagucugucuccuuccgcagacugucacaccucaggaaacuuguucccggauuuggcaaggccuacacuaucuucaauaaaacacugauggaggcggacgcacacuauaagaguauccggaccuggaacgaaauuauaccuagcaaaggcugcuugcgcguagggggaaagugucauccacacgugaaugguguguuuuucaacggcaucauucuagggcccgauggacauguccugaucccggagaugcaguccucucuccugcagcaacacauggaacuucuggagagcucagugauaccuuugaugcauccccucgccgaccugaguacgguuuucaaggauggcgacgaagcugaggauuuuguggagguccacuuaccagacgugcacaaacagauuuccgguguagaucuggggcuaccuagcuggggcaaguacguucucaugucugccggagcacuggcuauccuuauguuggugaucucacugaugaaaugcuucuggggcgucaaucgaaccaagcccauucagcaggggccaagagaaagugagaggaaagugagcaucgcuccccaaucccggaaggucauuucuucgugggaaagcuauaaguccggaggugagacagaacucuga

SEQ ID NO: 159568 - RNA, 1575 nt, Artificial Sequence
  derived and/or modified CDS sequence (opt3) from glycoprotein__RABV__KF484536.1
auggugcugcaggcccuccuuuucgcucccuuucugaucagcuccuugugcuuaggcaaguucccuauuuacaccauaccagacaaacuggggccguggucucccaucgauauucaccaucuaucauguccuaacaaucucgucguugaggacgaaggaugcaacagucugagcgguuuuuccuauauggagcuuaaggugggcuacaucucugcaauuagaguaaauggguucacauguacuggaguggucacggaagccgagaccuauacaaacuuugugggcuacguuacuaccacauucaaaaggaagcacuuucggccaaugcccgaugcgugccgcucggcuuauaauuggaaacuggccggugacccucgauacgaagagucauugcauaacccauaucccgauuaccacuggcuccguaccgugaagacuacaaaggagagccugaucgucauaaguccuuccguggcagaccuggauccauacgacaaaucucuccauagcagaaucuuccccgggggaaaguguuccggcauuaccguaucaaguacguauugcagcacuaaucacgaauacaccaucuggaugccggagaaagccggcuuagggacaucuugugauauuuuuacuaccuccaagggaaaaagggcuucaaaggguggccggacaugcggguucguugacgaacgcggacuguauaagagccuuaaaggcgcauguaaguugaaacugugcggugugagugggcuaagacucauggauggaaccugggucgccauccaaacgccugacgagacuaagugguguucuccagaucagcuggugaaccuucacgaccugcauuccgacgagauagaacacuugguggcugaggaacucgucaggaaacgggaggaaugccuggaugccuuagagagcauuaugacaaccaagucgguuucuuuucgccgacugucccaucucagaaaacuugugcccggcuucggcaaggcguacacuaucuuuaauaagacacugauggaggcagacgcccacuauaaaucaguaaggaccuggaacgaaauuaucccuaguaaggggugcuugcgggugggagguaaaugucacccacaugucaauggcguguucuucaacgggaucauucuaggacccgauggccacguucugauaccggagaugcagagcucccuccugcagcaacauauggaacuucuggagucuagcuugaucccucucaugcacccccuggcugacuuaucaacgguguuuaaggauggugacgaagccgaggauuucgucgaggugcaucugccagacguacacaaacagguuagugggguggaucuaggccucccuuccuggggaaaguacguccugaugagcgcaggcgcucuugccaccuugaugcuggugauuucucucaucaagugcugucguggggucaaucgcacaagaucaauacagaggggaccccgggaaagugagcgaaaagugagcguuacuccacagaacgguaaggugauuuccucuugggaaucguauaaaagcggcggggagacccgccuguga

SEQ ID NO: 159569 - RNA, 1575 nt, Artificial Sequence
  derived and/or modified CDS sequence (opt3) from glycoprotein__RABV__KF484537.1
auggugcugcaggcccuccuuuucgcucccuuucugaucagcuccuugugcuuaggcaaguucccuauuuacaccauaccagacaaacuggggccguggucucccaucgauauucaccaucuaucauguccuaacaaucucgucguugaggacgaaggaugcaacagucugagcgguuuuuccuauauggagcuuaaggugggcuacaucucugcaauuagaguaaauggguucacauguacuggaguggucacggaagccgagaccuauacaaacuuugugggcuacguuacuaccacauucaaaaggaagcacuuucggccaaugcccgaugcgugccgcucggcuuauaauuggaaacuggccggugacccucgauacgaagagucauugcauaacccauaucccgauuaccacuggcuccguaccgugaagacuacaaaggagagccugaucgucauaaguccuuccguggcagaccuggauccauacgacaaaucucuccauagcagaaucuuccccgggggaaaguguuccggcauuaccguaucaaguacguauugcagcacuaaucacgaauacaccaucuggaugccggagaaagccggcuuagggacaucuugugauauuuuuacuaccuccaagggaaaaagggcuucaaaggguggccggacaugcggguucguugacgaacgcggacuguauaagagccuuaaaggcgcauguaaguugaaacugugcggugugagugggcuaagacucauggauggaaccugggucgccauccaaacgccugacgagacuaagugguguucuccagauaggcuggugaaccuucacgaccugcauuccgacgagauagaacacuugguggcugaggaacucguccggaaacgcgaggaaugccuggaugccuuagagagcauuaugacaaccaagucgguuucuuuucgaagacugucccaucucaggaaacuugugcccggcuucggcaaggcguacacuaucuuuaauaagacacugauggaggcagacgcccacuauaaaucaguacggaccuggaacgaaauuaucccuaguaaggggugcuugcgugugggagguaaaugucacccacaugucaauggcguguucuucaacgggaucauucuaggacccgauggccacguucugauaccggagaugcagagcucccuccugcagcagcauauggaacuucuggagucuagcgugaucccuuugaugcacccccucgcugaccugucaacggucuuuaaggauggugacgaagccgaggauuucguggagguacauuuaccagacguucacaaacaagugaguggggucgaucugggccuaccuuccuggggaaaguacgugcucaugagcgcaggcgcucuggccacccuuauguuggucauuucucugaucaagugcugucgcggggugaauagaacaaggucaauacagcggggaccccgagaaagugagcgcaaaguuagcgugacuccacagaacgguaagguaauuuccucuugggaaucguauaaaagcggcggggagaccagacucuga

SEQ ID NO: 159570 - RNA, 1575 nt, Artificial Sequence
  derived and/or modified CDS sequence (opt3) from glycoprotein__RABV__KF484538.1
auggugcugcaggcccuccuuuucgcucccuuucugaucagcuccuugugcuucggcaaguuuccuauuuacaccauaccagacaaauuagggccguggucucccaucgauauucaccaucugucauguccuaacaaucuagucguugaggacgaaggaugcaacagucucagcgguuucuccuauauggagcugaaggugggcuacaucucugcaauuaaaguaaauggguuuacauguacuggaguggucacggaagccgagaccuauacaaacuucgugggcuacguuacuaccacauuuaagagaaaacacuucaggccaaugcccgaugcgugccggucggcuuauaauuggaaacuugccggugacccucgcuacgaagagucacugcauaacccauaucccgaguaccacugguugcgaaccgugaagacuacaaaggaaagccucaucgucauaaguccuuccguggcagaucuggacccauacgauaagucucugcauagccguaucuuuccgaaugggaaauguuccggaaugaccguaucaaguacguauugcagcacuaaccacgaguacaccauuuggaugcccgaaaagguuggccucggcacaucuugugacaucuucacuaccuccaaagggaagagagccucaaagggagguaggacaugcggcuuuguggaugagcggggguuauauaaaagccugaagggagcuuguaaacuuaaguugugcggcgucaguggucugcgccuaauggacgggaccuggguggcaauucaaacgucugaugagacuaaaugguguuccccugaccagcucgugaaucugcacgaucuucauagcgacgaaaucgagcaccuggucguugaagaguuggugagaaagagggaagagugccucgacgcccuggagucgauaaugacaaccaaaucuguauccuuccggcgcuuaucacaucugcgaaagcucgugccaggauuuggcaaggcuuacacuauuuucaacaaaacacuuauggaagccgaugcgcacuauaagagugucagaaccuggaaugagaucauucccagcaaaggcugccugaggguugggggaaagugucacccucaugugaacgguguguucuuuaauggcaucaucuuggggccagacggacacguccuaauucccgaaaugcaguccucucugcuccagcaacauauagagcugcuugaaagcucagugaucccgcugaugcacccuuuggcagaucucaguacgguauucaaagacggcgaugaggccgaggacuuuguugaagugcaucugcccgauguccacaagcagauuuccgguguggacuuagggcugccaagcuggggcaaguacguccuaaugucugcuggagcccucgcaacccugauccuugugauaucauugaugaaaugcugucgguggguuaaccguacaaagaguauucagcagggcccucgcgagagcgaaagaaaaguguccguaacuccccaaaaugggagggucaucucuucgugggagagcuauaagaucggaggugaaaccggccuguga

SEQ ID NO: 159571 - RNA, 1575 nt, Artificial Sequence
  derived and/or modified CDS sequence (opt3) from glycoprotein__RABV__KF484539.1
auggugcugcaggcccuccuuuucgcucccuuucugaucagcuccuugugcuuaggcaaguucccuauuuacaccauaccagacaaacuggggccguggucucccaucgauauucaccaucuaucauguccuaacaaucucgucguugaggacgaaggaugcaacagucugagcgguuuuuccuauauggagcuuaaggugggcuacaucucugcaauuaaaguaaauggguucacauguacuggaguggucacggaagccgagaccuauacaaacuuugugggcuacguuacuaccacauucaagagaaaacacuuuaggccaaugcccgaugcgugccggucggcuuauaauuggaagcuggccggugacccucgcuacgaagagucauugcauaacccauaucccgauuaccacuggcuccgaaccgugaagacuacaaaagagagccugaucgucauaaguccuuccguggcagaccuggauccauacgacaagucucuccauagccguaucuuccccgggggaaaauguuccggcaugaccguaucaaguacguauugcagcacuaaucacgaauacaccauuuggaugccggagaaggccggcuuagggacaucuugugauaucuuuacuaccuccaaaggaaagagagcuacaaaggguggcaaaaccugcggguucguugacgaaaggggacuguauaagucacuuaaaggcgcauguaaguugaaacugugcggugugagcgggcuacggcucauggauggaacgugggucgccauucaaaccagugacgagacaaagugguguucuccugaucagcuggugaaccuucacgaccugcauuccgacgagaucgaacacuugguggucgaggaacucguucgcaaaagagaggaaugccuggaugcuuuagagagcauaaugaccacuaagucggugucuuuuaggcggcugucccaucuccgcaaacuuguaccaggcuucggcaaggccuacacaauuuuuaauaagacccugauggaggcggacgcacacuauaaaucagugcgaacguggaacgaaaucauucccaguaaggggugcuugagagucggagguaaaugucacccucaugugaauggcguuuucuucaacgggaucauccuaggaccagauggccacgugcugauucccgagaugcagagcucccuccugcagcaacauauggaacuucuggagucuagcgucauaccguugaugcacccucucgccgaccccucaaccguguuuaaggaugacgaugaagcugaggacuucguagagguucaucugccagaugugcacaagcaggucagugguguggacuuagggcugccuuccuggggcagguacguccuaaugagcgccggagcacucgcuauccugaugcuugugauuucuuugaugaaaugcuguacaggcguuaaucggacuaagucaaucaaacaggggagucgugaaagcgagcgcaagguguccauaacuccccagaacggaaaaguaauuucuucgugggaaagcuauaaguccgguggcgagacagggcuguga

SEQ ID NO: 159572 - RNA, 1575 nt, Artificial Sequence
  derived and/or modified CDS sequence (opt3) from glycoprotein__RABV__KF484540.1
auggugcugcaggcccuccuuuucgcucccuuucugaucagcuccuugugcuuaggcaaguucccuauuuacaccauaccagacaaacuggggccguggucucccaucgauauucaccaucuaucauguccuaacaaucucgucguugaggacgaaggaugcaacagucugagcgguuuuuccuauauggagcuuaaggugggcuacaucucugcaauuagaguaaauggguucacauguacuggaguggucacggaagccgagaccuauacaaacuuugugggcuacguuacuaccacauucaaaaggaagcacuuucggccaaugcccgaugcgugccgcucggcuuauaauuggaaacuggccggugacccucgauacgaagagucauugcauaacccauaucccgauuaccacuggcuccguaccgugaagacuacaaaggagagccugaucgucauaaguccuuccguggcagaccuggauccauacgacaaaucucuccauagcagaaucuuccccgggggaaaguguuccggcauuaccguaucaaguacguauugcagcacuaaucacgaauacaccaucuggaugccggagaaagccggcuuagggacaucuugugauauuuuuacuaccuccaagggaaaaagggcuucaaaggguggccggacaugcggguucguugacgaacgcggacuguauaagagccuuaaaggcgcauguaaguugaaacugugcggugugagugggcuaagacucauggauggaaccugggucgccauccaaacgccugacgagauaaagugguguucuccagaucagcuggugaaccuucacgaccugcauuccgacgagauugaacacuugguggcugaggaacucgucaggaaacgggaggaaugccuggaugccuuagagagcaucaugacuacaaagucgguuucuuuucgccgacugucccaucucagaaaacuugugcccggcuucggcaaggcguacaccauuuuuaauaagacucugauggaggcagacgcccacuauaaaucaguaaggacauggaacgaaaucaucccuaguaaggggugcuugcgggugggagguaaaugucacccacaugucaauggcguguucuucaacgggauuauacuaggacccgauggccacguucugaucccggagaugcagagcucccuccugcagcaacauauggaacuucuggagucuagcgugauuccuuugaugcacccccucgcugaccugucaaccgucuuuaaggauggugacgaagccgaggauuucaucgaggugcauuuaccagacguacacaaacagguuagugggguggaucugggccuaccuuccuggggaaaguacguccucaugagcgcaggcgcucuggccacgcuuauguuggugauaucucugauuaagugcuguaaaggggucaaucguaccaagucaauccaguggggaccccgcgaaagugagagaaaagugagcguuacaccacagaacgguaaggugaucuccucuugggaaucguauaaaagcggcggggagacuaggcucuga

SEQ ID NO: 159573 - RNA, 1575 nt, Artificial Sequence
  derived and/or modified CDS sequence (opt3) from glycoprotein__RABV__KF484541.1
augauccugaaggcccuccuuuucgcucccuuucugauuagcuccuugugcuuaggcaaauucccuauauacaccaucccagacaagcuggggccguggucucccauugauauccaccaucuaucauguccuaacaaucucguggucgaggacgaaggaugcaacagucugagcgguuuuuccuauauggagcuuaaaguuggcuacauuucugcaaucaaggugaauggguucacauguacuggaguagugacggaagccgagaccuauacaaacuuugucggcuacgugacuaccacauucaaaagaaagcacuuuaggccaaugcccgaugcgugccggucggcuuauaauuggaagcuggccggugacccucgcuacgaagagucauugcauaacccauaucccgauuaccacuggcuccgaaccguuaaaacuacaaaggagagccugauaaucauuaguccuuccguggcagaccuggauccauacgacaaaucucuccauagccguaucuuccccgggggaaaguguuccggcaugaccgucucaaguacguauugcccgacuaaucacgaauacaccauuuggaugccugagaaagccagcuuaggcacaucuugugauaucuuuacuaccuccaaggggaagagagcuucaaggggaggucggacaugcggcuucguggacgaacgcgggcuguauaaaagccuuaagggagcauguaaauugaagcugugcggcguaaguggucuaagacucauggaugggaccuggguugccauacagacgucugacgagacuaaaugguguuccccagaucaacuggugaaccuucacgaccugcauagcgacgagauugaacacuuggucguggaggaacucgugaggaagcgggaggaaugccuggaugcuuuagagucgaucaugacaaccaaaucugucuccuuucgccgacugucacaucucagaaaacuuguucccggauucggcaaggccuacacuauuuuuaauaagacacugauggaggcggacgcacacuauaagagugugaggaccuggaacgaaaucaucccuagcaaaggcugcuugcggguagggggaaagugucacccacaugugaauggugucuucuucaacggcauuauacuagggcccgauggacacgugcugaucccggagaugcaguccucucuccugcagcagcauauggaacuucuggagagcucaguuauuccuuugaugcacccccucgccgacccaaguacgguguuuaaagaugacgaugaagcugaggacuucgucgaggugcaucugccugauguacacaagcaaguuuccggcguggacuuaggucugcccagcugggggaaguacguccuaaugucugccggcacccucgcaacacugaugcuugugaucucauugaugaaaugcugucguggauuuaaucgcacuaagaguauaagacaggauagcggcgaauccgggaggaaagucucugugaccccacagaacggaaagguuauuucgagcugggaguccuauaaaucagguggcgaaacagggcuguga

SEQ ID NO: 159574 - RNA, 1575 nt, Artificial Sequence
  derived and/or modified CDS sequence (opt3) from glycoprotein__RABV__KF484542.1
auggugcugcagguccuccuuuucgcccuguuuuugaucagcuccuuaugccugggcaaguuccccauuuacaccauaccugacaaacuagggccauggucuccgaucgauauucaccaucucucaugucccaacaaucugguuguggaggacgaaggaugcaacagucuuagcgguuuuuccuauauggagcugaagguaggcuacaucucugcuauuaaagugaauggguucacauguacuggagucgugacggaagcagagaccuauacaaacuuuguuggcuacgugacuaccacauucaagagaaaacacuuuaggccuaugccagaugccugccggucggcguauaauuggaaguuggcuggugacccccgcuacgaagagucacuccauaacccuuauccagaguaccacuggcugcgaaccgucaagacuacaaaagaaagccugaucgugauaagucccuccguagccgaucucgacccuuacgauaagucuuuacauagccguaucuucccauccgggaaauguucaggaaugaccguuaguagcacguauugcucuacuaaucacgaguacaccauuuggaugccggaaaaggugucccugggcacaucaugugacaucuuuacuaccagcaaaggcaagagagcaaguaaagggggaaggacaugcgguuucgucgaugagcggggccuuuauaagucuuugaagggggccuguaaacugaagcuaugcggaguguccggccuccgccugauggacgguaccuggguggcuauucaaacgagcgaugaggcaaaaugguguucgcccgaccagcuugucaaccugcacgauuugcauucugacgaaaucgagcaccucguuguggaggaacugguaagaaagagggaagagugcuuagacgcccuggaguccauaaugacuacaaaaucagugaguuuucggcgccucagccaucuucgaaagcuggucccuggguucggaaaggcuuacaccauuuuuaauaaaacuuugauggaagccgaugcgcacuauaaguccgugagaacauggaacgagaucauuccaucuaaaggcugccuaaggguuggcgggaagugucacccccaugugaauggagucuucuucaacgguaucauccugggcccugacgggcacgugcucauuccagaaaugcagagcucacugcuucagcaacauauagagcuguuggaaaguuccguaaucccccucaugcacccgcuggcagauuuaagcaccguuuuuaaagacggagaugaggccgaggacuucguggaaguccaucugccugaugugcacaagcagauuucuggcgucgaccuaggucuccccucaugggggaaguacgugcugaugagugcuggcgcccuugcaacguugguucuggugaucagccucaugaaaugcugucgguggguaaaucguaccaaguccauacagcagggaccacgcgagucugaaagaagggucucggugacaccucaaaacggcaaaguuauuagcuccugggagucauauaagaucgggggagaaacuggucuguga

SEQ ID NO: 159575 - RNA, 1575 nt, Artificial Sequence
  derived and/or modified CDS sequence (opt3) from glycoprotein__RABV__KF484543.1
auggugcugcaggcccuccuuuucgcucccuuucugaucagcuccuugugcuuaggcaaguucccuauuuacaccauaccagacaaacuggggccguggucucccaucgauauucaccaucuaucauguccuaacaaucucgucguugaggacgaaggaugcaacagucugagcgguuuuuccuauauggagcuuaaggugggcuacaucucugcaauuaaaguaaauggguucacauguacuggaguggucacggaagccgagaccuauacaaacuuugugggcuacguuacuaccacauucaagagaaaacacuuuaggccaaugcccgaugcgugccggucggcuuauaauuggaagcuggccggugacccucgcuacgaagagucauugcauaacccauaucccgaguaccacuggcuccgaaccgugaagacuacaaaagaaagccugaucgucauaaguccuuccguggcagaucuggacccauacgauaagucucuccauagccguaucuucccguccgggaaauguucaggaaugaccguaaguagcacguauugcucuacuaaucacgaguacaccauuuggaugcccgaaaagguuggcuuaggcacauccugugacaucuuuacuaccucaaaagggaagagagccagcaagggagguaggacaugcggcuucguggaugagcgggggcuguauaaaagucuuaagggagcuuguaaauugaagcugugcggcgucucuggucuacgccucauggacgggaccuggguggcaaugcaaacguccgaugagacuaaaugguguagcccugaccagcuggugaaccuucacgaucugcauucggacgaaauugagcacuuggucguugaggaacucgugagaaagagggaagagugccuggacgccuuagagucuaucaugacaaccaaauccguaucauuucggcgccugagucaucuccgaaaacuugugccaggauucggcaaggcuuacacuauauuuaauaagacacugauggaagccgaugcgcacuauaagagcgucagaaccugguccgagauuauccccucuaaaggcugcuugaggguugggggaaagugucacccucaugugaacgguguguucuucaauggcauuauccuagggccagacggacacguccugauccccgaaaugcagagcucacuccugcagcaacauauggagcuucuggaaaguuccgugauuccguugaugcacccucucgcagaucugagcacgguauuuaaagacggcgaugaggccgaggacuucguugaagugcauuuacccgauguccacaagcagauaucugguguggaccuggggcuaccaucauggggcaaguacguccucaugagugcuggagcccuggcaacccuuaucuuggugauuagccugaugaaaugcugucgguggguuaacaagacaaaauccauccagcagggcccucgugagucugaacgcaaggugucgguaacuccccaaaaugggaaagucauaagcuccugggagucauauaagauuggaggugaaaccggccucuga

SEQ ID NO: 159576 - RNA, 1575 nt, Artificial Sequence
  derived and/or modified CDS sequence (opt3) from glycoprotein__RABV__KF484544.1
auggugcugcaggcccuccuuuucgcucccuuucugaucagcuccuugugcuuaggcaaguucccuauuuacaccauaccagacaaacuggggccguggucucccaucgauauucaccaucuaucauguccuaacaaucucgucguugaggacgaaggaugcaacagucugagcgguuuuuccuauauggagcuuaaggugggcuacaucucugcaauuaaaguaaauggguucacauguacuggaguggucacggaagccgagaccuauacaaacuuugugggcuacguuacuaccacauucaagagaaaacacuuuaggccaaugcccgaugcgugccggucggcuuauaauuggaagcuggccggugacccucgcuacgaagagucauugcauaacccauaucccgaguaccacuggcuccgaaccgugaagacuacaaaagaaagccugaucgucauaaguccuuccguggcagaucuggacccauacgauaagucucuccauagccguaucuucccguccgggaaauguucaggaaugaccguaaguagcacguauugcucuacuaaucacgaguacaccauuuggaugcccgaaaagguuggcuuaggcacauccugugacaucuuuacuaccucaaaagggaagaaggccagcaaaggagguagaacaugcggcuucguggaugagagggggcuguauaagagucuuaaaggagcuuguaaguugaaacugugcggcgucucuggucuacggcucauggacgggaccuggguggcaaugcaaacguccgaugagacuaagugguguagcccugaccagcuggugaaccuucacgaucugcauucggacgaaauugagcacuuggucguugaggaacucgugcgcaaaagagaagagugccuggacgccuuagagucuaucaugacaaccaaguccguaucauuuaggcggcugagucaucuccgcaaacuugugccaggauucggcaaggcuuacacuauauuuaauaagacacugauggaagccgaugcgcacuauaaaagcguccgaaccuggaacgagauuauccccuccaagggcugcuugagaguugggggaaaaugucacccucaugugaaugguguguucuucaacggcauuauccuagggccagacggacacguccugauccccgaaaugcagucuuuucuccugcagcaacauauggagcuucuggaaagcucagugauuccguugaugcacccucucgcagaucugaguacgguauucaaggacggcgaugaggccgaggacuuuguugaagugcauuuacccgauguccacaagcagauauccgguguggaccuggggcuaccaagcuggggcaaauacguccucaugucugcuggagcccuggcaacccuuaucuuggugauuucacugaugaagugcuguagguggguuaaucggacaaaaaguauccagcagggcccucgugagagcgaacgcaagguguccguaacuccccaaaacgggaaagucauaucuucgugggagagcuauaagauuggaggugaaaccggccucuga

SEQ ID NO: 159577 - RNA, 1575 nt, Artificial Sequence
  derived and/or modified CDS sequence (opt3) from glycoprotein__RABV__KF484545.1
auggugcugcaggcccuccuuuucgcucccuuucugaucagcuccuugugcuuaggcaaguucccuauuuacaccauaccagacaaacuggggccguggucucccaucgauauucaccaucuaucauguccuaacaaucucgucguugaggacgaaggaugcaacagucugagcgguuuuuccuauauggagcuuaaggugggcuacaucucugcaauuaaaguaaauggguucacauguacuggaguggucacggaagccgagaccuauacaaacuuugugggcuacguuacuaccacauucaagagaaaacacuuuaggccaaugcccgaugcgugccggucggcuuauaauuggaagcuggccggugacccucgcuacgaagagucauugcauaacccauaucccgaguaccacuggcuccgaaccgugaagacuacaaaagaaagccugaucgucauaaguccuuccguggcagaucuggacccauacgauaagucucuccauagccguaucuucccguccgggaaauguucaggaaugaccguaaguagcacguauugcucuacuaaucacgaguacaccauuuggaugcccgaaaagguuggcuuaggcacauccugugacaucuuuacuaccucaaaagggaagaaggccagcaaaggagguagaacaugcggcuucguggaugagagggggcuguauaagagucuuaaaggagcuuguaaguugaaacugugcggcgucucuggucuacggcucauggacgggaccuggguggcaaugcaaacguccgaugagacuaagugguguagcccugaccagcuggugaaccuucacgaucugcauucggacgaaauugagcacuuggucguugaggaacucgugcgcaaaagagaagagugccuggacgccuuagagucuaucaugacaaccaaguccguaucauuuaggcggcugagucaucuccgcaaacuugugccaggauucggcaaggcuuacacuauauuuaauaagacacugauggaagccgaugcgcacuauaaaagcguccgaaccuggaacgagauuauccccuccaagggcugcuugagaguugggggaaaaugucacccucaugugaaugguguguucuucaacggcauuauccuagggccagacggacacguccugauccccgaaaugcagucuagccuccugcagcaacauauggagcuucuggaaucaagugugauuccguugaugcacccucucgcagaucuguccacgguauuuaaggacggcgaugaggccgaggacuucguugaagugcauuuacccgauguccacaagcagauaagcgguguggaccuggggcuaccaucuuggggcaaauacguccucaugucagcuggagcccuggcaacccuuaucuuggugauuagucugaugaagugcuguagguggguuaaucggacaaaaagcauccagcagggcccucgugaguccgaacgcaaggugucuguaacuccccaaaacgggaaagucauaucgagcugggaguccuauaagauuggaggugaaaccggccucuga

SEQ ID NO: 159578 - RNA, 1575 nt, Artificial Sequence
  derived and/or modified CDS sequence (opt3) from glycoprotein__RABV__KF484546.1
auggugcugcaggcccuccuuuucgcucccuuucugaucagcuccuugugcuuaggcaaguucccuauuuacaccauaccagacaaacuggggccguggucucccaucgauauucaccaucuaucauguccuaacaaucucgucguugaggacgaaggaugcaacagucugagcgguuuuuccuauauggagcuuaaggugggcuacaucucugcaauuaaaguaaauggguucacauguacuggaguggucacggaagccgagaccuauacaaacuuugugggcuacguuacuaccacauucaagagaaaacacuuuaggccaaugcccgaugcgugccggucggcuuauaauuggaagcuggccggugacccucgcuacgaagagucauugcauaacccauaucccgaguaccacuggcuccgaaccgugaagacuacaaaagaaagccugaucgucauaaguccuuccguggcagaucuggacccauacgauaagucucuccauagccguaucuucccguccgggaaauguucaggaaugaccguaaguagcacguauugcucuacuaaucacgaguacaccauuuggaugcccgaaaagguuggcuuaggcacauccugugacaucuuuacuaccucaaaagggaagagagccagcaagggagguaggacaugcggcuucguggaugagcgggggcuguauaaaagucuuaagggagcuuguaaauugaagcugugcggcgucucuggucuacgccucauggacgggaccuggguggcaaugcaaacguccgaugagacuaaaugguguagcccugaccagcuggugaaccuucacgaucugcauucggacgaaauugagcacuuggucguugaggaacucgugagaaagagggaagagugccuggacgccuuagagucuaucaugacaaccaaauccguaucauuucggcgccugagucaucuccgaaaacuugugccaggauucggcaaggcuuacacuauauuuaauaagacacugauggaagccgaugcgcacuauaagagcgucagaaccuggaacgagauuauccccuccaaaggcugcuugaggguugggggaaagugucacccucaugugaaugguguguucuucaacggcauuauccuagggccagacggacacguccugauccccgaaaugcagucuagccuccugcagcaacauauggagcuucuggaaucaagugugauuccguugaugcacccucucgcagaucuguccacgguauuuaaagacggcgaugaggccgaggacuucguugaagugcauuuacccgauguccacaagcagauaagcgguguggaccuggggcuaccaucuuggggcaaguacguccucaugucagcuggagcccuggcaacccuuaucuuggugauuagucugaugaaaugcugucgguggguuaaucguacaaagagcauccagcagggcccucgcgaguccgaaagaaaagugucuguaacuccccaaaacgggaaggucauaucgagcugggaguccuauaaaauuggaggugaaaccggccucuga

SEQ ID NO: 159579 - RNA, 1575 nt, Artificial Sequence
  derived and/or modified CDS sequence (opt3) from glycoprotein__RABV__KF484547.1
auggugcugcaggcccuccuuuucgcucccuuucugaucagcuccuugugcuuaggcaaguucccuauuuacaccauaccagacaaacuggggccguggucucccaucgauauucaccaucuaucauguccuaacaaucucgucguugaggacgaaggaugcaacagucugagcgguuuuuccuauauggagcuuaaggugggcuacaucucugcaauuaaaguaaauggguucacauguacuggaguggucacggaagccgagaccuauacaaacuuugugggcuacguuacuaccacauucaagagaaaacacuuuaggccaaugcccgaugcgugccggucggcuuauaauuggaagcuggccggugacccucgcuacgaagagucauugcauaacccauaucccgauuaccacuggcuccgaaccgugaagacuacaaaagagagccugaucgucauaaguccuuccguggcagaccuggauccauacgacaagucucuccauagccguaucuucccguccgggaaauguucaggaaugaccguaaguagcacguauugcucuacuaaucacgaauacaccauuuggaugcccgagaaggccggcuuaggcacauccugugauaucuuuacuaccucaaaagggaagagagcuagcaagggagguaggacaugcggcuucguugacgaacgggggcuguauaaaagucuuaagggagcauguaaauugaagcugugcggcgugucuggucuacgccucauggaugggaccugggucgccauucaaacguccgacgagacuaaaugguguagcucggaucagcuggugaaccuucacgaccugcauucugacgagaucgaacacuugguggucgaggaacucguuagaaagagggaggaaugccuggaugcuuuagaguccauaaugacaaccaaaucagugaguuuucggcgccugagccaucuccgaaaacuuguaccuggauucggcaaggccuacacuauuuuuaauaagacacugauggaggcggacgcacacuauaaguccgugagaaccuggaacgaagucaucccaucuaaaggcugcuugaggguugggggaaagugucacccccaugugaaugguguguucuucaacggcauuauccuagggccugauggacacguccugaucccagagaugcagagcucacuccugcagcaacauauggaacuucuggagaguuccgugauucccuugaugcacccgcucgccgacauaagcacgguauuuaaagauggcgacgaagcugaggauuucguugaggugcaucugccugacguccacaagcagaucucugguguggauuuagggcugcccucauggggcaaguacguccuaaugagugccggagcacucgcuauucugaugcuuaugaucagcuugaugaaaugcugucggggcgugaaucguaccaaguccauacagcaggggccacgcgaaucugagagaaaaguuucggugacaccucaaaacggaaagguaauuagcuccugggaaucauauaaaagugguggcgagacugggcuguga

SEQ ID NO: 159580 - RNA, 1575 nt, Artificial Sequence
  derived and/or modified CDS sequence (opt3) from glycoprotein__RABV__KF484548.1
auggugcugcagguccuccuuuucgcccuguuuuugaucagcuccuuaugccugggcaaguuccccauuuacaccauaccugacaaacuagggccauggucuccgaucgauauucaccaucucucaugucccaacaaucugguuguggaggacgaaggaugcaacagucuuagcgguuuuuccuauauggagcugaagguaggcuacaucucugcuauuaaagugaauggguucacauguacuggagucgugacggaagcagagaccuauacaaacuuuguuggcuacgugacuaccacauucaagagaaaacacuuuaggccuaugccagaugccugccggucggcguauaauuggaaguuggcuggugacccccgcuacgaagagucacuccauaacccuuauccagaguaccacuggcugcgaaccgucaagacuacaaaagaaagccugaucgugauaagucccuccguagccgaucucgacccuuacgauaagucuuuacauagccguaucuucccauccgggaaauguucaggaaugaccguuaguagcacguauugcucuacuaaucacgaguacaccauuuggaugccggaaaaggugucccugggcacaucaugugacaucuuuacuaccagcaaaggcaagagagcaaguaaagggggaaggacaugcgguuucgucgaugagcggggccuuuauaagucuuugaagggggccuguaaacugaagcuaugcggaguguccggccuccgccugauggacgguaccuggguggcuauucaaacgagcgaugaggcaaaaugguguucgcccgaccagcuugucaaccugcacgauuugcauucugacgaaaucgagcaccucguuguggaggaacugguaagaaagagggaagagugcuuagacgcccuggaguccauaaugacuacaaaaucaauuaguuuucggcgccucagccaucuucgaaagcuggugccuggguucggaaaggcuuacaccaucuuuaauaaaacuuugauggaagccgaugcgcacuauaaguccgucagaacauggaacgagauuaucccaucuaaaggcugccuaagggugggcgggaagugucacccccauguuaauggaguguucuucaacgguaucauucugggcccugacgggcacguccucauaccagaaaugcagagcucacugcuucagcaacauaucgagcuguuggaaaguuccgugauuccccucaugcacccgcuggcagauuuaagcaccguauuuaaagacggagaugaggccgaggacuucguugaagugcaucugccugauguccacaagcagaucucuggcguggaccuaggucuccccucaugggggaaguacguccugaugagugcuggcgcccuugcaacguuggugcugguuauaagccucaugaaauggugccggugggugaauaagaccaaauccauucagcagggaccacgugagucugaacgcaagguaucggucacaccucaaaacggcaaagugaucagcuccugggagucauauaagaucgggggagaaacuggucuguga

SEQ ID NO: 159581 - RNA, 1575 nt, Artificial Sequence
  derived and/or modified CDS sequence (opt3) from glycoprotein__RABV__KF484549.1
auggugcugcaggcccuccuuuucgcucccuuucugaucagcuccuugugcuuaggcaaguucccuauuuacaccauaccagacaaacuggggccguggucucccaucgauauucaccaucuaucauguccuaacaaucucgucguugaggacgaaggaugcaacagucugagcgguuuuuccuauauggagcuuaaggugggcuacaucucugcaauuaaaguaaauggguucacauguacuggaguggucacggaagccgagaccuauacaaacuuugugggcuacguuacuaccacauucaagagaaaacacuuuaggccaaugcccgaugcgugccggucggcuuauaauuggaagcuggccggugacccucgcuacgaagagucauugcauaacccauaucccgauuaccacuggcuccgaaccgugaagacuacaaaagagagccugaucgucauaaguccuuccguggcagaccuggauccauacgacaagucucuccauagccguaucuuccccgggggaaaauguuccggcaugaccguaucaaguacguauugcccgacuaaucacgaauacaccauuuggaugccugagaaggccggcuuagggacaagcugugauaucuuuacuaccucuaaaggaaagagagcuuccaaggguggcaggacaugcggguucguugacgaacggggacuguauaaaucacuuaagggcgcauguaaauugaagcugugcggugugagcgggcuacgccucauggauggaaccugggucgccauucaaacgagugacgagacuaaaugguguucuccagaucagcuggugaaccuucacgaccugcauuccgacgagaucgaacacuugguggucgaggaacucguuagaaagagggaggaaugccuggaugcuuuagagagcauaaugacaaccaaaucggugucuuuucggcgccugucccaucuccgaaaacuuguacccggcuucggcaaggccuacacuauuuuuaauaagacacugauggaggcggacgcacacuauaagucagugagaaccuggaacgaaaucauuccuaguaaagggugcuugagggucggagguaagugucacccacaugugaauggcguuuucuucaacgggaucauccuaggacccgauggccacgugcugauuccggagaugcagagcucccuccugcagcaacaugucgaacuucuggagucuagcgugauaccuuugaugcacccccucgccgacccaucaacgguauuuaaagaugacgaugaagcugaggacuucguugaggugcaucugccugauguccaccgucaggugaguggugucgacuuagggcugcccuccuggggcaaguacgugcuaaugagcgccggagcacucgcuacccugaugcuuguuaucucuuugaugaagugcugucggggcuuuaaucgcacaaaaucaacuagacaggggaguagggaaagcgagcggaagguguccguaaccccacagaacggaaaagucauuucuucgugggaaagcuauaaguccgguggcgagacagggcuguga

SEQ ID NO: 159582 - RNA, 1575 nt, Artificial Sequence
  derived and/or modified CDS sequence (opt3) from glycoprotein__RABV__KF484550.1
auggugcugcaggcccuccuuuucgcucccuuucugaucagcuccuugugcuucggcaaguuuccuauuuacaccauaccagacaaauuagggccguggucucccaucgauauucaccaucugucauguccuaacaaucuagucguugaggacgaaggaugcaacagucucagcgguuucuccuauauggagcugaaggugggcuacaucucugcaauuaaaguaaauggguuuacauguacuggaguggucacggaagccgagaccuauacaaacuucgugggcuacguuacuaccacauuuaagagaaaacacuucaggccaaugcccgaugcgugccggucggcuuauaauuggaagguggccggugacccucgcuacgaagagucacuucauaacccauaucccgauuaccacuggcugcgaaccgucaagacuacaaaagagagcuugaucauaaucaguccuuccguggcagaccucgauccauacgacaagucucugcauagccguauuuuucccgggggaaaauguuccggcaugaccaucucaaguacguauugcagcacuaaucacgauuacaccauuuggaugccggaaaagacaggccuggggacuucuugugacaucuucaccacauccaaaggaaagagagccucaaaggguggcaggaccugcggguuuguagaugagcggggacucuauaagagcuuaaagggcgcuuguaaacugaaacuuugcgguguuaguggguugcgccugauggacggaacgugggcagccauacaaacuucugaugaaacaaaaugguguuccccugaccagcuagugaaccuccacgaccugcauagcgaugagauugagcaccuugucguggaggaacuggugagaaggcgggaagagugcuuggacgcucucgaaucgaucaugaccacuaagucugucuccuuccgccgacugucacauuuaagaaaacugguuccaggcuuuggcaaggccuacacaauuuucaauaagacccucauggaggcggaugcacacuauaaaagugugaggacguggaacgagaucauccccagcaaggggugccuucggguaggagguaaaugucacccucaugugaauggcgucuucuuuaacgggauuauacugggaccagacggccacguguugauccccgaaaugcaguccucucuacugcagcaacauauggagcuccuggaaagcucaguuauuccgcuuaugcacccucuggccgauuugaguaccguguucaaggacggugaugaggcugaagacuuugucgaggugcaucuccccgauguacacaaacagguuuccgggguggaccugggcuuaccaagcuggggaaaguacaugcugaugucugccggcgcacuagcuacacucaugcuggucgugccucuuaugaagugcugucgucgcgucaauagaacuaaaucaauccagcaggggcccagggagagugaucggaaggugagcguuaccccacaauccggaaaagugauaucuucgugggaaagcuauaaguccgguggcgggacaggauuguga

SEQ ID NO: 159583 - RNA, 1575 nt, Artificial Sequence
  derived and/or modified CDS sequence (opt3) from glycoprotein__RABV__KF484551.1
auggugcugcaggcccuccuuuucgcucccuuucugaucagcuccuugugcuuaggcaaguucccuauuuacaccauaccagacaaacuggggccguggucucccaucgauauucaccaucuaucauguccuaacaaucucgucguugaggacgaaggaugcaacagucugagcgguuuuuccuauauggagcuuaaggugggcuacaucucugcaauuaaaguaaauggguucacauguacuggaguggucacggaagccgagaccuauacaaacuuugugggcuacguuacuaccacauucaagagaaaacacuuuaggccaaugcccgaugcgugccggucggcuuauaauuggaagcuggccggugacccucgcuacgaagagucauugcauaacccauaucccgaguaccacuggcuccgaaccgugaagacuacaaaagaaagccugaucgucauaaguccuuccguggcagaucuggacccauacgauaagucucuccauagccguaucuucccguccgggaaauguucaggaaugaccguaaguagcacguauugcucuacuaaucacgaguacaccauuuggaugcccgaaaagguuggcuuaggcacauccugugacaucuuuacuaccucaaaagggaagagagccagcaagggagguaggacaugcggcuucguggaugagcgggggcuguauaaaagucuuaagggagcuuguaaauugaagcugugcggcgucucuggucuacgccucauggacgggaccuggguggcaaugcaaacguccgaugagacuaaaugguguagcccugaccagcuggugaaccuucacgaucugcauucggacgaaauugagcacuuggucguugaggaacucgugagaaagagggaagagugccuggacgccuuagagucuaucaugacaaccaaauccguaucauuucggcgccugagucaucuccgaaaacuugugccaggauucggcaaggcuuacacuauauuuaauaagacacugauggaagccgaugcgcacuauaagagcgucagaaccuggaacgagauuauccccuccaaaggcugcuugaggguugggggacggugucacccucaugugaaugguguguucuucaacggcauuauccuagggccagacggacacguccugauccccgaaaugcagucuagccuccugcagcaacauauggagcuucuggaaucaagugugauuccguugaugcacccucucgcagaucuguccacgguauuuaaggacggcgaugaggccgaggacuucguugaagugcauuuacccgauguccacaaacagauaagcgguguggaccuggggcuaccaucuuggggcaaguacguccucaugucagcuggagcccuggcaacccuuaucuuggugauuagucugaugaagugcugucguuggguuaaucgcacaaaaagcauccagcagggcccuagagaguccgaaaggaaggugucuguaacuccccaaaacgggaaagucauaucgagcugggaguccuauaagauuggaggugaaaccggccucuga

SEQ ID NO: 159584 - RNA, 1575 nt, Artificial Sequence
  derived and/or modified CDS sequence (opt3) from glycoprotein__RABV__KF484552.1
auggugcugcaggcccuccuuuucgcucccuuucugaucagcuccuugugcuuaggcaaguucccuauuuacaccauaccagacaaacuggggccguggucucccaucgauauucaccaucuaucauguccuaacaaucucgucguugaggacgaaggaugcaacaaucugagugguuuuagcuauauggagcuuaaggugggcuacaucuccgcaauuaaaguaaacggguucacauguacuggaguggucacggaagccgagaccuauacaaauuuugugggcuacguuacuaccacauucaagagaaaacacuuuaggccaaugcccgaugcgugccggucugcuuauaacuggaagcuggccggugacccucgcuacgaagagucguugcauaauccauaucccgaguaccacuggcuccgaaccgugaagacuacaaaagaaucacugaucgucauaagcccuaguguggcagaucuggacccauacgauaagucccuccauucucguaucuucccgagcgggaaauguuccggaaugaccguaucaaguacguauugcagcacuaaccacgaguacaccauuuggaugcccgaaaaggccggcuuaggcacaucuugugacaucuuuacuaccuccaaagggaagagagcuucaaagggagguaggacaugcggcuucguugaugagcgggggcuguauaaaagccuuaagggagcauguaaauugaagcugugcggcgugaguggucuacgccucauggacgggaccugggucgccauucaaacgucugaugagacuaaaugguguuccccugaccagcuggugaaucuucacgaucugcauagcgacgaaaucgagcacuugguggucgaggaacucguuagaaagagggaagagugccuggacgcuuuagagucgauaaugacaaccaaaucuguguccuuucggcgccugucacaucuccgaaaacuuguaccaggauucggcaaggccuacacuauuuuuaacaagacacugauggaagcggaugcacacuauaagagugugagaaccuggaaugagaucauucccagcaaaggcugcuugagggucgggggaaagugucacccucaugugaacgguguuuucuucaauggcaucauccuagggccagacggacacgugcugauucccgaaaugcaguccucucuccugcagcaacauauggagcuucuggaaagcucagucauaccguugaugcacccucucgccgaucugaguacgguguuuaaagacggcgaugaggcugaggacuucguagaaguucauuuacccgaugugcacaagcagaucuccggugucgaccuggggcuaccaagcuggggcaaguacgugaugaugucugccggagcauuugcuacccucauucuggucaucucacuuaugaaaugcugucggugggugaaccguacaaagaguauacagcagggcccucgcgagagcgaaagaaaaguuuccgugacuccccaaaaugggaagguaauuucuucgugggagagcuauaaaaucggaggugaaaccggcuuguga

SEQ ID NO: 159585 - RNA, 1575 nt, Artificial Sequence
  derived and/or modified CDS sequence (opt3) from glycoprotein__RABV__KF484553.1
auggugcugcaggcccuccuuuucgcucccuuucugaucagcuccuugugcuuaggcaaguucccuauuuacaccauaccagacaaacuggggccguggucucccaucgauauucaccaucuaucauguccuaacaaucucgucguugaggacgaaggaugcaacagucugagcgguuuuuccuauauggagcuuaaggugggcuacaucucugcaauuaaaguaaauggguucacauguacuggaguggucacggaagccgagaccuauacaaacuuugugggcuacguuacuaccacauucaagagaaaacacuuuaggccaaugcccgaugcgugccggucggcuuauaauuggaagcuggccggugacccucgcuacgaagagucauugcauaacccauaucccgaguaccacuggcuccgaaccgugaagacuacaaaagaaagccugaucgucauaaguccuuccguggcagaucuggacccauacgauaagucucuccauagccguaucuucccguccgggaaauguucaggaaugaccguaaguagcacguauugcucuacuaaucacgaguacaccauuuggaugcccgaaaagguuuccuuaggcacaucaugugacaucuuuacuaccagcaaaggcaagagagccaguaaagggggaaggacaugcgguuucguggaugagcggggccuguauaagucucuuaagggggcuuguaaauugaagcugugcggagucuccggccuacgccucauggacgguaccuggguggcaauucaaacgagcgaugagacuaaaugguguucgccugaccagcuggugaaccuucacgaucugcauucugacgaaaucgagcacuuggucguugaggaacucgugagaaagagggaagagugccuggacgccuuagaguccauaaugacaaccaaaucaguaaguuuucggcgccugagccaucuccgaaaacuugugccaggguucggaaaggcuuacacuauuuuuaauaagacacugauggaagccgaugcgcacuauaaguccgucagaaccuggaacgagaucauucccucuaaaggcugcuugagggugggcgggaagugucacccucauguuaauggaguguucuucaacgguaucauccuaggcccagacgggcacguccugauucccgaaaugcagagcucacuccugcagcaacauauagagcuucuggaaaguuccgugaucccguugaugcacccucucgcagaucugagcacgguauuuaaagacggagaugaggccgaggacuucguugaagugcauuuacccgauguccacaagcagauuucuggcguggaccugggucuaccaucaugggggaaguacguccucaugagugcuggcgcccuggcaacccuuguguugguuaucagccugaugaaaugcugucggugggugaaucguacaaaguccauacagcagggaccucgcgagucugaaagaaaaguaucggucacuccccaaaacggcaaggugauuagcuccugggagucauauaaaaucgggggagaaaccggucucuga

SEQ ID NO: 159586 - RNA, 1575 nt, Artificial Sequence
  derived and/or modified CDS sequence (opt3) from glycoprotein__RABV__KF484554.1
auggugcugcaggcccuccuuuucgcucccuuucugaucagcuccuugugcuuaggcaaguucccuauuuacaccauaccagacaaacuggggccguggucucccaucgauauucaccaucuaucauguccuaacaaucucgucguugaggacgaaggaugcaacaaucugagugguuuuagcuauauggagcuuaaggugggcuacaucuccgcaauuaaaguaaacggguucacauguacuggaguggucacggaagccgagaccuauacaaauuuugugggcuacguuacuaccacauucaagagaaaacacuuuaggccaaugcccgaugcgugccggucugcuuauaacuggaagcuggccggugacccucgcuacgaagagucguugcauaauccauaucccgaguaccacuggcuccgaaccgugaagacuacaaaagaaucacugaucgucauaagcccuaguguggcagaucuggacccauacgauaagucccuccauucucguaucuucccgagcgggaaauguuccggaaugaccguaucaaguacguauugcagcacuaaccacgaguacaccauuuggaugcccgaaaaggccggcuuaggcacaucuugugacaucuuuacuaccuccaaagggaagagagcuucaaagggagguaggacaugcggcuucguugaugagcgggggcuguauaaaagccuuaagggagcauguaaauugaagcugugcggcgugaguggucuacgccucauggacgggaccugggucgccauucaaacgucugaugagacuaaaugguguuccccugaccagcuggugaaucuucacgaucugcauagcgacgaaaucgagcacuugguggucgaggaacucguuagaaagagggaagagugccuggacgcuuuagagucgauaaugacaaccaaaucuguguccuuucggcgccugucauaccuccgaaaacuuguaccaggauucggcaaggccuauacuauuuuuaacaagacacugauggaagcggaugcacauuacaagagugugagaaccuggaaugagaucauucccagcaaaggcugcuugagggucgggggaaagugucacccucacgugaacgguguuuucuucaauggcaucauccuagggccagacggacaugugcugauucccgaaaugcaguccucucuccugcagcaacacauggagcuucuggaaagcucagucauaccguugaugcauccucucgccgaucugaguacgguguuuaaagacggcgaugaggcugaggacuucguagaaguucacuuacccgaugugcauaagcagaucuccggugucgaccuggggcuaccaagcuggggcaaguaugugaugaugucugccggagcacucgcuacccugauucuugucaucucauugaugaaaugcugucggugggugaaccguacaaagaguauacagcagggcccucgcgagagcgaaagaaaaguuuccgugacuccccaaaaugggaagguaauuucuucgugggagagcuacaaaaucggaggugaaaccggccuguga

SEQ ID NO: 159587 - RNA, 1575 nt, Artificial Sequence
  derived and/or modified CDS sequence (opt3) from glycoprotein__RABV__KF484555.1
auggugcugcaggcccuccuuuucgcuccccuguugaucagcuccuuaugccugggcaaguuuccuauuuacaccauaccagagaaacuagggccguggucucccaucgacauucaccaucucucauguccuaacaaucuggucguugaagaugagggaugcaacagucuuagcgguuucuccuauauggaacugaaggugggcuacaucucugcaauuaaaguaaauggguuuacauguacuggaguggucacggaggccgaaaccuauacaaacuucgugggcuacguuacuaccacauuuaagagaaaacacuucucgccaaugcccgacgcgugcaggucagcuuauaauuggaaguuggccggugauccucgguacgaggagagccuccauaacccauaucccgacuaccacuggcugcgcaccgugaagacuacaaaagaaagucugaucgucauauccccuucuguggcagaucucgacccauacgauaagagcuuacauucccgaaucuuucccgggggaaaauguucaggcaugaccguaaguagcacguauugcucuacuaaucacgaguacaccauuuggaugccggaaaagccuggccuggggacauccugugacaucuucacuaccucaaaaggaaagcgugccagcaaggaggguagaacaugcggcuuuguugaugagagggggcuuuauaaaaguuugaagggagcuuguaaacugaagcuaugcggcgugucuggucuccggcugauggacgggaccugggucgcaauucaaacguccgaugaaaucaaaugguguagcccagaccagcuugugaaccugcacgauuugcauucggacgagauagaacaccucguggucgaggaacugguucgcaagagagaggagugcuuagacgcccuggaaucuauuaugacuacaaaauccgugucauucaggcggcucagucaucuucgcaagcugguacccggauuuggcaaggcuuacaccaucuucaauaaaacuuugauggaggccgaugcgcacuauaagagcgugcgaacauggaacgaaauuaucccuuccaaaggcugccuaagagucgggggaaagugucacccacaugugaaugguguguuuuucaacggcaucauucuggggcccgacggacacgugcucauaccggagaugcagucuagccugcuucagcaacaugucgaacuguuggagucaagugugaucccucucaugcacccccuggcagauccauccaccguauucaaagacgaugacgaggccgaagauuuuguugaggugcauuuaccugacguccagaagcagguuagcggcgucgaucugggucuacccucuugggggaaguacgugcucaugucagcuggcgcccuggcaacgcuuguuuuggugauuagucugaugaaaugcuguaggggaaucaaucggaccaagcucauaaaacagggcagccgugaauccgagcgcaagguaucugucacaccacaaaacgggaaagugauuucgagcugggaauccuauaagucaggaggugagacuggccuguga

SEQ ID NO: 159588 - RNA, 1575 nt, Artificial Sequence
  derived and/or modified CDS sequence (opt3) from glycoprotein__RABV__KF484556.1
auggugcugcaggcccuccuuuucgcucccuuucugaucagcuccuugugcuuaggcaaguucccuauuuacaccauaccagacaaacuggggccguggucucccaucgauauucaccaucuaucauguccuaacaaucucgucguugaggacgaaggaugcaacaaucugagugguuuuagcuauauggagcuuaaggugggcuacaucuccgcaauuaaaguaaacggguucacauguacuggaguggucacggaagccgagaccuauacaaauuuugugggcuacguuacuaccacauucagaaggaagcacuuucggccaaugcccgaugcgugccgcucugcuuauaacuggaaacuggccggugacccucgauacgaagagucguugcauaauccauaucccgaguaccacuggcuccguaccgugaagacuacaaaggaaucacugaucgucauaagcccuaguguggcagaucuggacccauacgauaaaucccuccauucuagaaucuucccgagcgggaaguguuccggaaugaccguaucaaguacguauugcagcacuaaccacgaguacaccauuuggaugcccgaaaaagccggcuuaggcacaucuugugacaucuuuacuaccuccaaggggaaaagggcuucaaagggaggucggacaugcggcuucguugaugagcgcgggcuguauaagagccuuaaaggagcauguaaguugaaacugugcggcgugaguggucuaagacucauggacgggaccugggucgccauucaaacgucugaugagacuaagugguguuccccugaccagcuggugaaucuucacgaucugcauagcgacgaaaucgagcacuugguggucgaggaacucguuaggaaacgggaagagugccuggacgcuuuagagucgauaaugacaaccaagucuguguccuuucgccgacugucacaucucagaaaacuuguaccaggauucggcaaggccuacacuauuuuuaacaagacacugauggaagcggaugcacacuauaaaagugugaggaccuggaaugagaucauucccagcaagggcugcuugcgggucgggggaaaaugucacccucaugugaacgguguuuucuucaauggcaucauccuagggccagacggacacgugcugauucccgaaaugcaguccucucuccugcagcaacauauggagcuucuggaaagcucagucauaccguugaugcacccucucgccgaucugaguacgguguuuaaggacggcgaugaggcugaggacuucguagaaguucauuuacccgaugugcacaaacagaucuccggugucgaccuggggcuaccaagcuggggcaaguacgugaugaugucugccggagcacucgcuacccugauucuugucaucucauugaugaagugcugucguugggugaaccgcacaaaaaguauacagcagggcccuagagagagcgaaaggaagguuuccgugacuccccaaaaugggaaaguaauuucuucgugggagagcuauaagaucggaggugaaaccggccuguga

SEQ ID NO: 159589 - RNA, 1575 nt, Artificial Sequence
  derived and/or modified CDS sequence (opt3) from glycoprotein__RABV__KF484557.1
auggugcugcaggcccuccuuuucgcucccuuucugaucagcuccuugugcuucggcaaguuuccuauuuacaccauaccagacaaauuagggccguggucucccaucgauauucaccaucugucauguccuaacaaucuagucguugaggacgaaggaugcaacagucucagcgguuucuccuauauggagcugaaggugggcuacaucucugcaauuaaaguaaauggguuuacauguacuggaguggucacggaagccgagaccuauacaaacuucgugggcuacguuacuaccacauuuaagagaaaacacuucaggccaaugcccgaugcgugccggucggcuuauaauuggaagguggccggugacccucgcuacgaagagucacuucauaacccauaucccgauuaccacuggcugcgaaccgucaagacuacaaaagagagcuugaucauaaucaguccuuccguggcagaccucgauccauacgacaagucucugcauagccguauuuuucccgggggaaaauguuccggcaugaccaucucaaguacguauugcagcacuaaucacgauuacaccauuuggaugccggaaaaggccggccuggggacaucuugugacaucuucacuaccuccaaaggaaagagagcuucaaaggguggcaggacaugcggguuuguagaugagcggggacucuauaagagcuuaaagggcgcauguaaacugaaacuuugcgguguuaguggguugcgccugauggacggaaccugggccgcuauacaaacgucugaugaaacuaaaugguguuccccugaccagcuagugaaccuccacgaccugcauagcgaugagauugagcaccuugucguggaggaacuggugagaaggcgggaagagugcuuggacgcccucgaaucgaucaugacaaccaagucugucuccuuccgccgacugucacauuuaagaaaacugguuccaggcuuuggcaaggcguacacuauuuucaauaagacacucauggaggcagaugcccacuauaaaagugugaggaccuggaacgagaucauccccagcaaggggugccuucggguaggagguaaaugucacccucaugugaauggcgucuucuuuaacgggauuauacugggaccagacggccacguguugauccccgaaaugcaguccucucuacugcagcaacauauggagcuccuggaaagcucaguuauuccgcuuaugcacccucuggcugauuugaguacgguguucaaggacggugaugaggccgaagacuuugucgaggugcaucuccccgauguacacaaacagguuuccgggguggaccugggcuuaccaagcuggggaaaguacaugcugaugucugcaggcgcucuagccacccucaugcuggucaucccucuuaugcguugcugucgcagagugaauaggacaaagucaauacagcaggggccccgggagagugaucgaaaagucagcgugacuccacaaaacggaaagguuauuuccucuugggaaucguauaaaagcgguggcgagaccggguuguga

SEQ ID NO: 159590 - RNA, 1575 nt, Artificial Sequence
  derived and/or modified CDS sequence (opt3) from glycoprotein__RABV__KF484558.1
augauccugcacgcccuccuuuucgcucccuuucugauuagcuccuugugcuuaggcaaguucccuauauacaccaucccagacaaacuggggccguggucucccauugauauccaucaccuaucauguccuaacaaucucgugauugaggacgaaggaugcaacagucugagcgguuuuuccuauauggagcuuaaggucggcuacaucucugcaauaaaaguuaauggguucacauguacuggagugguaacggaagccgagaccuauacaaacuuugugggcuacgucacuaccacauucaagagaaaacauuuuaggccaaugcccgaugcgugccggucggcuuauaauuggaagcuggccggugacccucgcuacgaagagucauugcacaacccauaucccgaguaccauuggcuccgaaccgugaagacuacaaaagaaagccugguugugaucaguccuuccgucgcagaucuggacccauacgauaagucucuccacagccguauuuucccguccgggaaauguucaggaaugaccgugaguagcacguauugcucuacuaaucacgaguacaccaucuggaugcccgaaaagguaggcuuaggcacauccugugacauuuuuacuaccucaaaagggaagagagccagcaagggagguaggacaugcggcuucguugaugagcgggggcuguauaaaagucuuaagggagcuuguaaauugaagcugugcggcgugucuggucuacgccucauggacgggaccugggucgcaauccagacguccgaugagacuaaaugguguagcccugaccaacuggugaaccuucaugaucugcacucggacgaaauagagcauuugguggucgaggaacucguuagaaagagggaagagugccuggacgccuuagagucuauuaugacaaccaaauccgugucauuucggcgccugagucaccuccgaaaacuuguaccaggauucggcaaggcuuacacuaucuuuaauaagacacugauggaagccgaugcgcacuauaagagcgugagaaccuggaacgagauuauccccuccaaaggcugcuugagggucgggggaaagugucauccucacgugaaugguguuuucuucaacggcaucauucuagggccagacggacaugugcugauacccgaaaugcagucuagccuccugcagcagcacauggagcuucuggaaucaagugucaucccguugaugcauccucucgcagaucuguccacgguguuuaaagacggcgaugaggccgaggacuucguagaaguucacuuacccgaugugcacaagcaaauuagcggugucgaccuggggcuaccaucuuggggcaaguacgugcucaugucagcuggagcccuggcaacccuuaucuuggucauaagucugaugaaaugcugucggugggugaaucguacagagagcauucagcagggcccucgcgaauccgagagaaagguuucugugacuccccagaacgggaaaguaaucucgagcugggaauccuauaagaucggaggugagaccggccucuga

SEQ ID NO: 159591 - RNA, 1575 nt, Artificial Sequence
  derived and/or modified CDS sequence (opt3) from glycoprotein__RABV__KF484559.1
auggugcugcaggcccuccuuuucgcucccuuucugaucagcuccuugugcuucggcaaguuuccuauuuacaccauaccagacaaauuagggccguggucucccaucgauauucaccaucugucauguccuaacaaucuagucguugaggacgaaggaugcaacagucucagcgguuucuccuauauggagcugaaggugggcuacaucucugcaauuaaaguaaauggguuuacauguacuggaguggucacggaagccgagaccuauacaaacuucgugggcuacguuacuaccacauuuaagagaaaacacuucaggccaaugcccgaugcgugccggucggcuuauaauuggaagguggccggugacccucgcuacgaagagucacuucauaacccauaucccgauuaccacuggcugcgaaccgucaagacuacaaaagagagcuugaucauaaucaguccuuccguggcagaccucgauccauacgacaagucucugcauagccguauuuuucccgggggaaaauguuccggcaugaccaucucaaguacguauugcagcacuaaucacgauuacaccauuuggaugccggaaaaggccggccuggggacaucuugugacaucuucacuaccuccaaaggaaagagagcuucaaaggguggcaggacaugcggguuuguagaugagcggggacucuauaagagcuuaaagggcgcauguaaacugaaacuuugcgguguuaguggguugcgccugauggacggaaccugggccgcuauacaaacgucugaugaaacuaaaugguguuccccugaccagcuagugaaccuccacgaccugcauagcgaugagauugagcaccuugucguggaggaacuggugagaaggcgggaagagugcuuggacgcccucgaaucgaucaugacaaccaagucugucuccuuccgccgacugucacauuuaagaaaacugguuccaggcuuuggcaaggcguacacuauuuucaauaagacacucauggaggcagaugcccacuauaaaagugugaggaccuggaacgagaucauccccagcaaggggugccuucggguaggagguaaaugucacccucaugugaauggcgucuucuuuaacgggauuauacugggaccagacggccacguguugauccccgaaaugcaguccucucuacugcagcaacauauggagcuccuggaaagcucaguuauuccgcuuaugcacccucuggcugauuugaguacgguguucaaggacggugaugaggccgaagacuuugucgaggugcaucuccccgauguacacaaacagguuuccgggguggaccugggcuuaccaagcuggggaaaguacaugcugaugucugcaggcgcucuagccacccucaugcuggucaucccucuuaugaagugcugucgucgcgugaauagaacaaaaucaauacagcaggggcccagggagagugaucggaaggucagcgugacuccacaaaacggaaaaguuauuuccucuugggaaucguauaagagcgguggcgagaccggguuguga

SEQ ID NO: 159592 - RNA, 1575 nt, Artificial Sequence
  derived and/or modified CDS sequence (opt3) from glycoprotein__RABV__KF620487.1
augaucccccaggcccuccuguucgugccuuuucuuggcuucccacugugcuuggggaaguuuccgauuuacaccauacccgacaaauuaggaccuuggagcccaaucgauauucaccaucuguccugucccaacaauauggucguugaggacgaagguugcacaaaccuaucuggcuucucauauauggagcucaaggugggguacaucagugcuauuaaaguaaauggauuuacuuguacgggcguggucaccgaagcagagacauauacuaacuucguggguuacguuaccacaaccuuuaagagaaaacacuucaggccugugccagaugccugccgggacgcgcauaauuggaagauggcuggggauccccgcuaugaagagagccugcacaacccuuacccagacuaucauuggcuucgaacugucaagacaaccaaagagucccuggugaucauaucuccgucgguagccgauuuggaccccuacgauaagucacuccacagcaguguuuuuccuggaggcaaauguuccggcaucacggugucuagcacuuacugcuccaccaaucacgacuauacaauuuggaugccagaaaacccccgucuggggacuucaugugauaucuucaccuacaguaagggaaaaagagcaagcaaggagucuaagacaugcgguuuugucgacgaaaggggccuguauaaaucccucaagggggccuguaaauuaaagcugugcggagugccuggccuucgguugauggaugguaccuggguggcuauucaaacgucagacgaggucaaaugguguccacccgaccagcugguuaaucuacaugaucuccacagcgacgagcuggaacaucuugugguagaggaacuggugaagaaacgcgaggaaugcuuggaugcacucgagaguaucaugacuacaaagucugucuccuucagaaggcugagccacuuacggaagcuggugccgggguuuggaaaagccuacaccauauucaacaagacucucauggaggcugacgcccacuauaaaucgguucgcacauggaaugaaauuaucccuucuaagggcugccuucgagugggcgggagaugucauccccacgucaacggaguguucuuuaaugguauuauccugggcccagaugggcauguauugaucccugagaugcaguccucacuacugcagcaacacauggaacuccuggagaguagcguuauuccccuuaugcauccacuggcggaccccuccgcaguguucaaaaccggagaugaagccgaggacuuugucgaggugcacuugccugauguccacaaacaggugucuggcguugaccucggucugccaagcugggggaaguacguguuaaugucagcuggcguacugauaguccuagugcucaugaucuuccugaugacgugcuguaagaggccgaaccgggccgaacuuauucaucacaguccccgugagaccgaacgcaagguuuccgugacaagccagggaggcagagucaucucuucaugggagaguuauaaaaaugggggagaaacuaaguuguga

SEQ ID NO: 159593 - RNA, 1575 nt, Artificial Sequence
  derived and/or modified CDS sequence (opt3) from glycoprotein__RABV__KF620488.1
augaucccccaggcccuacucuucgugccuuuucuuggcuucccacugugcuuggggaaguuuccgauuuacaccauacccgacaaguuaggaccuuggagcccaaucgauauucaccaucuguccugucccaacaauauggucguugaggacgaagguugcacaaaccuaucuggcuucucauauauggagcucaaggugggguacaucagugcuauuaaaguaaauggauuuacuuguacgggcguggucaccgaagcagagacauauacuaacuucguggguuacguuaccacaaccuuuaagagaaaacacuucaggccuaugccagaugccugccgggacgcgcauaauuggaagauggcuggggauccccgcuaugaagagagccugcacaacccuuacccagacuaucauuggcuucgaacugugaagacaaccaaagagucccuggucaucauaucuccgucgguggccgauuuggaccccuacgauaagucacuccacagcaguguauuuccuggaggcaaauguuccggcaucacgguuucuagcacuuacugcuccaccaaucacgacuauacaauuuggaugccagaaaacccccgucuggggacuucaugugauaucuucaccuacaguaagggaaaaagagcaagcaaggagucuaagacaugcgguuuuguggacgaaaggggccuguauaaaucccucaagggggccuguaaauuaaagcugugcggaguccuuggcuugcggcugauggaugguaccuggguggcuauucaaacgucagacgaggugaaaugguguccuccagaccagcuagucaaucuccaugauuuccgcagcgacgagcuggaacaccuuguuguggaggaacugguaaagaaaagagaggaaugcuuggaugcacucgagaguaucaugacuacaaagucuguguccuuuaggcggcugagccauuuacgcaagcugguccccggguucggaaaagccuacaccauauucaacaagacucucauggaggcugacgcccacuauaaaucggugcgaacauggaaugaaauuaucccgucuaagggcugccuuaaaguuggcgggagaugucacccucaugugaacggagucuuuuucaaugguauuauccugggccccgaugggcacguguugaucccagagaugcaguccucacuacugcagcaacauauggaacuccuggagaguagcguaauuccucuuaugcacccccuggcggacccauccgcaguuuuuaagaccggagaugaagccgaggacuucguggagguccauuugcccgaugugcacaagcaggucucuggcguggaccucggucugccuagcugggggaaauacguuuuaaugucagcuggcgugcugauaguacugguccucaugaucuuucugaugaugugcuguaagaaaccaaacagggccgaaccgauucaccauaguccccgggagacggaacguaagauguccgugaccagccagggaggccgcguuaucucuucaugggagaguuauaaaaaugggggagaaacaaaacuuuga

SEQ ID NO: 159594 - RNA, 1575 nt, Artificial Sequence
  derived and/or modified CDS sequence (opt3) from glycoprotein__RABV__KF620489.1
augaucccccaggcccugcuguucgugccuuuucuuggcuucccacugugcuuggggaaguuuccgauuuacaccauacccgacaaauuaggaccuuggagcccaaucgauauucaccaucuguccugucccaacaauauggucguugaggacgaagguugcacaaaccuaucuggcuucucauauauggagcucaaggugggguacaucagugcuauuaaaguaaauggauuuacuuguacgggcguggucaccgaagcagagacauauacuaacuucguggguuacguuaccacaaccuuuaagagaaaacacuucaggccugugccagaugccugccgggacgcgcauaauuggaagaucgcuggggauccccgcuaugaagagagccugcacaacccuuacccagacuaucauuggcuucgaacugucaagacaaccaaagagucccuggugauaaucucuccgucgguagccgauuuggaccccuacgauaagucacuccacagcaguguuuuuccuggaggcaaauguuccggcauuacggugucuagcacuuacugcuccaccaaucacgacuauacaaucuggaugccagaaaacccccgucuggggacuucaugugauauuuucaccuacaguaagggaaaaagagcaagcaaggagucuaagacaugcgguuuugucgacgaaaggggccuguauaaaucccucaagggggccuguaaauuaaagcugugcggagugccuggccuucgguugauggaugguaccuggguggcuauccaaacgucagacgaggucaaaugguguccacccgaccagcugguuaaucuacaugaucuccacagcgacgagcuggaacaucgcgugguagaggaacuugugaagaaaagagaggaaugccuggaugcauuggagaguauaaugacuacaaagucugucuccuucaggcggcucagccaccuccgcaaguuagugccgggguuuggaaaagccuacaccauuuucaacaagacucugauggaggcugacgcccacuauaaaucgguucgaacauggaaugaaaucauuccuucuaagggcugccucagagugggcgggaggugucauccccacgucaacggaguguucuuuaaugguaucauccuuggcccagaugggcauguacugauuccugagaugcaguccucauugcuacagcaacacauggaacugcucgagaguagcguuauaccccugaugcauccacuugcggaccccuccgcaguguucaaaaccggagaugaagccgaggacuuugucgaggugcaucugccugauguccacaaacaggugucuggcguugacuugggucucccaagcugggggaaguacgugcugaugucagcuggcguauuaaucguccuggugcuaaugauuuuccucaugacgugcuguaagcggccgaaccgugccgaacccauccaccacaguccucgcgagaccgaaagaaagguuuccgugacaagccagggaggcagggucauaucuucaugggagaguuauaaaaaugggggagaaacuaagcuguga

SEQ ID NO: 159595 - RNA, 1575 nt, Artificial Sequence
  derived and/or modified CDS sequence (opt3) from glycoprotein__RABV__KF656698.1
augauccuucaggugcuccaauucgucccccuucugauuagcccuuugugcuuaggcaaguuuccaauauacaccaucccggacaaacuggggcccugguccccuauugauauccaccaucuaucuuguccaaacaaucucguuguggaggacgaaggaugcacaaaccugucagguuucaguuauauggagcuuaagguaggcuacauuagcgccaucaaagugaauggguuuacuuguacgggagucgugaccgaagcugagacauauacuaacuucguuggcuacgugaccacaaccuuuaagagaaaacacuucaggcccauaccugaugcaugccgggccgcguauaauuggaagauggcuggugacccacgcuacgaagagucccugcagaaccccuauccugaguaccauugguugcgaacugucaagacaaccaaagaaucucucaucauuaucucgccaucaguggccgaucuggacccguacgauaagagccugcacagucguguauuucccgggggauccgcacucggcauuacgguuucuagcacuuauuguuccaccaaucaugacuacacaaucuggaugccugaggaaccaagauuaggcacuucaugcgauauauucaccaguagcaaagggaagaaagccucuaagggagguaagacauguggcuuuguggacgagagggggcuguauaaaucccuuaagggagcuugcaaauugaagcuguguggcguccuaggucuccggcugauggaugggaccugggugucaauucagacgagcgacaacacuaaauggugcagucccgaucagcuugugaaucugcacgacuuccacucugacgagaucgaacauuuggucguugaggaacucgugaagaaacgcgaggaaugucuggaugcauuagaguccauuaugacaaccaagagcguaucguuuagaaggcugacuuaccuccggaagcuggugccuggauucggcaaagccuauacaaucuuuaacaagacccugauggaggcugacgcccacuacaaaucuguccgcacguggaaugaaaucauuccauccaagggcugcuugaaagugcgagagagaugccaucccccgguugaugggguguucuucaacggaauaauccuagguccugacggcaauguccugauucccgaaaugcaaucaagucuccugcagcagcacauggagcuucuggaaagcuccgugaucccauugaugcacccucucgcggaucccucuaccguauuuaaggagggggacgaggcagaagauuucguugaggugcaucugccagacguccacaagcagauaagcggaguggauuuaggccugcccucaugggguaaauaucuacucaugauugccgggggccuggcuacacuugucuugaucaucuguaguauugccugcuguaggcgggcaaagcguacugaaucccgcagaaggggaagcggcgagucugggaaaaaggcuaccgccacaccucggacucgaaaagugguuucaaguugggaacuguacaagcgcgagggagacgcgagacucuga

SEQ ID NO: 159596 - RNA, 1575 nt, Artificial Sequence
  derived and/or modified CDS sequence (opt3) from glycoprotein__RABV__KF656699.1
augauccuucaggugcuccaauucgucccccuucugauuagcccuuugugcuuaggcaaguuuccaauauacaccaucccggacaaacuggggcccugguccccuauugauauccaccaucuaucuuguccaaacaaucucguuguggaggacgaaggaugcacaaaccugucagguuucaguuauauggagcuuaagguaggcuacauuagcgccaucaaagugaauggguuuacuuguacgggagucgugaccgaagcugagacauauacuaacuucguuggcuacgugaccacaaccuuuaagagaaaacacuucaggcccauaccugaugcaugccgggccgcguauaauuggaagauggcuggugacccacgcuacgaagagucccugcagaaccccuauccugaguaccauugguugcgaacugucaagacaaccaaagaaucucucaucauuaucucgccaucaguggccgaucuggacccguacgauaagagccugcacagucguguauuucccgggggauccgcacucggcauuacgguuucuagcacuuauuguuccaccaaucaugacuacacaaucuggaugccugaggaaccaagauuaggcacuucaugcgauauauucaccaguagcaaagggaagaaagccucuaagggagguaagacauguggcuuuguggacgagagggggcuguauaaaucccuuaagggagcuugcaaauugaagcuguguggcguccuaggucuccggcugauggaugggaccugggugucaauucagacgagcgacaacacuaaauggugcagucccgaucagcuugugaaucugcacgacuuccacucugacgagaucgaacauuuggucguugaggaacucgugaagaaacgcgaggaaugucuggaugcauuagaguccauuaugacaaccaagagcguaucguuuagaaggcugucuuaccuccggaagcuggugccuggauucggcaaagccuauacuaucuuuaacaagacacugauggaggcugacgcccacuacaaauccguccgcaccuggaaugaaaucauuccaucaaagggcugcuugaaagugcgagagagaugccaucccccgguugaugggguguucuucaacggaauaauccuagguccugacggcaauguccugauucccgaaaugcaaaguagccuccugcagcagcacauggagcuucuggaauccucugugaucccauugaugcacccucucgcggaucccagcacgguauuuaaggagggggacgaggcagaagauuucguugaggugcaucugccagacguccacaagcagauaucaggaguggauuuaggccugcccaguugggguaaauaucuacucaugauugccgggggccuggcuacccuugucuugaucaucuguuccauugccugcuguaggcgggcaaagcguacagaaagccgcagaaggggaucuggcgagucagggaaaaaggcuacugccaccccucggacacgaaaagugguuaguagcugggaacuguacaagcgcgagggagacgcgagacucuga

SEQ ID NO: 159597 - RNA, 1575 nt, Artificial Sequence
  derived and/or modified CDS sequence (opt3) from glycoprotein__RABV__KF663531.1
augaucccccaggugcuccuguucgucccucuucugguuuuuagcuccugcuucggcaaguuuccaauuuacaccauaccggacaaauuggggcccuggucuccuaucgauauucaccauuuaucauguccaaacaaucuggugguagaggacgaaggaugcacaaaccuaagugguuucagcuauauggagcucaaggugggcuacaucuccgccauuaaagucaauggguuuacuuguacgggagugguuaccgaagcugagacauauacuaacuucgugggcuacgucaccacaaccuuuaagagaaaacacuucaggcccaugccugaugcaugccgggccgcguauaauuggaagguggcuggugacccacgcuacgaagagucucugcauaaccccuauccugauuaccacuggcuucgaacuguaaagacaaccaaagagucgcugguuaucauaucaccaagcguggccgacuuggauccguacgacaagagucuccauucccgugucuuucccgggggaaaauguucuggcaucacggugagcuccacuugcuguucaaccaaucacgauuauacaauuuggaugccugaaaacccaagacugggcaccaguugcgacaucuucacuaauagcagggggaagcgggcaucuaaaggagguaagacauguggcuuuguggaugagcgcgggcugugcaagucccucaaaggagccuguaaguuaaaacugugcggcguccuugguuugagacugauggacgggaccuggguugcuauucaaacgucagaugaaaucaaguggugucccccugaccagcuagugaaccuccacgacuuccauagcgaugagauagagcacuuuguaguggaggaacuggucaaaaagagggaagagugccuugacgcacuggaaacuauuaugacaaccaaaagugugucuuuccggcgcuugucccaucuccgaaagcugguuccaggauucggcaaggccuacacuaucuuuaauaaaacauuaauggaggcugaugcccacuauaagagcauuagaaccuggaacgagaucauccccucgaaaggcugccugagggucgggggacggugucacccgcaugugaaugguguguucuuuaacggcauuauacucgggccugacggacacguacuuauccccgaaaugcagucuucccuguugcaucagcacauggagcuacuggaaucaaguguuauuccacucaugcauccucuggcggaucccagcacgguguucaaggacggcgaugaggcagaagacuuugucgaggugcaccuuccagauguccacaaacaaaucuccgguguggaccugggguugcccaauuggggcaaguacguucucauaucugccggagcucugaccgccuuaaugcugacaauuuuccuaaugacuugcugucguaagaccaaccgcgcaggcagcauccagcauucaccuggggagacaggaagaaaagugaguguaacuucccacaacgguagggucaucagccucugggaaucuuauaagucaggcagugagaccaaacuguga

SEQ ID NO: 159598 - RNA, 1575 nt, Artificial Sequence
  derived and/or modified CDS sequence (opt3) from glycoprotein__RABV__KF663532.1
augaucccccaggugcugcuguucgucccucuucuggccuuuagcuccugcuucggcaaguuuccaauuuacaccauaccggacaaauuggggcccuggucuccuaucgauauucaccauuuaucauguccaaacaaucugguuguggaggacgaaggaugcacaaaccuaagugguuucagcuauauggagcucaagguaggcuacaucuccgcuauuaaagugaauggguuuacuuguacgggagucgugaccgaagcagagacauauacuaacuucguuggcuacgugaccacaaccuuuaagagaaaacacuucaggcccaugccugaugccugccgggcggcuuauaauuggaaggucgccggugacccacgcuacgaagagucucugcauaaccccuauccugauuaccacuggcuucgaacugugaagacaaccaaagagucgcugguaaucauaucaccaagcguugcagacuuggauccguacgacaagagucuccauucccguguguuucccgggggaaaauguucuggcaucacggucagcuccacuugcuguucaaccaaucacgauuauacaauuuggaugccugaaaacccaagacugggcaccaguugcgacaucuucacuaauagcagggggaagcgggccucuaaaggagguaagacauguggcuuuguggaugagcgcgggcuguacaagucccucaaaggagcuugcaaguuaaaacuguguggcgugcuugguuuggggcugauggacggaaccugggucgcaauucaaacgucagaugaaaucaaguggugucccccugaccagcuaguuaaccuccacgacuuccauagcgaugagauagagcaccuggugguagaggaacuugugaaaaagagagaagagugccuggacgccuuggaaacuauuaugacaaccaaaagugucucuuuuaggcggcucucccaucugcgcaaguuagugccaggcuucggcaaggcuuauacuaucuucaauaaaacacugauggaggccgaugcgcacuacaagagcauucgaaccuggaacgagaucauccccucgaaagggugccucagaguuggagguaggugccacccgcaugugaauggcgucuuuuucaacgggauuauacuuggaccugacggccacgugcugauccccgaaaugcagucuuccuugcuacaucagcacauggagcugcucgaaucaaguguaauuccacugaugcauccucuugcagaucccagcacgguuuuuaaggacggugaugaggccgaagacuucguggagguccaccucccagaugugcacaaacaaaucuccggggucgacuugggccuccccaauuggggaaaguaugugcugauaucugcuggcgccuuaaccgcacugaugcuaacaauuuuucucaugacuuguugccggaagaccaaccgugcugggagcauccagcauucaccuggagagacaggucgcaaaguuagugugacuucccacaacggcagaguaaugauccugugggaaagcuacaagucugggucagagaccaaacuuuga

SEQ ID NO: 159599 - RNA, 1575 nt, Artificial Sequence
  derived and/or modified CDS sequence (opt3) from glycoprotein__RABV__KF663533.1
augaucccccaggugcuccuguucgucccucuucuggacuuuagcuccugcuucggcaaguuuccaauuuacaccauaccggauaaauuggggcccuggucuccuaucgacauucaccauuuaucauguccaaacaaucugguuguggaggaugaaggaugcacaaaccuaagugguuucagcuauauggagcucaagguaggcuacaucuccgccauuaaagugaauggguuuacuuguacgggagucgugaccgaagcugagacauauacuaacuucguuggcuacgugaccacaaccuuuaagagaaaacacuucaggcccaugccugacgcaugccgggccgcguauaauuggaaggucgcuggugauccacgcuacgaagagucucugcauaaccccuauccugacuaccacuggcuucgaacugugaagacaaccaaagagucgcugguaaucauaucaccaagcguugccgauuuggacccguacgauaagagucuccauucccguguguuucccgggggaaaauguucuggcaucacggucagcuccacuugcuguucaaccaaucacgacuauacaauuuggaugccugaaaacccaagacugggcaccaguugcgauaucuucacuaauagcagggggaagcgggcaucuaaaggagguaagacauguggcuuugaggacgaacgcgggcuguacaagucccucauuggagccugcaaauuaaagcuguguggcgugcuugguuugagaaggauggaugggaccuggguggcuauccaaacgucagacaaaauaaagcggugucccccugaccagcuggucaaccuacacgauuuccauagcgacgagauugagcaccucguuguggaggaacuggugaaaaagcgcgaagagugccuugaugcacuggaaacuaucaugacaaccaaaagugugucuuuucgaagauugucccaucucaggaagcuggucccaggauucggcaaggccuauacuauuuucaauaaaacauuaauggaggcugacgcccacuacaagagcauccggaccuggaacgagaucauucccucgaaaggcugccugcguguagggggacgcugccacccgcauguuaaugguguguuuuucaacggcauaauccucgggccugauggacacguccuuauucccgaaaugcagucuucccuguugcaucagcacauggagcuacuggaaucaagugugaucccacucaugcauccucuggcggaccccagcacgguauuuaaggauggcgacgaggcagaagauuucguugaggugcaccuuccagacguccacaaacaaauauccgguguggaucugggguugcccaauuggggcaaguauguccucauuucugccggagcucugaccgccuuaaugcugacaaucuuucuaaugacuuguugcagaaagaccaacagggcaggcagcauccagcauucaccuggggagacaggacggaaagugaguguuacuucccacaacggucgagugauuagccucugggaaucuuacaagucagagagugaaaccaaacuguga

SEQ ID NO: 159600 - RNA, 1575 nt, Artificial Sequence
  derived and/or modified CDS sequence (opt3) from glycoprotein__RABV__KF663534.1
augaucccccaggugcuccuguucgucccucuucugguuuuuagcuccugcuucggcaaguuuccaauuuacaccauaccggacaaauuggggcccuggucuccuaucgauauucaccauuuaucauguccaaacaaucuggugguagaggacgaaggaugcacaaaccuaagugguuucagcuauauggagcucaaggugggcuacaucuccgccauuaaagucaauggguuuacuuguacgggagugguuaccgaagcugagacauauacuaacuucgugggcuacgucaccacaaccuuuaagagaaaacacuucaggcccaugccugaugcaugccgggccgcguauaauuggaagguggcuggugacccacgcuacgaagagucucugcauaaccccuauccugauuaccacuggcuucgaacuguaaagacaaccaaagagucgcugguuaucauaucaccaagcguggccgacuuggauccguacgacaagagucuccauucccgugucuuucccgggggaaaauguucuggcaucacggugagcuccacuugcuguucaaccaaucacgauuauacaauuuggaugccugaaaacccaagacugggcaccaguugcgacaucuucacuaauagcagggggaagcgggcaucuaaaggagguaagacauguggcuuuggggaugagcgcggacuguacaagucccucaacggcgccugcaaauuaaagcuguguggugugcuuggguugagaaggauggacggaaccugggucgcuauucaaacgucagaugaaaucaaauggugucccccugaccagcugguuaaucuacacgacuuccauagcgaugagauagagcaccucgugguagaggaacuggugaagaaacgggaagagugccuugacgcacuggaaacuauuaugacaaccaagagugucucuuuucgccgauugucccaucucagaaaacuggugccaggcuucggcaaggccuauacuaucuucaacaagacauuaauggaggcugaugcccacuacaaaagcauuaggaccuggaaugagaucauccccucgaaggggugccugcggguuggaggucguugccacccgcaugugaacggcgucuuuuucaaugggauuauacucggaccugacggccacgugcuuauccccgaaaugcagucuucccuguugcaucagcacauggagcuacuggaaucaaguguaauuccacucaugcauccucuggcggaucccagcacgguuuuuaaagacggugaugaggcagaagacuucguggagguccaccuuccagaugugcacaagcaaaucuccggggucgaccugggcuugcccaacuggggaaaauaugugaugauaucugccggcgcucucaccgcccugauguuaacaauuuuucugaugacuuguugccgcaagaccaacagagcagggagcauccagcauucaccuggagagacagguaggaagguuagugugacuucccacaauggccggguaaucagccuaugggaaucuuacaaaucagagagugaaaccaagcucuga

SEQ ID NO: 159601 - RNA, 1575 nt, Artificial Sequence
  derived and/or modified CDS sequence (opt3) from glycoprotein__RABV__KF663535.1
augaucccccaggugcugcuguucgucccucuucugguuauuagcuccugcuuuggcaaguucccaauauacaccaucccggacaaauuggggcccuggucuccuauugauauccaccauuuaucauguccaaacaaucuggugguagaggacgaaggaugcacaaaccuaagugguuuuagcuauauggagcucaaggugggcuacauuuccgccaucaaagucaauggguucacuuguacgggagugguuaccgaagcugagacauauacuaacuuugugggcuacgucaccacaaccuucaagagaaaacacuuuaggcccaugccugaugcaugccgggccgcguauaauuggaagguggcuggugacccacgcuacgaagagucucugcauaaccccuauccugauuaccacuggcuucgaacuguaaagacaaccaaagagucgcugguuauaaucucaccaagcguggccgacuuggauccguacgacaagagucuccauucccgugucuuccccgggggaaaauguucuggcauuacggugagcuccacuugcuguucaaccaaucacgauuauacaaucuggaugccugaaaacccaagacugggcaccaguugcgacauuuuuacuaauagcagggggaagcgggcaucuaaaggagguaagacauguggcuucguggaugagcgcgggcuguacaagucccucaaaggagccugcaaguuaaaacuguguggcguccuugguuugagacugauggacgggaccuggguugcuauccaaacgucagaugaaauaaaguggugucccccugaccagcuagugaaccuccacgacuuucauagcgaugagauugagcaccugguaguggaggaacuugucaaaaagagggaagagugccuggacgcauuggaaacuaucaugacaaccaaaagugugucuuuccggcgccucucccaucugcgaaaguuaguuccaggauuuggcaaggccuauacuauuuucaauaaaacacugauggaggcugaugcccacuacaagagcaucagaaccuggaacgagaucauucccucgaaaggcugccucagggucgggggacggugccacccgcaugugaaugguguguucuuuaacggcauaauccuugggccugacggacacguacugauucccgaaaugcagucuuccuugcuacaucagcacauggagcugcucgaaucaaguguuaucccacugaugcauccucuugcggaucccagcacgguguucaaggacggcgaugaggcagaagacuuugucgaggugcaccucccagauguccacaaacaaauauccgguguggacuuggggcuccccaauuggggcaaguauguucugauuucugccggagcuuuaaccgcccugaugcuaacaaucuuccucaugacuuguugccguaagaccaaccgcgcaggcagcauccagcauucaccuggggagacaggaagaaaagugaguguaacuucccacaacgguagggucauuuuucugugggaaagcuacaagucuggcucagagaccaaacuuuga

SEQ ID NO: 159602 - RNA, 1575 nt, Artificial Sequence
  derived and/or modified CDS sequence (opt3) from glycoprotein__RABV__KF663536.1
augaucccccaggugcugcuguucgucccucuucugguuuuuagcuccugcuucggcaaguuuccaauuuacaccauaccggacaaauuggggcccuggucuccuaucgauauucaccauuuaucauguccaaacaaucuggugguagaggacgaaggaugcacaaaccuaagugguuucagcuauauggagcucaaggugggcuacaucuccgccauuaaagucaauggguuuacuuguacgggagugguuaccgaagcugagacauauacuaacuucgugggcuacgucaccacaaccuuuaagagaaaacacuucaggcccaugccugaugcaugccgggccgcguauaauuggaagguggcuggugacccacgcuacgaagagucucugcauaaccccuauccugauuaccacuggcuucgaacuguaaagacaaccaaagagucgcugguuaucauaucaccaagcguggccgacuuggauccguacgacaagagucuccauucccgugucuuucccgggggaaaauguucuggcaucacggugagcuccacuugcuguucaaccaaucacgauuauacaauuuggaugccugaaaacccaagacugggcaccaguugcgacaucuucacuaauagcagggggaagcgggcaucuaaaggagguaagacauguggcuuuguggaugagcgcgggcugugcaagucccucaaaggagccuguaaguuaaaacugugcggcguccuugguuugagacugauggacgggaccuggguugcuauucaaacgucagaugaaaucaaguggugucccccugaccagcuagugaaccuccacgacuuccauagcgaugagauagagcaccugguaguggaggaacuugucaaaaagagggaagagugccuggacgcauuggaaacuauuaugacaaccaaaagugugucuuuucggcgccucucccaucugcgaaaguuaguuccaggauucggcaaggccuacacuaucuucaauaaaacacugauggaggcugaugcccacuauaagagcauuagaaccuggaacgagaucauccccucgaaaggcugccucagggucgggggacggugucacccgcaugugaaugguguguuuuucaacggcauuauacuugggccugacggacacguacugauccccgaaaugcagucuuccuugcuacaucagcacauggagcugcucgaaucaaguguuauuccacugaugcauccucuugcggaucccagcacgguguuuaaggacggcgaugaggcagaagacuucgucgaggugcaccucccagauguccacaaacaaaucuccgguguggacuuggggcuccccaauuggggcaaguacguucugauaucugccggagcuuuaaccgcccugaugcuaacaauuuuucucaugacuugcugucguaagaccaaccgcgcaggcagcauccagcauucaccuggggagacaggaagaaaagugaguguaacuucccacaacgguagggucaucagccugugggaaucuuauaagucaggcagugagaccaaacuuuga

SEQ ID NO: 159603 - RNA, 1575 nt, Artificial Sequence
  derived and/or modified CDS sequence (opt3) from glycoprotein__RABV__KF663537.1
augaucccccaggugcuccuguucgucccucuucuggacuuuagcuccugcuucggcaaguuuccaauuuacaccauaccggauaaauuggggcccuggucuccuaucgacauucaccauuuaucauguccaaacaaucugguuguggaggaugaaggaugcacaaaccuaagugguuucagcuauauggagcucaagguaggcuacaucuccgccauuaaagugaauggguuuacuuguacgggagucgugaccgaagcugagacauauacuaacuucguuggcuacgugaccacaaccuuuaagagaaaacacuucaggcccaugccugacgcaugccgggccgcguauaauuggaaggucgcuggugauccacgcuacgaagagucucugcauaaccccuauccugacuaccacuggcuucgaacugugaagacaaccaaagagucgcugguaaucauaucaccaagcguugccgauuuggacccguacgauaagagucuccauucccguguguuucccgggggaaaauguucuggcaucacggucagcuccacuugcuguucaaccaaucacgacuauacaauuuggaugccugaaaacccaagacugggcaccaguugcgauaucuucacuaauagcagggggaagcgggcaucuaaaggagguaagacauguggcuuuguggacgagcgcgggcuguacaagucccucaacggagccugcaaauuaaagcuguguggcgugcuugguuugagaaggauggaugggaccugggucgcuauucaaacgucagacgaaaucaaauggugucccccugaccagcugguuaaucuacacgauuuccauagcgacgagauagagcaccucgugguagaggaacuggugaagaaacgggaagagugccuugaugcacuggaaacuauuaugacaaccaagagugucucuuuucgccgauugucccaucucagaaaacuggugccaggauucggcaaggccuauacuaucuucaacaagacauuaauggaggcugacgcccacuacaaaagcauuaggaccuggaaugagaucauccccucgaagggcugccugcggguugggggacguugccacccgcaugugaacggugucuuuuucaauggcauuauacucgggccugauggacacgugcuuauccccgaaaugcagucuucccuguugcaucagcacauggagcuacuggaaucaaguguaauuccacucaugcauccucuggcggaccccagcacgguuuuuaaagauggcgacgaggcagaagauuucguggagguccaccuuccagacgugcacaagcaaaucuccggugucgaucugggguugcccaacuggggcaaauaugugcucauaucugccggagcucugaccgccuuaaugcugacaauuuuucuaaugacuuguugccgcaagaccaacagagcaggcagcauccagcauucaccuggggagacaggaaggaagguuagugugacuucccacaauggucggguaaucagccucugggaaucuuacaaaucagagagugaaaccaagcuguga

SEQ ID NO: 159604 - RNA, 1575 nt, Artificial Sequence
  derived and/or modified CDS sequence (opt3) from glycoprotein__RABV__KF663538.1
augaucccccaggugcuucucuucgucccucuucugguuuuuagcuccugcuucggcaaguuuccaauuuacaccauaccggacaaauuggggcccuggucuccuaucgauauucaccauuuaucauguccaaacaaucuggugguagaggacgaaggaugcacaaaccuaagugguuucagcuauauggagcucaaggugggcuacaucuccgccauuaaagucaauggguuuacuuguacgggagugguuaccgaagcugagacauauacuaacuucgugggcuacgucaccacaaccuuuaagagaaaacacuucaggcccaugccugaugcaugccgggccgcguauaauuggaagguggcuggugacccacgcuacgaagagucucugcauaaccccuauccugauuaccacuggcuucgaacuguaaagacaaccaaagagucgcugguuaucauaucaccaagcguggccgacuuggauccguacgacaagagucuccauucccgugucuuucccgggggaaaauguucuggcaucacggugagcuccacuugcuguucaaccaaucacgauuauacaauuuggaugccugaaaacccaagacugggcaccaguugcgacaucuucacuaauagcagggggaagcgggcaucuaaaggagguaagacauguggcuuuguggaugagcgcgggcuguacaagucccucaaaggagccugcaaguuaaaacuguguggcguccuugguuugagacugauggacgggaccuggguugcuauucaaacgucagaugaaaucauaaggugucccccugaccagcuagugaaccuccacgacuuccauagcgaugagauugagcaccugguaguggaggaacuugucaagaaacgggaagagugccuggacgcauuggaaacuaucaugacaaccaagagugugucuuuucgccgacucucccaucugagaaaauuaguuccaggauucggcaaggccuauacuauuuucaauaagacacugauggaggcugaugcccacuacaaaagcaucaggaccuggaacgagaucauucccucgaagggcugccuccgggucgggggacguugccacccgcaugugaaugguguguuuuucaacggcauaauccuugggccugacggacacguacugauucccgaaaugcagucuuccuugcuacaucagcacauggagcugcucgaaucaaguguuaucccacugaugcauccucuugcggaucccagcacgguguuuaaagacggcgaugaggcagaagacuucgucgaggugcaucugccagauguccacaagcaaauauccgguguggacuuggggcuccccaauuggggcaaauauguucugauuucugccggagcuuuaaccgcccugaugcuaacaaucuuucucaugacuuguugccgcaagaccaacagagcaggcagcauccagcacucaccuggggagacaggaaggaaggugaguguaacuucccacaacggucgggucauuagccugugggaaucuuacaaaucagagagugaaaccaagcuguga

SEQ ID NO: 159605 - RNA, 1575 nt, Artificial Sequence
  derived and/or modified CDS sequence (opt3) from glycoprotein__RABV__KF663539.1
augaucccccaggugcugcuguucgucccucuucugguuuuuagcuccugcuucggcaaguuuccaauuuacaccauaccggacaaauuggggcccuggucuccuaucgauauucaccauuuaucauguccaaacaaucuggugguagaggacgaaggaugcacaaaccuaagugguuucagcuauauggagcucaaggugggcuacaucuccgccauuaaagucaauggguuuacuuguacgggagugguuaccgaagcugagacauauacuaacuucgugggcuacgucaccacaaccuuuaagagaaaacacuucaggcccaugccugaugcaugccgggccgcguauaauuggaagauggcuggugacccacgcuacgaagagucucugcauaaccccuauccugauuaccacuggcuucgaacugugaagacaaccaaagagucgcugguaaucauaucaccaagcguugccgacuuggauccguacgacaagagucuccauucccguguguuucccgggggaaaauguucuggcaucacggucagcuccacuugcuguucaaccaaucacgauuauacaauuuggaugccugaaaacccaagacugggcaccaguugcgacaucuucacuaauagcagggggaagcgggcaucuaaaggagguaagacauguggcuuuggggaugagcgcggacuguacaagucccucagaggcgccugcaaauuaaagcuguguggugugcuuggguugaggcugauggacggaaccuggguggucauucaaacgucagaugaaaucaaauggugcagccccgaccagcuaguuaaccuccacgacuuccauagugaugagauagagcaccuggugguagaggaacuugugaagaaacgggaagagugccuggacgcuuuggaaacuauuaugacaaccaagucugucuccuuucgccgacucagccaucugagaaaauuagugccuggcuucggcaaggcauauacuaucuucaauaagacacugauggaggccgaugcucacuacaaaucgauuaggaccuggaacgagaucaucccaucuaaggggugucuccggguuggaggucguugccacccccaugugaauggcgucuuuuucaacgggauuauacuuggaccggacggccacgugcugaucccugaaaugcaguccucauugcuacaucagcacauggagcugcucgaaaguagcguaauuccccugaugcauccacuugccgauccuuccacgguuuuuaaagacggugaugaggcggaagacuucguggagguccaccuccccgaugugcacaagcaaaucucuggggucgacuugggccucccaaauuggggaaaauaugugcugauaagcgcaggcgccuuaaccgcucugaugcuaaugauuuuucucaugacauguugccgcaagacuaacagagccgagucaauccagcauagucccggggaaaccggaaggaagguuuccgugacaagccacaacggucggguaaucucuucaugggagaguuacaaaagcgaauccgagacuaagcuguga

SEQ ID NO: 159606 - RNA, 1575 nt, Artificial Sequence
  derived and/or modified CDS sequence (opt3) from glycoprotein__RABV__KF663540.1
augaucccccaggugcugcuguucgucccucuucugguuuuuagcuccugcuucggcaaguuuccaauuuacaccauaccggacaaauuggggcccuggucuccuaucgauauucaccauuuaucauguccaaacaaucuggugguagaggacgaaggaugcacaaaccuaagugguuucagcuauauggagcucaaggugggcuacaucuccgccauuaaagucaauggguuuacuuguacgggagugguuaccgaagcugagacauauacuaacuucgugggcuacgucaccacaaccuuuaagagaaaacacuucaggcccaugccugaugcaugccgggccgcguauaauuggaagauggcuggugacccacgcuacgaagagucucugcauaaccccuauccugauuaccacuggcuucgaacugugaagacaaccaaagagucgcugguaaucauaucaccaagcguugccgacuuggauccguacgacaagagucuccauucccguguguuucccgggggaaaauguucuggcaucacggucagcuccacuugcuguucaaccaaucacgauuauacaauuuggaugccugaaaacccaagacugggcaccaguugcgacaucuucacuaauagcagggggaagcgggcaucuaaaggagguaagacauguggcuuuguggaugagcgcgggcuguacaagucccucaccggagccugcaaauuaaagcuguguggcgugcuugguuugucacugauggacgggacgugggucgcuauucaaacuagcgaugaaaucaaauggugcagucccgaccagcuaguuaaccuccacgacuuccauucugaugagauagagcaccuggugguagaggaacuugugaagaaaagagaagagugccuggacgcauuggaaacaauuaugaccacuaaguccgucagcuuuaggcggcucucgcaucugcgcaaauuagugccuggauucggcaaggccuauacaaucuucaauaagacccugauggaggcugaugcccacuacaaaucuauucgaacguggaacgagaucaucccauccaagggcugucucagaguugggggaaggugccacccccaugugaauggugucuuuuucaacggcauuauacuugggccggacggacacgugcugaucccugaaaugcagucaaguuugcuacaucagcacauggagcugcucgaaagcuccguaauuccccugaugcauccacuugcggauccuucuaccguuuuuaaagacggcgaugaggcagaagacuucguggagguccaccuccccgaugugcacaagcaaaucagcggugucgacuuggggcucccaaauuggggcaaauaugugcugauaucagccggagcuuuaacagcccugaugcuaaugauuuuucucaugacuuguugccggaagaccaaccgugcagagaguauccagcauucccccggcgaaacagggcgcaagguuagcgugacuucucacaacggaagaguaaucucaaguugggagagcuacaaauccgaaucugagaccaagcuguga

SEQ ID NO: 159607 - RNA, 1575 nt, Artificial Sequence
  derived and/or modified CDS sequence (opt3) from glycoprotein__RABV__KF663541.1
augaucccccaggugcuccuguucgucccucuucugguuuuuagcuccugcuucggcaaguuuccaauuuacaccauaccggacaaauuggggcccuggucuccuaucgauauucaccauuuaucauguccaaacaaucuggugguagaggacgaaggaugcacaaaccuaagugguuucagcuauauggagcucaaggugggcuacaucuccgccauuaaagucaauggguuuacuuguacgggagugguuaccgaagcugagacauauacuaacuucgugggcuacgucaccacaaccuuuaagagaaaacacuucaggcccaugccugaugcaugccgggccgcguauaauuggaagauggcuggugacccacgcuacgaagagucucugcauaaccccuauccugauuaccacuggcuucgaacugugaagacaaccaaagagucgcugguaaucauaucaccaagcguugccgacuuggauccguacgacaagagucuccauucccguguguuucccgggggaaaauguucuggcaucacggucagcuccacuugcuguucaaccaaucacgauuauacaauuuggaugccugaaaacccaagacugggcaccaguugcgacaucuucacuaauagcagggggaagcgggcaucuaaaggagguaagacauguggcuuuguggaugagcgcgggcuguacaaguccucaaaaggagccugcaagcucaaauuauguggcgugcugggucuuagauugauggacgggaccugggucgcuauucaaacgagcgaugaaaucaaguggugcagucccgaccagcugguuaaccuacacgacuuccauucugaugagauagagcaccucgugguagaggaacuggugaaaaagagggaagagugccuugacgcacuggaaacuauuaugacaaccaaauccgucagcuuucggcgcuugucgcaucuccgaaagcuggugccuggauucggcaaggccuauacuaucuucaauaaaacauuaauggaggcugaugcccacuacaagucuauuagaaccuggaacgagaucaucccauccaaaggcugucugaggguugggggacggugccacccccaugugaauggugucuuuuucaacggcauuauacucgggccggacggacacgugcuuaucccugaaaugcagucaagucuguugcaucagcacauggagcuacuggaaagcuccguaauuccccucaugcauccacuggcggauccuucuacgguuuuuaaggacggcgaugaggcagaagacuucguggagguccaccuucccgaugugcacaaacaaaucagcggugucgaccugggguugccaaauuggggcaaguaugugcucauaucagccggagcucugaccgccuuaaugcugaugauuuuucuaaugacauguugccguaagacuaaccgcgcagagaguauccagcauucccccggcgaaaccgggagaaaaguuagcgugacaucucacaacggaaggguaaucucaaguugggagagcuacaaguccgguucugaaacuaaacucuga

SEQ ID NO: 159608 - RNA, 1575 nt, Artificial Sequence
  derived and/or modified CDS sequence (opt3) from glycoprotein__RABV__KF663542.1
auguucccucccgugcugcucuuugucccacuucugguuuucagcuccugcuuuggcaaguucccgaucuacaccauucccgacaaauuggggccuuggucuccaauagauauccaccauuuaucaugucccaacaaucuggugguagaggacgaaggaugcacaaaccuaagugguuuuagcuauauggagcucaaggugggcuacauuuccgccaucaaagucaauggguucacuuguacgggagugguuaccgaagcugagacauauacuaacuuugugggcuacgucaccacaaccuucaagagaaaacacuuuaggccuaugccagaugcaugccgggccgcguauaauuggaagguggcuggugacccccgcuacgaagagucucugcauaacccuuauccagauuaccacuggcuucgaacuguaaagacaaccaaagagucgcugguuauuaucucaccgagcguggccgacuuggaucccuacgacaagagucuccauucccgugucuucccugggggaaaauguucuggcauaacggugagcuccacuugcuguucaaccaaucacgauuauacaaucuggaugccagaaaaccccagacugggcaccaguugcgacauuuuuacuaauagcagggggaagcgggcaucuaaaggagguaagacauguggcuuccgcgaugagagagggcuguacaagucccucaaaggagccugcaaguuaaaacuguguggcgugcuugguuugaggcugauggacgggaccugggucgcuacgcagacuucaaacgaaaucaaguggugcccuccagaucaacuuguuaaucuccacgacuuucauagcgacgagauugagcaccuggugguagaggaacuugugaaaaagcgggaagagugccuggaugcauuggaaacaaucaugaccacuaaaagugucucuuuccgccgacucucccaucugagaaaguuagugcccggauucggcaaggccuauacaauauuuaacaaaacccugauggaggcugacgcccacuacaagagcauuaggacguggaaugagaucauuccgucgaaaggcugucuccggguugggggacguugccacccucaugugaacggugucuucuuuaauggcaucauccuugggcccgauggacacgugcugauuccagaaaugcagucuuccuugcuacaucagcacauggagcugcucgaaucaaguguaauaccucugaugcauccccuugcggacccaagcaccguuuucaaggauggcgacgaggcagaagauuuuguggagguccaucugcccgacgugcacaaacagaucuccggugucgauuuggggcucccuaacuggggcaaguaugugcugauuucugccggagcuuuaacagcccugaugcuaacuaucuuccucaugaccuguugccgcaagacaaacagagcaggcagcauacaacacucaccaggggagacuggaaggaaaguuagugugaccucccacaauggucggguaauuuuucugugggaaagccauaucucuggcucagagacaaagcuauga

SEQ ID NO: 159609 - RNA, 1575 nt, Artificial Sequence
  derived and/or modified CDS sequence (opt3) from glycoprotein__RABV__KF663543.1
auguucccccaggugcugcucuuugucccucuucugguuuucagcuccugcuuuggcaaguucccaaucuacaccauuccggacaaauuggggcccuggucuccuauagauauccaccauuuaucauguccaaacaaucuggugguagaggacgaaggaugcacaaaccuaagugguuuuagcuauauggagcucaaggugggcuacauuuccgccaucaaagucaauggguucacuuguacgggagugguuaccgaagcugagacauauacuaacuuugugggcuacgucaccacaaccuucaagagaaaacacuuuaggcccaugccugaugcaugccgggccgcguauaauuggaagguggcuggugacccacgcuacgaagagucucugcauaaccccuauccugauuaccacuggcuucgaacuguaaagacaaccaaagagucgcugguuauuaucucaccaagcguggccgacuuggauccguacgacaagagucuccauucccgugucuuccccgggggaaaauguucuggcauaacggugagcuccacuugcuguucaaccaaucacgauuauacaaucuggaugccugaaaacccaagacugggcaccaguugcgacauuuuuacuaauagcagggggaagcgggcaucuaaaggagguaagacauguggcuucgaggaugaacgcgggcuguacaagucccucaccggagccugcaaauuaaagcuguguggcgugcuugguuugagacugauggacgggacgugggucgcuauccaaacuucagaugagauuaaauggugucccccugaccagcuaguuaaccuccacgacuuucauagcgaugagaucgaacaccuggugguagaggaacuugugaagaaaagggaggaaugccuggacgcauuggagacaauaaugaccacuaagagugucucuuuccggcgccucucccaucugcgaaaauuagugccaggauucggcaaggccuauacaauuuuuaauaagacccugauggaggcugaugcccacuacaaaagcaucagaacguggaacgaaauuauccccucgaagggcugccucaggguugggggacggugccacccgcaugugaauggugucuucuuuaacggcaucauucuugggccugacggacacgugcugauacccgagaugcagucuuccuugcuacaucagcacauggaacugcucgagucaaguguaaucccacugaugcauccucuugcggaucccagcaccguuuucaaagacggcgaugaagcagaggacuuuguggagguccaccuuccagaugugcacaagcaaauuuccggugucgacuuggggcuccccaauuggggcaaauaugugcugaucucugccggagcuuuaacagcccugaugcuaacuauauuccucaugaccuguugccguaagacaaaccgcgcaggcagcauucagcauucaccuggggaaacuggaagaaagguuagugugaccucccacaacgguaggguaaucagccugugggagucuuacaaaucaggcagugaaacaaagcuguga

SEQ ID NO: 159610 - RNA, 1575 nt, Artificial Sequence
  derived and/or modified CDS sequence (opt3) from glycoprotein__RABV__KF663544.1
auguucccccaggugcugcucuuugucccucuucugguuuucagcuccugcuuuggcaaguucccaaucuacaccauuccggacaaauuggggcccuggucuccuauagauauccaccauuuaucauguccaaacaaucuggugguagaggacgaaggaugcacaaaccuaagugguuuuagcuauauggagcucaaggugggcuacauuuccgccaucaaagucaauggguucacuuguacgggagugguuaccgaagcugagacauauacuaacuuugugggcuacgucaccacaaccuucaagagaaaacacuuuaggcccaugccugaugcaugccgggccgcguauaauuggaagguggcuggugacccacgcuacgaagagucucugcauaaccccuauccugauuaccacuggcuucgaacuguaaagacaaccaaagagucgcugguuauuaucucaccaagcguggccgacuuggauccguacgacaagagucuccauucccgugucuuccccgggggaaaauguucuggcauaacggugagcuccacuugcuguucaaccaaucacgauuauacaaucuggaugccugaaaacccaagacugggcaccaguugcgacauuuuuacuaauagcagggggaagcgggcaucuaaaggagguaagacauguggcuucgaggaugaacgcgggcuguacaagucccucaaaggagccugcaaguuaaaacuguguggcgugcuugguuugagaaggauggacgggaccugggucgcuauccaaacgucagaugagauuaaguggugucccccugaccagcugguuaaccuacacgacuuucauagcgaugagaucgaacaccucgugguagaggaacuggugaaaaagcgggaggaaugccuugacgcacuggagacuauaaugacaaccaaaagugucucuuuccgccgauugucccaucucagaaagcuggugccaggauucggcaaggccuauacuauuuuuaauaaaacauuaauggaggcugaugcccacuacaagagcaucaggaccuggaacgaaauuauccccucgaaaggcugccugcggguugggggacguugccacccgcaugugaauggugucuucuuuaacggcaucauucucgggccugacggacacgugcuuauacccgagaugcagucuucccuguugcaucagcacauggaacuacuggagucaaguguaaucccacucaugcauccucuggcggaucccagcacgguuuucaaggacggcgaugaagcagaggacuuuguggagguccaccuuccagaugugcacaaacaaauuuccggugucgaccugggguugcccaauuggggcaaguaugugcucaucucugccggagcucugaccgccuuaaugcugacaauauuccuaaugacuuguugccgcaagaccaacagagcaggcagcauucagcauucaccuggggaaacaggaaggaaaguuagugugacuucccacaacggucggguaaucagccucugggagucuuacaagucaggcagugaaaccaaacuguga

SEQ ID NO: 159611 - RNA, 1575 nt, Artificial Sequence
  derived and/or modified CDS sequence (opt3) from glycoprotein__RABV__KF663545.1
auguucccccaggugcugcucuuugucccucuucugguuuucagcuccugcuuuggcaaguucccaaucuacaccauuccggacaaauuggggcccuggucuccuauagauauccaccauuuaucauguccaaacaaucuggugguagaggacgaaggaugcacaaaccuaagugguuuuagcuauauggagcucaaggugggcuacauuuccgccaucaaagucaauggguucacuuguacgggagugguuaccgaagcugagacauauacuaacuuugugggcuacgucaccacaaccuucaagagaaaacacuuuaggcccaugccugaugcaugccgggccgcguauaauuggaagguggcuggugacccacgcuacgaagagucucugcauaaccccuauccugauuaccacuggcuucgaacuguaaagacaaccaaagagucgcugguuauuaucucaccaagcguggccgacuuggauccguacgacaagagucuccauucccgugucuuccccgggggaaaauguucuggcauaacggugagcuccacuugcuguucaaccaaucacgauuauacaaucuggaugccugaaaacccaagacugggcaccaguugcgacauuuuuacuaauagcagggggaagcgggcaucuaaaggagguaagacauguggcuucggggaugagcgcggacuguacaagucccucaaaggcgccugcaaguuaaaacuguguggugugcuuggguugagacugauggacggaaccugggucgcuauccaaacgucagaugaaauuaaguggugucccccugaccagcuaguuaaccuccacgacuuucauagcgaugagaucgagcaccuggugguagaggaacuugugaaaaagagggaagagugccuggacgcauuggaaacuauaaugacaaccaaaagugucucuuuccggcgccucucccaucugcgaaaguuagugccaggcuucggcaaggccuauacuauuuuuaauaaaacacugauggaggcugaugcccacuacaagagcaucagaaccuggaacgagauuauccccucgaaagggugccucaggguuggaggucggugccacccgcaugugaauggcgucuucuuuaacgggaucauucuuggaccugacggccacgugcugauacccgaaaugcagucuuccuugcuacaucagcacauggagcugcucgaaucaaguguaaucccacugaugcauccucuugcggaucccagcacgguuuucaaggacggugaugaggcagaagacuuuguggagguccaucugccagaugugcacaaacaaauuuccggggucgacuugggccuccccaauuggggaaaguaugugcugaucucugccggcgcuuuaaccgcccugaugcuaaugauauuccucaugacauguugccguaagacuaaccgcgcagagagcauucagcacucaccuggggaaaccggaagaaaaguuagugugacaucccacaacgguaggguaaucagcucuugggagucauacaagaguggcagcgaaacuaaacuguga

SEQ ID NO: 159612 - RNA, 1575 nt, Artificial Sequence
  derived and/or modified CDS sequence (opt3) from glycoprotein__RABV__KF663546.1
auguucccccaggugcugcucuuugucccucuucugguuuucagcuccugcuuuggcaaguucccaaucuacaccauuccggacaaauuggggcccuggucuccuauagauauccaccauuuaucauguccaaacaaucuggugguagaggacgaaggaugcacaaaccuaagugguuuuagcuauauggagcucaaggugggcuacauuuccgccaucaaagucaauggguucacuuguacgggagugguuaccgaagcugagacauauacuaacuuugugggcuacgucaccacaaccuucaagagaaaacacuuuaggcccaugccugaugcaugccgggccgcguauaauuggaagguggcuggugacccacgcuacgaagagucucugcauaaccccuauccugauuaccacuggcuucgaacuguaaagacaaccaaagagucgcugguuauuaucucaccaagcguggccgacuuggauccguacgacaagagucuccauucccgugucuuccccgggggaaaauguucuggcauaacggugagcuccacuugcuguucaaccaaucacgauuauacaaucuggaugccugaaaacccaagacugggcaccaguugcgacauuuuuacuaauagcagggggaagcgggcaucuaaaggagguaagacauguggcuucguggaugagcgcgggcuguacaagucccucaaaggagccugcaaguuaaaacuguguggcguccuugguuugagacugauggacgggaccuggguugcuauccaaacgucagaugaaauuaaguggugucccccugaccagcuagugaaccuccacgacuuucauagcgaugagaucgagcaccugguaguggaggaacuugucaaaaagagggaagagugccuggacgcauuggaaacuauaaugacaaccaaaagugugucuuuccggcgccucucccaucugcgaaaguuaguuccaggauucggcaaggccuauacuauuuuuaauaaaacacugauggaggcugaugcccacuacaagagcaucagaaccuggaacgagauuauccccucgaaaggcugccucagggucgggggacggugccacccgcaugugaaugguguguucuuuaacggcaucauucuugggccugacggacacguacugauacccgaaaugcagucuuccuugcuacaucagcacauggagcugcucgaaucaaguguuaucccacugaugcauccucuugcggaucccagcacgguguucaaggacggcgaugaggcagaagacuuugucgaggugcaucugccagauguccacaaacaaauuuccgguguggacuuggggcuccccaauuggggcaaguauguucugaucucugccggagcuuuaaccgcccugaugcuaccuauauuccucaugacauguugccguaagacuaaccgcgcaggcagcauucagccaucaccgggggagaccggaagaaaagugaguguaacaucccacaacgguagggucaucagccugugggaaucuuacaagucaggcagugagacuaaacuuuga

SEQ ID NO: 159613 - RNA, 1575 nt, Artificial Sequence
  derived and/or modified CDS sequence (opt3) from glycoprotein__RABV__KF709069.1
auggugccccaggcccugcuguucgucccucuucugguuuuuagcaugugcuucggcaaguuuccaaucuacaccauuccggacaaauuggggcccugguccccuauagauauccaccauuuaucuuguccaaacaaucuggugguagaggacgaaggaugcacaaaccuaucagguuucaguuauauggagcucaaggugggcuacauuagcgcuaucaaagucaauggguuuacuuguacgggagugguuaccgaagcagagacauauacuaacuucgugggcuacgucaccacaauguuuaagagaaaacacuucaggcccaccccugaugccugccgggcggcuuauaauuggaagauggccggugacccacgcuacgaagagucccugcauaaccccuauccugauuaccacuggcuucgaacugugaagacaaccaaagagucucugguaauuaucucgccaucaguugcagacuuggauccguacgacaagagccuccauagucguguguuucccaaugggaaauguuccggaauaacgaucucuagcacuuauugcccuaccaaccacgauuacacaauuuggcugccagaaaaucccagacugggcacuuccugugacaucuucaccaacucaaggggcaagcgggccaguaaagggagcaagacaugcggauuugucgaugagcgcggucucuauaagucuuuaaaaggcgcuuguaagcugaaacuuugcgggguguugggacugagacuaauggacggcaccuggguggcaaugcaagccuccgaugaaacgaagugguguccuccagaccagcucgucaaucugcacgacuucaggucagaugagauugagcauuuuguuguggaggaacuugugaaaaagcgggaagagugccuggacgcuuuggaaagcaucaugacuacaaaaaguguaucuuuccgccgacucucccaccugagaaaguuaguccccgguuucgggaaggccuacaccauauuuaacaaaacucugauggaggcggaugcacauuauaagagcgugaggacauggaaugagauuaucccgucgaaaggaugccuccggguuggcggccguugucacccucacgugaacggggucuucuuuaauggaauuauccuuggucccgacggccaugugcugaucccagaaaugcagucuuccuugcuacagcaacacauggagcugcucgaaucaaguguaauuccucugaugcauccccuugccgauccaagcaccguuuucaaggacggggaugaggcugaaaacuuuguggagguccaccuccccgacgugcauaaacagauauccggagucgauuugggccucccuaacugggguaaguacgugcugguuucugccgggguguuaaucgcacugaugcuaauuaucuuccucaugacgugcuguggccgcguaaauagaccaaagagcacccagcacaaccugggaggcacagggagggaggucucagugacuccgcagaguggaaaaguuauauccagcugggaaucuuauaagucagguggcgagacccggcuuuga

SEQ ID NO: 159614 - RNA, 1575 nt, Artificial Sequence
  derived and/or modified CDS sequence (opt3) from glycoprotein__RABV__KF709070.1
auggugccccaggcccuccuguucgucccucuucugguuuuuagcaugugcuucggcaaguuuccaaucuacaccauuccggacaaauuggggcccugguccccuauagauauccaccauuuaucuuguccaaacaaucuggugguagaggacgaaggaugcacaaaccuaucagguuucaguuauauggagcucaaggugggcuacauuagcgcuaucaaagucaauggguuuacuuguacgggagugguuaccgaagcagagacauauacuaacuucgugggcuacgucaccacaauguuuaagagaaaacacuucaggcccaccccugaugccugccgggcggcuuauaauuggaagauggccggugacccacgcuacgaagagucccugcauaaccccuauccugauuaccacuggcuucgaacugugaagacaaccaaagagucucugguaauuaucucgccaucaguugcagacuuggauccguacgacaagagccuccauagucguguguuucccaaugggaaauguuccggaauaacgaucucuagcacuuauugcccuaccaaccacgauuacacaauuuggcugccagaaaaucccagacugggcacuuccugugacaucuucaccaacucaaggggcaagcgggccaguaaagggagcaagacaugcggauuugucgaugagcgcggucucuauaagucuuuaaaaggcgcuuguaagcugaaacuuugcgggguguugggacugagacuaauggacggcaccuggguggcaaugcaagccuccgaugaaacgaagugguguccuccagaccagcucgucaaucugcacgacuucaggucagaugagauugagcaucuuguuguggaggaacuggugaaaaagcgggaagagugcuuggacgcucucgaaagcaucaugacuacaaaaaguguaucuuuucgccgacugucccacuuaagaaagcugguccccgguuucgggaaggccuacaccauauucaacaaaacucucauggaggcggaugcacauuauaagagcgugaggacauggaaugagauuaucccgucgaaaggaugccuucggguuggcggccguugucacccucacgugaacggggucuuuuucaauggaauuauccugggucccgacggccauguguugaucccagaaaugcagucuucccuacugcagcaacacauggagcuccuggaaucaaguguaauuccucuuaugcauccccuggccgauccaagcaccguuuuuaaggacggggaugaggcugaaaacuucguggagguccacuugcccgacgugcauaaacagauauccggagucgaucucggccugccuaacugggguaaguacguguuaguuucugccggggugcugaucgcacuaaugcucauuaucuuucugaugacgugcuguggccgcguaaauagaccaaagagcacccagcacaaccuuggaggcacagggagggaggucucagugacuccgcagaguggaaaaguuauauccagcugggaaucuuauaagucagguggcgagacccgguuguga

SEQ ID NO: 159615 - RNA, 1575 nt, Artificial Sequence; identical to SEQ ID NO: 159155
  derived and/or modified CDS sequence (opt3) from glycoprotein__RABV__KF709071.1

SEQ ID NO: 159616 - RNA, 1575 nt, Artificial Sequence; identical to SEQ ID NO: 159155
  derived and/or modified CDS sequence (opt3) from glycoprotein__RABV__KF709072.1

SEQ ID NO: 159617 - RNA, 1575 nt, Artificial Sequence
  derived and/or modified CDS sequence (opt3) from glycoprotein__RABV__KF709074.1
auggugccccaggcccuccuguucgucccucuucugguuuuuccaaugugcuucggcaaguuuccgaucuacaccauucccgacaaauuggggccuuggagcccaauagauauccaccauuuauccugucccaacaaucuggugguagaggacgaaggaugcacaaaccuaucugguuucucauauauggagcucaaggugggcuacauuagugcuaucaaagucaauggguuuacuuguacgggagugguuaccgaagcagagacauauacuaacuucgugggcuacgucaccacaaccuuuaagagaaaacacuucaggccuacuccagaugccugccgggcggcuuauaauuggaagauggccggugacccccgcuacgaagagagccugcauaacccuuauccagauuaccacuggcuucgaacagugaagaccacgaaagagucccugguaauuaucucuccgucgguugcagacuuggaucccuacgacaagucacuccauagccguguguuuccuaaugggaaauguaguggaauaacuaucuccucuaccuauugcccaacaaaccacgauuacacuauuuggcugcccgaaaauccuagacugggcaccagcugugacaucuucacaaacuccaggggcaagcgggccucaaaagggaguaagaccugcggauuugucgaugagcgcggucucuauaagagcuuaaaaggcgcuuguaagcugaaacuuugcgggguguugggacugagacuaauggacggcacguggguggcaaugcaagccucugaugaaacuaagugguguccacccgaccagcucgucaaucugcacgacuucagguccgaugagauugagcaucuuguuguggaggaacuggugaaaaagcgggaagagugcuuggacgcucucgaaucaaucaugacaaccaaaagcguaaguuuucgccgacugucucacuuaagaaagcuggucccggguuucgggaaggccuacacuauauucaacaaaacacucauggaggcggaugcacauuauaaguccgugaggaccuggaaugagauuaucccuagcaaaggaugccuucggguuggcggccguuguuacccccacgugaacggggucuuuuucaauggaauuauccuggguccagacggccacguguugaucccugaaaugcagucgucucuacugcagcaacauauggagcuccuggaauccucaguaauuccccuuaugcacccacuggccgaucccaguacgguuuuuaaggacggggaugaggcugaaaacuucguggagguccauuugccugacgugcacaaacagauaagcggagucgaucucggccugccaaacugggguaaguauguguuaguuuccgccggggugcugaucgcacuaaugcucauuaucuuucugaugaccugcuguggccgcguaaauagaccgaagucuacacagcauaaccuuggaggcacugggagggaggucagcgugacaccccagucaggaaaaguuauaaguuccugggaaagcuacaagucugguggcgagacccgguuguga

SEQ ID NO: 159618 - RNA, 1575 nt, Artificial Sequence
  derived and/or modified CDS sequence (opt3) from glycoprotein__RABV__KF709075.1
auggugccccaggcccuccuguucgucccucuucugguuuuuagcaugugcuucggcaaguuuccaaucuacaccauuccggacaaauuggggcccugguccccuauagauauccaccauuuaucuuguccaaacaaucuggugguagaggacgaaggaugcacaaaccuaucagguuucaguuauauggagcucaaggugggcuacauuagcgcuaucaaagucaauggguuuacuuguacgggagugguuaccgaagcagagacauauacuaacuucgugggcuacgucaccacaaccuuuaagagaaaacacuucaggcccacuccugaugccugccgggcggcuuauaauuggaagauggccggugacccacgcuacgaagagucccugcauaaccccuauccugauuaccacuggcuucgaacagugaagaccacgaaagagucucugguaauuaucucgccaucaguugcagacuuggauccguacgacaagagccuccauagucguguguuucccaaugggaaauguuccggaauaacuaucucuagcaccuauugcccuacaaaccacgauuacacuauuuggcugccagaaaaucccagacugggcaccuccugugacaucuucacaaacucaaggggcaagcgggccaguaaagggagcaagaccugcggauuugucgaugagcgcggucucuauaagucuuuaaaaggcgcuuguaagcugaaacuuugcgggguguugggacugagacuaauggacggcacguggguggcaaugcaagccuccgaugaaacuaagugguguccuccagaccagcucgucaaucugcacgacuucaggucagaugagauugagcaucuuguuguggaggaacuggugaaaaagcgggaagagugcuuggacgcucucgaaagcaucaugacaaccaaaaguguaucuuuucgccgacugucccacuuaagaaagcugguccccgguuucgggaaggccuacacuauauucaacaaaacacucauggaggcggaugcacauuauaagagcgugaggaccuggaaugagauuaucccgucgaaaggaugccuucggguuggcggccguugucacccucacgugaacggggucuuuuucaauggaauuauccugggucccgacggccauguguugaucccagaaaugcagucuucccuacugcagcaacacauggagcuccuggaaucaaguguaauuccucuuaugcauccccuggccgauccaagcacgguuuuuaaggacggggaugaggcugaaaacuucguggagguccacuugcccgacgugcauaaacagauauccggagucgaucucggccugccuaacugggguaaguacguguuaguuucugccggggugcugaucgcacuaaugcucauuaucuuucugaugaccugcuguggccgcguaaauagaccagagagcacacagcacaaccuuggaggcacugggagggaagucucagugaccccgcagaguggaaagguuauauccagcugggagucuuauaaaucagguggcgaaacacgguuguga

SEQ ID NO: 159619 - RNA, 1575 nt, Artificial Sequence; identical to SEQ ID NO: 159618
  derived and/or modified CDS sequence (opt3) from glycoprotein__RABV__KF709076.1

SEQ ID NO: 159620 - RNA, 1575 nt, Artificial Sequence
  derived and/or modified CDS sequence (opt3) from glycoprotein__RABV__KF709077.1
auggugccccaggcccugcuguucgucccucuucugguuuuuagcaugugcuucggcaaguuuccaaucuacaccauuccggacaaacccgggccuugguccccaauagauauccaccauuugucuugucccaacaauuuagugguagaggacgaaggaugcacaaaccugucagguuucaguuauauggagcuaaaggugggcuacauuagcgcuaucaaagucaauggguuuacuuguacgggagugguuaccgaagcagagacauauacuaacuucgugggcuacgucaccacaaccuuuaagagaaaacacuucaggccuacuccagaugccugccgggcggcuuauaauuggaagauggccggugacccccgcuacgaagagucccuccauaacccuuauccagauuaccacuggcugcgaacagugaagaccacgaaagagucucuuguaauuaucucgccgucaguugcagaccuggaucccuacgacaagagcuugcauagucguguguuuccuaaugaaaaauguuccgggauaacuaucucuagcaccuauugcccaacaaaccacgauuacacuauuuggcuccccgagaauccuagacugggaaccuccugugacaucuucacaaacucaaggggcaagcgggccaguaaaggcagcaagaccugcggguuugucgaugaacgcggacuguauaagucucucaaaggugcuuguaaguuaaaacugugcggcgugcuuggguugagacugauggacggaacguggguggcaaugcaagccuccgaugagacuaagugguguccacccgaccagcuagucaaucuccacgacuucaggucagaugagauugaacaucugguuguggaggaacuugugaaaaagcgggaggaaugccuggacgcuuuggagagcaucaugacaaccaaaaguguaucuuuucgccgacucucccaccugagaaaguuagucccgggcuucgguaaggccuacacuauauucaacaaaacacugauggaggcggaugcacauuauaagagcgugaggaccuggaaugaaauuaucccuucgaaagggugccuccggguuggaggccguugucacccccacgugaacggcgucuuuuucaaugggauuauccuuggaccagacggucaugugcugaucccugagaugcagucuuccuugcuacagcaacacauggaacugcucgagucaaguguaauuccccugaugcauccacuugccgaucccagcacgguuuuuaaggacggcgaugaagcugagaacuucguggagguccaccucccugacgugcauaaacagauauccggggucgauuugggacucccaaacuggggcaaguacgugcugguuucugccgguguguuaaucgcacugaugcuaauuaucuuucucaugaccugcugugggcgcguaaauagaccggaaagcacacagcacaaccugggcggaacuggcagggaggucucagugacaccccagagugggaagguuauauccagcugggaaucuuauaaaucaggaggugagacccggcuuuga

SEQ ID NO: 159621 - RNA, 1575 nt, Artificial Sequence
  derived and/or modified CDS sequence (opt3) from glycoprotein__RABV__KF709078.1
auggugccccaggcccuccuguucgucccucuucugguuuuuagcaugugcuucggcaaguuuccaaucuacaccauuccggacaaauuggggcccugguccccuauagauauccaccauuuaucuuguccaaacaaucuggugguagaggacgaaggaugcacaaaccuaucagguuucaguuauauggagcucaaggugggcuacauuagcgcuaucaaagucaauggguuuacuuguacgggagugguuaccgaagcagagacauauacuaacuucgugggcuacgucaccacaaccuuuaagagaaaacacuucaggcccacuccugaugccugccgggcggcuuauaauuggaagauggccggugacccacgcuacgaagagucccugcauaaccccuauccugauuaccacuggcuucgaacagugaagaccacgaaagagucucugguaauuaucucgccaucaguugcagacuuggauccguacgacaagagccuccauagucgugugcugcccaaugggaaauguuccggaacuaccacaucuagcacuuauugcccuaccaaccacgauuacacaauauggcugccagaaaaucccagacucggcaccuccugugacaucuuuacgaacucaaggggcaagcgggccaguaaagggagcaagacuugcggauucgucgaugagcgcgguuuauauaagucucugaaaggcgcuuguaaacuuaaauugugcggggugcugggacuaagacucauggacggcacauggguggcaaugcaagccuccgaugaaaccaagugguguccuccagaccagcuggucaaucuucacgacuuuaggucagaugagauugagcaucugguuguggaagaguugguaaagaagcgggaagagugccucgacgcucuggaaagcaucaugacuacaaaaagugugucuuuccgccgauuaucccaccugagaaagcucguccccgguuuugggaaggccuacaccauuuucaacaaaacgcuuauggaggcggaugcacauuauaagagcgugaggaccuggaaugagaucauaccgucgaaaggaugccugcggguuggcggccguugucacccucacgugaacggggucuucuuuaauggaauuaucuugggucccgacggccaugugcuaauuccagaaaugcagucuucccugcuccagcaacacauggagcugcuugaaucaaguguaaucccucugaugcaucccuuggccgauccaagcacaguuuucaaggacggggaugaggcugaaaacuuuguggagguccaccuccccgacgugcauaaacagaucuccggagucgaucugggcuuaccuaacugggguaaguacgugcugguuucugccggggugcuaauugcacucaugcugauaaucuuccuuaugacuugcuguggccgcguaaauagaccagagagcacccagcacaacuugggaggcacagggagggaagucucagugacuccgcagaguggaaagguuauuuccagcugggagucuuauaaaucagguggcgaaacccggcuguga

SEQ ID NO: 159622 - RNA, 1575 nt, Artificial Sequence
  derived and/or modified CDS sequence (opt3) from glycoprotein__RABV__KF709080.1
auggugccccaggcccuccuguucgucccucuucugguuuuuagcaugugcuucggcaaguuuccaaucuacaccauuccggacaaauuggggcccugguccccuauagauauccaccauuuaucuuguccaaacaaucuggugguagaggacgaaggaugcacaaaccuaucagguuucaguuauauggagcucaaggugggcuacauuagcgcuaucaaagucaauggguuuacuuguacgggagugguuaccgaagcagagacauauacuaacuucgugggcuacgucaccacaaccuuuaagagaaaacacuucaggcccacuccugaugccugccgggcggcuuauaauuggaagauggccggugacccacgcuacgaagagucccugcauaaccccuauccugauuaccacuggcuucgaacagugaagaccacgaaagagucucugguaauuaucucgccaucaguugcagacuuggauccguacgacaagagccuccauagucguguguuucccaaugggaaauguuccggaauaacuaucucuagcaccuauugcccuacaaaccacgauuacacuauuuggcugccagaaaaucccagacugggcaccuccugugacaucuucacaaacucaaggggcaagcgggccaguaaagggagcaagaccugcggauuugucgaugagcgcggucucuauaagucuuuaaaaggcgcuuguaagcugaaacuuugcgggguguugggacugagacuaauggacggcacguggguggcaaugcaagccuccgaugaaacuaagugguguccuccagaccagcucgucaaucugcacgacuucaggucagaugagauugagcaucuugcuguugaggaacuggugaaaaagcgggaagagugcuuggacgcccucgaaagcaucaugacaaccaaaaguguaucuuuucgccgacugucccacuuaagaaagcuggugcccgguuucgggaaggcguacacuauauucaacaaaacacucauggaggcagaugcccauuauaagagcgucaggaccuggaaugagauuaucccgucgaaaggaugccuucgggugggcggccguugucacccucacguuaacgggguguuuuucaauggaauuauccugggucccgacggccaugucuugaucccagaaaugcagucuucccuacugcagcaacacauggagcuccuggaaucaagugugauuccucuuaugcauccccuggcugauccaagcacgguauuuaaggacggggaugaggccgaaaacuucguugaggugcacuugcccgacguccauaaacagauauccggaguggaucucggccugccuaacugggguaaguacgucuuagugucugcagggguucugaucgcucuaaugcucauuaucuuucugaugaccugcuguggccgcgugaauagaccagagagcacacagcacaaccuuggaggcacugggagggaaguaucagucaccccgcagaguggaaaggugauauccagcugggagucuuauaaaucagguggcgaaacacgguuguga

SEQ ID NO: 159623 - RNA, 1575 nt, Artificial Sequence; identical to SEQ ID NO: 159434
  derived and/or modified CDS sequence (opt3) from glycoprotein__RABV__KF726852.1

SEQ ID NO: 159624 - RNA, 1575 nt, Artificial Sequence
  derived and/or modified CDS sequence (opt3) from glycoprotein__RABV__KF726853.1
augaucagccaggccuuccuguuugugccccuccuugcuuucuccccuugcuuuggcaaguucccaauuuacaccauaccggacaaacuggggcccuggucuccuaucgauauucaccauuugucauguccaaacaauuuagucguugaggacgaaggaugcacaaaccugagugguuuuagcuauauggagcuaaaggugggcuacaucuccgcaauuaaaguaaauggguucacuuguacgggaguggucaccgaagccgagacauauacuaacuuugugggcuacguuaccacaaccuucaagagaaaacacuuuaggcccaugccugaugcgugccggacugcuuauucuuggaagauggccggugacccacgcuacgaagagucgcuccauaaucccuauccugauuaccacuggcugcgaacagugaagaccacgaaagagucacuugucaucauaagcccaaguguggcagaccuggauccguacgacaaguccuugcauucucguguauuccccgggggaaaauguagcggccucacuguuuccucaaccugcuguaguacaaaccacgauuauacuaucuggaugccugaaaauccaagacugggcaccagcugcgacauuuuuacaaacucuagggggaagcgggccuccaaaggagguaagaccuguggcuucguggaugagcgcgggcuguacaagucacucaaaggagcuugcaaguuaaaacuguguggcgucagcggucuuagauugauggacgggacguggguggcaauccaaacaagugaugaaauuaaguggugcucucccgaccagcuggugaaucuacacgaccuccauuccgaugagaucgagcaccuggucguugaggaacuugugaaaaagagggaagagugccuggacgccuuggaaagcauaaugacuaccaaaucgguaucuuuucggcgccucucccaucugcgaaaguuagugccuggauucggcaaggcuuauacuauuuucaacaaaacacugauggaggccgaugcgcacuacaagucaaucagaaccuggaaugagauuaucccaaguaaaggcugucucagggucgggggacggugccacccccaugugaacgguguguuuuucaauggcaucauucuugggccggacggacacguucugauaccugaaaugcagagcuccuugcuacaucagcacauggagcugcucgaaucuagcgucaucccccugaugcauccacuugcagauccuucaacgguguuuaaggacggcgaugaggccgaagacuucguagagguucaucugcccgaugcucacaaacaaauuagugguguggacuuggggcucccaaacuggggcaaguauguccugauguccgccggagcauuaaccgcucugaugcuaaugaucuuucucaugacauguugccguaagacuaaucgcgccgagagcaugccccacucuccuggcgaaaccgggagaaaagugucacugacaagucacaacggaagggucauaagcuccugggagucuuacaagucggguggcgaaacuaaacuuuga

SEQ ID NO: 159625 - RNA, 1575 nt, Artificial Sequence
  derived and/or modified CDS sequence (opt3) from glycoprotein__RABV__KJ004416.1
augaucccccaggugcugcuguucgucccucuucugguuuuuagcuccugcuucggcaaguuuccaauuuacaccauaccggacaaauuggggcccuggucuccuaucgauauucaccauuuaucauguccaaacaaucuggugguagaggacgaaggaugcacaaaccuaagugguuucagcuauauggagcucaaggugggcuacaucuccgccauuaaagucaauggguuuacuuguacgggagugguuaccgaagcugagacauauacuaacuucgugggcuacgucaccacaaccuuuaagagaaaacacuucaggcccaugccugaugcaugccgggccgcguauaauuggaagauggcuggugacccacgcuacgaagagucucugcauaaccccuauccugauuaccacuggcuucgaacugugaagacaaccaaagagucgcugguaaucauaucaccaagcguugccgacuuggauccguacgacaagagucuccauucccguguguuucccgggggaaaauguucuggcaucacggucagcuccacuugcuguucaaccaaucacgauuauacaauuuggaugccugaaaacccaagacugggcaccaguugcgacaucuucacuaauagcagggggaagcgggcaucuaaaggagguaagacauguggcuuuguggaugagcgcgggcuguacaagucccucaaaggagccugcaaguuaaaacuguguggcgugcuugguuugagacugauggacgggaccugggucgcuauucaaacgucagaugaaacuaaguggugcagccccgaccagcuaguuaaccuccacgacuuccauagugaugagaucgagcaccuggugguagaggaacuugugaaaaagagggaagagugccuggacgcauuggaaacaauaaugaccacuaaaucugucuccuuucggcgccucagccaucugcgaaaguuagugccuggauucggcaaggccuauacaauuuucaauaaaacccugauggaggcugaugcccacuacaagucgaucagaacguggaacgagauuaucccaucuaaaggcugucucaggguugggggacggugccacccccaugugaauggugucuuuuucaacggcaucauucuugggccggacggacacgugcugauaccugaaaugcaguccucauugcuacaucagcacauggagcugcucgaaaguagcguaaucccccugaugcauccacuugcggauccuuccaccguuuuuaaggacggcgaugaggcagaagacuucguggagguccaccuccccgaugugcacaaacaaauuucuggugucgacuuggggcucccaaauuggggcaaguaugugcugaucagcgccggagcuuuaacagcccugauguuuacuauauuccuaaugaccuguugccguaagacaaaccgcgcaggcucaauucagcucagucccggggagacuggaagaaaaguuuccgugaccagccauaacgguaggguaaucucuucaugggaaaguuacaagagcggcuccgagacaaaacuguga

SEQ ID NO: 159626 - RNA, 1575 nt, Artificial Sequence
  derived and/or modified CDS sequence (opt3) from glycoprotein__RABV__KJ174608.1
augaucccccaggcccugcucagcgugccucuucugauuuccucuuugugcuucggcaaguuuccaauauacaccaucccggagaaauuagggcccuggucaccuauugacauccaccaucugaguuguccaaacaaucuagucguugaagaugagggaugcaacagccucuccgguuucucuuauauggaacugaaggugggcuacauuucggcuaucaaaguaaauggguuuacauguacuggaguggucacggaggcagaaaccuauacaaacuucgugggcuacguuacuaccacauuuaagagaaaacacuucaggcccaugccugacgccugccgggcggcuuauaauuggaagaccgccggugauccacgcuacgaggagucacuucauaaccccuauccugacuaccacuggcugcgaacugugaagacaaccaaagaaagccuuauaaucauuaguccauccgucgcagaucucgacccguacgauaagucucugcauagccguaucuuucccgggggaaaaugucugggcauuacgaucuccucaacuuauugcaguaccaaucacgacuacacaauauggaugccugaggaagccagacucggcacuagcugugauauuuucaccaacucuaaggggaaaagggcuuccaagggaggucggacaugcggcuuuguggacgagcgcggguuauauaagucacugaaaggagcauguaaguugaaauugugcggcguaccaggucugagacuaauggaugggaccuggguugccauccaaacgcccaaugagacuaagugguguagcccugaccagcucgugaacguccacgauuucaggagugacgaaauugagcaucuggugguggaggaacuuauccggaaacgcgaagagugccuggacgcuuuggagucuaucaugacaaccaaguccgucagcuuucgaagacucucgaaucugaggaaauuaguuccaggauucggcaaggccuacacuauuuuuaacaagacacugauggaagcggaugcacacuauaaaucugugcggaccuggaaugagauaauccccucccguggcugccucaagguagggggacgcugucauccgcacgugaacggugucuucuucaauggcauuauccuugggccugacggacacauacugauucccgaaaugcagucaaguuugcuacagcaacauauggagcugcucgaaagcuccgugaucccacugauccacccucuugccgaucccucuacgguuuuuaaagacggcgaugaggcugaggacuucguggaaguccaucugccagaugugcaccagcagguaagcgguguugacuuggggcuccccgauuggggcaaguacgugcugaugucagccggagcauuagcuaccgucaugcugacaauuuuucuaaucacuugcuguagaagggugaaacggaccgagaguauucagcaaucccucggcgaaagcgggcgaaaggucucugugacaccucagaacggaaagguuaugucaaguugggaguauuacaaaagcgguggcgggacucgccuguga

SEQ ID NO: 159627 - RNA, 1575 nt, Artificial Sequence; identical to SEQ ID NO: 159463
  derived and/or modified CDS sequence (opt3) from glycoprotein__RABV__KJ174609.1

SEQ ID NO: 159628 - RNA, 1575 nt, Artificial Sequence
  derived and/or modified CDS sequence (opt3) from glycoprotein__RABV__KJ174615.1
augaucccccaggcccugcucagcgugccucuucugauuuccucuuugugcuucggcaaguuuccaauauacaccaucccggagaaauuagggcccuggucaccuauugacauccaccaucugaguuguccaaacaaucuagucguugaagaugagggaugcaacagccucuccgguuucucuuauauggaacugaaggugggcuacauuucggcuaucaaaguaaauggguuuacauguacuggaguggucacggaggcagaaaccuauacaaacuucgugggcuacguuacuaccacauuuaagagaaaacacuucaggcccauggccgacgcgugccgggcugccuauaauuggaagaccgcaggggauccucgcuacgaggagucacuucauaacccauaucccgacuaccacuggcugcgaacugugaagacaaccaaagaaagccuuauaaucauuaguccuuccgucgccgaucucgacccauacgauaagucucugcauagccguaucuuuccggguggaaaaugucugggcauuacgaucuccucaacuuauugcaguaccaaucacgacuacacaauauggaugcccgaggaagcuagacucggcacuagcugugauauuuucaccaacucuaaggggaaaagggcauccaagggaggucggacaugcggcuuuguggacgagcgcggguuauauaagucacugaaaggagccuguaaguugaaauugugcggcguaccuggucugagacuaauggaugggaccuggguugcuauccaaacgccaaaugagacuaagugguguagccccgaccagcucgugaacguccacgauuucaggagugacgaaauugagcaucuggugguggaggaacuuauccggaaacgcgaagagugccuggacgccuuggagucuaucaugacaaccaaguccgucagcuuucgaagacucucgaaucugaggaaauuaguuccuggauucggcaaggcguacacuauuuuuaacaagacacugauggaagcagaugcccacuauaaaucugugcggaccuggaaugagauaaucccaucccguggcugccucaagguagggggacgcugucauccccacgugaacggugucuucuucaauggcauuauccuugggccggacggacacauacugauuccugaaaugcagucaaguuugcuacagcaacauauggagcugcucgaaagcuccgugaucccccugauccacccacuugcugauccuucuacgguuuuuaaagacggcgaugaggccgaggacuucguggaaguccaucugcccgaugugcaccagcagguaagcgguguugacuuggggcucccagauuggggcaaguacgugcugaugucagcaggagcuuuagccaccgucaugcugacaauuuuucuaaucacuugcuguagaagggugaaacggaccgagaguauucagcaaggccccggggaauccggacgaaagcucagcgucacaccucagaacgguaaggugaugucuucaugggaguauuacaaaaguggcgggggaacucgccuguga

SEQ ID NO: 159629 - RNA, 1575 nt, Artificial Sequence
  derived and/or modified CDS sequence (opt3) from glycoprotein__RABV__KJ174616.1
augaucccccaggcccugcucagcgugccucuucugauuuccucuuugugcuucggcaaguuuccaauauacaccaucccggagaaauuagggcccuggucaccuauugacauccaccaucugaguuguccaaacaaucuagucguugaagaugagggaugcaacagccucuccgguuucucuuauauggaacugaaggugggcuacauuucggcuaucaaaguaaauggguuuacauguacuggaguggucacggaggcagaaaccuauacaaacuucgugggcuacguuacuaccacauuuaagagaaaacacuucaggcccaugccugacgccugccgggcggcuuauaauuggaagaccgccggugauccacgcuacgaggagucacuucauaaccccuauccugacuaccacuggcugcgaacugugaagacaaccaaagaaagccuuauaaucauuaguccauccgucgcagaucucgacccguacgauaagucucugcauagccguaucuuucccgggggaaaaugucugggcauuacgaucuccucaacuuauugcaguaccaaucacgacuacacaauauggaugccugaggaagccagacucggcacuagcugugauauuuucaccaacucuaaggggaaaagggcuuccaagggaggucggacaugcggcuuuguggacgagcgcggguuauauaagucacugaaaggagcauguaaguugaaauugugcggcguaccaggucugagacuaauggaugggaccuggguugccauccaaacgcccaaugagacuaagugguguagcccugaccagcucgugaacguccacgauuucaggagugacgaaauugagcaucuggugguggaggaacuuauccggaaacgcgaagagugccuggacgcuuuggagucuaucaugacaaccaaguccgucagcuuucgaagacucucgaaucugaggaaauuaguuccaggauucggcaaggccuacacuauuuuuaacaagacacugauggaagcggaugcacacuauaaaucugugcggaccuggaaugagauaauccccuccaagggcugccucaaaguagggggacguugucauccgcacgugaacggugucuucuucaauggcauuauccuugggccugacggacacauacugauucccgaaaugcagucaaguuugcuacagcaacauauggagcugcucgaaagcuccgugaucccacugauccacccucuugccgaucccucuacgguuuuuaaggacggcgaugaggcugaggacuucguggaaguccaucugccagaugugcaccagcagguaagcgguguugacuuggggcuccccgauuggggcaaauacgugcugaugucagccggagcauuagcuaccgucaugcugacaauuuuucuaaucacuugcugucgcagagugaagaggaccgagaguguccagcaaggccucggggaauccggacggaaggugagcguugccccucagaacgguaaagugaugucuucaugggaguauuacaagaguggcgggggaacacgacuguga

SEQ ID NO: 159630 - RNA, 1575 nt, Artificial Sequence
  derived and/or modified CDS sequence (opt3) from glycoprotein__RABV__KJ174617.1
augaucccccaggcccugcucagcgugccucuucugauuuccucuuugugcuucggcaaguuuccaauauacaccaucccggagaaauuagggcccuggucaccuauugacauccaccaucugaguuguccaaacaaucuagucguugaagaugagggaugcaacagccucuccgguuucucuuauauggaacugaaggugggcuacauuucggcuaucaaaguaaauggguuuacauguacuggaguggucacggaggcagaaaccuauacaaacuucgugggcuacguuacuaccacauuuaagagaaaacacuucaggcccaugccugacgccugccgggcggcuuauaauuggaagaccgccggugauccacgcuacgaggagucacuucauaaccccuauccugacuaccacuggcugcgaacugugaagacaaccaaagaaagccuuauaaucauuaguccauccgucgcagaucucgacccguacgauaagucucugcauagccguaucuuucccgggggaaaaugucugggcauuacgaucuccucaacuuauugcaguaccaaucacgacuacacaauauggaugccugaggaagccagacucggcacuagcugugauauuuucaccaacucuaaggggaaaagggcuuccaagggaggucggacaugcggcuuuguggacgagcgcggguuauauaagucacugaaaggagcauguaaguugaaauugugcggcguaccaggucugagacuaauggaugggaccuggguugccauccaaacgcccaaugagacuaagugguguagcccugaccagcucgugaacguccacgauuucaggagugacgaaauugagcaucuggugguggaggaacuuauccggaaacgcgaagagugccuggacgcuuuggagucuaucaugacaaccaaguccgucagcuuucgaagacucucgaaucugaggaaauuaguuccaggauucggcaaggccuacacuauuuuuaacaagacacugauggaagcggaugcacacuauaaaucugugcggaccuggaaugagauaauccccucccguggcugccucaagguagggggacgcugucauccgcacgugaacggugucuucuucaauggcauuauccuugggccugacggacacauacugauucccgaaaugcagucaaguuugcuacagcaacauauggagcugcucgaaagcuccgugaucccacugauccacccucuugccgaucccucuacgguuuuuaaagacggcgaugaggcugaggacuucguggaaguccaucugccagaugugcaccagcagguaagcgguguugacuuggggcuccccgauuggggcaaguacgugcugaugucagccggagcauuagcuaccgucaugcugacaauuuuucuaaucacuugcuguagaagggugaaacggaccgagaguauucagcaaggccucggggaauccggacgaaaggucagcguggccccucagaacgguaagguuaugucuucaugggaguauuacaaaaguggcgggggaacacgccuguga

SEQ ID NO: 159631 - RNA, 1575 nt, Artificial Sequence
  derived and/or modified CDS sequence (opt3) from glycoprotein__RABV__KJ174618.1
augaucccccaggcccuucucuucgugccuuuucuuuucccaagccugugcuugggcaaguuuccgauuuacaccauacccgagaaauuagggccuugguccccaaucgacauucaccaucugucuugucccaacaaucuagucguugaagaugagggaugcgacucacucagugguuucagcuauauggaacugaaggugggcuacaucuccgcuauuaaaguaaacggguuuacauguacuggaguggucacggaggcagaaaccuauacaaauuucgugggcuacguuacuaccacauuuaagagaaaacacuucaggccuaugccagaugccugccgggcggcuuauaacuggaagaccgccggugacccccgcuacgaggagucucuucauaauccuuauccagauuaccacuggcugcgaacugugaagacaaccaaagaaucguugaucauaaucucaccgagcgucgcagaccucgaucccuacgacaagagucugcauucccguguguuuccugggggaaaaugucugggcauuacgaucucuagcacuuauugcuccaccaaccacgauuacacaauuuggaugccagaggaagccagacucggcacuucaugugacaucuucaccaauaguaaggggaaaagggcuagcaagggaggucggacaugcggcuuuguagaugagcgcggguuauauaagucucugaaaggagcauguaagcugaaauugugcggcguucccggucugagacuaauggacgggaccuggguggccauacaaacgccuggagagacuaagugguguuccccagaucagcucgucaaccugcacgacuucaggucagacgaaauugagcaucuugugguggaggaacugaucaaaaagcgggaagagugcuuggaugcucucgagagcauuaugacaaccaaaagugucucuuuucgccgacuguccaauuuaagaaagcugguucccggcuucggcaaggccuacacuaucuucaacaaaacacucauggaagcggacgcacacuauaagagcaucaggaccugggaugagauuauaccgucgaaagggugccuucgggugggaggucguugucauccucacguaaauggcguguuuuucaacgggaucauucugggacccgacggccacgucuugaucccagaaaugcagucuucccuacugcagcaacauauggagcuccuggaaucaagugugauaccucuuauucacccccuggccgauccaagcacgguuuuuaaggacggugaugaggcugaggacuucguggaaguccauuugcccgaugugcacgagcagguauccgggguugaccucggccugccuaauuggggaaaauacguguuaaucucugccggcguccuggcaaccgugauccuaacaauuuuucuccugacuugcugucgcagagucaacaggaccaagccaaagcagcagagccuuggggauucaggacggaaagugaguguuacaccgcaaaaugguaaggugauguccagcugggaauauuacaaaucugagggccgaacuucauuguga

SEQ ID NO: 159632 - RNA, 1575 nt, Artificial Sequence
  derived and/or modified CDS sequence (opt3) from glycoprotein__RABV__KJ174619.1
augaucccccaggccuuccuguuugugccuuuccucuuuccaagccuuugccugggcaaguucccgauuuacaccauacccgagaaauuggggccuugguccccaaucgacauucaccauuuaucuugucccaacaaucuggucguugaagaugagggaugcgacucacuaagugguuuuagcuauauggaacucaaggugggcuacaucuccgcuauuaaaguaaacggguucacauguacuggaguggucacggaggcagaaaccuauacaaauuuugugggcuacguuacuaccacauucaagagaaaacacuuuaggccuaugccagaugccugccgggcggcuuauaacuggaagaccgccggugacccccgcuacgaggagucucugcauaauccuuauccagauuaccacuggcuucgaacugugaagacaaccaaagaaucgcugaucauaaucucaccgagcgucgcagacuuggaucccuacgacaagagucuccauucccguguguucccugggggaaaaugucugggcauuacgaucucuagcacuuauugcuccaccaaccacgauuacacaauuuggaugccagaggaagccagacugggcacuucaugugacaucuuuaccaauaguaaggggaaaagggcuagcaagggaggucggacaugcggcuucguagaugagcgcgggcucuauaagucuuuaaaaggagcauguaagcugaaacuuugcggcguucccgguuugagacugauggacgggaccuggguggccauacaaacgccuggagagacuaagugguguuccccagaucagcuagucaaccuccacgacuuuaggucagacgaaauugagcaucuggugguggaggaacuuaucaaaaagcgggaagagugccuggaugcuuuggagagcauuaugacaaccaaaagugucucuuuccgccgacucuccaaucugagaaaguuaguucccggcuucggcaaggccuacacuaucuuuaacaaaacacugauggaagcggacgcacacuauaagagcaucaggaccugggaugagauuauaccgucgaaagggugccuccgggugggaggucguugucauccucacguaaauggcguguucuuuaacgggaucauucuuggacccgacggccacguccugaucccagaaaugcagucuuccuugcuacagcaacauauggagcugcucgaaucaagugugauaccucugauucacccccuugccgauccaagcacgguuuucaaggacggugaugaggcugaggacuuuguggaaguccaucugcccgaugugcacgagcagguauccgggguugacuugggccucccuaauuggggaaaauacgugcugaucucugccggcgucuuagcaaccgugauccugacaauuuuccuacucacuugcugucgcagagucaacaggaccaagccaaagcagcagagccugggggaaucaggacggaaagugaguguuacaccgcaaaaugguaaggugauguccagcugggaguauuacaaaucugaaggccgaacuucacuuuga

SEQ ID NO: 159633 - RNA, 1575 nt, Artificial Sequence
  derived and/or modified CDS sequence (opt3) from glycoprotein__RABV__KJ174620.1
augaucccccaggcccuccuguucgugccuuuucuuuucccaagccugugcuugggcaaguuuccgauuuacaccauacccgagaaauuagggccuugguccccaaucgacauucaccaucugucuugucccaacaaucuagucguugaagaugagggaugcgacucacucagugguuucagcuauauggaacugaaggugggcuacaucuccgcuauuaaaguaaacggguuuacauguacuggaguggucacggaggcagaaaccuauacaaauuucgugggcuacguuacuaccacauuuaagagaaaacacuucaggccuaugccagaugccugccgggcggcuuauaacuggaagaccgccggugacccccgcuacgaggagucucuucauaauccuuauccagauuaccacuggcugcgaacugugaagacaaccaaagaaucguugaucauaaucucaccgagcgucgcagaccucgaucccuacgacaagagucugcauucccguguguuuccugggggaaaaugucugggcauuacgaucucuagcacuuauugcuccaccaaccacgauuacacaauuuggaugccagaggaagccagacucggcacuucaugugacaucuucaccaauaguaaggggaaaagggcuagcaagggagguaagacaugcggcuuuguagaugagcggggguuauauaaaucucugaagggagcauguaaacuuaaguugugcggcguucccggucugcgccuaauggacgggaccuggguggccauacaaacgccuggagagacuaaaugguguuccccagaucagcucgucaaccugcacgacuucagaucagacgaaauugagcaucuugugguggaggaacugaucaagaaaagggaagagugcuuggaugcucucgagagcauuaugacaaccaagagugucucuuuucggcgccuguccaauuuacgaaagcugguucccggcuucggcaaagccuacacuaucuucaacaagacacucauggaagcggacgcacacuauaaaagcaucagaaccugggaugagauuauaccgucgaaggggugccuuagggugggaggucggugucauccucacguaaauggcguguuuuucaacgggaucauucugggacccgacggccacgucuugaucccagaaaugcagucuucccuacugcagcaacauauggagcuccuggaaucaagugugauaccucuuauucacccccuggccgauccaagcacgguuuuuaaagacggugaugaggcugaggacuucguggaaguccauuugcccgaugugcacgagcagguauccgggguugaccucggccugccuaauuggggaaaguacguguuaaucucugccggcguccuggcaaccgugauccuaacaauuuuucuccugacuugcugucgucgcgucaacagaaccaagccaaaacagcagagccuuggggaaucaggaaggaaggugaguguuacaccgcaaaaugguaaagugauguccagcugggaguauuacaagucugaaggccggacuucauuguga

SEQ ID NO: 159634 - RNA, 1575 nt, Artificial Sequence
  derived and/or modified CDS sequence (opt3) from glycoprotein__RABV__KJ174622.1
augaucccccaggcccuucucuucgugccuuuucuuuucccaagccugugcuugggcaaguuuccgauuuacaccauacccgagaaauuagggccuugguccccaaucgacauucaccaucugucuugucccaacaaucuagucguugaagaugagggaugcgacucacucagugguuucagcuauauggaacugaaggugggcuacaucuccgcuauuaaaguaaacggguuuacauguacuggaguggucacggaggcagaaaccuauacaaauuucgugggcuacguuacuaccacauuuaagagaaaacacuucaggccuaugccagaugccugccgggcggcuuauaacuggaagaccgccggugacccccgcuacgaggagucucuucauaauccuuauccagauuaccacuggcugcgaacugugaagacaaccaaagaaucguugaucauaaucucaccgagcgucgcagaccucgaucccuacgacaagagucugcauucccguguguuuccugggggaaaaugucugggcauuacgaucucuagcacuuauugcuccaccaaccacgauuacacaauuuggaugccagaggaagccagacucggcacuucaugugacaucuucaccaauaguaaggggaaaagggcuagcaagggaggucggacaugcggcuuuguagaugagcgcggguuauauaagucucugaaaggagcauguaagcugaaauugugcggcguucccggucugagacuaauggacgggaccuggguggccauacaaacgccuggagagacuaagugguguuccccagaucagcucgucaaccugcacgacuucaggucagacgaaauugagcaucuugugguggaggaacugaucaaaaagcgggaagagugcuuggaugcucucgagagcauuaugacaaccaaaagugucucuuuucgccgacuguccaauuuaagaaagcugguucccggcuucggcaaggccuacacuaucuucaacaaaacacucauggaagcggacgcacacuauaagagcaucaggaccugggaugagauuauaccgucgaaagggugccuucgggugggaggucguugucauccucacguaaauggcguguuuuucaacgggaucauucugggacccgacggccacgucuugaucccagaaaugcagucuucccuacugcagcaacauauggagcuccuggaaucaagugugauaccucuuauucacccccuggccgauccaagcacgguuuuuaaggacggugaugaggcugaggacuucguggaaguccauuugcccgaugugcacgagcagguauccgggguugaccucggccugccuaauuggggaaaauacguguuaaucucugccggcguccuggcaaccgugauccuaacagucuuucuccugacuugcugucgcagagugaacaggaccaagccaaagcagcagagccuuggggaaucaggacggaaaguuagugugacaccgcaaaaugguaagguaauguccagcugggaguauuacaaaucugaaggccgaacuucauuguga

SEQ ID NO: 159635 - RNA, 1575 nt, Artificial Sequence
  derived and/or modified CDS sequence (opt3) from glycoprotein__RABV__KJ174623.1
augaucccccaggcccuucucuucgugccuuuucuuuucccaagccugugcuugggcaaguuuccgauuuacaccauacccgagaaauuagggccuugguccccaaucgacauucaccaucugucuugucccaacaaucuagucguugaagaugagggaugcgacucacucagugguuucagcuauauggaacugaaggugggcuacaucuccgcuauuaaaguaaacggguuuacauguacuggaguggucacggaggcagaaaccuauacaaauuucgugggcuacguuacuaccacauuuaagagaaaacacuucaggccuaugccagaugccugccgggcggcuuauaacuggaagaccgccggugacccccgcuacgaggagucucuucauaauccuuauccagauuaccacuggcugcgaacugugaagacaaccaaagaaucguugaucauaaucucaccgagcgucgcagaccucgaucccuacgacaagagucugcauucccguguguuuccugggggaaaaugucugggcauuacgguaucuagcacuuauugcuccaccaaccacgauuacacaaucuggaugccagaggaagccagacucggcacuucaugugacauuuucaccaauaguaaggggaaaagggcuagcaagggaggucggacaugcggcuuuguugaugagcgcggguuauauaagucucugaaaggagcauguaagcugaaauugugcggcgugcccggucugagacuaauggacgggaccugggucgccauccaaacgccuggagagacuaagugguguuccccagaucagcucgugaaccugcacgacuucaggucagacgaaauagagcaucuuguggucgaggaacugauuaaaaagcgggaagagugcuuggaugcucucgagagcaucaugacaaccaaaaguguuucuuuucgccgacuguccaauuuaagaaagcuggugcccggcuucggcaaggccuacacuauuuucaacaaaacacucauggaagcggacgcacacuauaagagcguaaggaccugggaugagaucaucccgucgaaagggugccuucgggugggaggucguugucauccucacgucaauggcguguuuuucaacgggauuauacugggacccgacggccacguuuugaucccagaaaugcagucuucccuacugcagcaacauauggagcuccuggaaucaagugugauuccucuuauccacccccuggccgauccaagcacggucuuuaaggacggugaugaggcugaggacuucguggaaguacauuugcccgauguucacaaacagguguccggggucgaccucggccugccuaauuggggaaaguacguguuaaugggcgccgggguccuggcaaccgugauacuaacaauuuuucuccugacuugcugucgcagaguuaacaggaccaagccaaaacagcagucucuuggagagagcggucggaaggugucaguaacaccgcaaaauggcaaagucaugaguuccugggaauauuacaagagcgaggggcgaacuucuuuguga

SEQ ID NO: 159636 - RNA, 1575 nt, Artificial Sequence; identical to SEQ ID NO: 159455
  derived and/or modified CDS sequence (opt3) from glycoprotein__RABV__KJ174624.1

SEQ ID NO: 159637 - RNA, 1575 nt, Artificial Sequence
  derived and/or modified CDS sequence (opt3) from glycoprotein__RABV__KJ174625.1
augaucccccaggcccuucucuucgugccuuuucuuuucccaagccugugcuugggcaaguuuccgauuuacaccauacccgagaaauuagggccuugguccccaaucgacauucaccaucugucuugucccaacaaucuagucguugaagaugagggaugcgacucacucagugguuucagcuauauggaacugaaggugggcuacaucuccgcuauuaaaguaaacggguuuacauguacuggaguggucacggaggcagaaaccuauacaaauuucgugggcuacguuacuaccacauuuaagagaaaacacuucaggccuaugccagaugccugccgggcggcuuauaacuggaagaccgccggugacccccgcuacgaggagucucuucauaauccuuauccagauuaccacuggcugcgaacugugaagacaaccaaagaaucguugaucauaaucucaccgagcgucgcagaccucgaucccuacgacaagagucugcauucccguguguuuccugggggaaaaugucugggcauuacgguaucuagcacuuauugcuccaccaaccacgauuacacaaucuggaugccagaggaagccagacucggcacuucaugugacauuuucaccaauaguaaggggaaaagggcuagcaagggaggucggacaugcggcuuuguugaugagcgcggguuauauaagucucugaaaggagcauguaagcugaaauugugcggcgugcccggucugagacuaauggacgggaccugggucgccauccaaacgccuggagagacuaagugguguuccccagaucagcucgugaaccugcacgacuucaggucagacgaaauagagcaucuuguggucgaggaacugauuaaaaagcgggaagagugcuuggaugcucucgagagcaucaugacaaccaaaaguguuucuuuucgccgacuguccaauuuaagaaagcuggugcccggcuucggcaaggccuacacuauuuucaacaaaacacucauggaagcggacgcacacuauaagagcguaaggaccugggaugagaucaucccgucgaaagggugccuucgggugggaggucguugucauccucacgucaauggcguguuuuucaacgggauuauacugggacccgacggccacguuuugaucccagaaaugcagucuucccuacugcagcaacauauggagcuccuggaaucaagugugauuccucuuauccacccccuggccgauccaagcacggucuuuaaggacggugaugaggcugaggacuucguggaaguacauuugcccgauguucacaaacagguguccggggucgaccucggccugccuaauuggggaaaguacguguuaaugggcgccgggguccuggcaaccgugauacuaacaauuuuucuccugacuugcugucgcagaguuaacaggaccaagccaaaacagcagucucuugaggaaagcggacggaaggugucaguaacaccgcaaaaugguaaagucaugaguuccugggaguauuacaagagcgaaggccgaacuucuuuguga

SEQ ID NO: 159638 - RNA, 1575 nt, Artificial Sequence; identical to SEQ ID NO: 159637
  derived and/or modified CDS sequence (opt3) from glycoprotein__RABV__KJ174626.1

SEQ ID NO: 159639 - RNA, 1575 nt, Artificial Sequence; identical to SEQ ID NO: 159469
  derived and/or modified CDS sequence (opt3) from glycoprotein__RABV__KJ174627.1

SEQ ID NO: 159640 - RNA, 1575 nt, Artificial Sequence; identical to SEQ ID NO: 159297
  derived and/or modified CDS sequence (opt3) from glycoprotein__RABV__KJ174628.1

SEQ ID NO: 159641 - RNA, 1575 nt, Artificial Sequence; identical to SEQ ID NO: 159469
  derived and/or modified CDS sequence (opt3) from glycoprotein__RABV__KJ174629.1

SEQ ID NO: 159642 - RNA, 1575 nt, Artificial Sequence; identical to SEQ ID NO: 159297
  derived and/or modified CDS sequence (opt3) from glycoprotein__RABV__KJ174630.1

SEQ ID NO: 159643 - RNA, 1575 nt, Artificial Sequence
  derived and/or modified CDS sequence (opt3) from glycoprotein__RABV__KJ174631.1
augaucccccaggcccuguuguucgugccucuucugauuccaagccucugcuuaggcgaguuuccgauauacaccauccccgacaagcuggggccuugguccccaauugauauccaccaucuaucuugucccaacaaucucgucgcugaaaacgacggaugcacaucacugagugguuucagcuauauggagcuuaaaguuggcuacauuuccgcaaucaaggugaauggguuuacuuguacgggaguagugaccgaagccgagacauauacuaacuucgucggcuacgugaccacaaccuuuaaaagaaagcacuucaggccuacuccagaugcgugccgggcugcccaugacuggaaaauggcaggggauccccgcuaugaagccucucugcaaaauccuuacccagacuaucacugguugcgaacaguuaagaccacgaaggagucgcucgugauaaucucaccgagcgucgcugaucuggaccccuacgauaaaagucugcauucccguguguuuccuucugggaagugucucggaauuacuguaagcuccaccuacugcucaacaaaccacgacuauacuaucuggaugccaguugagcccagauuaggcaccaguugugauauuuucacaaauagcaggggcaaacgggcaucuaaggguggacgcgugugcgguuuugucgacgaaagaggccuguacaaaucccuuaagggggccuguagguugaagcugugcggagugccuggcauccggcuacucgaugguaccugggugucaauacagacgagcgaggacauuaaaugguguccacccgaccgccuggucaaccuucacgauuuccauagugacgaaaucgagcaccugguuguggcugaguugauuaagcgaagagaaaauugccucgaugcccuggagucuaucaugacuacaaaauccgugagcuuuaggcgguuaucgcaucugcguaagcucguaccgggguucggaaaagcguauaccaucuuuaacaagacucuuauggaagcagacgcccacuacaaaucugucaagacauggaaugaggugauuccuuccaagggcugccuggaaguuggcgggcgcugucacccccaugugaacggagucuucuucaaugguauaaucuugggcccagaugggaacgugcuaauuccugagaugcagucaagucugcuccagcaacacauggagcugcuugaaagcuccguaaucccccugaugcauccauuggcugaccccucuaccguuuuuaaagagggagaugaagccgaggacuucguggaaguccaccucccugaugugcauaagcaggucagcgacguggaucugggcuuaccaucaugggguaaauaucugcuaauaggggcaggcgcucucgccauucugauccuugcgaucguuuugauuaucugcuguagaagggugaauaagacgcggaguacccagcgaggacaccgcgaguccggcgggaaaaugagcguagucccgcagaacggaaagauuauaucuucaugggagcuguacaagagugaaagcgagacaggucucuga

SEQ ID NO: 159644 - RNA, 1575 nt, Artificial Sequence
  derived and/or modified CDS sequence (opt3) from glycoprotein__RABV__KJ174632.1
augaucccccaggcccuguuguucgugccucuucugauuccaagccucugcuuaggcgaguuuccgauauacaccauccccgacaagcuggggccuugguccccaauugauauccaccaucuaucuugucccaacaaucucgucgcugaaaacgacggaugcacaucacugagugguuucagcuauauggagcuuaaaguuggcuacauuuccgcaaucaaggugaauggguuuacuuguacgggaguagugaccgaagccgagacauauacuaacuucgucggcuacgugaccacaaccuuuaaaagaaagcacuucaggccuacuccagaugcgugccgggcugcccaugacuggaaaauggcaggggauccccgcuaugaagccucucugcaaaauccuuacccagacuaucacugguugcgaacaguuaagaccacgaaggagucgcucgugauaaucucaccgagcgucgcugaucuggaccccuacgauaaaagucugcauucccguguguuuccuucugggaagugucucggaauuacuguaagcuccaccuacugcucaacaaaccacgacuauacuaucuggaugccaguugagcccagauuaggcaccaguugugauauuuucacaaauagcaggggcaaacgggcaucuaaggguggacgcgugugcgguuuugucgacgaaagaggccuguacaaaucccuuaagggggccuguagguugaagcugugcggagugccuggcauccggcuacucgaugguaccugggugucaauacagacgagcgaggacauuaaaugguguccacccgaccgccuggucaaccuucacgauuuccauagugacgaaaucgagcaccugguuguggcugaguugauuaagcgaagagaaaauugccucgaugcccuggagucuaucaugacuacaaaauccgugagcuuuaggcgguuaucgcaucugcguaagcucguaccgggguucggaaaagcguauaccaucuuuaacaagacucuuauggaagcagacgcccacuacaaaucugucaagacauggaaugaggugauuccuuccaagggcugccuggaaguuggcgggcgcugucacccccaugugaacggagucuucuucaaugguauaaucuugggcccagaugggaacgugcuaauuccugagaugcagucaagucugcuccagcaacacauggagcugcuugaaagcuccguaaucccccugaugcauccauuggcugaccccucuaccguuuuuaaagagggagaugaagccgaggacuucguggaaguccaccucccugaugugcauaagcaggucagcgacguggaucugggcuuaccaucaugggguaaauaucugcuaauaagugcaggggcucucgccauucugauccuugcgaucguuuugauuaucugcuguaagagagugaaaaagacgggcuccauucagaggggacaccgggagagcggcgggaagaugucuguagucccgcagaauggaaaaauaaucucaaguugggagcuguacaagagcgaauccgagaccggucucuga

SEQ ID NO: 159645 - RNA, 1575 nt, Artificial Sequence
  derived and/or modified CDS sequence (opt3) from glycoprotein__RABV__KJ174633.1
augaucccccaggcccuguuguucgugccucuucugauuccaagccucugcuuaggcgaguuuccgauauacaccauccccgacaagcuggggccuugguccccaauugauauccaccaucuaucuugucccaacaaucucgucgcugaaaacgacggaugcacaucacugagugguuucagcuauauggagcuuaaaguuggcuacauuuccgcaaucaaggugaauggguuuacuuguacgggaguagugaccgaagccgagacauauacuaacuucgucggcuacgugaccacaaccuuuaaaagaaagcacuucaggccuacuccagaugcgugccgggcugcccaugacuggaaaauggcaggggauccccgcuaugaagccucucugcaaaauccuuacccagacuaucacugguugcgaacaguuaagaccacgaaggagucgcucgugauaaucucaccgagcgucgcugaucuggaccccuacgauaaaagucugcauucccguguguuuccuucugggaagugucucggaauuacuguaagcuccaccuacugcucaacaaaccacgacuauacuaucuggaugccaguugagcccagauuaggcaccaguugugauauuuucacaaauagcaggggcaaacgggcaucuaaggguggacgcgugugcgguuuugucgacgaaagaggccuguacaaaucccuuaagggggccuguagguugaagcugugcggagugccuggcauccggcuacucgaugguaccugggugucaauacagacgagcgaggacauuaaaugguguccacccgaccgccuggucaaccuucacgauuuccauagugacgaaaucgagcaccugguuguggcugaguugauuaagcgaagagaaaauugccucgaugcccuggagucuaucaugacuacaaaauccgugagcuuuaggcgguuaucgcaucugcguaagcucguaccgggguucggaaaagcguauaccaucuuuaacaagacucuuauggaagcagacgcccacuacaaaucugucaagacauggaaugaggugauuccuuccaagggcugccuggaaguuggcgggcgcugucacccccaugugaacggagucuucuucaaugguauaaucuugggcccagaugggaacgugcuaauuccugagaugcagcccucacugcuccagcaacacauggagcugcuugaaaguagcguaaucccacugaugcaucccuuggcugacccuuccaccguuuuuaaagagggagaugaagccgaggacuucguggaaguccaccucccagaugugcauaagcaggucucugacguggaucugggcuuaccgagcugggguaaauaucugcuaauaucagcaggggcucucgccauucugauccuugcgaucguuuugaugauuugcuguagaagggugaauaagacgggcaguacccagcggggacaccgagaguccggcgggaaaaugagcguagucccccagaacggaaagaucauuucuucaugggagcuguacaagagugaaagcgagacaggucucuga

SEQ ID NO: 159646 - RNA, 1575 nt, Artificial Sequence
  derived and/or modified CDS sequence (opt3) from glycoprotein__RABV__KJ174634.1
augaucccccaggccauucuguucgugccucuccuuauaccaagccugugcuugggcgaguuuccgaucuacaccauucccgacaaguuagggccuugguccccaaucgauauucaccaucugucuugucccaacaaucuagucgcugaaaacgacggaugcacaucacucagugguuucagcuauauggagcugaaaguuggcuacaucuccgcaauaaaggugaauggguuuacuuguacgggaguagugaccgaagccgagacauauacuaacuucgucggcuacgugaccacaaccuuuaaaagaaagcacuucaggccuacuccagaugcgugccgggcugcccaugacuggaaaauggcaggggauccccgcuaugaagccucucuucaaaauccuuacccagacuaucacuggcugcgaacaguuaagaccacgaaggagucguuggugaucauuucaccgagcgucgcugaucucgaccccuacgauaaauuucugcauagucguguguucccuuccgggaagugucugggaaucacuguaucuagcaccuacugcuccacaaaccacgacuauacuauuuggaugccaguugagcccagacucggcaccucaugugauaucuuuacaaauaguaggggcaaacgggcaagcaaggguggacgcgugugcgguuucgucgacgaaagaggcuuauacaaaucucugaagggggccuguaggcuuaaguugugcggagugccuggcauacggcugcuagaugguaccuggguguccauucagacgucagaggacaucaaaugguguccacccgaccgccucgucaaccugcacgauuuucauagcgacgaaauugagcaccuuguuguggcugagcugaucaagcgaagagaaaauugcuuggaugcccucgagaguaucaugacuacaaaaucuguauccuucaggcggcugagccauuuacguaagcuggugccgggguuuggaaaagcguauaccauuuucaacaagacucucauggaagcagacgcccacuacaaaucggucaagacauggaaugaggugauaccuucuaagggcugccuugaaguuggcgggcgcugucacccccaugugaacggagucuucuuuaaugguaucauucugggcccagaugggaacguguugaucccugagaugcaguccucacuacugcagcaacacauggagcuccuggaaaguagcguaauaccccuuaugcauccacuggcugaccccuccaccguuuucaaagagggagaugaagccgaggaauuuguggagguccacuugccugacgugcauaagcaggucucugauguggaccucggccugccaagcugggguaaauauuuacugauuucagcaggggcucuagccauccucauccuggcgauuguucuuaucauuugcuguagaagggugaauaagacgggcaguacccagcggggacaccgagaguccggcgggaaaaugagcguagucccgcagaacggaaagauaaucucuucaugggaauuguacaagagugagagcgaaacaggucuguga

SEQ ID NO: 159647 - RNA, 1575 nt, Artificial Sequence
  derived and/or modified CDS sequence (opt3) from glycoprotein__RABV__KJ174635.1
augaucccccaggcccuguuguucgugccucuucugauuccaagccucugcuuaggcgaguuuccgauauacaccauccccgacaagcuggggccuugguccccaauugauauccaccaucuaucuugucccaacaaucucgucgcugaaaacgacggaugcacaucacugagugguuucagcuauauggagcuuaaaguuggcuacauuuccgcaaucaaggugaauggguuuacuuguacgggaguagugaccgaagccgagacauauacuaacuucgucggcuacgugaccacaaccuuuaaaagaaagcacuucaggccuacuccagaugcgugccgggcugcccaugacuggaaaauggcaggggauccccgcuaugaagccucucugcaaaauccuuacccagacuaucacugguugcgaacaguuaagaccacgaaggagucgcucgugauaaucucaccgagcgucgcugaucuggaccccuacgauaaaagucugcauucccguguguuuccuucugggaagugucucggaauuacuguaagcuccaccuacugcucaacaaaccacgacuauacuaucuggaugccaguugagcccagauuaggcaccaguugugauauuuucacaaauagcaggggcaaacgggcaucuaaggguggacgcgugugcgguuuugucgacgaaagaggccuguacaaaucccuuaagggggccuguagguugaagcugugcggagugccuggcauccggcuacucgaugguaccugggugucaauacagacgagcgaggacauuaaaugguguccacccgaccgccuggucaaccuucacgauuuccauagugacgaaaucgagcaccugguuguggcugaguugauuaagcgaagagaaaauugccucgaugcccuggagucuaucaugacuacaaaauccgugagcuuuaggcgguuaucgcaucugcguaagcucguaccgggguucggaaaagcguauaccaucuuuaacaagacucuuauggaagcagacgcccacuacaaaucugucaagacauggaaugaggugauuccuuccaagggcugccuggaaguuggcgggcgcugucacccccaugugaacggagucuucuucaaugguauaaucuugggcccagaugggaacgugcuaauuccugagaugcagucaagucugcuccagcaacacauggagcugcuugaaagcuccguaaucccccugaugcauccauuggcugaccccucuaccguuuuuaaagagggagaugaagccgaggacuucguggaaguccaccucccugaugugcauaagcaggucagcgacguggaucugggcuuaccaucaugggguaaauaucugcuaauaagugcaggggcucucgccauucugauccuugcgguuguguugaucauuugcuguagaaggguaaauaagacgcgguccacccagcgaggccaccgcgagagcggaggcaaaaugucugucgugccgcagaacgggaagaucauuucaaguugggagcuguacaagagcgaauccgagacaggacucuga

SEQ ID NO: 159648 - RNA, 1575 nt, Artificial Sequence
  derived and/or modified CDS sequence (opt3) from glycoprotein__RABV__KJ174636.1
augaucccccaggcccuguuguucgugccucuucugauuccaagccucugcuuaggcgaguuuccgauauacaccauccccgacaagcuggggccuugguccccaauugauauccaccaucuaucuugucccaacaaucucgucgcugaaaacgacggaugcacaucacugagugguuucagcuauauggagcuuaaaguuggcuacauuuccgcaaucaaggugaauggguuuacuuguacgggaguagugaccgaagccgagacauauacuaacuucgucggcuacgugaccacaaccuuuaaaagaaagcacuucaggccuacuccagaugcgugccgggcugcccaugacuggaaaauggcaggggauccccgcuaugaagccucucugcaaaauccuuacccagacuaucacugguugcgaacaguuaagaccauaaaggagucgcucgugaucauuucaccgagcgucgcugaucuggaccccuacgauaaaagucugcauucccguguguuuccuucugggaagugucucggaaucacgguaagcuccacuuacugcucaaccaaccacgacuauacaauuuggaugccaguugagcccagauuaggcacuagcugugauaucuucaccaauagcaggggcaaacgggcaucuaaggguggacgcgugugcgguuuugucgacgaaagaggccuguacaaaucccuuaagggggccuguagguugaagcugugcggagugccuggcauacggcuacucgaugguacaugggugucaauucagaccagcgaggacaucaaaugguguccacccgaccgccuggucaaccuucacgauuuccauagugacgaaauugagcaccugguuguggcugaguugaucaagcgaagagaaaauugccucgaugcccuggagucuaucaugacgacuaaauccguaaguuuuaggcgguuaucgcaucugcguaagcucgugccgggguucggaaaagcguauacaauuuuuaacaagacccuuauggaagcagacgcccacuacaaaucugucaagacuuggaaugaggugauaccuuccaagggcugccuggaaguuggcgggcgcugucacccccaugugaacggagucuucuucaaugguaucauuuugggcccagaugggaacgugcuaaucccugagaugcagucaagucugcuccagcaacacauggagcugcuugaaagcuccguaauaccccugaugcauccauuggcugaccccucuacaguuuuuaaagagggagaugaagccgaggacuucguggaaguccaccucccugaugugcauaagcaggucagcgacguggaucugggcuuaccaucaugggguaaauaucugcuaauuagugcaggggcucucaccauccugauccuugccauuguuuugaucagaugcuguaggcgggugaauaagacgcgauccacccagcgcggccacagagagagcggaggcaaaaugucuguagucccgcagaacgggaagauuauaucaaguugggagcuguacaagagcgaauccgagacaggacucuga

SEQ ID NO: 159649 - RNA, 1575 nt, Artificial Sequence
  derived and/or modified CDS sequence (opt3) from glycoprotein__RABV__KJ174637.1
augaucccccaggcccuguuguucaugccucuucugauuccaagccucugcuuaggcgaguuuccgauauacaccauccccgacaagcuggggccuugguccccaauugauauccaccaucuaucuugucccaacaaucucguggcugaaaacgacggaugcacaucacugagugguuucagcuauauggagcuuaaagucggcuacauuuccgcaaucaagguuaauggguuuacuuguacgggagugguaaccgaagccgagacauauacuaacuucgugggcuacgucaccacaaccuuuaaaagaaagcacuucaggccuacuccagaugcgugccgggcugcccaugacuggaaaauggcaggggauccccgcuaugaagccucucugcaaaauccuuacccagacuaucacugguugcgaacagugaagaccacgaaggagucgcucguuauaaucucaccgagcguggcugaucuggaccccuacgauaaaagucugcauucccgugucuuuccuucugggaagugucucggaauuacugugagcuccaccuacugcucaacaaaccacgacuauacuaucuggaugccaguagagcccagauuaggcaccaguugugauauuuucacaaauagcaggggcaaacgggcaucuaaggguggacgcguuugcgguuuuguggacgaaagaggccuguacaaaucccuuaagggggccuguagguugaagcugugcggagucccuggcauccggcuacucgaugguaccugggugucaauacagacgagcgaggacauuaaaugguguccacccgaccgccuggugaaccuucacgauuuccauagugacgaaaucgagcaccuggucguugcugaguugauuaagcgaagagaaaauugccucgaugcccuggagucuaucaugacuacaaaauccgugagcuuuaggcgguuaucgcaucugcguaagcucguaccgggguucggaaaagcguauaccaucuuuaacaagacucuuauggaagcagacgcccacuacaaaucugugaagacauggaaugaggucauuccuuccaagggcugccuggaagugggcgggcgcugucacccccauguuaacggaguguucuucaaugguauaaucuugggcccagaugggaacguccuaauuccugagaugcagucaagucugcuccagcaacacauggagcugcuugaaagcuccgugaucccccugaugcauccauuggcugaccccucuaccguauuuaaagagggagaugaagccgaggacuucguugaagugcaccucccugauguccauaaacaggugagcgacgucgaucugggcuuaccaucaugggguaaguaucugcuaauaagugcaggggcucucgccauucugauccuugcgaucguguugauuaucugcuguagaaggguuaauaagacgguguccacccagcggggccaccgagagagcggaggcaaaaugucuguagucccgcagaacgggaagauuauaucaaguugggagcuguacaagagcgaauccgagacaggacucuga

SEQ ID NO: 159650 - RNA, 1575 nt, Artificial Sequence
  derived and/or modified CDS sequence (opt3) from glycoprotein__RABV__KJ174638.1
augaucccccaggcccuguuguucgugccucuucugauuccaagccucugcuuaggcgaguuuccgauauacaccauccccgacaagcuggggccuugguccccaauugauauccaccaucuaucuugucccaacaaucucgucgcugaaaacgacggaugcacaucacugagugguuucagcuauauggagcuuaaaguuggcuacauuuccgcaaucaaggugaauggguuuacuuguacgggaguagugaccgaagccgagacauauacuaacuucgucggcuacgugaccacaaccuuuaaaagaaagcacuucaggccuacuccagaugcgugccgggcugcccaugacuggaaaauggcaggggauccccgcuaugaagccucuguucaaaauccuuacccagacuaucacuggcugcgaacagugaagaccacgaaggagucguuggucauaaucucaccgagcguggcugaucucgaccccuacgauaaaagucugcauucccguguauuuccuucugggaagugucugggaauuacuguuagcuccaccuacugcucaacaaaccacgacuauacuaucuggaugccaguggagcccagacucggcaccaguugugauauuuucacaaauagcaggggcaaacgggcaucuaaggguggacgcgucugcgguuuuguggacgaaagaggcuuauacaaaucccugaagggggccuguaggcuuaaguugugcggagugccuggcauccggcugcuagaugguaccugggucucaauacagacgagcgaggacauuaaaugguguccacccgaccgccucguuaaccugcacgauuuccauagugacgaaaucgagcaccuugugguagcugagcugauuaagcgaagagaaaauugcuuggaugcccucgagucuaucaugacuacaaaauccgugagcuuuaggcggcugucgcauuuacguaagcuggucccgggguucggaaaagcguauaccaucuuuaacaagacucucauggaagcagacgcccacuacaaaucugugaagacauggaaugagguuauuccuuccaagggcugccuugaagugggcgggcgcugucacccccaugucaacggaguguucuucaaugguauaauccugggcccagaugggaacguauugauuccugagaugcagucaagucuacugcagcaacacauggagcuccuggaaagcuccguuaucccccuuaugcauccacuggcugaccccucuaccguguuuaaagagggagaugaagccgaggacuucgucgaagugcacuugccugauguccauaaacaggugagcgacguugaucucggccugccaucaugggguaaguauuuacugauaagugcaggggcucuagccauucucauccuggcgaucgugcuuauuaucugcuguagaaggguaaauaagacgggcuccacccagcggggacaccgagagagcggcgggaaaaugucugucgugccgcagaacggaaagauuauaucaaguugggaguuguacaagagcgaauccgagacaggucuguga

SEQ ID NO: 159651 - RNA, 1575 nt, Artificial Sequence; identical to SEQ ID NO: 159469
  derived and/or modified CDS sequence (opt3) from glycoprotein__RABV__KJ174639.1

SEQ ID NO: 159652 - RNA, 1575 nt, Artificial Sequence
  derived and/or modified CDS sequence (opt3) from glycoprotein__RABV__KJ174640.1
augaucccccaggcccuccuguucgugccucuucugauucccagcuugugcuuaggcgaguuuccgauauacaccauccccgacaagcuggggccuugguccccaauugauauccaccaucuaucuugucccaacaaucucgucgcugaaaacgacggaugcacaucacugagugguuucagcuauauggagcuuaaaguuggcuacauuuccgcaaucaaggugaauggguuuacuuguacgggaguagugaccgaagccgagacauauacuaacuucgucggcuacgugaccacaaccuuuaaaagaaagcacuucaggccuacuccagaugcgugccgggcugcccaugacuggaaaauggcaggggauccccgcuaugaagccucucugcaaaauccuuacccagacuaucacugguugcgaacaguuaagaccacgaaggagucgcucgugauaaucucaccgagcgucgcugaucuggaccccuacgauaaaagucugcauucccguguguuuccuucugggaagugucucggaauuacuguaagcuccaccuacugcccaacaaaccacgacuauacuaucuggaugcccguugagccuagauuaggcaccucaugugauauuuucacaaauaguaggggcaaacgggcaagcaaggguggacgcgugugcgguuuugucgacgaaagaggccuguacaaaucucuuaagggggccuguagguugaagcugugcggagugccaggcauccggcuacucgaugguaccuggguguccauacagacgucagaggacauuaaauggugucccccggaccgccuggucaaccuucacgauuuccauagcgacgaaaucgagcaccugguuguggcugaguugauuaagcgaagagaaaauugccucgaugcccuggagaguaucaugacuacaaaaucuguauccuuuaggcgguuaagccaucugcguaagcucgugccuggguucggaaaagcguauaccaucuuuaacaagacucuuauggaagcagacgcccacuacaaaucggucaagacauggaaugaggugauucccucuaagggcugccuggaaguuggcgggcgcugucacccacaugugaacggagucuucuucaaugguauaaucuugggcccugaugggaacgugcuaauucccgagaugcaguccucacugcuccagcaacacauggagcugcuugaaaguagcguaaucccacugaugcaucccuuggcugacccuuccaccguuuuuaaagagggagaugaagccgaggacuucguggaaguccaccucccagaugugcauaagcaggucuuuggcguggaccuggguuuaccgucuugggggaaauaucugcuaauaagcgcaggcgcucucgccauucugauccuugcgaucguuuugauuaucugcuguagaagggugaauaagacggagucaaccccacggggacaccgagagaguggcgggaaaauguccguagucccucagaacggaaagauuauaagcucuugggaacuguacaagucagagagugaaacaggucucuga

SEQ ID NO: 159653 - RNA, 1575 nt, Artificial Sequence; identical to SEQ ID NO: 159296
  derived and/or modified CDS sequence (opt3) from glycoprotein__RABV__KJ174641.1

SEQ ID NO: 159654 - RNA, 1575 nt, Artificial Sequence
  derived and/or modified CDS sequence (opt3) from glycoprotein__RABV__KJ174642.1
auggugccccaggcccuccuguucgucccucuucugauccccagcuugugcuuaggcgaguuuccgauuuacaccauacccgacaagcuggggccuuggacaccaaucgauauucaccaucuauccugucccaacaaucucguugcugaaaacgacggaugcacuucucugucagguuucaguuauauggagcuuaaagugggcuacaucagcgcaauuaagguaaauggguuuacguguaccggaguggucacagaagccgagacuuauaccaacuucgugggcuacguuacaaccacuuuuaaaagaaagcacuucaggccuaugccagaugcgugccgggcugcccaugacuggaaaauggcaggggauccccgcuaugaagacucccugcaaaauccuuacccagauuaucacugguugcgaacagugaagaccacgaaggagucucucgucaucauaucgccgucaguggccgaccuggaucccuacgacaaaagccugcauagucguguauuuccuuccgggaagugucucggaaucacuguuucuagcaccuacugcuccacaaaccacgauuauacuauuuggaugccaguggagcccagauuaggcaccucaugugacaucuucacaaauaguaggggcaaacgggcuagcaaggguggacgcgucugcgguuuuguggaugaaagaggccuguacaaaucucuuaagggggcauguaaguugaaacugugcggagugccuggcauuaggcuacucgacgguaccugggucuccauccagacgucagaggacauaaagugguguccacccgaucggcugguuaaccuucacgacuuccauagcgaugaacuggagcacuuggugguagaggaacucauuaaacgccgagagaauugccuggacgccuuagaaaguaucaugacuacaaagucuguguccuuuagaaggcugagccaucuccggaaacuugucccgggguucggaaaggcuuauaccauuuuuaacaaaacucugauggaggccgaugcgcacuacaagucggugaagacauggaaugaaguuaucccuucuaaaggcugcuuggaggugggcgggaagugucacccaccagucaacggaguguucuucaaugguaucauucuaggcccugacgggaacguacugauacccgagaugcaguccucacuccugcagcaacauauggaacuucuggagaguagcguuaucccauugaugcacccccucgcagauccuuccaccguguuuaaagaaggagacgaggccgaagauuucgucgaggugcaucugccagacguccacaaacaggugucugauguugacuuaggccugccgagcugggguaaguaucuacucaugucagcuggggcccuggcaauucuuaucuuggcuauagugcugauuaucugcugucgucgcguaaauaagacgggcaguacccagagaggacauagggagucccggggcaagaugagcgucucuccccagaacgggaaaaucauuucaaguugggaacucuacaagcgagagagcgaaacaggacuguga

SEQ ID NO: 159655 - RNA, 1575 nt, Artificial Sequence
  derived and/or modified CDS sequence (opt3) from glycoprotein__RABV__KJ174643.1
augaucccccaggcccuccuguucgugccucuucugauucccagcuugugcuuaggcgaguuuccgauauacaccauccccgacaagcuggggccuuggacaccaauugauauccaccaucuauccugucccaacaaucucgucgcugaaaacgacggaugcacuucucugucagguuucaguuauauggagcuuaaaguuggcuacauuagcgcaaucaaggugaauggguuuacguguaccggaguagugacagaagccgagacuuauaccaacuucgucggcuacgugacaaccacuuuuaaaagaaagcacuucaggccuaugccagaugcgugccgggcugcccaugacuggaaaauggccggugauccccgcuaugaagacucccugcaaaauccuuacccagauuaucacugguugcgaacaguuaagaccacgaaggagucucucgugauaaucucgccgucagucgccgaccuggaucccuacgacaaaagccugcauagucguguguuuccuuccgggaagugucucggaauuacuguaucuagcaccuacugcuccacaaaccacgauuauacuaucuggaugccaguugagcccagauuaggcaccucaugugacauuuucacaaauaguaggggcaaacgggcuagcaaagggggacgcgugugcgguuuugucgaugaaagaggccuguacaagucucuuaagggggcauguaaguugaaacugugcggagugccuggcaucaggcuacucgacgguaccuggguguccauacagacgucagaggacauuaagugguguccacccgaucggcuggucaaccuucacgacuuccauagcgaugaacuggagcacuugguuguggaggaacucaucaaacgccgagagaauugccuggacgccuuagaaaguauuaugacuacaaagucuguauccuuuagaaggcugagccaucuccggaaacuugugccgggguucggaaaggcuuauaccaucuuuaacaaaacucugauggaggccgaugcgcacuacaagucggucaagacauggaaugaagugaucccuucuaaaggcugcuuggagguuggcgggaagugucacccaccagugaacggagucuucuucaaugguauuauacuaggcccugacgggaacgugcugauccccgagaugcaguccucacuccugcagcaacauauggaacuucuggagaguagcguaauuccauugaugcacccccucgcagauccuuccaccguuuuuaaagaaggagacgaggccgaagauuucguggagguccaucugccagacgugcacaagcaggucucugauguggacuuaggccugccgagcugggguaaauaucuacucaugucagcuggggcccuggcaauccuuauauuggcuauuguucugaucaucugcugucgucgcgugaauaagacgggcaguacccagagaggacauagggagucccggggcaagaugagcguagcaccccagaacgggaaaauuaucucuucaugggaacucuacaagcgagagagugaaacaggacuguga

SEQ ID NO: 159656 - RNA, 1575 nt, Artificial Sequence; identical to SEQ ID NO: 159655
  derived and/or modified CDS sequence (opt3) from glycoprotein__RABV__KJ174644.1

SEQ ID NO: 159657 - RNA, 1575 nt, Artificial Sequence
  derived and/or modified CDS sequence (opt3) from glycoprotein__RABV__KJ174645.1
augaucccccaggcccugcucagccuucuguuguuaauuuccucucugugccuaggcaaguucccuauauacaccaucccagacaaacucgggccguggucacccauugauauccaccaucugaguuguccuaacaaucuuguggucgaggacgaaggaugcacaagccuguccgguuuuucuuauauggaguugaagguuggcuacauuucggcuaucaaagugaacggguucacuuguacgggaguagugaccgaagcagagacauauacuaauuuugucggcuacgugaccacaaccuucaagagaaaacacuuuaggccaaugcccgaugccugccgggcggcucaugaauggaagauggccggugacccucgcuaugaggauucacuccaaaacccauaccccgacuaucacuggcugcgaacuguuaagacaaccaaagagagccugauaaucauuaguccuuccguggcagaucucgacccauacgauaagucuuuacauagccgugucuuccccgggggaaauugucugggcaucacgauuuccucaacuuacugcaguaccaaccacgacuauacaaucuggaugccggaagaggccagacuuggcacuagcugugauauauuuaccucuuccagggggaaacgggcuucaaagggagguaaaauuugcggcuucguggacgaacgcggguuguacaagagccugaagggagcauguaaacuaaagcucugcggcguaccuggucugagacuuauggaugggacauggguuaguauccagaccucugacgagacgaaaugguguccacccgaccagcuggugaauguccacgauuuucauuccgacgagauugaacacuugaucguggaggaacucgugaagaaaagggaggaaugccuggaugccuuagagagcaucaugacuacaaagucggucucuuuccggcgccugucccaucuccgaaaacuuguuccuggauuuggcaaggcuuauaccauuuucaacaagacucugauggaggccgacgcgcacuacaaaucagugagaacauggaaugaaauaaucccaaguaagggcugcuugaaaguagggggaaugugucacccccauguggguggcgucuuuuucaacgggauuauccuaggaccggauggcaccgugcugauaccugagaugcagagcucccuccugcaacagcacauggaacuucuggagucuagcguuauucccuugaugcauccacucgcagacccuucaacgguguucaaggaaggugaugaggccgaggacuuugucgaaauccaucugcccgaugugcacaaacagaucagugggguagacuuaggccugccauccuggggaaaguaucuacucauuagcgcuggcgcccuggcaacccuuaucuugacaauuuuccugauaacuugcuguaggaagguuaaucggaccgagucuauccagcgugggcacggagaaucagagcgcaaagugagugucagcccccaaaacgguagagugauuuccucuugggaacucuacaagucgggcggggagacaaaucuguga

SEQ ID NO: 159658 - RNA, 1575 nt, Artificial Sequence
  derived and/or modified CDS sequence (opt3) from glycoprotein__RABV__KJ174646.1
augaucccccaggcccuccuguucgugccucuucugauuccaaguuugugcuuaggcaaguuuccgauauacaccauccccgacaaacuggggccuugguccccaauugauauccaccaucuaucuugucccaacaaucucgucgcugaggacgaaggaugcacaucacugagugguuucagcuauauggagcuuaagguuggcuacauuuccgcaaucaaagugaacggguuuacuuguacgggaguagugaccgaagccgagacauauacuaauuucgucggcuacgugaccacaaccuuuaagagaaaacacuucaggccuaugccagaugcgugccgggcugcccaugacuggaagauggccggugauccccgcuaugaagacucucugcaaaacccuuacccagauuaucacugguugcgaacuguuaagacaaccaaagagucgcucgugauaaucucaccgagcgucgcagaccuggaucccuacgacaagagucugcauucccguguguuuccuucugggaaaugucucggaauuacgguaagcuccacuuacugcucaaccaaucacgauuauacaaucuggaugccaguugaggcuagauuaggcacuagcugugacauuuucaccaacagcaagggcaaaaaggcaucuaaagggggaaggacaugcgguuuuguggaugaacggggccuguacaagucccuuaagggggccuguaaauugaagcugugcggaguccccggccuacgccucauggacgguaccugggugucaauccagacgagcgacgauauaaaaugguguccuccagaccagcuggugaaucuucacgauuuccauagugacgagauugaacaccuggucguugaggaguugaucaagaaaagagaagggugccucgaugcucuggagucuauuaugacuacaaaguccgugagcuuuaggcgguuaucgcaucugcgcaagcucguacccggauucggcaaagccuauaccaucuuuaacaauacucuuauggaagcggacgcacacuacaagucugugcgaacauggaacgaggucaucccguccaaaggcugccugaagguugggggaagaugucacccucccgugaaugguguguucuucaacggcauuauauuggggccagauggaaauguccuaaucccugaaaugcagucaagucugcuccaacagcauauggagcugcuugagagcuccgugauuccccugaugcacccauuggccgaccccucuaccguauuuaaagauggcgacgaagcugaggauuucguugaagugcaucucccugacguccacaaacaggugagcgagaucgaccuggguuuaccaucaugggggaaguaucugcuaaugagugccggcguccucgcaacgcugauacuugcuaucuuuuugauuaccugcuguaggcgggccaaccguacagaauccacucagcgcggaagaagggagagcggcgggaaggugucuguugcgccgcaaaauggaaaggugaucucaaguugggagcuguacaaaagcgaauccgagaccggucucuga

SEQ ID NO: 159659 - RNA, 1575 nt, Artificial Sequence
  derived and/or modified CDS sequence (opt3) from glycoprotein__RABV__KJ174647.1
augaucccccaggcccuccuguucgugccucuucugauuccaaguuugugcuuaggcaaguuuccgauauacaccauccccgacaaacuggggccuugguccccaauugauauccaccaucuaucuugucccaacaaucucgucgcugaggacgaaggaugcacaucacugagugguuucagcuauauggagcuuaagguuggcuacauuuccgcaaucaaagugaacggguuuacuuguacgggaguagugaccgaagccgagacauauacuaauuucgucggcuacgugaccacaaccuuuaagagaaaacacuucaggccuaugccagaugcgugccgggcugcccaugacuggaagauggccggugauccccgcuaugaagacucucugcaaaacccuuacccagauuaucacugguugcgaacuguuaagacaaccaaagagucgcucgugauaaucucaccgagcgucgcagaccuggaucccuacgacaagagucugcauucccguguguuuccuucugggaaaugucucggaauuacgguaagcuccacuuacugcucaaccaaucacgauuauacaaucuggaugccaguugaggcuagauuaggcacuagcugugacauuuucaccaacagcaagggcaaaaaggcaucuaaagggggaaggacaugcgguuuuguggaugaacggggccuguacaagucccuuaagggggccuguaaauugaagcugugcggaguccccggccuacgccucauggacgguaccugggugucaauccagacgagcgacgauauaaaaugguguccuccagaccagcuggugaaucuucacgauuuccauagugacgagauugaacaccuggucguugaggaguugaucaagaaaagagaagggugccucgaugcucuggagucuauuaugacuacaaaguccgugagcuuuaggcgguuaucgcaucugcgcaagcucguacccggauucggcaaagccuauaccaucuuuaacaauacucuuauggaagcggacgcacacuacaagucugugcgaacauggaacgaggucaucccguccaaaggcugccugaagguugggggaagaugucacccucccgugaaugguguguucuucaacggcauuauauuggggccagauggaaauguccuaaucccugaaaugcagucaagucugcuccaacagcauauggagcugcuugagagcuccgugauuccccugaugcacccauuggccgaccccucuaccguauuuaaagauggcgacgaagcugaggauuucguugaagugcaucucccugacguccacaaacaggugagcgagaucgaccuggguuuaccaucaugggggaaguaucugcuaaugagugccggcguccucgcaacgcugauacuugcuaucuuuuugauuaccugcuguaggcggacaaaccguacugaauccacccagcgcggaagaagggagagcggcgggaaggugucuguugccccgcaaaauggaaagaucauuucaaguugggagcuguacaaaagcgaauccgagacaggucucuga

SEQ ID NO: 159660 - RNA, 1575 nt, Artificial Sequence; identical to SEQ ID NO: 159331
  derived and/or modified CDS sequence (opt3) from glycoprotein__RABV__KJ174648.1

SEQ ID NO: 159661 - RNA, 1575 nt, Artificial Sequence; identical to SEQ ID NO: 159331
  derived and/or modified CDS sequence (opt3) from glycoprotein__RABV__KJ174649.1

SEQ ID NO: 159662 - RNA, 1575 nt, Artificial Sequence
  derived and/or modified CDS sequence (opt3) from glycoprotein__RABV__KJ174650.1
augauccugcaggcccuccuuuucgugccccuguugauuagcccuuuaugccugggcaaguuuccaauauacaccaucccggacaaaauugggcccugguccccuaucgauauucaccaucuaucuuguccaaacaaucucgucguugaggacgaaggaugcacaacucugucagguuucaguuauauggagcuuaaggugggcuacaucagcgcuauaaaaguaaacggguuuacguguaccggaguggucacagaagcagagacuuauaccaauuucgugggcuacguuacaaccacuuuuaagagaaaacacuucaggcccacaccugaugccugccgggcggcuuauaacuggaagaucgccggugacccacgcuacgaagauucccugcaaaaucccuauccugacuaccauugguugcgaaccgugaagacgacuaaagagucucucauuaucauuucgccaucagucgcagaucuggacccguacgauaagagccugcacagucguguguuucccuccgggaaaugucucggaaucaccauaucuagcacauauugcuccacuaaccaugacuacaccauuuggaugccugaggaagccagauuaggcacaucaugugauaucuucgcuaauaguaagggcaaaagggcaagcaaagggggaaagaccugcgguuuuguagacgagcggggccuguauaagucucuucgcggggccuguaaguugaaacugugcggaguuccaggccuaagacucauggaugguacguggguguccauucagacuacagacgaaaccaaguggugucccccugaccagcuggucaaccuucacgauuuccacucagacgagaucgagcaucuggugguggaagaguuggucaaaaagagggaagagugccucgaugcucuggaaagcaucaugacuacaaaaaguguuucuuuucggcgcuuaucccaucugcgaaagcucgugccaggguucggaaaggccuacaccauuuuuaauaaaacgcuuauggaggcggacgcacacuauaagagcguacagaccuggaacgagauaauccccucgaaaggcugccugaaggugggcgggagaugucacccgcacgucgauggaguguucuucaaugguauuaucuugggcccugacgggaacguucuaauacccgaaaugcaaucuucccugcuccagcagcauauggagcugcuugaaucaagugugauuccacugaugcacccuuuggccgaucccagcacagucuuuaaagacggagaugaggcugaagacuucguggagguacaucucccagauguucacaaacagguguccggcgucgaccuggguuuacccgacugggggaaguaccugcuaaugucugccggcgcacucgcuacucugcuuuugaccaucuuucugaugacaugcuguaggaaggugaauaagacugagagcacccaucgggauccuggagaaucaggccguaaagucaguguggccccacgcaacgggaagguuaucuccagcugggagcucuauaaaucuggaggugaaacaagacuguga

SEQ ID NO: 159663 - RNA, 1575 nt, Artificial Sequence
  derived and/or modified CDS sequence (opt3) from glycoprotein__RABV__KJ174651.1
augauccugcaggcccuccuuuucgugccccuguugauuagcccuuuaugccugggcaaguuuccaauauacaccaucccggacaaaauugggcccugguccccuaucgauauucaccaucuaucuuguccaaacaaucucgucguugaggacgaaggaugcacaacucugucagguuucaguuauauggagcuuaaggugggcuacaucagcgcuauaaaaguaaacggguuuacguguaccggaguggucacagaagcagagacuuauaccaauuucgugggcuacguuacaaccacuuuuaagagaaaacacuucaggcccacaccugaugccugccgggcggcuuauaacuggaagaucgccggugacccacgcuacgaagauucccugcaaaaucccuauccugacuaccauugguugcgaaccgugaagacgacuaaagagucucucauuaucauuucgccaucagucgcagaucuggacccguacgauaagagccugcacagucguguguuucccuccgggaaaugucucggaaucaccauaucuagcacauauugcuccacuaaccaugacuacaccauuuggaugccugaggaagccagauuaggcacaucaugugauaucuucaccaauaguaagggcaaaagggcuagcaaagggggaaagacgugcgguuuuguagacgagcggggccuguauaagucucuucgcggggcauguaaguugaaacugugcggaguuccaggccuaagacucauggaugguacuuggguguccauucagacaaccgacgacacuaaguggugucccccugaucagcuggucaaccuucacgacuuccacucagaugaaaucgagcaucuggugguggaggaauuggucaaaaagagggaggaaugccucgacgcccuggagagcaucaugacaaccaaaaguguuucuuuucggcgcuuaucccaucugcgaaagcucgugccaggguucggaaaggcuuacacgauuuuuaauaaaacccuuauggaagccgaugcgcacuauaagagcguacagacauggaacgagauaauccccucgaaaggcugccugaaggugggcgggagaugucacccgcacgucgacggaguguucuucaaugguauuaucuugggcccugaugggaacguucuaauacccgagaugcaaucuucccugcuccagcagcauauggaacugcuugagucaagugugauuccacugaugcacccuuuggcagaccccagcacugucuuuaaagauggagacgaagccgaggauuucguggaaauccaucucccagacguacacaagcagguuuccggcguggaccuggguuuacccgauugggggaaguaccugcuaaugucugcuggcgcccucgcaacccugcuuuugacaaucuuucugaugacuugcuguaggaaagucaauaagaccgagagcacacaucgggacccuggagagucaggccguaaagugagugucgcuccacgcaacgggaaggugauuuccagcugggaacucuauaaaucuggaggugagaccagacuguga

SEQ ID NO: 159664 - RNA, 1575 nt, Artificial Sequence
  derived and/or modified CDS sequence (opt3) from glycoprotein__RABV__KJ174653.1
augaucccccaggcccuucucuucgugccucuucugauuagcuccuugugcuuuggcgaguucccaauauacaccaucccggaaaaguuagggcccuggucuccuauugacauccaccaucugucauguccaaacaaucuagucguugaggaugaaggaugcaacagucucagcgguuuuuccuauauggagcugaaagugggcuacauuucuucgaucaagguaaauggguucacauguacuggaguggucacggaagcugagaccuauacaaacuuugugggcuacguuacuaccacauucaaaagaaagcacuuuaggcccaugccugacgcaugccgggccgcguauucauggaaaauagcuggugauccacgcuacgaggaaagccuucauaaucccuauccugacuaccacuggcugcgaaccgugaagacuacaaaggagaguuuggucaucauuuccccaucuguggccgaucucgacccguacgauaaaagccugcauucccguguauucucagggggaaagugucugggcaucaccauuaguagcacguauugcucuacuaaccacgacuacaccaucuggaugcccgaagaggcaagacucggcacauccugugauauauuuacuaauucaaaagggaagagggccagcaaaggagguaagaccugcggcuucguugacgagcggggguuauauaagagucugaaaggagcuuguaagcugaaauugugcggcgugccuggucugcgccuaauggaugggacaugggucucuauucaaaccuccgacgaaacgaagugguguccacccgaucagcucgugaacauccacgacuuuagaagcgacgagauugaacaucugguggucgaggaacuuguuaaaaagagggaggagugccuggaugcauuggaaucgaucaugacuacaaaaucuguguccuuccggcgccucucacaucugcgaaaguuaguaccuggauuuggcaaggccuacaccaucuucaauaaaacucugauggaggcugacgcccacuauaagagugugagaacauggaacgaaauuauaccaagcaaaggcugccucuccgucgggggaaggugucacccccacgugaaugguguuuucuuuaacggcaucauuauggggccggauggaucugugcuuaucccugagaugcagagcucacuguugcagcaacauauggaacuacuggagaguuccgucauaccccucaugcacccacuggcgaauccuagcaccguguucaaggacggcgaugaggcagaagacuuuauugagguacaucuucccgauguucaggaacaggugucuggugucgaccugggguugccaaacuggggcaaauacgugcucaugucagccggagcucuggccaucuuaaugcugacgaucuuccuaaugaccuuuugccggcguacaaaucgcacuaagaguauucagcaaggccccggggagagcggaagaaaggucuccgugccuccacagaacgguaaaguuaucucuucgugggagagcuucaaguccggcggggaaaccggacucuga

SEQ ID NO: 159665 - RNA, 1575 nt, Artificial Sequence; identical to SEQ ID NO: 159339
  derived and/or modified CDS sequence (opt3) from glycoprotein__RABV__KJ174654.1

SEQ ID NO: 159666 - RNA, 1575 nt, Artificial Sequence; identical to SEQ ID NO: 159382
  derived and/or modified CDS sequence (opt3) from glycoprotein__RABV__KJ174655.1

SEQ ID NO: 159667 - RNA, 1575 nt, Artificial Sequence
  derived and/or modified CDS sequence (opt3) from glycoprotein__RABV__KJ174656.1
augaucccccagacccuucucuucgugccucuucugauuuugccaagcugcuuaggcaaguuuccgauauacacaauccccgacaaaauugggccuugguccccaaucgauauucaccaucugucuugucccaacaaucuagucguugaggacgaaggaugcacuucacucagugguuucagcuauauggagcugaaggugggcuacaucuccgccauaaaaguaaacggguuuacguguaccggaguggucacagaagcugagacuuauaccaauuucgugggcuacguuacaaccacuuuuaagagaaaacacuucaggccuacaccagaugcaugccgggccgcguauaacuggaagauggcuggugacccccgcuacgaagauucucuucaaaauccuuauccagacuaccauuggcugcgaaccgugaagacgacuaaagagucguugaucauuaucucaccgagcgucgccgaucucgaccccuacgauaagagucugcacucccguguguuuccuucugggaaaugucugggaauuaccguaagcuccacauauugcucaacuaaccaugacuacaccaucuggaugccagaggaagcaagacucggcacaaguugugauauauucaccaauagcaagggcaaaagggccucuaaagggggaaagacgugcgguuuuguugacgagcggggcuuauauaagucccugcgcggggcuuguaagcugaaauugugcggagugcccggccugagacuaauggaugguacuugggucucaauucagacaaccgacgaaacuaagugguguccuagcgaccagcucgugaaccugcacgauuuccacagugacgagaucgagcaucuuguggucgaggaacugguuaaaaagagggaagagugcuuggaugcacucgaaucuauuaugacaaccaaauccgugagcuuucggcgccugucgcacuuacgaaagcugguaccaggguucggaaaggccuacacgaucuuuaauaaaacccucauggaggcugacgcccauuauaagucugugcagacauggaacgagaucauucccuccaaaggcugccuuaaggucggcgggagaugucacccgcacguggauggaguuuucuucaaugguauaauccugggcccugacgggaacguguugauucccgaaaugcaaucaagucuacugcagcagcauauggagcuccuggaaagcuccgucaucccacuuaugcacccucuggcggaucccucuacuguguuuaaagacggagaugaggcagaagacuucguagagguucauuugccagaugugcacaagcaggucagcggcguggaccucggucugcccgacugggggaaguacuuacugaugucagccggcgcucuagccacccuccugcuuacaauauuuuugaugacuugcuguaggaaagucaauaagaccgagaguacacaacgggauuccggagaaagcggccguaaagugucuauugcaccucgcaacgggaagguuaucucaaguugggagcuguauaaaagcggaggugacaccagacucuga

SEQ ID NO: 159668 - RNA, 1575 nt, Artificial Sequence; identical to SEQ ID NO: 159667
  derived and/or modified CDS sequence (opt3) from glycoprotein__RABV__KJ174657.1

SEQ ID NO: 159669 - RNA, 1575 nt, Artificial Sequence
  derived and/or modified CDS sequence (opt3) from glycoprotein__RABV__KJ174658.1
augaucagccagacccuccuguucgugacacuucugauuuccucuuugugcuuuggcgaguuccccauauacacuaucccugaaaaguuagggccauggucaccgauugacauccaccaucugaguugucccaacaaucuagucguugaggaugaaggaugcaacagccucuccgguuuuucuuauauggagcugaaagugggcuacauuucgucaaucaagguaaauggguucacguguaccggaguggucacagaagccgagacuuauaccaacuuugugggcuacguuacaaccacuuucaaaagaaagcacuuuaggccuaugccagacgcuugccgggcagccuauaauuggaaaaugagcggugauccccgcuacgaggaaagucuucauaacccuuauccagacuaccacuggcugcgaacagugaagaccacgaaggaguccuuggucauaaucucucccagcguggcggaucucgacccuuacgauaaaucccugcauucacguguauucagugggggaaagugucugggcauuacuaucagcucuaccuauugcuccacaaaucacgacuacacucucuggaugccagaagaggcuagauuaggcaccucaugugauauuuuuacaaacagcaaagggaagagggccaguaaaggaggucggaccugcggcuucguugacgagcgcgggcuguauaagucucuuaagggagcauguaaauugaagcugugcggcgugccgggucuaagacucauggaugggacgugggucuccauccaaacuagcgacgaaacaaaauggugucccccugaucagcuggugaauauacacgacuuuaggucggacgagauugaacaucuuguggucgaggaacugguuaagaaacgggaggagugcuuggaugcccucgaaucuaucaugaccacuaaguccgugucauuccgccgacugagucacuuaagaaaacugguaccaggauuuggcaaggcuuacacaauuuucaacaagacccucauggaggcagacgcccauuauaaaagcgugaggacguggaaugaagucauccccuccaagggcugccuuucuguugggggacggugucacccucacguggaugguguguucuuuaacggcaucauucuggggccagacggaagcgucuugauacccgagaugcagucaagucuacugcagcaacauauggaacuccuggaguccagcgugaucccgcuuaugcacccucuggcuaaucccucuaccguauucaaagauggcgacgaggccgaagauuuuguugaggugcauuugccagacguccaggaacaggugucaggugucgaucucgggcugccuaacuggggcaaguacguguuaaugagugcgggagcacuggccauucuacuccugacaaucuuccuuaugacuugcugucgucgcgcuaauagaaccaaaagcauaaggcagggccccgaggaauccgggcggcgaguuucugugccaccccaaaacggaaagguaauuucgagcugggaguccuuuaagucagguggcgagacaggguuguga

SEQ ID NO: 159670 - RNA, 1575 nt, Artificial Sequence
  derived and/or modified CDS sequence (opt3) from glycoprotein__RABV__KJ174659.1
augaucagccagacccuccuguucgugccccuucugauuuccucuuugugcuuaggcgaguuuccuauauacacaaucccagaaaagcuggggccguggucacccauugacauccaccaucuaaguuguccuaacaaucucgucguugaggaugaaggaugcaacagccuguccgguuucucuuauauggagcuuaaagugggcuacauuucgucaaucaagguaaauggguuuacuuguacgggaguggucaccgaagccgagacauauacuaacuucgugggcuacguuaccacaaccuuuaaaagaaagcacuucaggccaaugcccgacgcuugccgggcagccuauaauuggaaaaugagcggugauccucgcuacgaggaaagucugcauaacccauaucccgacuaccacugguugcgaacugugaagacaaccaaggagucccucgucauaaucucuccuagcguggcggaucuggacccauacgauaaaucccugcauucacguguauuuagugggggaaagugucucggcauuacgaucagcucuacuuauugcuccaccaaucacgacuacacauuauggaugccggaagaggcuagacugggcacuucaugugauauuuucaccaacagcaaagggaagagggccaguaaaggagguaagacaugcggcuuuguugacgagcgggggcuuuauaagucuuugaaaggagcauguaagcugaaacuaugcggcgugcccggucuccgccugauggaugggaccugggucuccauccaaacgagcgacgaaacuaagugguguccuccagaucagcuugugaauauacacgacuuccauucggacgagauugaacaccugguggucgaggaauugguuaaaaagagagaggagugccucgaugcccuggaaucuaucaugacaaccaaauccgugucauuuaggcgguuaagucaucugcgcaagcucguacccggauucggcaaggcuuacacuauuuuuaacaaaacacuuauggaggcagacgcccacuauaagagcgugcgaaccuggaaugaagucaucccuuccaaaggcugccugucuguugggggaagaugucacccacauguggaugguguguucuucaacggcaucauuuuggggcccgacggaagcguccuaauaccggagaugcagucaagucugcuccagcaacacauggaacugcuugaguccagcgugaucccucugaugcaucccuuggcuaauccaucuacgguauuuaaggauggcgacgaggccgaagauuucguugaggugcaccucccugacguccaggaacaggugucaggugucgaucugggguuacccaacuggggcaaauacgugcugaugagugcgggagcacuagccauucuccugcuuaccaucuuuuugaugacaugcuguaggcgggcuaaucguacuaagagcauacgcagaggcccagaggaauccgggaggaagguuucugugcccccucagaacggaaaaguaauuucgagcugggaguccuucaagucagguggcgagacccggcuguga

SEQ ID NO: 159671 - RNA, 1575 nt, Artificial Sequence
  derived and/or modified CDS sequence (opt3) from glycoprotein__RABV__KJ174660.1
augaucccccaggcccuccuguucgugccucuucugauuagcuccuugugcuuaggcaaguuuccaauauacaccaucccggagaaacuggggcccuggucuccuauugacauccaccaucuaggauguccaaacaaucucgucguugaagaugaggguugcgacucacugaguggcuucagcuauauggaacuuaaggugggguacauuuccgcuaucaaaguaaacggauuuacauguacuggcguggucacggaggcagaaaccuauacaaauuucguggguuacguuacuaccacauuuaagagaaaacacuucaggcccaugccugaugccugccgggcggcuuauaacuggaagaccgccggggacccacgcuacgaggagucucugcauaaucccuauccugauuaccacugguugcgaacugugaagacaaccaaagaaucgcucauaaucauuucaccaagcgucgcagaccuggauccguacgacaagagucugcauucccguguguuucccggaggcaaaugucucggcaucacgguaucuagcacuuauugcuccaccaaccacgauuacacaauuuggaugccugaggaaacuagauuagggaccucaugugacaucuucacaaauaguaggggaaagcgggccagcaaagguggcaagaccugcggguuuguugaugagcgcggacuguauaagucucuuaaaggcgcuuguaaguugaaacugugcggugugccagggcuaagacucauggacggaacgugggucuccauacaaacucccgaugagacaaagugguguucaccugaccagcuggugaaccuucacgacuuccauagcgaugaaauugagcaccugguggucgaagaguugguuaaaaagagggaagagugccucgacgcacuggagaguaucaugaccacuaaaucuguguccuuucggcgcuuaagccaucugcgaaagcucguaccaggcuucggcaaggccuacacaauuuuuaauaaaacccuuauggaagcugaugcccacuauaagucggugagaacgugggacgagaucauccccucuaaagggugccugagggucggaggucggugucacccgcaugugaacggcguuuucuucaaugggauuauauugggaccugauggccacgugcuaauccccgaaaugcaguccucacugcuccagcaacauauggagcugcuugaaaguagcgucauuccacugaugcacccuguggcgaaccccuccaccguauuuaaggacggugaugaggcagaggacuucguugaagugcauuugccagauguccacgaacaggugucuggggucgaccucggccugcccaauuggggaaaauacauguuaaugagcgccggcgcucuggccacaaucauacuaacuauuuuucucaucgcaugcugucgucgcgugaacagaaaggagucaaggcagcaggggcugggagagaguggucggaagguuuccgugaccccucaaaauggcaaaguacuuagcucuugggaaugguauaagucagggggagagacacgauuguga

SEQ ID NO: 159672 - RNA, 1575 nt, Artificial Sequence
  derived and/or modified CDS sequence (opt3) from glycoprotein__RABV__KJ174661.1
augaucccccaggcccugcuccuucugccuuugaugauuagcuccuuaugccugggcaaguucccaauauacaccaucccggacaaacuagggcccuggucuccuauugauauccaccaucucucauguccaaacaaucugguggucgaggacgaaggaugcacaagucuuagcgguuuuuccuauauggagcugaagguuggcuacauuucugcuaucaaagugaacggguucacuuguacgggaguagugaccgaagcagagacauauacuaauuuugucggcuacgugaccacaaccuucaagagaaaacacuuuaggcccaugccugaugccugccgggcggcuuauaacuggaagguugccggugacccacgcuacgaagagucguugcaaaaucccuauccugauuaccauuggcuccgaacugugaagacaaccaaagagucacugauaaucauuagcccaagugucgcagaccuggauccguacgacaagucccuccguucuagaaucuuccccgggggaaaauguuuaggcauuacggugagcuccacuuauugcucaaccaaccacgauuacacaaucuggaugccugaagaggccaggcugggcaccaguugugacauauuuaccaauagcaaggggaaacgggcuucuaagggagguaagauuugcggcuucguagaugaacgcgggcuuuauaaauccuugaagggagcauguaaacugaagcuaugcggcguuucaggucucagacugauggacgggacauggguggccauccagaccagcgaggagacgaaaugguguccaagugaucagcuugucaaccugcaugacuuucacucugacgaaauugagcacuuggugguggaggaacucgucaagaaaagggaagagugccuggaugcuuuagaguccaucaugacuacaaagagcguuucguuccggcgccugucucaucuccgaaagcuggugcccggauuuggcaaagccuacaccaucuucaauaagacucugauggaagcggacgcacacuauaacuccguaagaacauggaaugagauuauaccuucaaaaggcugcuugaaggucgggggaaggugucauccacacguggaugguguguuuuucaacggcaucauucuagggcccgacggaaauguucugaucccggaaaugcagaguagccuccugcaacagcacauggagcuucuggaauccucugugauaccuuugaugcauccccucgccgauccaagcaccgucuucaaagagggcgacgaggcugaaaacuuuguggagguacaccuuccugauauucauaagcagguuucagguaucgacuuagggcugcccaauuggggcaaguaccuacucaugagugccggagcacuggcugcccuuaucuugacgauuuuccugauuaccugcugucggcgugugaacacaacuaaauccaucaagcagggcccagaagagagccgcagaaaagucucugugacuccccaaucagggagggucgugaguagcugggaacucuauaagaaaggaggugagacaaagcuguga

SEQ ID NO: 159673 - RNA, 1575 nt, Artificial Sequence
  derived and/or modified CDS sequence (opt3) from glycoprotein__RABV__KJ174662.1
augaucccccaggcccugcuccuucugccuuugaugauuagcuccuuaugccugggcaaguucccaauauacaccaucccggacaaacuagggcccuggucuccuauugauauccaccaucucucauguccaaacaaucugguggucgaggacgaaggaugcacaagucuuagcgguuuuuccuauauggagcugaagguuggcuacauuucugcuaucaaagugaacggguucacuuguacgggaguagugaccgaagcagagacauauacuaauuuugucggcuacgugaccacaaccuucaagagaaaacacuuuaggcccaugccugaugccugccgggcggcuuauaacuggaagguugccggugacccacgcuacgaagagucguugcaaaaucccuauccugauuaccauuggcuccgaacugugaagacaaccaaagagucacugauaaucauuagcccaagugucgcagaccuggauccguacgacaagucccuccguucuagaaucuuccccgggggaaaauguuuaggcauuacggugagcuccacuuauugcucaaccaaccacgauuacacaaucuggaugccugaagaggccaggcugggcaccaguugugacauauuuaccaauagcaaggggaaacgggcuucuaagggagguaagauuugcggcuucguagaugaacgcgggcuuuauaaauccuugaagggagcauguaaacugaagcuaugcggcguuucaggucucagacugauggacgggacauggguggccauccagaccagcgaggagacgaaaugguguccaagugaucagcuugucaaccugcaugacuuucacucugacgaaauugagcacuuggugguggaggaacucgucaagaaaagggaagagugccuggaugcuuuagaguccaucaugacuacaaagagcguuucguuccggcgccugucucaucuccgaaagcuggugcccggauuuggcaaagccuacaccaucuucaauaagacucugauggaagcggacgcacacuauaacuccguaagaacauggaaugagauuauaccuucaaaaggcugcuugaaggucgggggaaggugucauccacacguggaugguguguuuuucaacggcaucauucuagggcccgacggaaauguucugaucccggaaaugcagaguagccuccugcaacagcacauggagcuucuggaauccucugugauaccuuugaugcauccccucgccgauccaagcaccgucuucaaagagggcgacgaggcugaaaacuuuguggagguacaccuuccugauauucauaagcagguuucagguaucgacuuagggcugcccaauuggggcaaguaccuacucaugagugccggagcacuggcugcccuuauguugacgaucuuccugauuaccugcugucggcgugugaacacaacuaaauccaucaagcagggcccagaagagagccgcagaaaagucucugugacuccccaaucagggagggucgugaguagcugggaacucuauaagaaaggaggugagacacggcuguga

SEQ ID NO: 159674 - RNA, 1575 nt, Artificial Sequence
  derived and/or modified CDS sequence (opt3) from glycoprotein__RABV__KJ174663.1
augaucccccaggccauucugagcgugccucuccuuauauccucucugugcuucggcaaguuuccaaucuacaccauuccggagaaauuggggcccuggucaccuaucgacauucaccauuuaaguuguccaaacaaucuggucguugaagaugagggaugcacaacucuaagcgguuucuccuauaucgaacucaaggugggcuacauaucugcuaucaaaguaaacggguuuacguguaccggaguggucacagaggcagaaacuuauaccaauuucgugggcuacguuacaaccacuuuuaagagaaaacacuucaggcccaugccugacgccugccgggcggcuuauaacuggaagauugccggugauccacgcuacgaggagucgcugcauaaucccuauccugacuaccacuggcuucgaacagugaagaccacgaaagaaucacuggucaucauuagcccaaguguggcagauuuggacccguacgauaagucccuccauucucguguauuucccgggggaaaaugucugggcaucacuauaagcuccaccuauugcucaacaaaccacgacuacacuauuuggaugccugaggaagccagacugggcaccaguugugauaucuucacaaauagcagggggaagcgggcuucuaaaggagguagaaccugcggcuuuguugacgagcgcgggcucuauaaguccuuaaagggagcauguaaacugaaacuuugcggcgugccagguuugaggcugauggaugggacgugggucucaauucaagccagcgacgagacuaagugguguagucccgaucagcuagugaacgugcacgacuuccauucugacgaaaucgagcaccucgucguugaggagcuggugaagcggcgcgaagagugccuugaugcucuggaguccaucguaacaaccaaaagcauuucguuucgaagauugucucaucucaggaagcuggugccuggauucggcaaagccuacacuauauuuaauaagacauuaauggaagcggacgcacacuauaaguccguccggaccuggaacgagaucauuccaucaaaaggcugccugaguguugggggacguugucacccccaugugaaugguguguucuucaacggcaucauacucgggccggauggaaauguccuuauuccugaaaugcagagcucccuguugcagcaacacauggagcuacuggaaucuagcgugaucccccucaugcauccacuggccgacccuucaacgguauuuaaggauggcgacgaggcugaggauuucguugaagugcaccuucccgacguccaggaacaggugaguggugucgaucugggguugccaaacuggggcaaauacgugcucauguccgccggagcacuggcuaucuuaauucugaccaucuuucuaauuacaugcugucgcagagccaauaagacuaaaagcacccagcaaggccucgggggaucugguaggaagguuucagugaguccccagaacggcaagguaauaagcuccugggaaucuuauaaaaacgggggagagacacggcuguga

SEQ ID NO: 159675 - RNA, 1575 nt, Artificial Sequence
  derived and/or modified CDS sequence (opt3) from glycoprotein__RABV__KJ174664.1
augaucccccaggccauucugagcgugccucuccuuauauccucucugugcuucggcaaguuuccaaucuacaccauuccggagaaauuggggcccuggucaccuaucgacauucaccauuuaaguuguccaaacaaucuggucguugaagaugagggaugcacaacucuaagcgguuucuccuauaucgaacucaaggugggcuacauaucugcuaucaaaguaaacggguuuacguguaccggaguggucacagaggcagaaacuuauaccaauuucgugggcuacguuacaaccacuuuuaagagaaaacacuucaggcccaugccugacgccugccgggcggcuuauaacuggaagauugccggugauccacgcuacgaggagucgcugcauaaucccuauccugacuaccacuggcuucgaacagugaagaccacgaaagaaucacuggucaucauuagcccaaguguggcagauuuggacccguacgauaagucccuccauucucguguauuucccgggggaaaaugucugggcaucacuauaagcuccaccuauugcucaacaaaccacgacuacacuauuuggaugccugaggaagccagacugggcaccaguugugauaucuucacaaauagcagggggaagcgggcuucuaaaggagguagaaccugcggcuuuguugacgagcgcgggcucuauaaguccuuaaagggagcauguaaacugaaacuuugcggcgugccagguuugaggcugauggaugggacgugggucucaauucaagccagcgacgagacuaagugguguagucccgaucagcuagugaacgugcacgacuuccauucugacgaaaucgagcaccucgucguugaggaacuggugaagcggcgcgaagagugccuugaugcucuggaguccaucguaacaaccaaaagcgugucguuucgaagauugucucaucucaggaagcuggucccuggauucggcaaagccuacacuauuuuuaauaagacauuaauggaagcggacgcacacuauaaguccgugcggaccuggaacgagauaaucccaucaaaaggcugccugaguguugggggacguugucacccccaugugaauggugucuucuucaacggcauuauccucgggccggauggaaaugugcuuauaccugaaaugcagagcucccuguugcagcaacacauggagcuacuggaaucuagcguaauuccccucaugcauccacuggccgacccuucaacgguuuuuaaggauggcgacgaggcugaggauuucguggaaguccaccuucccgacgugcaggagcaggucagugguguggaucugggguugccaaacuggggcaaauacaugcucauguccgccggagcacuggcuaucuuaauccugaccauuuuucuaaucacaugcugucgcagagccaauaagacuaaaagcacccagcaaggccucgggggaucugguaggaagguuucagugaguccccagaacggcaagguaauuagcuccugggaaucuuauaaaaacgggggagagacacggcuguga

SEQ ID NO: 159676 - RNA, 1575 nt, Artificial Sequence
  derived and/or modified CDS sequence (opt3) from glycoprotein__RABV__KJ174665.1
augaucccccaggccauucugagcgugccucuccuuauauccucucugugcuucggcaaguuuccaaucuacaccauuccggagaaauuggggcccuggucaccuaucgacauucaccauuuaaguuguccaaacaaucuggucguugaagaugagggaugcacaacucuaagcgguuucuccuauaucgaacucaaggugggcuacauaucugcuaucaaaguaaacggguuuacguguaccggaguggucacagaggcagaaacuuauaccaauuucgugggcuacguuacaaccacuuuuaagagaaaacacuucaggcccaugccugacgccugccgggcggcuuauaacuggaagauugccggugauccacgcuacgaggagucgcugcauaaucccuauccugacuaccacuggcuucgaacagugaagaccacgaaagaaucacuggucaucauuagcccaaguguggcagauuuggacccguacgauaagucccuccauucucguguauuucccgggggaaaaugucugggcaucacuauaagcuccaccuauugcucaacaaaccacgacuacacuauuuggaugccugaggaagccagacugggcaccaguugugauaucuucacaaauagcagggggaagcgggcuucuaaaggagguagaaccugcggcuuuguugacgagcgcgggcucuauaaguccuuaaagggagcauguaaacugaaacuuugcggcgugccagguuugaggcugauggaugggacgugggucucaauucaagccagcgacgagacuaagugguguagucccgaucagcuagugaacgugcacgacuuccauucugacgaaaucgagcaccucgucguugaggagcuggugaagcggcgcgaagagugccuugaugcucuggaguccaucguaacaaccaaaagcauuucguuucgaagauugucucaucucaggaagcuggugccuggauucggcaaagccuacacuauauuuaauaagacauuaauggaagcggacgcacacuauaaguccguccggaccuggaacgagaucauuccaucaaaaggcugccugaguguugggggacguugucacccccaugugaaugguguguucuucaacggcaucauacucgggccggauggaaauguccuuauuccugaaaugcagagcucccuguugcagcaacacauggagcuacuggaaucuagcgugaucccccucaugcauccacuggccgacccuucaacgguauuuaaggauggcgacgaggcugaggauuucguugaagugcaccuucccgacguccaggaacaggugaguggugucgaucugggguugccaaacuggggcaaauacgugcucauguccgccggagcacuggcuaucuuaauucugaccaucuuucuaauuacaugcugucgcagagccaauaagauaaaaagcacuaggcagggccucgggggaucuggucggaagguuucagugaguccccaaaacggcaagguaaucagcuccugggaaucuuauaaaaacgggggagagacccgacuguga

SEQ ID NO: 159677 - RNA, 1575 nt, Artificial Sequence
  derived and/or modified CDS sequence (opt3) from glycoprotein__RABV__KJ174666.1
augaucccccaggcccuccuguucgugccucuucugauuccaaguuugugcuuaggcaaguuuccgauauacaccauccccgacaaacuggggccuugguccccaauugauauccaccaucuaucuugucccaacaaucucgucguugaggacgaaggaugcacaucacugagugguuucagcuauauggagcuuaaggugggcuacauuuccgcuaucaaaguaaacggguuuacuuguacgggaguggucaccgaagcagagacauauacuaauuucgugggcuacguuaccacaaccuuuaagagaaaacacuucaggccuaugccagaugccugccgggcggcucaugacuggaagauagccggugauccccgcuaugaagacucucugcaaaacccuuacccagauuaucacugguugcgaacugugaagacaaccaaagagucgcucgucaucauuucaccgagcguggcagagcuggaccccuacgauaagagucugcauucccguguauuuccuucugggaaaugucucggaaucacgguuagcuccacuuacugcucaaccaaucacgacuauacaauuuggaugccaguggaagccagauuaggcacuagcugugauaucuucaccaacagcaggggcaagaaggcuucuaaagggggacggacaugcgguuuugucgacgagcgcggccuguacaagucccuuaaaggggcauguaaguugaaacugugcggagugcccggccuaagacucauggaugguaccugggugucaauacagacgagcgacgacauuaagugguguccuccagaucagcuggucaaucuucacgacuuccauagugaugaaaucgagcaccugguuguggaggaauugauuaaaaagagggaggggugccucgacgcccuggaaucuaucaugacuacaaaauccgugagcuuucggcgcuuaucgcaucugcgaaagcucguacccggauucggcaaggcuuauaccaucuuuaacaauacucuuauggaggccgaugcgcacuacaaaucugucagaacauggaacgaagugauuccguccaagggcugccugaaaguugggggaaggugucacccucccgugaauggugucuucuucaacggcauaaucuuggggccagacggaaaggugcuaauuccugagaugcagucaagucugcuccaacagcauauggagcugcuugaaagcuccguaaucccccugaugcacccauuggcagaucccucuaccguuuuuaaagacggcgaugaggccgaagacuucguggagguccaucucccugaugugcacaagcaggucagcgacguggaccuggguuuaccaucaugggggaaguaucugcuaaugagugcuggcgcccucgcaacgcugauacuugcuaucuuuuugauuaccugcugucggcgugccaaucgcacagaauccacucagagaggacauagggagagcggcgggaaaaugucuguugcgccgcaaaacggaaagaucauuucaaguugggagcuguacaaaagcgaauccgagaccgguauguga

SEQ ID NO: 159678 - RNA, 1575 nt, Artificial Sequence
  derived and/or modified CDS sequence (opt3) from glycoprotein__RABV__KJ174667.1
augaucuuccaggcccugcucuuugugccccuucugauuagcuccuugugcuuaggcaaguucccuauauacaccaucccagacaaacuggggccguggucucccauugauauccaccaucuaucauguccuaacaaucucgucguugaggacgaaggaugcacaagucugagcgguuuuuccuauauggagcuuaaggugggcuacauuucugcuaucaaaguaaacggguucacuuguacgggaguggucaccgaagcagagacauauacuaauuuugugggcuacguuaccacaaccuucaagagaaaacacuuuaggccaauacccgaugccugccgggcggcuuauaacuggaagaucgccggugacccucgcuacgaagagucgcugcaaaauccauaucccgauuaccauugguugcgaacugugaagacaaccaaagagucacucauuaucauuagcccuagugucgcagaccuggauccauacgacaagucccugcacucucgucucuucccagggggaaaauguuuaggcaucacgauaagcuccacuuauugcucaaccaaccaugauuacacaauuuggaugcccgaggaaccuagacugggcaccaguugugacaucuuuacuaauagcaaggggaaaaaggccucuaagggagguaaagugugcggcuucguagaugaaagggggcuuuauaaguccuugaaaggagcuuguaagcugaaacuaugcggcguuucaggucuccggcugauggacgggacaugggugaccauucagacgagcgaugagacuaagugguguccacccgaccagcuugucaaccugcacgacuuucacagugaugagaucgaacauuuggugguggaggaacucgucaaaaagcgcgaggaaugccuggacgcauuagagucuaucaugacaaccaaguccguuagcuucagaaggcugucguaccuccggaaacuugugccuggauuuggcaaggccuauacuauuuucaauaaaacacugauggaggcugaugcccacuacaagucuguacgcaccuggaacgaaauaaucccauccaaaggcugcuugaaggugucagaccgaugucauccccacgucgaugggguguucuuuaauggaauuauccuagguccggacggcaacguucugauaccugagaugcagaguagccuccugcaacagcacauggaacuucuggaguccucugugauucccuugaugcauccacucgcggauccuagcacggucuucaaggacggggaugaagcagaggacuuuguggagguacaucugcccgauguucacaaacagaucucaggaguggacuuaggccugccaaguugggguaaguaucuacucaugaucgccgggggccuggcuacccuugucuugauuaucuuccugauggccugcuguagaaggacaaaacggacugaaccccgucgcagaggauccggcgagagcggggaaaaggugcucgcaaccccucagccgaaaaaggucgugucuucaugggagcuguacaagagggaaggagacgcucggcuuuga

SEQ ID NO: 159679 - RNA, 1575 nt, Artificial Sequence
  derived and/or modified CDS sequence (opt3) from glycoprotein__RABV__KJ174668.1
augaucuuccaggcccugcucuuugugccccuucugauuagcuccuugugcuuaggcaaguucccuauauacaccaucccagacaaaauugggccguggucucccaucgauauucaccaucugucauguccuaacaaucuagucguugaggacgaaggaugcacaagucucagcgguuuuuccuauauggagcugaaggugggcuacaucucugcuauaaaaguaaacggguucacuuguacgggaguggucaccgaagcagagacauauacuaauuuugugggcuacguuaccacaaccuucaagagaaaacacuuuaggccaauccccgaugccugccgggcggcuuauaacuggaagauugccggugacccucgcuacgaagagucgcuucaaaauccauaucccgauuaccauuggcugcgaacugugaagacaaccaaagagucauugaucauuaucagcccuagugucgcagaccucgauccauacgacaagucccugcacucucgucuguuccccgggggaaaaugucucggcauaacgauuagcuccacuuauugcucaaccaaccaugauuacacaaucuggaugccggaggaaccuagauuaggcaccaguugugacauuuuuaccaauagcaaggggaaaaaggccucuaagggagguaaagugugcggcuucguagaugaaagggggcuguauaagucccuuaaaggagcuuguaaguugaaacugugcggcguuucaggucuacggcucauggacgggacaugggugaccauccagacgagcgaugagacuaagugguguccacccgaccagcuggucaaccuucacgacuuucacagugaugagaucgaacaucuggugguggaggaauuggucaaaaagcgcgaggaaugccucgacgcacuggagucuauuaugacaaccaaguccguuagcuucagaagguuaucguaccugcggaaacucgugccuggauuuggcaaggccuauacuauauucaauaaaacacuuauggaggcugaugcccacuacaagucuguacgcaccuggaacgaaaucauuccauccaaaggcugccugaaggugucagaccgaugucauccccacgucgaugggguguucuuuaauggaaucauauuggguccggacggcaacguucuaauuccugagaugcagaguagccugcuccaacagcacauggaacugcuugaguccucugugaucccccugaugcauccauuggcggauccuagcacggucuucaaggacggggaugaagcagaggacuuuguggagguacaccuccccgauguucauaaacagaucucaggaguggaccugggcuuaccaaguugggguaaguaucugcuaaugauugccgggggccucgcuacccugguccuuaucauuuucuugauggccugcuguagaaggacaaaacggacugaaucccgucgcagaggaagcggcgagucuggggaaaaggugcuggcaacuccccagccuaaaaaggucgugucaaguugggagcucuacaagagggaaggagacgcucggcuguga

SEQ ID NO: 159680 - RNA, 1575 nt, Artificial Sequence
  derived and/or modified CDS sequence (opt3) from glycoprotein__RABV__KJ174669.1
augaucuuccaggcccugcucuuugugccccuucugauuagcuccuugugcuuaggcaaguucccuauauacaccaucccagacaaaauugggccguggucucccaucgauauucaccaucugucauguccuaacaaucuagucguugaggacgaaggaugcacaagucucagcgguuuuuccuauauggagcugaaggugggcuacaucucugcuauaaaaguaaacggguucacuuguacgggaguggucaccgaagcagagacauauacuaauuuugugggcuacguuaccacaaccuucaagagaaaacacuuuaggccaauccccgaugccugccgggcggcuuauaacuggaagauugccggugacccucgcuacgaagagucgcuucaaaauccauaucccgauuaccauuggcugcgaacugugaagacaaccaaagagucauugaucauuaucagcccuagugucgcagaccucgauccauacgacaagucccugcacucucgucuguuccccgggggaaaaugucucggcauaacgauuagcuccacuuauugcucaaccaaccaugauuacacaaucuggaugccggaggaaccuagauuaggcaccaguugugacauuuuuacuaauagcaaggggaaaaaggccucuaagggagguaaagugugcggcuucguagaugaaagggggcuguauaagucccuuaaaggagcuuguaaguugaaacugugcggcguuucaggucuacggcucauggacgggacaugggugaccauccagacgagcgaugagacuaagugguguccacccgaccagcuggucaaccuucacgacuuucacagugaugagaucgaacaucuggugguggaggaauuggucaaaaagcgcgaggaaugccucgacgcacuggagucuauuaugacaaccaaguccguuagcuucagaagguuaucguaccugcggaaacucgugccuggauuuggcaaggccuauacuauauucaauaaaacacuuauggaggcugaugcccacuacaagucuguacgcaccuggaacgaaaucauuccauccaaaggcugccugaaggugucagaccgaugucauccccacgucgaugggguguucuuuaauggaaucauauuggguccggacggcaacguucuaauuccugagaugcagaguagccugcuccaacagcacauggaacugcuugaguccucugugaucccccugaugcauccauuggcggauccuagcacggucuucaaggacggggaugaagcagaggacuuuguggagguacaccuccccgauguucauaaacagaucucaggaguggaccugggcuuaccaaguugggguaaguaucugcuaaugauugccgggggccucgcuacccugguccuuaucauuuucuugauggccugcuguagaaggacaaaacgggcagaaucccgucgcagaggaagcggcgagucuggggaaaaggugcuggcuacuccccagccuaaaaaggucgugucaaguugggagcucuacaagagggaaggagacgcccggcuguga

SEQ ID NO: 159681 - RNA, 1575 nt, Artificial Sequence; identical to SEQ ID NO: 159679
  derived and/or modified CDS sequence (opt3) from glycoprotein__RABV__KJ174670.1

SEQ ID NO: 159682 - RNA, 1575 nt, Artificial Sequence; identical to SEQ ID NO: 159468
  derived and/or modified CDS sequence (opt3) from glycoprotein__RABV__KJ174671.1

SEQ ID NO: 159683 - RNA, 1575 nt, Artificial Sequence
  derived and/or modified CDS sequence (opt3) from glycoprotein__RABV__KJ174672.1
augaucuuccaggcccugcucuuugugccccuucugauuagcuccuugugcuuaggcaaguucccuauauacaccaucccagacaaacuggggccguggucucccauugauauccaccaucuaucauguccuaacaaucucgucguugaggacgaaggaugcacaagucugagcgguuuuuccuauauggagcuuaaggugggcuacauuucugcuaucaaaguaaacggguucacuuguacgggaguggucaccgaagcagagacauauacuaauuuugugggcuacguuaccacaaccuucaagagaaaacacuuuaggccaauacccgaugccugccgggcggcuuauaacuggaagacugccggugacccucgcuacgaagagucgcugcaaaauccauaucccgauuaccauugguugcgaacagugaagaccacgaaagagucacucaucauuaucagcccuagugucgcagaccuggauccauacgacaagucccugcacucucgucucuuccccgggggaaaauguuuaggcauuacuaucagcuccaccuauugcucaacaaaccaugauuacacuauauggaugccggaggaaccuagacugggcaccaguugugacauuuuuacaaauagcaaggggaaaaaggccucuaagggagguaaagugugcggcuucguagaugaaagggggcuuuauaaguccuugaaaggagcuuguaagcugaaacuaugcggcguuucaggucuccggcugauggacgggaccugggugacgauccagacuagcgaugagacaaagugguguccacccgaccagcuugucaaccugcacgacuuucacagugaugagauugaacauuuggugguggaggaacucgucaaaaagcgcgaggaaugccuggacgcauuagagucuaucaugaccacuaaguccguuagcuucagaaggcugucguaccuccggaaacuugugccuggauuuggcaaggccuauacaaucuucaauaaaacccugauggaggcugaugcccacuacaagucuguacgcacguggaacgaaauuauaccauccaaaggcugcuugaaggugucagaccgaugucauccccacgucgaugggguguucuuuaauggaaucauucuagguccggacggcaacguucugaucccugagaugcagaguagccuccugcaacagcacauggaacuucuggaguccucugugauacccuugaugcauccacucgcggauccuagcaccgucuucaaggacggggaugaagcagaggacuuuguggagguacaucugcccgauguucacaaacagauuucaggaguggacuuaggccugccaaguugggguaaguaucuacucaugaucgccgggggccuggcuacacuugucuugaucauuuuccugauggccugcuguagaaggacuaaacggaccgaaucccgucgcagaggaagcggcgagucuggggaaaaggugcucgcaacaccccagccuaaaaaggucgugucaaguugggagcuguacaagagggaaggagacgcucggcuuuga

SEQ ID NO: 159684 - RNA, 1575 nt, Artificial Sequence; identical to SEQ ID NO: 159678
  derived and/or modified CDS sequence (opt3) from glycoprotein__RABV__KJ174673.1

SEQ ID NO: 159685 - RNA, 1575 nt, Artificial Sequence
  derived and/or modified CDS sequence (opt3) from glycoprotein__RABV__KJ174674.1
augaucuuccaggcccugcucuuugugccacuucugauuagcuccuugugcuuaggcaaguucccuauauacccaaucccggacaaacuggggcccuggucuccuauugauauccaccaucuaucauguccaaacaaucucgucggagaggacgaagguugcauuagucugagcggcuuuuccuauauggagcuuaagguuggguacaucucugcuauaaaagugaacggauucaccuguacaggcguagugacugaagcagagacguauaccaauuuugucgguuacgugacaacuaccuucaagagaaaacacuuuaggcccaucccugaugccugccgggcggcuuauaacuggaagauugccggggacccacgcuacgaagagucgcugcaaaaucccuauccugauuaccauugguugcgaacaguuaagaccacuaaagagucacucaucauuaucagcccaaguguggcagaccuggauccguacgacaagucccugcacucucgucucuuccccggaggcaaauguuuaggcauaacaauuagcuccaccuauugcucaacgaaccaugauuacacuaucuggaugccugaggaaccaagacuggggaccaguugugacauuuuuacaaauagcaaggguaaaaaggccucuaagggaggcaaagucugcggguucguggaugaaaggggacuuuauaaguccuugaaaggcgcuuguaagcugaaacuaugcgguguaucagggcuccggcugauggacggaacuuggguuaccauccagacaagcgaugagaccaaguggugucccccugaccagcuugugaaccugcacgacuuucacagugaugagaucgaacauuuggucguggaggaacucgugaaaaagcgcgaggaaugccuggacgcauuagagucuauuaugacgacuaaguccgucagcuucagaaggcugucguaccuccggaaacuuguuccaggcuuuggcaaggccuauacaauauucaauaaaacccugauggaggcugaugcccacuacaagucugugcgcacuuggaacgaaaucauucccuccaaagggugcuugaagguaucagaccgaugucauccgcacguggauggagucuucuuuaaugguaucauacuaggcccugacgggaacgugcugauucccgagaugcagaguagccuccugcaacagcacauggaacuucuggaguccucuguuaucccauugaugcauccucucgcggaucccagcacaguguucaaggacggagaugaagcagaggacuuugucgaggugcaucugccagauguacacaaacagaucucaggcguugacuuaggucugcccaguugggggaaguaucuacucaugauugccggcggacuggcuacccuuguguugaucauuuuccugauggccugcuguagaaggacgaaacggaccgaaucccgucgcagaggcagcggggagucuggagaaaagguccucgcaacaccucagcccaaaaagguggucucaaguugggagcuguacaagagggaaggugacgcucggcuuuga

SEQ ID NO: 159686 - RNA, 1575 nt, Artificial Sequence; identical to SEQ ID NO: 159360
  derived and/or modified CDS sequence (opt3) from glycoprotein__RABV__KJ174675.1

SEQ ID NO: 159687 - RNA, 1575 nt, Artificial Sequence
  derived and/or modified CDS sequence (opt3) from glycoprotein__RABV__KJ174676.1
augaucccccaggcccuccuguucgugccucuucugauuagcuccuugugcuuuggcagauucccaauauacaccaucccggacaaguuagggcccuggucuccuauugauauccaccaucugucauguccaaacaaucuagucguugaggacgaaggaugcacaagucucagcgguuuuuccuauauggagcugaaagugggcuacauuucugcuaucaagguaaacggguucacuuguacgggaguggucaccgaagcagagacauauacuaauuuugugggcuacguuaccacaaccuucaaaaggaagcacuuucggcccaugccugaugccugccgcacugcguauaacuggaaaauagcuggugacccacgauacgaagagucgcuucaaaaucccuauccugauuacaacuggcugcguacagugaagaccacgaaggagucauugaucgucauuagcccaaguguggccgaccucgauccguacgacaaaucccugcauucuagaguauuccccgggggaaagugucugggcaucacuauuagcuccaccuauugcucaacaaaucacgauuacacuaucuggaugccugaagaggcaaggcucggcaccaguugugacauauuuacaaacagccgggggaaacgcgccucuaagggagguaaaaccugcggcuucguugaugaaagaggguuauauaagucccugaagggagcuuguaaacuuaaguugugcggcgugccaggucugaggcuaauggacgggacgugggucacuauucagacaucagaugagaccaaauggugucccagcgaccagcucgugaaucugcaugacuuucacagugaugagaucgaacaccuuguggucgaggaacugguuaagaaacgggaggaaugcuuggacgcacucgagucuauuaugacuacaaaguccgugagcuuccgccgacugucgcauuuaagaaaacugguaccuggauuuggcaaggccuacaccaucuucaacaagacgcucauggaggcugaugcccacuauaaaucuaucaggaccuggaaugaagugauuccauccaagggcugccuuaaagucgggggacggugucauccccacguggacgguguuuucuuuaacggcauaauccuggggccggauggaaauguguugauuccugagaugcagucaagucuacugcaacagcacgucgaacuccuggagagcuccgugaucccccuuaugcauccacuggcggacccuucuacaguauucaaggauggcgacgaagcagaggauuuuguugaggugcacuuccccgacauacauaaacaggucagcgguguggauuuggggcucccaaacuggggcaaguaccuguuaaugucagccggagcucuggccgcacuaaugcucgcuauuuuucugaugacuugcugucgucgcgucaauagaaccgaaaguauccagaggggccccggggaguccggacggaaggugagcaucacaucucaaaacgguaaaguuauuucaaguugggaacuuuauaagagcggcggggagacuggauuguga

SEQ ID NO: 159688 - RNA, 1575 nt, Artificial Sequence
  derived and/or modified CDS sequence (opt3) from glycoprotein__RABV__KJ174677.1
augaucccccaggcccuucucuucgugccucuucugauuagcuccuugugcuuuggcggguucccaauauacaccaucccggacaaguuaggacccuggucuccuauugauauccaccaucugucauguccaaacaaucuagucguugaggacgaagguugcacaagucucagcggcuuuuccuauauggagcugaaagugggguacauuucugcuaucaagguaaacggauucacuuguacgggcguggucaccgaagcagagacauauacuaauuuuguggguuacguuaccacaaccuucaaaagaaagcacuuuaggcccaugccugauucgugccgggccgcguauaacuggaaaacugcuggggacccacgcuacgaagagucacuucaaaaucccuauccugauuaccauuggcugcgaacagugaagaccacgaaggagagcuugauaaucauuaguccauccgucgccgaccucgauccguacgacaaaucucugcacagccguguguuccccggaggcaagugucugggcaucacuguauccucaaccuauugcaguacaaaccaugauuacacuauuuggaugccugaagaggcaagacucgggaccagcugugacaucuuuacaaauucuaggggaaaacgggccuccaaggguggcagaaccugcggguucguugaugaacgcggauuauauaaaucacugaagggcgcuuguaagcugaaauugugcggugugcuggggcuaaggcucauggacggaacgugggucacuauacacacaagcaacgagaccaagugguguccaagugaucagcuggugaaucuucacgacuuucauucugacgagauugaacaccugguggucgaggaauugguuaaaaagcgggaggaaugccucgaugcacuggaguccaucaugacuacaaaaagcgugucguuccgccgauuaucucaucugagaaagcucguacccggcuuuggcaaagccuacaccauuuucaacaagacgcuuauggaggcugacgcccacuauaaguccaucaggaccuggaaugaaaucauuccuucaaaagggugccugaaggugggaggucggugucacccacaugucgauggcguguucuuuaacgggauaaucuugggacccgacggcaauguucuaauuccggagaugcagaguagccugcuccagcaacacguggaacugcuugaguccucugucaucccucugaugcaucccuuggcggauccaagcacaguguucaaagacggugaugaagcagaggacuuuguagagguucaccucccugaugugcauaagcaggucucagggguggaccugggcuuacccaacuggggaaaauaccugcuaaugagugccggcguccucgcuacucugaugcuuaccauauucuugauuacaugcugucgucgcguggauagaacugaauccauccagagggggccaggagagcugggucgggaaguuagcgugaccucucagaauggcaagguagucucaaguugggagcucuauaagagcgggggagaaacacgacuguga

SEQ ID NO: 159689 - RNA, 1575 nt, Artificial Sequence
  derived and/or modified CDS sequence (opt3) from glycoprotein__RABV__KJ174678.1
augaucccccaggcccuucucuucgugccucuucugauuagcuccuugugcuuuggcggguucccaauauacaccaucccggacaaguuaggacccuggucuccuauugauauccaccaucugucauguccaaacaaucuagucguugaggacgaagguugcacaagucucagcggcuuuuccuauauggagcugaaagugggguacauuucugcuaucaagguaaacggauucacuuguacgggcguggucaccgaagcagagacauauacuaauuuuguggguuacguuaccacaaccuucaaaagaaagcacuuuaggcccaugccugaugccugccgggcggcuuauaacuggaaaacugccggggacccacgcuacgaagagucgcuucaaaaucccuauccugauuaccauuggcugcgaacagugaagaccacgaaggagucauugauaaucauuagcccaagugucgcagaccucgauccguacgacaaaucccugcacucucguguguuccccggaggcaagugucugggcaucacuguaagcuccaccuauugcucaacaaaccaugauuacacuauuuggaugccugacgaagccagacucgggaccaguugugauaucuuuacaaauagcaggggaaaacgggcuucuaaggguggcagaaccugcggguucguugacgagcgcggauuauauaaaucccugaagggcgcauguaagcugaaauugugcggugugcuggggcuaaggcucauggauggaacgugggucacuauacagacaucaaacgaaaccaagugguguccaagcgaccagcuggugaaucuucacgacuuucacagugaugagauugagcaucugguggucgaagaguugguuaaaaagcgggaagagugccucgacgcccuggaaucuaucaugacuacaaaauccgugagcuuccgccgauuaucgcaccugagaaagcucguacccggcuuuggcaaggcuuacaccauuuucaacaagacgcuuauggaggccgaugcgcauuauaagucuaucaggaccuggaaugagaucauuccuuccaaagggugccugaaggugggaggucggugucacccacacauggacggcgucuucuuuaacgggauaaucuugggacccgauggcaaugugcuaauuccggaaaugcagucaagucugcuccaacagcauguugagcugcuugaaagcuccgugaucccucugaugcaccccuuggcagacccaucuacagucuucaaagauggugacgaggccgaagauuuuguggagguacaucucccugacguucacaaacaggugagcggggucgaucugggcuuacccaacuggggaaaauaccugcuaaugucagcuggcgcccucgcaacucugaugcuuaugauauucuugauuaccugcugucgucgcguggacagaacagagaguauccagagggggccaggagaacugggucgggaggucuccgugacuagccaaaauggcaagguuaucucuucaugggaacucuauaagagugggggagagacccgacuguga

SEQ ID NO: 159690 - RNA, 1575 nt, Artificial Sequence
  derived and/or modified CDS sequence (opt3) from glycoprotein__RABV__KJ174679.1
augaucccccaggcccuguucuuugugccucuccuuauuagcucccugugcgucggcggguucccaauauacaccaucccggacaaguugggacccuggucuccuauugauauccaccauuuaucauguccaaacaaucugguuguggaggacgaagguugcacaagucuaagcggcuuuuccuauauggagcucaaaguaggguacauuucugcuaucaaggugaacggauucacuuguacgggcgucgugaccgaagcagagacauauacuaauuuuguugguuacgugaccacaaccuucaaaagaaagcacuuuaggcccaugccugauucgugccgggccgcguauaacuggaaaacugcuggggacccacgcuacgaagagucacugcaaaaucccuauccugauuaccauuggcuucgaacagucaagaccacgaaggagagccugauaaucauuaguccauccguggccgacuuggauccguacgacaaaucucuccacagccguguauuccccggaggcaagugucugggcaucacuguuuccucaaccuauugcaguacaaaccaugauuacacuauuuggaugccugaagaggcaagacuggggaccagcugugacaucuuuacaaauucuaggggaaaacgggccuccaaggguggcagaaccugcggguucguggaugaacgcggacucuauaaaucauuaaagggcgcuuguaagcugaaacuuugcggugucuuggggcugaggcuaauggacggaacgugggugacuauacacacaagcaacgagaccaagugguguccaagugaucagcucgugaaucugcacgacuuucauucugacgagauugaacaccuugucguugaggaacuggugaaaaagcgggaggaaugcuuggaugcacucgaguccaucaugacuacaaaaagcguaucguuccgccgacugucucauuuaagaaagcuggugcccggcuuuggcaaagccuacaccauuuucaacaagacgcucauggaggcugacgcccacuauaaguccaucaggaccuggaaugaaaucauuccuucaaaagggugccuuaaggucggaggucggugucacccacauguggauggcguuuucuuuaacgggauaauccugggacccgacggcaauguguugauuccggagaugcagaguagccuacugcagcaacacgucgaacuccuggaguccucugugaucccucuuaugcauccccuggcggauccaagcacaguauucaaagacggugaugaagcagaggacuuuguugaggugcacuugccugauguccauaaacaggugucaggggucgaccucggccugcccaacuggggaaaguacuuacugaugagugccggcgugcuagcuacucucaugcugaccauauuccuuauuacaugcugucgucgcguugauagaacugaauccauccagagggggccaggagaguugggucgggaagugagcguaaccucucagaauggcaaggucaucucaaguugggagcuguauaagagcgggggagaaacacgacucuga

SEQ ID NO: 159691 - RNA, 1575 nt, Artificial Sequence
  derived and/or modified CDS sequence (opt3) from glycoprotein__RABV__KJ174680.1
augaucccccaggcccuccuguucgugccucuucugauuagcuccuugugcuuuggcggguucccaauauacaccaucccggacaaguuaggacccuggucuccuauugauauccaccaucugucauguccaaacaaucuagucguugaggacgaagguugcacaagucucagcggcuuuuccuauauggagcugaaagugggguacauuucugcuaucaagguaaacggauucacuuguacgggcguggucaccgaagcagagacauauacuaauuuuguggguuacguuaccacaaccuucaaaagaaagcacuuuaggcccaugccugaugccugccgggcggcuuauaacuggaaaacugccggggacccacgcuacgaagagucgcuucaaaaucccuauccugauuaccauuggcugcgaacagugaagaccacgaaggagucauugauaaucauuagcccaagugucgcagaccucgauccguacgacaaaucccugcacucucguguguuccccggaggcaagugucugggcaucacuguaagcuccaccuauugcucaacaaaccaugauuacacuauuuggaugccugaagaggccagacucgggaccaguugugacaucuuuacaaauagcaggggaaaacgggcuucuaaggguggcagaaccugcggguucguugaugaacgcggauuauauaaaucccugaagggcgcauguaaacuuaaauugugcggugugcuggggcuaaggcucauggacggaacgugggucacuauacagacaucaaacgagaccaagugguguccaagcgaucagcuggugaaucuucacgacuuucacagugacgagauugaacaucugguggucgaggaauugguuaaaaagcgggaggaaugccucgaugcccuggagucuaucaugacuacaaaauccgugagcuuccgccgauuaucgcaccugagaaagcucguacccggcuuuggcaaggcuuacaccauuuucaacaagacgcuuauggaggccgacgcgcauuauaagucuaucaggaccuggaaugaaaucauuccuuccaaagggugccugaaggugggaggucggugucacccacacgucgauggcguguucuuuaacgggauaaucuugggacccgacggcaauguucuaauuccggagaugcagucaagucugcuccaacagcauguggaacugcuugagagcuccgucaucccucugaugcaccccuuggcagauccaucuacaguguucaaagacggugaugaagccgaggacuuuguagagguucaucucccugaugugcacaagcaggucagcgggguggaccugggcuuacccaacuggggaaaauaccugcuaaugucagcuggcgcccucgcaacucugaugcuuaugauauucuugauuaccugcugucgucgcgucgauagaacagaaaguauccagagggggccaggagagcugggucgggaaguguccguuacuagccaaaauggcaaggugaucucuucaugggagcucuauaagagugggggagaaacccgacuguga

SEQ ID NO: 159692 - RNA, 1575 nt, Artificial Sequence
  derived and/or modified CDS sequence (opt3) from glycoprotein__RABV__KJ174681.1
augaucccccaggcccuucucuucgugccucuucugauuagcuccuugugcuuuggcggguucccaauauacaccaucccggacaaguuaggacccuggucuccuauugauauccaccaucugucauguccaaacaaucuagucguugaggacgaagguugcacaagucucagcggcuuuuccuauauggagcugaaagugggguacauuucugcuaucaagguaaacggauucacuuguacgggcguggucaccgaagcagagacauauacuaauuuuguggguuacguuaccacaaccuucaaaagaaagcacuuuaggcccaugccugauucgugccgggccgcguauaacuggaaaacugcuggggacccacgcuacgaagagucacuucaaaaucccuauccugauuaccauuggcugcgaacagugaagaccacgaaggagagcuugauaaucauuaguccauccgucgccgaccucgauccguacgacaaaucucugcacagccguguguuccccggaggcaagugucugggcaucacuguauccucaaccuauugcaguacaaaccaugauuacacuauuuggaugccugaagaggcaagacucgggaccagcugugacaucuuuacaaauucuaggggaaaacgggccuccaaggguggcagaaccugcggguucguugaugaacgcggauuauauaaaucacugaagggcgcuuguaagcugaaauugugcggugugcuggggcuaaggcucauggacggaacgugggucacuauacacacaagcaacgagaccaagugguguccaagugaucagcuggugaaucuucacgacuuucauucugacgagauugaacaccugguggucgaggaauugguuaaaaagcgggaggaaugccucgaugcacuggaguccaucaugacuacaaaaagcgugucguuccgccgauuaucucaucugagaaagcucguacccggcuuuggcaaagccuacaccauuuucaacaagacgcuuauggaggcugacgcccacuauaaguccaucaggaccuggaaugaaaucauuccuucaaaagggugccugaaggugggaggucggugucacccacaugucgauggcguguucuuuaacgggauaaucuugggacccgacggcaauguucuaauuccggagaugcagaguagccugcuccagcaacacguggaacugcuugaguccucugucaucccucugaugcaucccuuggcggauccaagcacaguguucaaagacggugaugaagcagaggacuuuguagagguucaccucccugaugugcauaagcaggucucagggguggaccugggcuuacccaacuggggaaaauaccugcuagucagugccggcgugcucgcuacucugaugcuuaccauauucuugauuacaugcugucgucgcguugauagaacugaauccauccagagggggccaggagagcugggucggaaggugagcguaaccucucagaauggcaaggucaucucaaguugggaacucuauaaaagcgggggagagacacgacuguga

SEQ ID NO: 159693 - RNA, 1575 nt, Artificial Sequence
  derived and/or modified CDS sequence (opt3) from glycoprotein__RABV__KJ174682.1
augaucgcccaggcucuccuguucgugccccuucugauuagcccuuugugcuuuggcaaguucccaauauacaccaucccggacaaauuagggcccugguccccuauugauauccaccaucugucuuguccaaacaaucuagucguugaggacgaagagugcacaucacucaguggauuuagcuauauggaacugaagguggguuacauuuccgcaaucaaaguaaacggcuucacuuguacggggguggucaccgaggccgaaacauauacuaauuuugugggauacguuaccacaaccuucaagagaaaacacuuuaggcccacuccugaugcgugccgggcugccuauaacuggaagauggcaggcgacccacgcuacgaggagucucuucauaaucccuauccugauuaccacuggcugcgaacagugaagaccacgaaagaaucguugauaaucauuucaccaagcgucgccgaccucgauccguacgacaagagucugcauucccguguguuccccggugggaaaugucugggaaucacuauuucuagcaccuauugcuccacaaaccacgauuacacuaucuggaugccugaggaagcuagacucggcaccucaugugacauauuugcaaauaguaggggcaagcgggccagcaaagggggacgcacaugcgguuucguagaugagagaggcuuauauaagucucugaagggggcuuguaaacuuaaguugugcggaguuccaggccugaggcuaauggacgguaccugggugacgauucaaacuuccaacgagacaaaauggugucccccugaucggcucgucaaucugcacgacuuucauucagacgaaaucgagcaccuugugguggaggaacuggucaagaaacgcgaagagugcuuggaugcccucgagagcauuaugaccacuaagaguguuucuuuccgaagacuguccuacuuaaggaaacuggugccaggguuuggaaaggcguauacaaucuucaacaagacccucauggaagcagacgcccauuacaaaagcguacggacguggaaugagaucauucccucgaagggcugccuuaaagugggcgggcguugucacccgcacgucgauggaguguucuuuaacgguauaauccugggcccugacgggaauguuuugauucccgaaaugcagucuucccuacugcagcagcauauggagcuccuggaaucaagugugaucccacuuaugcacccucuggcugaucccagcaccgucuucaaggacggagaugaggccgaggacuuuguggaaguacauuugccagauauacacaaacaaguuuccggcguggaccucggucugcccgauugggggaaguauuuacugaugucugcaggcgcucuagccacacucaugcugacuauuuuccuuaugaccugcugucgcagagcgaacaggacagagagcauccagcggggaccuggcgaaucagggcgaaaggucagugugacuccacagaauggaaaagucaucuccagcugggaguuguacaagucugguggcgaaaccaaacuguga

SEQ ID NO: 159694 - RNA, 1575 nt, Artificial Sequence
  derived and/or modified CDS sequence (opt3) from glycoprotein__RABV__KJ174683.1
augaucgcccaggcucuguuguucgugccccuucugauuagcccuuugugcuuaggcaaguuuccaauauacaccaucccggacaaacuggggcccugguccccuauugauauccaccaucuaucuuguccaaacaaucucgucguugaggacgaagagugcacaucacugaguggauucagcuauauggaacuuaagguggguuacauuuccgcaaucaaaguaaacggcuuuacuuguacggggguggucaccgaggccgaaacauauacuaauuucgugggauacguuaccacaaccuuuaagagaaaacacuucaggcccacuccugaugcgugccgggcugccuauaacuggaagauggcaggcgacccacgcuacgaggagucucugcauaaucccuauccugauuaccacugguugcgaacagugaagaccacgaaagaaucgcucauaaucauuucaccaagcgucgccgaccuggauccguacgacaagagucugcauucccguguguuucccggugggaaaugucucggaaucacuauuucuagcaccuauugcuccacaaaccacgauuacacuaucuggaugccugaggaagcuagauuaggcaccucaugugacauauucgcaaauaguaggggcaagcgggccagcaaagggggacgcacaugcgguuuuguagaugagagaggccuguauaagucucuuaagggggcuuguaaauugaagcugugcggaguuccaggccuaaggcucauggacgguaccugggugacgauucaaacuuccaacgagacaaaauggugucccccugaucggcuggucaaucuucacgacuuccauucagacgaaaucgagcaccuggugguggaagaguuggucaagaaacgcgaagagugccucgaugcccuggagagcauuaugaccacuaagaguguuucuuuucgaagauuauccuaccugaggaaacucgugccaggguucggaaaggcguauacaaucuuuaacaagacccuuauggaagcagacgcccauuacaaaagcguacggacguggaaugagaucauucccucgaagggcugccugaaagugggcgggcguugucacccgcacgucgauggaguguucuucaacgguauaaucuugggcccugacgggaauguucuaauucccgaaaugcagucuucccugcuccagcagcauauggagcugcuugaaucaagugugaucccacugaugcacccuuuggcugaucccagcaccgucuuuaaggacggagaugaggccgaggacuucguggaaguacaucucccagauauacacaaacaaguuuccggcguggaccuggguuuacccgauugggggaaguaucugcuaaugucugcaggcgcucucgccacacugaugcuuacuauuuuucucaugaccugcugucgcagagcgaacaggacagagagcauccagcggggaccuggcgaaucagggcgaaaggucagugugacuccacagaauggaaaagucaucuccagcugggagcuguacaagucugguggcgaaaccaaacucuga

SEQ ID NO: 159695 - RNA, 1575 nt, Artificial Sequence
  derived and/or modified CDS sequence (opt3) from glycoprotein__RABV__KJ466147.1
augaucccccaggcccuucucuucgugccucuucuggucuuuccauugugcuucggcaaguuuccgauuuacaccauacccgacaaauuagggccuuggagcccaaucgauauucaccaucuguccugucccaacaaucuaguuguggaggacgaaggaugcacaaaccucucugguuucucauauauggagcugaagguaggcuacaucagugcuauuaaagugaauggguuuacuuguacgggagucgugaccgaagcagagacauauacuaacuucguuggcuacgugaccacaaccuuuaagagaaaacacuucaggccuacuccagaugccugccggagcgcguauaauuggaagauggcuggugacccccgcuacgaagagucccuucauaacccuuauccagauuaccacuggcugcgaacagucaagaccacgaaagagucugugguaaucauaucgccgucaguugccgacuuggaucccuacgacgaaagccuccauagucguguguuuccuagagggaaguguuccggaaucacugucucuagcgcauauugcuccaccaaucacgauuacacaauuuggaugccagagaaccccaggcugggcacuucaugugacaucuucaccaauagucggggcaaacgcgccagcaaggggucuaaaacaugcggauuuguggaugaaagaggucuguauaagucccucaagggcgcuuguaaauuaaagcugugcggggugcuuggauugaggcugauggacggcaccugggucgcaauucaaacgucaaacgagacuaaaugguguccuccagaucagcuaguuaaucuccacgacuuccauagcgacgagaucgaacaccuggugguagaggaacuugugaagaaacgggaggaaugccuggaugccuuggagaguauaaugacaaccaagucugucuccuuucgccgacucagccaucugagaaaauuagugcccgguuucgggaaggcuuacacuauuuucaacaagacacugauggaggccgacgcgcacuauaaaucgguucagaccuggaaugaaaucauuccgucuaagggaugccucagggugggcggccggugucacccucaugucaacgggguguuuuucaauggaaucauccuuggucccgauggccacguacugauuccagagaugcaguccucauugcuacaacagcauauggaacugcucaaaaguagcguuauaccucugaugcacccccuugcagacccauccacgguguuuaaggauggggacgaggucgaagauuucguggagguccaucugcaggacgugcacaaacagguuucuggaguggauuugggccuccccaacugggguaaggacguacugaugggggccggcgucuuaaccgcucugaugcuaaugaucuuucucaugacaugcugucgucgcacuaacagagccgagagcauucaacacucacugggagaaaccggcaggaaggugaguguuacaccucaguccgggcgggugaucagcucuugggagucauacaaaaguggaggugaaacuaagcuguga

SEQ ID NO: 159696 - RNA, 1575 nt, Artificial Sequence
  derived and/or modified CDS sequence (opt3) from glycoprotein__RABV__KJ476819.1
auggugccccaggcccugcuccuugucccucuguugguuuucagcaugugcuuuggcaaguucccaaucuacaccauuccggacaaauuagggcccugguccccuauagauauccaccaucugucuuguccaaacaaucuagugguagaggacgaaggaugcacaaaccucucagguuuuaguuauauggagcugaaggugggccacauuagcgcuaucaaagucaauggguucacuuguacgggagugguuaccgaagcagagacauacacuaacuuugugggcuaugucaccacaaccuucaagagaaaacauuuuaggcccacuccugaugccugccgggcggcuuacaauuggaagauggccggugacccacgcuaugaagagucccuucacaaccccuacccugauuaucauuggcugcgaacagugaagaccacgaaagagucuuugguaauuaucucgccaucaguugcagaccucgauccguacgacaagagccugcacagucguguguuccccaaugggaaauguuccggaauaacuaucucuagcaccuacugcccuacaaaccacgauuauacuauuuggcugccagaaaaucccagacucggcaccuccugugacaucuuuacaaacucaaggggcaagcgggccaguaaagggagcaagaccugcggauucgucgaugagcgcgguuuauacaagucucugaaaggcgcuuguaaacuuaaauugugcggggugcugggacuaagacucauggacggcacguggguggcaaugcaagccuccgaugaaacuaagugguguccuccagaccagcuggucaaucuucaugacuuuaggucagaugagauugagcaccugguuguggaagaguugguaaagaagcgggaagagugccucgacgcucuggaaagcaucaugacaaccaaaagugugucuuuccgccgauuaucccaucugagaaagcucguccccgguuuugggaaggccuauacuauauucaacaaaacacuuauggaggcggaugcacacuacaagagcgugaggaccuggaaugagauuaucccgucgaaaggaugccugcggguuggcggccguugucacccucaugugaacggggucuucuuuaauggaauuaucuugggucccgacggccacgugcuaaucccagaaaugcagucuucccugcuccagcaacauauggagcugcuugaaucaaguguaauuccucugaugcaccccuuggccgauccaagcacgguuuucaaggacggggaugaggcugaaaacuuuguggagguccaucuccccgacgugcacaaacagauauccggagucgaucugggcuuaccuaacugggguaaguaugugcugguuucugccggggugcuaaucgcacucaugcugauuaucuuccuuaugaccugcuguggccgcguaaauagaccaaagagcacacagcacaacuugggaggcacugggagggaggucucagugaccccgcagaguggaaaaguuauauccagcugggaaucuuacaagucagguggcgagacacggcuguga

SEQ ID NO: 159697 - RNA, 1575 nt, Artificial Sequence
  derived and/or modified CDS sequence (opt3) from glycoprotein__RABV__KJ476820.1
auggugccccaggcccuccuguucgucccucuucugguuuuuagcaugugcuucggcaaguuuccaaucuacaccauuccggacaaauuggggcccugguccccuauagauauccaccauuuaucuuguccaaacaaucuggugguagaggacgaaggaugcacaaaccuaucagguuucaguuauauggagcucaaggugggcuacauuagcgcuaucaaagucaauggguuuacuuguacgggagugguuaccgaagcagagacauauacuaacuucgugggcuacgucaccacaaccuuuaagagaaaacacuucaggcccacuccugaugccugccggacagcguauaauuggaagauggcuggugacccacgcuacgaagagucccugcauaaccccuauccugauuaccacuggcuucgaaccgugaagacgacuaaagagucucugguaauuaucucgccaucaguugccgacuuggauccguacgacaagagccuccauagucguguguuucccaaugggaaauguuccggaauaaccaucucuagcacauauugcccuacuaaccacgauuacaccauuuggcugccagaaaaucccagacugggcacauccugugacaucuucaccaacucaaggggcaagcgggcaaguaaagggagcaagacgugcggauuugucgaugagcgcggucucuauaagucuuuaaaaggcgccuguaagcugaaacuuugcgggguguugggacugagacuaauggacggcacuuggguggcuaugcaagcauccgaugaaacaaagugguguccuccagaccagcucgucaaucugcacgacuucaggucagaugagauugagcaucuuguuguggaggaacuggugaaaaagcgggaagagugcuuggacgcccucgaaagcaucaugaccacuaaaaguguaucuuuucgccgacugucccacuuaagaaagcugguccccgguuucgggaaggcuuacacaauauucaacaaaacccucauggaggccgaugcgcauuauaagagcgugaggacguggaaugagauuaucccgucgaaaggaugccuucggguuggcggccguugucacccucacgugaacggggucuuuuucaauggaauuauccugggucccgacggccauguguugaucccagaaaugcagucuucccuacugcagcaacacauggagcuccuggaaucaaguguaauuccucuuaugcauccccuggcagauccaagcaccguuuuuaaggacggggaugaggccgaaaacuucguggagguccacuugcccgacgugcauaaacagauauccggagucgaucucggccugccuaacugggguaaguacguguuaguuucugcuggggugcugaucgcccuaaugcucauuaucuuucugaugacaugcuguggccgcguaaauagaccaaagagcacucagcacaaccuuggaggcaccgggagggaggucucagugacaccgcagaguggaaaaguuauauccagcugggaaucuuauaagucagguggcgagacucgguuguga

SEQ ID NO: 159698 - RNA, 1575 nt, Artificial Sequence
  derived and/or modified CDS sequence (opt3) from glycoprotein__RABV__KJ564280.1
auggugccccaggcccugcuguucgucccucuucugguuuuuagcuccugcuucggcaaguuuccaaucuacaccauuccggacaaauuggggcccuggucuccuauagauauccaccauuuaucauguccaaacaaucuggugguagaggacgaaggaugcacaaaccuaagugguuucagcuauauggagcucaaggugggcuacauuuccgcuaucaaagucaauggguuuacuuguacgggagugguuaccgaagcagagacauauacuaacuucgugggcuacgucaccacaaccuuuaagagaaaacacuucaggcccaugccugaugccugccgggcggcuuauaauuggaagauggccggugacccacgcuacgaagagucucugcauaaccccuauccugauuaccacuggcuucgaacugugaagacaaccaaagagucgcugguaauuaucucaccaagcguugcagacuuggauccguacgacaagagucuccauucccguguguuucccgggggaaaauguucuggcauaacggucagcuccacuugcuguucaaccaaucacgauuauacaaucuggaugccugaaaacccaagacugggcaccaguugcgacauuuucacuaauagcagggggaagcgggccucuaaaggagguaagacauguggcuuuguggaugagcgcgggcuguacaagucccucaaaggagcuugcaaguuaaaacuguguggcgugcuugguuugagacugauggacgggaccugggucgcaauccaaacgucagaugaaauuaaguggugcagccccgaccagcuaguuaaccuccacgacuuccauagugaugagaucgagcaccuggugguagaggaacuugugaaaaagagggaagagugccuggacgccuuggaaacuauaaugacaaccaaaucugucuccuuucggcgccucagccaucugcgaaaguuagugccuggauucggcaaggcuuauacuauuuucaauaaaacacugauggaggccgaugcgcacuacaagucgaucagaaccuggaacgagacgauuccaucuaaaggcugucucaggguugggggacggugccacccccaugugaauggugucuuuuucaacggcaucauccuugggccggacggacacgugcugauuccugaaaugcaguccucauugcuacaucagcacauggagcugcucgaaaguagcguaauaccccugaugcauccacuugcagauccuuccaccguuuuuaaggacggcgaugaggccgaagacuucguggagguccaccuccccgaugugcacaaacaaaucucuggugucgacuuggggcucccaaauuggggcaaguaugugcugauuagcgcuggagccuuaacagcacugaugcuaacuaucuuucucaugaccuguugccguaagacaaaccgcgcuggcucaauacagcauagucccggggagacuggaagaaaaguuuccgugaccagccacaacgguaggguaauuucuucaugggaaaguuacaagagcggcggggagacaggacuguga

SEQ ID NO: 159699 - RNA, 1575 nt, Artificial Sequence
  derived and/or modified CDS sequence (opt3) from glycoprotein__RABV__KM016899.1
auggugccccuggucccucucuucguuccacuucugguguuuccguugugcagcggcaaguuccccaucuacaccauuccugacaaauuagggccauggucccccauagauauccaccaucugucuuguccuaacaaucuaguaguggaggacgaaggaugcgccaaccucucagguuuuaguuauauggagcugaaggucggcuacauuagcgcuaucaaagugaauggguucacauguacuggaguugugacggaagcagagaccuauacaaacuuugucggcuacgugacuaccacauucagaaggaagcacuuucggccaacccccgaugccugccgcgcggcuuauaauuggaaaauggccggugacccucgauacgaagagucccuucauaacccauauccggauuaccacuggcugcguacuguaaagacaaccaaggagucuuugguuauuaucucgcccucaguggcagaccucgauccuuacgacaaaagccugcauaguagagucuucccauccgggaaguguucuggaauaacggugagcuccacuuauugcucaaccaaucacgauuacacaaucuggaugcccgaaaaccugaggcucggcaccaguugugacauuuuuacuaauagccggggcaaacgcgccucuaagggguccaaaacaugcggauucguggaugagagagguuuauauaagucacugaagggcgcuuguaaacuuaaguugugcgggguccugggacuaaggcucauggacggcaccuggguugcaaugcagacgagcggugaaacuaaaugguguccuccagaucaacuggugaaccuucacgacuuucggagugacgagaucgagcaucugguaguggaagaguuggucaagaaacgcgaagagugccucgaugcccuggaaucuauuaugacaaccaaguccgugagcuuccgaagauuaucgcaccugaggaaacucguucccggguuuggaaaggcuuacacuaucuucaauaagacacuuauggaggccgacgcgcauuauaaaucugugcggaccuggaacgagauaauuccguccaagggcugccugcgugucggcgggcgcugucacccucacgugaauggaguauucuuuaacgguaucauuuugggccccgaugggcauguucuaaucccagaaaugcagucaagucugcuccagcagcacauggagcugcuugaaagcuccgugaucccucugaugcaucccuuggcagacccaucuacggucuucaaagauggagacgaggccgaagauuuuguggagguccaccuccccgacgugcauaagcaaguuagcggcguggaucuggguuuaccuaauugggggaaauacauucugcuaucagcuggcgcccucauagcacugaugcuuaugaucuucuugaugaccugcuguagaaaguuuaacaggccagagaguacacagcggucccugggaggcacugggcgaaagguaagcauuaccucucagggagguaaagucaucucaaguugggaaagcuauaaguccggcggggagacacgccucuga

SEQ ID NO: 159700 - RNA, 1575 nt, Artificial Sequence; identical to SEQ ID NO: 159004
  derived and/or modified CDS sequence (opt3) from glycoprotein__RABV__KM093868.1

SEQ ID NO: 159701 - RNA, 1575 nt, Artificial Sequence
  derived and/or modified CDS sequence (opt3) from glycoprotein__RABV__KM278992.1
auggugccccagguccuccuguucguuccucuucugguguuuagcaugugcuucggcaaguuuccaaucuacaccauuccggacaaauuggggcccugguccccuauagauauccaccauuuaucuuguccaaacaaucugguaguggaggacgaaggaugcacaaaccuaucagguuucaguuauauggagcucaaggucggcuacauuagcgccaucaaagugaauggguuuacuuguacgggaguugugaccgaagcugagacauauacuaacuucgucggcuacgugaccacaaccuuuaagagaaaacacuucaggcccacuccugaugcaugccgggccgcguauaauuggaagauggcuggugacccacgcuacgaagagucccugcauaaccccuauccugauuaccacuggcuucgaacaguaaagaccacgaaagagucucugguuauuaucucgccaucagugacugacuuggauccguacgacaagagccuccauagucgugucuuucccuccgggaaaugucugggaauaaccaucucuagcacauauugcuccacuaaucacgauuacaccauuuggaugccugaaaacccaagacugggcacaucaugugacaucuucaccaauaguaggggcaagcgggccagcaaagggggaaagacgugcgguuuuguggaugagcgcggccucuauaagucuuuaaaaggggcauguaagcugaaacuuugcggaguguugggccugagacuaauggacgguacuugggucgccaugcaggcuuccgaugaaacaaaguggugucccccugaccagcucguuaaccugcacgacuucaggucagaugagauugagcaucuugugguagaggaacuggugaaaaagcgggaagagugcuuggacgcacucgaaagcaucaugaccacuaaaagugucucuuuucgccgacugucccacuuaagaaagcuggugccaggguucggaaaggccuacacaauauucaauaaaacccucauggaggcugaugcccauuauaagagcguuaggacguggaacgagauuauccccucgaaaggcugccuucgggugggcgggcguugucacccgcacgucaagggaguguuuuucaaugguauuauccugggcccugacgggcauguauugauccccgaaaugcagucuucccuacugcagcaacacauggagcuccuggaaucaaguguuauuccacuuaugcauccucuggcggaucccagcaccguguuuaaagacggagaugaggcagaagacuucgucgaggugcacuugccagauguccauaagcaaguguccggcguugaccucggucugcccucuugggggaaguacguguuaguaagcgccggcguccuggugguucuaaugcucacaauauuuaucauuacuugcuguggacgcgugcacagaccuaaaucaacccagcacagucugggcgggacaggaaggaaggucuccgugacuagccagucugguaaaguaaucucaaguugggagagcuauaaguccggcggggaaacccggcuuuga

SEQ ID NO: 159702 - RNA, 1575 nt, Artificial Sequence; identical to SEQ ID NO: 159701
  derived and/or modified CDS sequence (opt3) from glycoprotein__RABV__KM278993.1

SEQ ID NO: 159703 - RNA, 1575 nt, Artificial Sequence
  derived and/or modified CDS sequence (opt3) from glycoprotein__RABV__KM408747.1
auggugccccagguccugcuguucguuccucuucugguguuuagcaugugcuucggcaaguuuccaaucuacaccauuccggacaaauuggggcccugguccccuauagauauccaccauuuaucuuguccaaacaaucugguaguggaggacgaaggaugcacaaaccuaucagguuucaguuauauggagcucaaggucggcuacauuagcgccaucaaagugaauggguuuacuuguacgggaguugugaccgaagcugagacauauacuaacuucgucggcuacgugaccacaaccuuuaagagaaaacacuucaggcccacuccugaugcaugccgggccgcguauaauuggaagauggcuggugacccacgcuacgaagagucccugcauaaccccuauccugauuaccacuggcuucgaacaguaaagaccacgaaagagucucugguuauuaucucgccaucaguggccgacuuggauccguacgacaagagccuccauagucgugucuuucccuccgggaaauguucuggaauaacuaucagcuccaccuauugcucaacaaaucacgauuacacuauuuggaugccugaaaacccaagacugggcaccaguugugacaucuucacaaauagcaggggcaagcgggcaucuaaagggggaaagaccugcgguuuuguggaugagcgcggccuguauaagucccucaaaggggccuguaaguuaaaacugugcggagugcuuggcuugagacugauggacgguacgugggucgcuaugcaaacuucagaugaaacaaaguggugucccccugaccagcuaguuaaccuccacgacuucaggagcgaugagauugagcaucuggugguagaggaacuugugaaaaagcgggaagagugccuggacgcauuggaaaguaucaugaccacuaaaucugucuccuuucgccgacucagccaccugagaaaguuagugccaggguucggaaaggccuacacaauauucaauaaaacccugauggaggcugaugcccauuauaagucgguuaggacguggaacgagauuauccccucuaaaggcugccuccgggugggcgggcguugucacccgcacgucaagggaguguuuuucaaugguauuauccuuggcccugacgggcauguacugauccccgaaaugcaguccucauugcuacagcaacacauggagcugcucgaaaguagcguuauuccacugaugcauccucuugcggaucccuccaccguguuuaaagagggagacgaagcagaggauuucgucgaggugcaccucccagacguccauaagcagauaucuggcguggauuugggucuccccagcugggggaaguacguucuggugucagccggcguauuagucgugcugaugcuaacaaucuuuauuaucacuugcuguggacgcauacacagaccuaaauucacccagcacggccucgggggaacagguaggaagguuagugugacuucccagagcggcaaagucauuucuucaugggaaaguuauaagagcgggggagagacccggcuguga

SEQ ID NO: 159704 - RNA, 1575 nt, Artificial Sequence
  derived and/or modified CDS sequence (opt3) from glycoprotein__RABV__KM492745.1
auggugccccagguccugcuguucguuccucuucugguguuuagcaugugcuucggcaaguuuccaaucuacaccauuccggacaaauuggggcccugguccccuauagauauccaccauuuaucuuguccaaacaaucugguaguggaggacgaaggaugcacaaaccuaucagguuucaguuauauggagcucaaggucggcuacauuagcgccaucaaagugaauggguuuacuuguacgggaguugugaccgaagcugagacauauacuaacuucgucggcuacgugaccacaaccuuuaagagaaaacacuucaggcccacuccugaugcaugccgggccgcguauaauuggaagauggcuggugacccacgcuacgaagagucccugcauaaccccuauccugauuaccacuggcuucgaacaguaaagaccacgaaagagucucugguuauuaucucgccaucaguggccgacuuggauccguacgacaagagccuccauagucgugucuuucccuccgggaaauguucuggaauaacuaucagcuccaccuauugcucaacaaaucacgauuacacuauuuggaugccugaaaacccaagacugggcaccaguugugacaucuucacaaauagcaggggcaagcgggcaucuaaagggggaaagaccugcgguuuuguggaugagcgcggccuguauaagucccucaaaggggccuguaaguuaaaacugugcggagugcuuggcuugagacugauggacgguacgugggucgcuaugcaaacuucagaugaaacaaaguggugucccccugaccagcuaguuaaccuccacgacuucaggagcgaugagauugagcaucuggugguagaggaacuugugaaaaagcgggaagagugccuggacgcauuggaaaguaucaugaccacuaaaucugucuccuuucgccgacucagccaccugagaaaguuagugccaggguucggaaaggccuacacaauauucaauaaaacccugauggaggcugaugcccauuauaagucgguuaggacguggaacgagauuauccccucuaaaggcugccuccgggugggcgggcguugucacccgcacgucaagggaguguuuuucaaugguauuauccuuggcccugacgggcauguacugauccccgaaaugcaguccucauugcuacagcaacacauggagcugcucgaaaguagcguuauuccacugaugcauccucuugcggaucccuccaccguguuuaaagacggagaugaggcagaagacuucgucgaggugcaccucccagauguccauaagcagauaucuggcguggacuugggucuccccagcugggggaaguacguucuggugucagccggcguauuagucgugcugaugcuaacaacuuuuaucauuaccugcuguggacgcaucagaaggccuaaaaguacacagcacggccucgggggaacuggucggaagguuuccgugaccagccagucuggcaaagucauaucaaguugggagagcuauaaguccgggggagaaacacgacuguga

SEQ ID NO: 159705 - RNA, 1575 nt, Artificial Sequence; identical to SEQ ID NO: 159178
  derived and/or modified CDS sequence (opt3) from glycoprotein__RABV__KM492746.1

SEQ ID NO: 159706 - RNA, 1575 nt, Artificial Sequence
  derived and/or modified CDS sequence (opt3) from glycoprotein__RABV__KM492747.1
auggugccccagguccugcuguucguuccucuucugguguuuagcaugugcuucggcaaguuuccaaucuacaccauuccggacaaauuggggcccugguccccuauagauauccaccauuuaucuuguccaaacaaucugguaguggaggacgaaggaugcacaaaccuaucagguuucaguuauauggagcucaaggucggcuacauuagcgccaucaaagugaauggguuuacuuguacgggaguugugaccgaagcugagacauauacuaacuucgucggcuacgugaccacaaccuuuaagagaaaacacuucaggcccacuccugaugcaugccgggccgcguauaauuggaagauggcuggugacccacgcuacgaagagucccugcauaaccccuauccugauuaccacuggcuucgaacaguaaagaccacgaaagagucucugguuauuaucucgccaucaguggccgacuuggauccguacgacaagagccuccauagucgugucuuucccuccgggaaauguucuggaauaacuaucagcuccaccuauugcucaacaaaucacgauuacacuauuuggaugccugaaaacccaagacugggcaccaguugugacaucuucacaaauagcaggggcaagcgggcaucuaaagggggaaagaccugcgguuuuguggaugagcgcggccuguauaagucccucaaaggggccuguaaguuaaaacugugcggagugcuuggcuugagacugauggacgguacgugggucgcuaugcaaacuucagaugaaacaaaguggugucccccugaccagcuaguuaaccuccacgacuucaggagcgaugagauugagcaucuggugguagaggaacuugugaaaaagcgggaagagugccuggacgcauuggaaaguaucaugaccacuaaaucugucuccuuucgccgacucagccaccugagaaaguuagugccaggguucggaaaggccuacacaauauucaauaaaacccugauggaggcugaugcccauuauaagucgguuaggacguggaacgagauuauccccucuaaaggcugccuccgggugggcgggcguugucacccgcacgucaauggaguguuuuucaacgguauuauccuuggcccugacgggcauguacugauccccgaaaugcaguccucauugcuacagcaacacauggagcugcucgaaaguagcguuauuccacugaugcauccucuugcggaucccuccaccguguuuaaggacggagaugaggcagaagacuucgucgaggugcaccucccagauguccauaaacagauaucuggcguggacuugggucuccccagcugggggaaguacguucuggugucagccggcguauuagucgugcugaugcuaacaaucuuuauuaugacuugcuguggacgcguuagaaggccuaagaguacccagcacggcuucgggggaacaggucggaaaguguccgucacuagccagucuggcaaggugaucucaaguugggagagcuauaaauccgggggagaaacccgacucuga

SEQ ID NO: 159707 - RNA, 1575 nt, Artificial Sequence
  derived and/or modified CDS sequence (opt3) from glycoprotein__RABV__KM492748.1
auggugccccagguccugcuccuuguuccucuguugguguucagcaugugcuuuggcaaguucccaaucuacaccauuccggacaaauuagggcccugguccccuauagauauccaccaucugucuuguccaaacaaucuaguaguggaggacgaaggaugcacaaaccucucagguuuuaguuauauggagcugaaggucggcuacauuagcgccaucaaagugaauggguucacuuguacgggaguugugaccgaagcugagacauauacuaacuuugucggcuacgugaccacaaccuucaagagaaaacacuuuaggcccacuccugaugcaugccgggccgcguauaauuggaagauggcuggugacccacgcuacgaagagucccuucauaaccccuauccugauuaccacuggcugcgaacaguaaagaccacgaaagagucuuugguuauuaucucgccaucaguggccgaccucgauccguacgacaagagccugcauagucgugucuuccccuccgggaaauguucuggaauaacuaucagcuccaccuauugcucaacaaaucacgauuacacuauuuggaugccugaaaacccaagacugggcaccaguugugacaucuuuacaaauagcaggggcaagcgggcaucuaaagggggaaagaccugcgguuucguggaugagcgcggccucuauaaguccuuaaaaggggccuguaagcugaaacuuugcggaguguugggccugagacuaauggacgguacgugggucgcuaugcaaacuucagaugaaacaaaguggugucccccugaccagcucguuaaccugcacgacuuuaggagcgaugagauugagcaucuugugguagaggaacuggugaaaaagcgggaagagugcuuggacgcacucgaaaguaucaugaccacuaaaucugucuccuuccgccgacugagccacuuaagaaagcuggugccaggguuuggaaaggccuacacaauauucaauaaaacccucauggaggcugaugcccauuauaagucgguuaggacguggaacgagauuauccccucuaaaggcugccuucgggugggcgggcguugucacccgcacgucaauggaguguucuuuaacgguauuauccugggcccugacgggcauguauugauccccgaaaugcaguccucacuacugcagcaacacauggagcuccuggaaaguagcguuauuccacuuaugcauccucuggcggaucccuccaccguguucaaggacggagaugaggcagaagacuuugucgaggugcacuugccagauguccauaaacagauaucuggcguggaccucggucugcccagcugggggaaguacguuuuagugucagccggcguacuggucgugcuaaugcucacaaucuucaugauuacuugcuguggacgcauccacagaccuaagaguacccagcacggccuugggggaacagguaggaaaguuuccgugacuagccagucuggcaaggucauaucaaguugggagagcuauaaauccgggggagaaacccggcuguga

SEQ ID NO: 159708 - RNA, 1575 nt, Artificial Sequence
  derived and/or modified CDS sequence (opt3) from glycoprotein__RABV__KM492750.1
auggugccccagguccugcuguucguuccucuucugguguuuagcguaugcuucggcaaguuuccaaucuacaccauuccggacaaauuggggcccugguccccuauagauauccaccauuuaauuuguccaaacaaucugguggucgaggacgaaggaugcacaaaccuaacugguuucucuuauauggagcucaaggugggcuacaucucagccauuaaaguuaauggguuuaguuguacgggaguggucaccgaggcuuauacauaccccaacuucgugggcuauguaacuagcaccuuuaagagaaaacacuucaggccuacaccagaugcaugccgggccgcguacaauuggaagauggcuggugacccccgcuuugaagaaucccugcauuauccuuacccagauuaccacuggcuucgaaccguuaagacuacaaaagagucucuggugaucauaucgccgucagucgccgacuuggaucccuaugacaagagccuccauagucguguguucccuuccgggaaauguucuggaaucaccauuagcuccacguacugcucaacuaaccacgauuauaccaucuggaugccagagaaucccagacugggcacaaguugugacauuuuuacuaacagcaggggcaagcgggcaucuaaagggggaaagaccugcgguuucguggaugaacgcggccuguacaagucccucaaaggggccuguaaguuaaaacugugcggaguccuuggcuugagacugauggacgguacauggguugcuaugcaaaccucagaugagacgaagugguguccuccagaccagcuagugaaucuccacgacuuuaggagcgaugaaaucgagcaucugguaguggaggaacuugucaaaaagcgggaggaaugccuggacgcauuggagaguauaaugacuacaaaaucuguguccuuccgccgacucagccaccugagaaaguuaguucccggguucggaaaggccuauaccauuuuuaacaaaacucugauggaagcugaugcccauuacaagucggugaggacauggaaugagaucauuccgucuaaaggcugccuccgggucggcgggcguugucacccucacgugaagggaguauucuuuaacgguaucauccuuggccccgacgggcauguucugauuccagagaugcaguccucauugcuacagcaacacauggaacugcucgagaguagcgugauaccucugaugcauccccuugcggauccauccaccgucuucaaagacggagaugaagcagaggacuuuguggaaguccaccuccccgaugugcauaagcagaucucuggcguugacuugggucucccuagcugggggaaguaugugcugguaucagccggcgucuuagugguucugaugcuaacgauuuucaucauaaccugcuguggacgcauucacagaccaaaaaguacacagcacggccucgggggaacugguaggaagguguccgucaccagccagucuggcaaagugaucucaaguugggagagcuacaaguccgggggagagacacggcuguga

SEQ ID NO: 159709 - RNA, 1575 nt, Artificial Sequence
  derived and/or modified CDS sequence (opt3) from glycoprotein__RABV__KM492751.1
auggugccccagguccugcuguucguuccucuucugguguuuagcaugugcuucggcaaguuuccaaucuacaccauuccggacaaauuggggcccugguccccuauagauauccaccauuuaucuuguccaaacaaucugguaguggaggacgaaggaugcacaaaccuaucagguuucaguuauauggagcucaaggucggcuacauuagcgccaucaaagugaauggguuuacuuguacgggaguugugaccgaagcugagacauauacuaacuucgucggcuacgugaccacaaccuuuaagagaaaacacuucaggcccacuccugaugcaugccgggccgcguauaauuggaagauggcuggugacccacgcuacgaagagucccugcauaaccccuauccugauuaccacuggcuucgaacaguaaagaccacgaaagagucucugguuauuaucucgccaucaguggccgacuuggauccguacgacaagagccuccauagucgugucuuucccuccgggaaauguucuggaauaacuaucagcuccaccuauugcucaacaaaucacgauuacacuauuuggaugccugaaaacccaagacugggcaccaguugugacaucuucacaaauagcaggggcaagcgggcaucuaaagggggaaagaccugcgguuuuguggaugagcgcggccuguauaagucccucaaaggggccuguaaguuaaaacugugcggagugcuuggcuugagacugauggacgguacgugggucgcuaugcaaacuucagaugaaacaaaguggugucccccugaccagcuaguuaaccuccacgacuucaggagcgaugagauugagcaucuggugguagaggaacuugugaaaaagcgggaagagugccuggacgcauuggaaaguaucaugaccacuaaaucugucuccuuucgccgacucagccaccugagaaaguuagugccaggguucggaaaggccuacacaauauucaauaaaacccugauggaggcugaugcccauuauaagucgguuaggacguggaacgagauuauccccucuaaaggcugccuccgggugggcgggcguugucacccgcacgucaagggaguguuuuucaaugguauuauccuuggcccugacgggcauguacugauccccgaaaugcaguccucauugcuacagcaacacauggagcugcucgaaaguagcguuauuccacugaugcauccucuugcggaucccuccaccguguuuaaagacggagaugaggcagaagacuucgucgaggugcaccucccagauguccauaagcagauaucuggcguggacuugggucuccccagcugggggaaguacguucuggugucagccggcguauuagucgugcugaugcuaacaaucuuuauuaucacuugcugucgcagaauaaggcggccucgaaguacccagcacggacucggcgggacaggacgcaaaguuuccgugacuagccagucugguaaggucauuucaaguugggagagcuauaaauccggcggggaaaccagacuguga

SEQ ID NO: 159710 - RNA, 1575 nt, Artificial Sequence
  derived and/or modified CDS sequence (opt3) from glycoprotein__RABV__KM492752.1
auggugccccagguccugcuguucguuccucuucugguguuuagcaugugcuucggcaaguuuccaaucuacaccauuccggacaaauuggggcccugguccccuauagauauccaccauuuaucuuguccaaacaaucugguaguggaggacgaaggaugcacaaaccuaucagguuucaguuauauggagcucaaggucggcuacauuagcgccaucaaagugaauggguuuacuuguacgggaguugugaccgaagcugagacauauacuaacuucgucggcuacgugaccacaaccuuuaagagaaaacacuucaggcccacuccugaugcaugccgggccgcguauaauuggaagauggcuggugacccacgcuacgaagagucccugcauaaccccuauccugauuaccacuggcuucgaacaguaaagaccacgaaagagucucugguuauuaucucgccaucaguggccgacuuggauccguacgacaagagccuccauagucgugucuuucccuccgggaaauguucuggaauaacuaucagcuccaccuauugcucaacaaaucacgauuacacuauuuggaugccugaaaacccaagacugggcaccaguugugacaucuucacaaauagcaggggcaagcgggcaucucgcgggggaaaaaccugcgguuuuguggaugagagaggccuguauaagucccucaagggggccuguaaauuaaagcugugcggagugcuuggcuugaggcugauggacgguacgugggucgcuaugcaaacuucagaugaaacaaaauggugucccccugaccagcuaguuaaccuccacgacuuccggagcgaugagauugagcaucuggugguagaggaacuugugaagaaacgcgaagagugccuggacgcauuggaaaguaucaugaccacuaagucugucuccuuucgaagacucagccaccugaggaaauuagugccaggguucggaaaggccuacacaauauucaauaagacccugauggaggcugaugcccauuauaaaucgguucggacguggaacgagauuauccccucuaagggcugccuccgugugggcgggcgcugucacccgcacgucaaaggaguguuuuucaaugguauuauccuuggcccugacgggcauguacugauccccgaaaugcaguccucauugcuacagcaacacauggagcugcucgaaaguagcguuauuccacugaugcauccucuugcggaucccuccaccguguuuaaggacggagaugaggcagaagacuucgucgaggugcaccucccagauguccauaaacagauaucuggcguggacuugggucuccccaacugggggaaguacguucuggugagcgccggcguauuagucgugcugaugcuaacaaucuuuauuaucacuugcuguggaagaauaaggcggccucgaucaacccagcacggccucgggggaacaggucgcaagguuagugugacuucccagagcggcaaagucauuucuucaugggagaguuauaagagcgggggagaaaccagacuguga

SEQ ID NO: 159711 - RNA, 1575 nt, Artificial Sequence
  derived and/or modified CDS sequence (opt3) from glycoprotein__RABV__KM492753.1
auggugccccagguccugcuguucguuccucuucugguguuuagcaugugcuucggcaaguuuccaaucuacaccauuccggacaaauuggggcccugguccccuauagauauccaccauuuaucuuguccaaacaaucugguaguggaggacgaaggaugcacaaaccuaucagguuucaguuauauggagcucaaggucggcuacauuagcgccaucaaagugaauggguuuacuuguacgggaguugugaccgaagcugagacauauacuaacuucgucggcuacgugaccacaaccuuuaagagaaaacacuucaggcccacuccugaugcaugccgggccgcguauaauuggaagauggcuggugacccacgcuacgaagagucccugcauaaccccuauccugauuaccacuggcuucgaacaguaaagaccacgaaagagucucugguuauuaucucgccaucaguggccgacuuggauccguacgacaagagccuccauagucgugucuuucccuccgggaaauguucuggaauaacuaucagcuccaccuauugcucaacaaaucacgauuacacuauuuggaugccugaaaacccaagacugggcaccaguugugacaucuucacaaauagcaggggcaagcgggcaucuaaagggggaaagaccugcgguuuuguggaugagcgcggccuguauaagucccucaaaggggccuguaaguuaaaacugugcggagugcuuggcuugagacugauggacgguacgugggucgcuaugcaaacuucagaugaaacaaaguggugucccccugaccagcuaguuaaccuccacgacuucaggagcgaugagauugagcaucuggugguagaggaacuugugaaaaagcgggaagagugccuggacgcauuggaaaguaucaugaccacuaaaucugucuccuuucgccgacucagccaccugagaaaguuagugccaggguucggaaaggccuacacaauauucaauaaaacccugauggaggcugaugcccauuauaagucgguuaggacguggaacgagauuauccccucuaaaggcugccuccgggugggcgggcguugucacccgcacgucaauggaguguuuuucaacgguauuauccuuggcccugacgggcauguacugauccccgaaaugcaguccucauugcuacagcaacacauggagcugcucgaaaguagcguuauuccacugaugcauccucuugcggaucccuccaccguguuuaaggacggagaugaggcagaagacuucgucgaggugcaccucccagauguccauaaacagauaucuggcguggacuugggucuccccagcugggggaaguacguucuggugucagccggcguauuagucgugcugaugcuaacaaucuuuauuaugacuugcuguggacgcguucacagaccuaagaguacccagcacggccucgggggaacagguaggaaaguguccgucacuagccagucuggcaaggugaucucaaguugggagagcuauaaauccgggggagaaacccggcuguga

SEQ ID NO: 159712 - RNA, 1575 nt, Artificial Sequence
  derived and/or modified CDS sequence (opt3) from glycoprotein__RABV__KM492754.1
auggugccccagguccugcuguucguuccucuucugguguuuagcaugugcuucggcaaguuuccaaucuacaccauuccggacaaauuggggcccugguccccuauagauauccaccauuuaucuuguccaaacaaucugguaguggaggacgaaggaugcacaaaccuaucagguuucaguuauauggagcucaaggucggcuacauuagcgccaucaaagugaauggguuuacuuguacgggaguugugaccgaagcugagacauauacuaacuucgucggcuacgugaccacaaccuuuaagagaaaacacuucaggcccacuccugaugcaugccgggccgcguauaauuggaagauggcuggugacccacgcuacgaagagucccugcauaaccccuauccugauuaccacuggcuucgaacaguaaagaccacgaaagagucucugguuauuaucucgccaucaguggccgacuuggauccguacgacaagagccuccauagucgugucuuucccuccgggaaauguucuggaauaacuaucagcuccaccuauugcucaacaaaucacgauuacacuauuuggaugccugaaaacccaagacugggcaccaguugugacaucuucacaaauagcaggggcaagcgggcaucuaaagggggaaagaccugcgguuuuguggaugagcgcggccuguauaagucccucaaaggggccuguaaguuaaaacugugcggagugcuuggcuugagacugauggacgguacgugggucgcuaugcaaacuucagaugaaacaaaguggugucccccugaccagcuaguuaaccuccacgacuucaggagcgaugagauugagcaucuggugguagaggaacuugugaaaaagcgggaagagugccuggacgcauuggaaaguaucaugaccacuaaaucugucuccuuucgccgacucagccaccugagaaaguuagugccaggguucggaaaggccuacacaauauucaauaaaacccugauggaggcugaugcccauuauaagucgguuaggacguggaacgagauuauccccucuaaaggcugccuccgggugggcgggcguugucacccgcacgucaauggaguguuuuucaacgguauuauccuuggcccugacgggcauguacugauccccgaaaugcaguccucauugcuacagcaacacauggagcugcucgaaaguagcguuauuccacugaugcauccucuugcggaucccuccaccguguuuaaggacggagaugaggcagaagacuucgucgaggugcaccucccagauguccauaaacagauaucuggcguggacuugggucuccccagcugggggaaguacguucuggugucagccggcguauuagucgugcugaugcuaacaaucuuuauuaugacuugcuguggacgcguucacagaaguaaguccacccagcacggccucgggggaacagguaggaaagugagcgucacuucucagucaggcaaggugaucaguagcugggaguccuauaaaucugggggagaaacccggcuguga

SEQ ID NO: 159713 - RNA, 1575 nt, Artificial Sequence
  derived and/or modified CDS sequence (opt3) from glycoprotein__RABV__KM492755.1
auggugccccagguccugcuguucguuccucuucugguguuuagcaugugcuucggcaaguuuccaaucuacaccauuccggacaaauuggggcccugguccccuauagauauccaccauuuaucuuguccaaacaaucugguaguggaggacgaaggaugcacaaaccuaucagguuucaguuauauggagcucaaggucggcuacauuagcgccaucaaagugaauggguuuacuuguacgggaguugugaccgaagcugagacauauacuaacuucgucggcuacgugaccacaaccuuuaagagaaaacacuucaggcccacuccugaugcaugccgggccgcguauaauuggaagauggcuggugacccacgcuacgaagagucccugcauaaccccuauccugauuaccacuggcuucgaacaguaaagaccacgaaagagucucugguuauuaucucgccaucaguggccgacuuggauccguacgacaagagccuccauagucgugucuuucccuccgggaaauguucuggaauaacuaucagcuccaccuauugcucaacaaaucacgauuacacuauuuggaugccugaaaacccaagacugggcaccaguugugacaucuucacaaauagcaggggcaagcgggcaucuaaagggggaaagaccugcgguuuuguggaugagcgcggccuguauaagucccucaaaggggccuguaaguuaaaacugugcggagugcuuggcuugagacugauggacgguacgugggucgcuaugcaaacuucagaugaaacaaaguggugucccccugaccagcuaguuaaccuccacgacuucaggagcgaugagauugagcaucuggugguagaggaacuugugaaaaagcgggaagagugccuggacgcauuggaaaguaucaugaccacuaaaucugucuccuuucgccgacucagccaccugagaaaguuagugccaggguucggaaaggccuacacaauauucaauaaaacccugauggaggcugaugcccauuauaagucgguuaggacguggaacgagauuauccccucuaaaggcugccuccgggugggcgggcguugucacccgcacgucaauggaguguuuuucaacgguauuauccuuggcccugacgggcauguacugauccccgaaaugcaguccucauugcuacagcaacacauggagcugcucgaaaguagcguuauuccacugaugcauccucuugcggaucccuccaccguguuuaaggacggagaugaggcagaagacuucgucgaggugcaccucccagauguccauaaacagauaucuggcguggacuugggucuccccagcugggggaaguacguucuggugucagccggcguauuagucgugcugaugcuaacaaucuuuauuaugacuugcuguggacgcguucacagaccuaagaguacccagcacggccucgggggaacagagaggaaaguguccgucacuagccagucugguaaggugaucucaaguugggaaagcuauaaauccggcggggagacccggcuguga

SEQ ID NO: 159714 - RNA, 1575 nt, Artificial Sequence; identical to SEQ ID NO: 159713
  derived and/or modified CDS sequence (opt3) from glycoprotein__RABV__KM492758.1

SEQ ID NO: 159715 - RNA, 1575 nt, Artificial Sequence
  derived and/or modified CDS sequence (opt3) from glycoprotein__RABV__KM492759.1
auggugccccagguccugcuguucguuccucuucugguguuuagcaugugcuucggcaaguuuccaaucuacaccauuccggacaaauuggggcccugguccccuauagauauccaccauuuaucuuguccaaacaaucugguaguggaggacgaaggaugcacaaaccuaucagguuucaguuauauggagcucaaggucggcuacauuagcgccaucaaagugaauggguuuacuuguacgggaguugugaccgaagcugagacauauacuaacuucgucggcuacgugaccacaaccuuuaagagaaaacacuucaggcccacuccugaugcaugccgggccgcguauaauuggaagauggcuggugacccacgcuacgaagagucccugcauaaccccuauccugauuaccacuggcuucgaacaguaaagaccacgaaagagucucugguuauuaucucgccaucaguggccgacuuggauccguacgacaagagccuccauagucgugucuuucccuccgggaaauguucuggaauaacuaucagcuccaccuauugcucaacaaaucacgauuacacuauuuggaugccugaaaacccaagacugggcaccaguugugacaucuucacaaauagcaggggcaagcgggcaucuaaagggggaaagaccugcgguuuuguggaugagcgcggccuguauaagucccucaaaggggccuguaaguuaaaacugugcggagugcuuggcuugagacugauggacgguacgugggucgcuaugcaaacuucagaugaaacaaaguggugucccccugaccagcuaguuaaccuccacgacuucaggagcgaugagauugagcaucuggugguagaggaacuugugaaaaagcgggaagagugccuggacgcauuggaaaguaucaugaccacuaaaucugucuccuuucgccgacucagccaccugagaaaguuagugccaggguucggaaaggccuacacaauauucaauaaaacccugauggaggcugaugcccauuauaagucgguuaggacguggaacgagauuauccccucuaaaggcugccuccgggugggcgggcguugucacccgcacgucaauggaguguuuuucaacgguauuauccuuggcccugacgggcauauccugauucccgaaaugcaguccucauugcuacagcaacacauggagcugcucgaaaguagcguaauaccacugaugcauccucuugcggaucccuccaccguuuuuaaggacggagaugaggcagaagacuucguggagguccaccucccagaugugcauaaacagaucucuggcgucgacuugggucuccccagcugggggaaguacgugcugguuucagccggcguguuaguaguccugaugcuaacaauuuuuaucaugacuugcuguggacgcgugcacagaccuaagaguacccagcacggccucgggggaacagagaggaaaguuuccgugacuagccagucugguaaggucauaucaaguugggaaagcuauaaauccggcggggagacccggcuguga

SEQ ID NO: 159716 - RNA, 1575 nt, Artificial Sequence
  derived and/or modified CDS sequence (opt3) from glycoprotein__RABV__KM492760.1
auggugccccagguccugcuguucguuccucuucugguguuuagcaugugcuucggcaaguuuccaaucuacaccauuccggacaaauuggggcccugguccccuauagauauccaccauuuaucuuguccaaacaaucugguaguggaggacgaaggaugcacaaaccuaucagguuucaguuauauggagcucaaggucggcuacauuagcgccaucaaagugaauggguuuacuuguacgggaguugugaccgaagcugagacauauacuaacuucgucggcuacgugaccacaaccuuuaagagaaaacacuucaggcccacuccugaugcaugccgggccgcguauaauuggaagauggcuggugacccacgcuacgaagagucccugcauaaccccuauccugauuaccacuggcuucgaacaguaaagaccacgaaagagucucugguuauuaucucgccaucaguggccgacuuggauccguacgacaagagccuccauagucgugucuuucccuccgggaaauguucuggaauaacuaucagcuccaccuauugcucaacaaaucacgauuacacuauuuggaugccugaaaacccaagacugggcaccaguugugacaucuucacaaauagcaggggcaagcgggcaucuaaagggggaaagaccugcgguuuuguggaugagcgcggccuguauaagucccucaaaggggccuguaaguuaaaacugugcggagugcuuggcuugagacugauggacgguacgugggucgcuaugcaaacuucagaugaaacaaaguggugucccccugaccagcuaguuaaccuccacgacuucaggagcgaugagauugagcaucuggugguagaggaacuugugaaaaagcgggaagagugccuggacgcauuggaaaguaucaugaccacuaaaucugucuccuuucgccgacucagccaccugagaaaguuagugccaggguucggaaaggccuacacaauauucaauaaaacccugauggaggcugaugcccauuauaagucgguuaggacguggaacgagauuauccccucuaaaggcugccuccgggugggcgggcguugucacccgcacgucaauggaguguuuuucaacgguauuauccuuggcccugacgggcauguacugauccccgaaaugcaguccucauugcuacagcaacacauggagcugcucgaaaguagcguuauuccacugaugcauccucuugcggaucccuccaccguguuuaaggacggagaugaggcagaagacuucgucgaggugcaccucccagauguccauaaacagauaucuggcguggacuugggucuccccagcugggggaaguacguucuggugucagccggcguauuagucgugcugaugcuaacaaucuuuauuaugacuugcuguggacgcguucacagaccuaagaguacccagcacucccucggcgggacagagaggaaagugagcgucacuucucagucaggaaaggugaucaguagcugggaauccuauaaaucugguggcgagacccggcuguga

SEQ ID NO: 159717 - RNA, 1575 nt, Artificial Sequence
  derived and/or modified CDS sequence (opt3) from glycoprotein__RABV__KM492761.1
auggugccccagguccugcuguucguuccucuucugguguuuagcaugugcuucggcaaguuuccaaucuacaccauuccggacaaauuggggcccugguccccuauagauauccaccauuuaucuuguccaaacaaucugguaguggaggacgaaggaugcacaaaccuaucagguuucaguuauauggagcucaaggucggcuacauuagcgccaucaaagugaauggguuuacuuguacgggaguugugaccgaagcugagacauauacuaacuucgucggcuacgugaccacaaccuuuaagagaaaacacuucaggcccacuccugaugcaugccgggccgcguauaauuggaagauggcuggugacccacgcuacgaagagucccugcauaaccccuauccugauuaccacuggcuucgaacaguaaagaccacgaaagagucucugguuauuaucucguugucaguggccgaccucgauccauacgacaagagccugcauagucgugucuuuccguccgggaaauguucuggaauaacuaucagcuccaccuauugcucaacaaaucacgauuacacuauuuggaugcccgaaaacccuagacugggcaccaguugugacaucuucacaaauagcaggggcaagcgggcaucuaaagggggaaagaccugcgguuuuguggaugagcgcggccucuauaaguccuuaaaaggggccuguaagcugaaacuuugcggaguguugggccugagacuaauggacgguacgugggucgcuaugcaaacuucagaugaaacaaagugguguccacccgaccagcucguuaaccugcacgacuucaggagcgaugagauugagcaucuugugguagaggaacuggugaaaaagcgggaagagugcuuggacgcacucgaaaguaucaugaccacuaaaucugucuccuuucgccgacugagccacuuaagaaagcuggugccuggguucggaaaggccuacacaauauucaauaaaacccucauggaggcugaugcccauuauaagucgguuaggacguggaacgagauuaucccaucuaaaggcugccuucgggugggcgggcguugucacccccacgucaauggaguguuuuucaacgguauuauccugggcccggacgggcauguauugaucccugaaaugcaguccucacuacugcagcaacacauggagcuccuggaaaguagcguuauuccccuuaugcauccacuggcggauccuuccaccguguuuaaggacggagaugaggcagaagacuucgucgaggugcacuugcccgauguccauaaacagauaucuggcguggaccucggucugccaagcugggggaaguacguuuuagugucagccggcguacuggucgugcuaaugcucacaaucuuuauuaugacuugcuguggacgcguucacagacccaagaguacccagcacggccucgggggaacagguaggaaaguguccgucacuagccagucuggcaaggugaucucaaguugggagagcuauaaauccgggggagaaacccggcuuuga

SEQ ID NO: 159718 - RNA, 1575 nt, Artificial Sequence
  derived and/or modified CDS sequence (opt3) from glycoprotein__RABV__KM492762.1
auggugccccagguccugcuguucguuccucuucugguguuuagcaugugcuucggcaaguuuccaaucuacaccauuccggacaaauuggggcccugguccuuaauagauauccaccaucugucuuguccuaacaaucuaguaguggaggacgaaggaugcacaaaccucucagguuucaguuauauggagcugaaggucggcuacauuagcgccaucaaagugaauggguuuacuuguacgggaguugugaccgaagcugagacauauacuaacuucgucggcuacgugaccacaaccuuuaagagaaaacacuucaggccaacucccgaugcaugccgggccgcguauaauuggaagauggcuggugacccucgcuacgaagagucccuucauaacccauaucccgauuaccacuggcugcgaacaguaaagaccacgaaagagucuuugguuauuaucucgccuucaguggccgaccucgauccauacgacaagagccugcauagucgugucuuuccguccgggaaauguucuggaauaacuaucagcuccaccuauugcucaacaaaucacgauuacacuauuuggaugcccgaaaacccuagacugggcaccaguugugacaucuucacaaauagcaggggcaagcgggcaucuaaagggggaaagaccugcgguuuuguggaugagcgcggccucuauaaguccuuaaaaggggccuguaagcugaaacuuugcggaguguugggccugagacuaauggacgguacgugggucgcuaugcaaacuucagaugaaacaaagugguguccacccgaccagcucguuaaccugcacgacuucaggagcgaugagauugagcaucuugugguagaggaacuggugaaaaagcgggaagagugcuuggacgcacucgaaaguaucaugaccacuaaaucugucuccuuucgccgacugagccacuuaagaaagcuggugccuggguucggaaaggccuacacaauauucaauaaaacccucauggaggcugaugcccauuauaagucgguuaggacguggaacgagauuaucccaucuaaaggcugccuucgggugggcgggcguugucacccccacgucaauggaguguuuuucaacgguauuauccugggcccggacgggcauguauugaucccugaaaugcaguccucacuacugcagcaacacauggagcuccuggaaaguagcguuauuccccuuaugcauccacuggcggauccuuccaccguguuuaaggacggagaugaggcagaagacuucgucgaggugcacuugcccgauguccauaaacagauaucuggcguggaccucggucugccaagcugggggaaguacguuuuagugucagccggcguacuggucgugcuaaugcucacaaucuuuauuaugacuugcuguggacgcguucacagacccaagaguacccagcacggccucgggggaacagagaggaaaguguccgucacuagccagucugguaaggugaucucaaguugggaaagcuauaaauccggcggggagacccggcuuuga

SEQ ID NO: 159719 - RNA, 1575 nt, Artificial Sequence; identical to SEQ ID NO: 159711
  derived and/or modified CDS sequence (opt3) from glycoprotein__RABV__KM492763.1

SEQ ID NO: 159720 - RNA, 1575 nt, Artificial Sequence; identical to SEQ ID NO: 159713
  derived and/or modified CDS sequence (opt3) from glycoprotein__RABV__KM492764.1

SEQ ID NO: 159721 - RNA, 1575 nt, Artificial Sequence
  derived and/or modified CDS sequence (opt3) from glycoprotein__RABV__KM492765.1
auggugccccagguccuccuguucguuccucuucugguguuuagcaugugcuucggcaaguuuccaaucuacaccauuccggacaaaguagggcccggauccccuauagauauccaccauuugucuuguccaaacaauuuagugauugaggacgaagguugcacaaaccugucaggcuucaguuauauggagcuaaaggucggguacaucagcgccauuaaaguguccggauuuacuuguacgggcguugaaaccgaggcugaaacauauacuaauuucguggguuacgucaccacaaccuuuaagagaaaacacuucaggcccacuccuaacgcaugccgggccgcguauaaucgcaagauggcuggggauccacgauacgaggagucucuccauaaccguugucccgaauaucacuggcugagaacagugaagaccacgaaagagucgcuuguaaucauaucaccuagcguugccgaccuggauccauacgacaagaguuugcauuccaggguguuuccgucuggaaaaugcagcggcaucacuauuuccucaaccuacuguaguacaaaucacgauuauacuaucuggaugcccgaaaacccucggcucggcaccagcugcgacauuuucacaaauucucgcgggaagagagcauccaaaggagguaagaccuguggcuuugucgaugagagggggcuguacaagucacugaaaggagccugcaagcucaaauuauguggcgugcugggucuucgguugauggacgggacguggguggcuaugcaaacuagcgaugagacaaaguggugcccacccgaccagcuggucaaccuacacgauuuccgcagugacgaaaucgagcaucucguuguggaggaacugguaaagaaacgagaagagugccuugacgcacuggagucuauaaugaccacuaaauccgugagcuuuagaagguugucgcaccuccggaagcuggucccuggauucggcaaggccuauacaauuuucaauaaaaccuuaauggaagcugaugcccauuacaagucugugcguacguggaacgagaucauuccauccaaaggcugucugcgcguugggggaagaugccacccccacgugaauggugucuuuuucaacggcaucauccucgggccggacggacaugugcuuauuccugaaaugcagucaagucuguugcagcaacacauggagcuacuggaaagcuccguaauaccccucaugcauccacuggcggauccuucuaccguuuuuaaggacggcgaugaggcagaggacuucguggaaguccaccuucccgaugugcauaaacagaucagcggugucgaccugggguugccaucauggggcaaguaugugcucguuagugccggagugcugguagucuuaaugcugacaauuuuuaucaugacuuguugcggcagggugcaccggcccaaguccacccagcacgggcuaggagguacagagcgaaaaguuagcgugacuucucagucaggcaaggucauaaguagcugggaauccuacaaaucugggggagagacccgccucuga

SEQ ID NO: 159722 - RNA, 1575 nt, Artificial Sequence
  derived and/or modified CDS sequence (opt3) from glycoprotein__RABV__KM594023.1
augaucccccagaacccucugcucggccuucuguuggugagcuccuuaugcuucgggaaguuuccaauuuacaccauaccggacaaacugggacccuggucuccuaucgauauucaccaucuaucauguccaaauaaccucgucguugaggacgaagguugcacaagucugagcggcuucuccuauauggagcuuaaggugggguacaucucugccauuaaaguaaauggauuuacuuguacgggcguggucaccgaagcugagacauauacuaacuucguggguuacguuaccacaaccuuuaagagaaggcacuuccggcccaugccugaugcaugccgcgccgcgcauaauuggaaaaucgcuggggacccacgauaugaagauucgcugcaaaaccccuacccugacuaucacugguugcguacugugaagacaaccaaggagucacucauaaucauuagcccaagugucgccgaucuggacccguacgauaaaucccugcauucuagaguguuucccggaggcaagugucucggcguaacgaucagcuccacuuacugcucaaccaaucacgacuauacaauuuggaugccugaggaagcaggguuaggaaccaguugugauaucuucacuaacagcagggguaaacgggccucuaagggcgggaaaacaugcggauuuguugacgagcgcggccuguacaagucccuuaaggguucauguaaauugaagcugugcggggugccaggacuaagacucauggauggcaccugggucagcauacagacgcccgacgaaacuaaaugguguccuccagaccagguggugaaucugcacgauuuccauagugacgagauugagcaccuugucguugaggaacugaucaagaaaagggaagagugcuuggaugcucucgaaucuauuaugacaaccaaguccgugagcuuucggcgccugucgcauuuacgaaaacugguacccggcuucgggaaggcauauacuaucuacaacaagacacucauggaggccgacgcucacuauaaaucugugagaaccuggaaugagaucauuccguccaagggaugccuuagggucgguggccggugucacccugauguggacgggguguuuuucaacggaauaauccugggccccgaugguaauguuuugauuccagaaaugcagucaagucuacugcaacagcauauggagcuccuggaaagcuccgucaucccucuuaugcacccccuggccgacccaucuacgauauucaaagauagcgacgaggcggaagauuuuguggagguacauuugcccgacguucacaagaaaauuucagggguggaccucggccugccuaguuggggaaaguacuuacugauguccgcaggcgcccuagcugcccucaugcugaccacacuuuugaucacuugcugucguaaggucaaccgcgcagagccaaaacagcaggggccgagagaaagcggaaggaccaucucugugacaccccaaaauggucgggucauuucaaguugggagcuguauaagagcggcuccgaaacugggcucuga

SEQ ID NO: 159723 - RNA, 1575 nt, Artificial Sequence
  derived and/or modified CDS sequence (opt3) from glycoprotein__RABV__KM594024.1
augauccccagaaacccucugcucggccuucuguuggugagcuccuuaugcuucgggaaguuuccaauuuacaccauaccggacaaacugggacccuggucuccuaucgauauucaccaucuaucauguccaaauaaccucgucguugaggacgaagguugcacaagucugagcggcuucuccuauauggagcuuaaggugggguacaucucugccauuaaaguaaauggauuuacuuguacgggcguggucaccgaagcugagacauauacuaacuucguggguuacguuaccacaaccuuuaagaggcggcacuuccgccccaugccugaugcaugccgagccgcgcauaauuggaaaaucgcuggggacccacguuaugaagauucgcugcagaaccccuacccugacuaucacugguugagaacugugaagacaaccaaggagucacucauaaucauuagcccaagugucgccgaucuggacccguacgauaaaucccugcauucuaggguguuucccggaggcaagugucucggcguaacgaucagcuccacuuacugcucaaccaaucacgacuauacaauuuggaugccugaggaagcaggguuaggaaccaguugugauaucuucacuaacagccgggguaaacgcgccucuaagggcgggaaaacaugcggauuuguugacgagagaggccuguacaagucccuuaaggguucauguaaauugaagcugugcggggugccaggacuaaggcucauagauggcaccugggucagcauucaaacgcccgacgaaacuaaaugguguccuccagaccagguggugaaucugcacgauuuccauagugacgagaucgagcaccuugucguugaggaacugauuaagaaacgggaagagugcuuggaugcucucgaaucuaucaugacaaccaaguccgugagcuuucgccgacugucgcauuuaagaaaacugguacccggcuucgggaaggcauauacuauccacaacaagacacucauggaggccgacgcucacuacaaaucugugaggaccuggaaugagauuauaccguccaagggaugccuucgggucgguggccguugucauccuaacguggaugggguguuuuucaauggaaucauucugggccccgacgguaacguuuugaucccagaaaugcagucaagucuacugcagcaacacauggagcuccuggaaagcuccgucauaccucuuaugcauccccuggccgauccaucuacgauuuucaaagacagcgaugaggcggaagacuuuguggauguacacuugcccgacguucauaagaaaaucucagggguggaccucggccugccuaguuggggaaaguauuuacugauguccgcaggcgcccuagcugcccucaugcugaccacacuuuugaucacuugcugucgcaaggucaauagagcagagccaaaacagcaggggccgagggagagcggacggaccauuucugugacaccccagaacggucgagucaucucaaguugggaacuguacaagagcggcuccgagacugggcucuga

SEQ ID NO: 159724 - RNA, 1575 nt, Artificial Sequence
  derived and/or modified CDS sequence (opt3) from glycoprotein__RABV__KM594025.1
augaucccccuggaccuccuucugggcuuguuacuggccagcucccuaugcuucgggaaguuuccuauuuacaccauaccagauaaacucggaccguggucucccaucgacauucaccaucugucauguccuaacaaucuuguggucgaggaugaagguugcacaagucugagcggcuucuccuauauggaguugaagguuggguacaucucugcuauuaaagugaacggauuuacuuguacgggcguagugaccgaagcagagacauauacuaauuucgucgguuacgugaccacaaccuuuaagagaaaacacuucaggccaaugcccgacgccugccgggcggcucaugaauggaagacugccggggauccucgcuaugaggacucgcuccagaacccauaccccgauuaucacuggcugcgaacaguuaagaccacgaaagagucacuggugaucauaagcccuagugucgcagaccucgauccauacgacaaguccuuacauucucguguguuuccgggaggcaaaugucugggcguaacuaucagcuccaccuacugcucaacaaaucacgauuauacuauuuggaugcccgaagaggccgggcuuggaaccaguugugacaucuucacaaacagcagagguaagagggcuucuaaaggcgggcggauuugcggauuuguugaugaacgcggcuuguacaagucccugaagggugcauguaaacuaaagcucugcggggugccuggacugagacuuauggacggcaccugggucucaauccaagccccagacgagacgaaauggugucccccugaucagguggugaaucugcacgacuuccauagcgaugagauagaacacuuggucguugaggaacucauuaagaaaagggaggaaugccuggacgcuuuagagaguaucaugacuacaaagucuguguccuuucggcgccugagccaucuccgaaaacuuguaccaggcuucgggaaggccuauaccauuuuuaacaagacucugauggaggcggaugcacacuacaaaucggugagaacauggaaugaagucgugcccucuaagggaugcuugaaaguuggugggaggugucacuccgacguggauggcgucuucuucaacggaaucauccuaggcccggacgguaaugugcugauuccugagaugcagucaagucuccugcagcaacauauggaacuucuggagagcuccguaauacccuugaugcacccacucgccgauccuucuaccaucuuuaaggacagcgaugaagcugaggacuucguugacgugcaucugcccgauguccacaaacaggugucaggggucgacuuaggccugccaaguuggggaaaguaucuacucauguccgccggcgcacuggcuacgcuuaugagcgccaucuuuuuggugaccugcuguaagaaaguuaagcgggcggagcccgcccaucacgggccuaaagaaucuggacguaagauuucagugacaccacagaacgguaaaguaauaaguagcugggaggucuacaaguccggcaaugaaccggggcuguga

SEQ ID NO: 159725 - RNA, 1575 nt, Artificial Sequence
  derived and/or modified CDS sequence (opt3) from glycoprotein__RABV__KM594026.1
augaucccccaggcccugcucuuugugccucuucugauuagcuccucuugcuuuggcaaguucccagucuacaccauaccggagaaauuggggcccuggucaccuaucgacauucaccauuuaaguuguccaaacaaucuggcuguugaagaugagggaugcaacagccuauccgguuuuucuuauauggaacucaaggugggcuacaucucggcaauuaaaguaaauggguucacauguacuggaguggucacggaggccgaaaccuauacaaacuuugugggcuacguuacuaccacauucaagagaaaacacuuuaggcccaugccugacgcgugccgggcugccuauaauuggaagauggcuggugauccacgcuacgaggagucacugcauaaccccuauccugacuaccacuggcuucgaaccgugacuacaaccaaggaaagccugaucauaaucaguccauccgucgccaauuuggauccguacgacaaaucucuccauagccguguguuccccgggggaaaguguaugggcauuacgguauccucaacuuuuugcaguaccaaccacgauuauacaaucuggaugccugagaaugcuagacugggcacuagcugugacauuuucaccacaucuaaagggaagaaagcauccaagggagguaagaucugcggcuuuguugaugaaagggggcuguacaaaucacucaagggagccuguaaauuaaagcugugcggcgugagcggucuucgguugcuggacgggaccugggucacgauacaaacaagugaugagauuaaaugguguccacccgacaagcuagugaaccuccacgauuuccauucugacgagaucgaacaccugguggucgaggaacuuguucgcaaaagagaggaaugccuggacacuuuggaguccauuaugaccacuaagagcgugucguuuaggcggcucucucaucugcgcaaguuaguaccuggauucggcaaagcauauacaaucuucaauaagacccugauggaggccgaugcgcacuacaaauccgugaacacguggaaugaaaucauuccaucaaagggcugccucaccgucgggggacgaugucacccccaugugaacgguguuuucuucaauggcauaauccuugggccggacggacacgugcugauuccugagaugcagaguagcuugcuacagcagcauauggaacugcucgaguccucugucaucccccugaugcacccacuugcagauccuagcacaguguuuaaagacggcgaugaagccgaggacuucguagagguucaucugcccgaugugcacaagcaagucucagguauagacuuggggcucccaaacuggggcaaguaugugcugauuagugcuggauuuuuagucacucugcuacucaucaucuucuuuaugauuugcuguagaagggccaaccggcguguguccacccagcagagccugggcgaaucugggaaaaagguuuucgugaucccccagaauggaaaaguaauuucaaguugggagagcuacaagaacgguacagaaacucgccuuuga

SEQ ID NO: 159726 - RNA, 1575 nt, Artificial Sequence
  derived and/or modified CDS sequence (opt3) from glycoprotein__RABV__KM594027.1
augaucccccaggcccugcucuuugugccucuucugauuagcuccucuugcuuuggcaaguucccagucuacaccauaccggagaaauuggggcccuggucaccuaucgacauucaccauuuaaguuguccaaacaaucuggcuguugaagaugagggaugcaacagccuauccgguuuuucuuauauggaacucaaggugggcuacaucucggcaauuaaaguaaauggguucacauguacuggaguggucacggaggccgaaaccuauacaaacuuugugggcuacguuacuaccacauucaagagaaaacacuuuaggcccaugccugacgcgugccgggcugccuauaauuggaagauggcuggugauccacgcuacgaggagucacugcauaaccccuauccugacuaccacuggcuucgaaccgugacuacaaccaaggaaagccugaucauaaucaguccauccgucgccaauuuggauccguacgacaaaucucuccauagccguguguuccccgggggaaaguguaugggcauuacgguauccucaacuuuuugcaguaccaaccacgauuauacaaucuggaugccugagaaugcuagacugggcacuagcugugacauuuucaccacaucuaaagggaagaaagcauccaagggagguaagaucugcggcuuuguugaugaaagggggcuguacaaaucacucaagggagccuguaaauuaaagcugugcggcgugagcggucuucgguugcuggacgggaccugggucacgauacaaacaagugaugagauuaaaugguguccacccgacaagcuagugaaccuccacgauuuccauucugacgagaucgaacaccugguggucgaggaacuuguucgcaaaagagaggaaugccuggacacuuuggaguccauuaugaccacuaagagcgugucguuuaggcggcucucucaucugcgcaaguuaguaccuggauucggcaaagcauauacaaucuucaauaagacccugauggaggccgaugcgcacuacaaauccgugaacacguggaaugaaaucauuccaucaaagggcugccucaccgucgggggacgaugucacccccaugugaacgguguuuucuucaauggcauaauccuugggccggacggacacgugcugauuccugagaugcagaguagcuugcuacagcagcauauggaacugcucgaguccucugucaucccccugaugcacccacuugcagauccuagcacaguguuuaaagacggcgaugaagccgaggacuucguagagguucaucugcccgaugugcacaagcaagucucagguauagacuuggggcucccaaacuggggcaaguaugugcugauuagugcuggauuuuuagucacucugcuacucaucaucuuccugaugauuugcuguagaagggccaaccggcguguguccacccagcagagccuuggcgaaucugggaaaaagguuuuugugaucccccagaauggaaaaguaauuucaaguugggagagcuacaagaacggugcagaaacacgcuuguga

SEQ ID NO: 159727 - RNA, 1575 nt, Artificial Sequence
  derived and/or modified CDS sequence (opt3) from glycoprotein__RABV__KM594028.1
augaucccccaggcccugcucuuugugccucuucugauuagcuccucuugcuuuggcaaguucccagucuacaccauaccggagaaauuggggcccuggucaccuaucgacauucaccauuuaaguuguccaaacaaucuggcuguugaagaugagggaugcaacagccuauccgguuuuucuuauauggaacucaaggugggcuacaucucggcaauuaaaguaaauggguucacauguacuggaguggucacggaggccgaaaccuauacaaacuuugugggcuacguuacuaccacauucaagagaaaacacuuuaggcccaugccugacgcgugccgggcugccuauaauuggaagauggcuggugauccacgcuacgaggagucacugcauaaccccuauccugacuaccacuggcuucgaaccgugacuacaaccaaggaaagccugaucauaaucaguccauccgucgccaauuuggauccguacgacaaaucucuccauagccguguguuccccgggggaaaguguaugggcauuacgguauccucaacuuuuugcaguaccaaccacgauuauacaaucuggaugccugagaaugcuagacugggcacuagcugugacauuuucaccacaucuaaagggaagaaagcauccaagggagguaagaucugcggcuuuguugaugaaagggggcuguacaaaucacucaagggagccuguaaauuaaagcugugcggcgugagcggucuucgguugcuggacgggaccugggucacgauacaaacaagugaugagauuaaaugguguccacccgacaagcuagugaaccuccacgauuuccauucugacgagaucgaacaccugguggucgaggaacuuguucgcaaaagagaggaaugccuggacacuuuggaguccauuaugaccacuaagagcgugucguuuaggcggcucucucaucugcgcaaguuaguaccuggauucggcaaagcauauacaaucuucaauaagacccugauggaggccgaugcgcacuacaaauccgugaacacguggaaugaaaucauuccaucaaagggcugccucaccgucgggggacgaugucacccccaugugaacgguguuuucuucaauggcauaauccuugggccggacggacacgugcugauuccugagaugcagaguagcuugcuacagcagcauauggaacugcucgaguccucugucaucccccugaugcacccacuugcagauccuagcacaguguuuaaagaaggcgacgaggccgaggauuucguagaaguucaucugcccgacgugcacaagcaagucucagguauagauuuggggcucccaaacuggggcaaguaugugcugauuagugcuggauuuuuagucacucugcuacucaucaucuuccugaugauuugcuguagaagggccaaccggcguguguccacccagcagagccuuggcgagucugggaaaaagauguuuguuaucccccagaauggaaaagugauuucaaguugggaaagcuacaagaacggugcagagacaggcuuguga

SEQ ID NO: 159728 - RNA, 1575 nt, Artificial Sequence
  derived and/or modified CDS sequence (opt3) from glycoprotein__RABV__KM594029.1
augauccaccaggcccugcuccuugugccccugaugauuagcucccaaugcuugggcaaguucccuauauacaccaucccagacaaauuagggccguggucucccauugauauccaucaccugucauguccuaacaaucuaauugucgaggacgaaggaugcacaagucucagcggucuguccuauauggagcuuaagguuggcuacaucucugcuauaaaagugaacggguuuacuuguacgggaguagugaccgaagcagagacauauacuaauuucgucggcuacgugaccacaaccuuuaagagaaaacauuucaggccaaugcccgaugccugccgggcggcuuauaacuggaagaucgccggugacccucgcuacgaagagucgcugcagaauccauaucccgauucacacugguugcgaacuguuaagacaaccaaagagagccucauuaucauuaguccuuccguggcagaccuggauccauacgacaagucucugcguagcagagucuuucccgggggaaaaugucucggcaucacgauauccucaacuuacugcaguaccaaccaugauuauacaauuuggaugccggaagaggccagguuaggcacuagcugugacaucuucaccaauucuaaggggaaacgggcuuccaagggagguaagauuugcggcuuuguggaugaacgcgggcuguacaaaucacuuaagggagcauguaaauugaagcugugcggcguaagcggucuaagacucauggacgggacauggguuaguauccagaucccugaugagauuaaaugguguccaucugaccagcuggugaaccuucacgacuuccacuccgaugagauagaacaucuggucguggaggaauuggugaagaaaagggaggaaugccucgacgcccuggagagcaucaugaccacgaagucggucucuuuucggcgcuuaucccaucugcgaaagcucguucccggauucggcaaggcuuauacuauuuuuaauaaaacacuuauggaggccgaugcgcacuacaacucagugagaaccuggaaugaaaucauaccuaguaaaggcugccugaagguagggggaaggugucacccacacguggacggugucuucuuuaacggcauuaucauggggcccgauggaagcguguugaucccggagaugcaauccucucuacugcagcagcauauggaacuccuggagagcucaguuauuccucuuaugcacccccuggcagacccaaguacuguguucaaagaugacgaugaagccgagaauuucgucgaggugcauuugccugacauccacaagcagguauccggcauugaucucggucugcccgacugggggaaguauuuacugaugagcacaggcgcucuagccgcacucauacugaccaucuuucuuauuuugugcugucggaaaguuaaccguaaggaaucuauccaacgcucacuggaggaaaguggaagaaaagugccagucacgccccagaauggcaaggugaucagcuccugggagcucuacaaaaacgggggagaaaccaagcuguga

SEQ ID NO: 159729 - RNA, 1575 nt, Artificial Sequence
  derived and/or modified CDS sequence (opt3) from glycoprotein__RABV__KM594030.1
augaucccccaggcccuccuguucgugcuucuguugauuagcuccucuugcuuuggcaaguucccugucuacaccauaccagacaaauuagggccguggucacccaucgauauucaccaucugaguuguccuaacaaucuaaucguugaggacgaaggaugcaacaaucucagcgguuuuuccuauauggagcugaaggugggcuacauuucugcuaucaaaguaaacggguucacauguacuggaguggucacggaagcagagaccuauacaaauuuugugggcuacguuacuaccacauucaagagaaaacacuuuaggccaacccccgaugccugccgggcggcuuauaacuggaagauggccggugacccucgcuacgaagagucgcuucauaauccauaucccgauuaccacuggcugcgaacugugaagacaaccaaagagucauugauaaucauuagcccuagugucgcagaccucgauccauacgacaagucccugcauucucguguguucccgagcgggaaaugucugggaaucacgauuuccucaacuuauugcaguaccaaccacgauuacacaaucuggaugcccgaaaaggccagacucggcacuagcugugacauauuuaccaauucuaaaggcaagaaggcuuccaaagggggaaagguaugcgguuucguugaugagaggggcuuauauaaaucacugaagggggcauguaaacuuaaguugugcggagugccuggccugcggcuaauggacgguacaugggucagcgugcaaaccccagaugaagccaaauggugucccccugaccagcucgugaaccugcacgacuuucauagugaugagauugagcaccuugucguugaggaacuggugaagaagcgcgaagagugcuuggacacgcucgaaucuaucaugacuacaaaauccgugagcuucagaaggcugucgcauuuacggaagcugguaccaggguuuggaaaggcuuacaccauuuucaauaaaacucucauggaggccgaugcgcacuauaaaucuguccacacauggaacgaggugauccccuccaagggcugccuuaagguuggcgggcgcugucauccgcacgugaauggagucuuccugaacgguaucauuuugggcccugacgggaaugugcuaauacccgaaaugcagucaagucugcuccagcaacauauggagcugcuugaaagcuccguaaucccacugaugcacccuuugucugaucccagcaccguuuuuaaagacggagaugaggcagaagacuucguggagguccaucucccagaugugcacaagcaggucucaggcguggacuuuggucugcccaacugggggcgauacguuuuaaugagugccggcgugcuggcuauucuaauccucacgauauuccugaugauuugcuguagaaggguaaaccggaaagauuccagccguucuucaccuggagagcuuggccgcaaggucagugugaccccacagaaugggaaaguuaucagcuccugggaaucuuauaagucggagggagaaacaagauuguga

SEQ ID NO: 159730 - RNA, 1575 nt, Artificial Sequence
  derived and/or modified CDS sequence (opt3) from glycoprotein__RABV__KM594031.1
augaucccccaggcccuccuguucgugcuucuguugauuagcuccucuugcuuuggcaaguucccugucuacaccauaccagacaaauuagggccguggucacccaucgauauucaccaucugaguuguccuaacaaucuaaucguugaggacgaaggaugcaacaaucucagcgguuuuuccuauauggagcugaaggugggcuacauuucugcuaucaaaguaaacggguucacauguacuggaguggucacggaagcagagaccuauacaaauuuugugggcuacguuacuaccacauucaagagaaaacacuuuaggccaacccccgaugccugccgggcggcuuauaacuggaagauggccggugacccucgcuacgaagagucgcuucauaauccauaucccgauuaccacuggcugcgaacugugaagacaaccaaagagucauugauaaucauuagcccuagugucgcagaccucgauccauacgacaagucccugcauucucguguguucccgagcgggaaaugucugggaaucacgauuuccucaacuuauugcaguaccaaccacgauuacacaaucuggaugcccgaaaaggccagacucggcacuagcugugacauauuuaccaauucuaaaggcaagaaggcuuccaaagggggaaagguaugcgguuucguugaugagaggggcuuauauaaaucacugaagggggcauguaaacuuaaguugugcggagugccuggccugcggcuaauggacgguacaugggucagcgugcaaaccccagaugaagccaaauggugucccccugaccagcucgugaaccugcacgacuuucauagugaugagauugagcaccuugucguugaggaacuggugaagaagcgcgaagagugcuuggacacgcucgaaucuaucaugacuacaaaauccgugagcuucagaaggcugucgcauuuacggaagcugguaccaggguuuggaaaggcuuacaccauuuucaauaaaacucucauggaggccgaugcgcacuauaaaucuguccacacauggaacgaggugauccccuccaagggcugccuuaagguuggcgggcgcugucauccgcacgugaauggagucuuccugaacgguaucauuuugggcccugacgggaaugugcuaauacccgaaaugcagucaagucugcuccagcaacauauggagcugcuugaaagcuccguaaucccacugaugcacccuuugucugaucccagcaccguuuuuaaagacggagaugaggcagaagacuucguggagguccaucucccagaugugcacaagcaggucucaggcguggacuuuggucugcccaacugggggcgauacguuuuaaugagugccggcgugcuggcuauucuaauccucacgauauuccugaugauuugcuguagaaggguaaaccggaaagauuccagccguucuucacuuggagaguugggccgcaaggucagugugaccccucagaaugggaaaguuaucagcuccugggaaucuuauaagucggagggagaaacaagacuguga

SEQ ID NO: 159731 - RNA, 1575 nt, Artificial Sequence
  derived and/or modified CDS sequence (opt3) from glycoprotein__RABV__KM594032.1
augaucccccaggcccugcuguucgugcuucuguugauuagcuccuuaugcucuggcaaguuuccuauauacaccaucccagacaaacuggggccguggucacccauugauauccaccaucuaaguuguccuaacaaucucauugucgaggacgaaggaugcagcucccugucugguuucucguauauggagcuuaagguuggcuacaucucagcuauaaaagugaacggguuuacauguacuggaguagugacggaagcagagaccuauacaaauuucgucggcuacgugacuaccacauuuaagagaaaacacuucaggccaaugcccgaugccugccgggcggcuuauaacuggaagauggccggugacccucgcuacgaagagagccugcauaauccauaucccgauuaccacugguugcgaaccguuaagacuacaaaagagagucucaucauuaucuccccuucuguggcagaccuggauccauacgacaagagccugcauucccgugucuuucccgggggaaaaugucucggcauuaccaucucaaguacguauugcagcacuaaccacgauuacaccauauggaugccggaagaaccuagauuaaggacaucuugugacauuuucacuaauuccaagggcaaacgggccucaaaagggggaaagaugugcgguuuuguggaugaacgcggccuguauaagagccuuaagggggcuuguaaauugaagcugugcggaguaccaggccuaagacucauggacgguaccuggguuagugugcaaacacccgaugagaccaaaugguguucuccugaccagcuggucaaccuucacgacuuccauuccgaugagaucgaacaccuggugguggaggaauuggucaagaaaagggaggaaugccucgacacgcuggagagcauuaugacuacaaagucgguuucuuuucggcgcuuaucccaucugcgaaagcucgugccaggguucggaaaagcauacaccaucuuuaauaagacucuuauggaggccgaugcucacuauaaaucaauccagacauggaacgaaguaauucccaguaagggcugccugaaagugggcgggagaugucacccgcaugucaauggaguguucuugaacgguauaauccuaggcccugacgggaauguucugauucccgagaugcagagcucccuccugcaacagcacauggaacuucuggagucuagcgugaucccauugaugcauccucucucagaucccaguaccgucuucaaggacggagaugaagccgaggacuuuguggagguacaccucccagauguucauaaacagguguccggcgucgacuucgguuuacccaacugggggagguacgugcugaugagcgcgggcgcacuagccauacucaugcugacgauuuuucuuaugaucugcugucggaaggucaagcguaccgauucuucacagaguagcuuggaggagcugcgcagaaaaguguccguuacaccucaaaauggaaaggugaucucuucgugggaaagcuauaaauccgagggcgaaacuaggcucuga

SEQ ID NO: 159732 - RNA, 1575 nt, Artificial Sequence
  derived and/or modified CDS sequence (opt3) from glycoprotein__RABV__KM594033.1
augaucccccaggcccugcuccuugugccucuggucauuagcuccuugugcuuaggcaaguucccaauauacaccaucccggacaaacuggggcccuggucuccuauugauauccaccaucuaucauguccaaacaaucucguuguggaggacgaaggaugcacaagucugagcgguuuuuccuauauggagcuuaagguaggcuacauuucugcuaucaaagugaacggguucacuuguacgggagucgugaccgaagcagagacauauacuaauuuuguuggcuacgugaccacaaccuucaagagaaaacacuuuaggcccaugucggaugccugccgggcggcuuauaacuggaaggucgccggugacccucgcuacgaagagucacugcaaaauccauaucccgauuaccauugguugcgaacugugaagacaaccaaagagagccucauaaucauuaguccuuccguagcagaccuggauccauacgacaagucucugcguagcagaaucuuccccgggggaaaaugucucggcauuacgguuuccucaacuuauugcaguaccaaccacgauuacacaaucuggaugccggaagaggccagguuaggcacuuauugugacauauuuaccaauagcaaggggaaacgggcuucuaagggagguaagauuugcggcuucguggaugaacgcgggcuguacaaaucccuuaagggagcauguagauugaaacugugcggcgucucaggucuaaggcucauggacgggacauggguggccauccagaccagcgaggagacgaagugguguccuagugaucagcuggugaaccuucaugacuuucacucugacgaaauugagcaccuggucguugaagaguuggugaaaaagcgggaagagugccucgauacucuggaguccaucaugacaaccaaaagcguaucguuccgccgauuaucucaucugagaaagcucgugccaggauuuggcaaggcuuauacuaucuucaauaaaacacuuauggaagccgacgcgcacuacaacuccgucaggaccuggaaugagauuauacccucaaagggcugccugaaaguugggggacggugucauccucacguggaugguguguuuuucaacggcaucauuuuggggccagacggaaauguccuaauccccgaaaugcagaguagccugcuccaacagcacauggagcugcuugaauccucugugauaccgcugaugcauccuuuggcagaucccagcacgguauucaaggagggcgacgaggccgaaaacuuuguugaggugcaccucccagauauucauaaacaggucucagguaucgaccugggguuaccuaauuggggcaaguaucugcuaaugagugcuggagcccucgcagcucugauccuuaccauuuucuugaucacaugcugucgucgcgugaacagaacugaauccauuaagaggggccccgaggaaagccggcgaaaagucucugugaccccacagaacgggaagguuauaucaaguugggagcuguacaaaaauggaggugagacaaagcucuga

SEQ ID NO: 159733 - RNA, 1575 nt, Artificial Sequence
  derived and/or modified CDS sequence (opt3) from glycoprotein__RABV__KM594034.1
augaucccccaggcccugcuccuugugccucuggucauuagcuccuugugcuuaggcaaguucccaauauacaccaucccggacaaacuggggcccuggucuccuauugauauccaccaucuaucauguccaaacaaucucguuguggaggacgaaggaugcacaagucugagcgguuuuuccuauauggagcuuaagguaggcuacauuucugcuaucaaagugaacggguucacuuguacgggagucgugaccgaagcagagacauauacuaauuuuguuggcuacgugaccacaaccuucaagagaaaacacuuuaggcccaugucgggugccugccgggcggcuuauaacuggaaggucgccggggauccucgcuacgaagagucacugcaaaauccauaucccgacuaccauugguugcgaacugugaagacaaccaaagagagccucauaaucauuaguccuuccguagcagaucuggacccauacgauaagucucugcguagcagaaucuucccgggaggcaaaugucucggcauuacgguuuccucaacuuauugcaguaccaaccacgacuacacaaucuggaugcccgaagaggccagguuagggacuagcugugauauauuuaccaauucuaagggaaaacgggcuuccaaggguggcaagauuugcggguucguggacgaacgcggacuguauaaaucacuuaagggcgcauguagauugaaacugugcggugucagcgggcuaaggcucauggauggaacauggguggccauccagaccagugaggagacgaagugguguccuucugaccagcuggugaaccuucaugauuuucacuccgacgaaauugagcaccuggucguugaagaguuggugaaaaagcgggaagagugccucgacacucuggagagcaucaugacaaccaaaucgguaucuuuccgccgauuaucccaucugagaaagcucgugccaggcuuuggcaaggcuuacacuaucuucaauaaaacacuuauggaagccgaugcgcacuauaacucagucaggaccuggaaugagauuauacccaguaaggggugccugcgggugggaggucguugucauccucacguugacggcguguuuuucaacgggaucauuuugggaccagauggcaauguccuaauccccgaaaugcagagcucccugcuccaacagcacauggagcugcuugaaucuagcgugauaccgcugaugcauccuuuggcagaccccucaacgguauucaaagagggugaugaggccgaaaacuuuguugaggugcaccucccagacauucauaagcaggucagugggaucgaucugggcuuaccuaauuggggaaaauaccugcuaauguccgcuggcgcccucgcagcucugauccuuaccauuuucuugaucacaugcugucgcagagugaacaggacugaaagcauuaagcaggggcccgaggaaucucggcgaaaggucucagugaccccacaaaacggaaaaguuauaaguagcugggagcuguauaagaaugguggcgagacaaaacucuga

SEQ ID NO: 159734 - RNA, 1575 nt, Artificial Sequence
  derived and/or modified CDS sequence (opt3) from glycoprotein__RABV__KM594035.1
augaucccccaggcccugcuccuugugccucuggucauuagcuccuugugcuuaggcaaguucccaauauacaccaucccggacaaacuggggcccuggucuccuauugauauccaccaucuaucauguccaaacaaucucguuguggaggacgaaggaugcacaagucugagcgguuuuuccuauauggagcuuaagguaggcuacauuucugcuaucaaagugaacggguucacuuguacgggagucgugaccgaagcagagacauauacuaauuuuguuggcuacgugaccacaaccuucaagagaaaacacuuuaggcccaugucggaugccugccgggcggcuuauaacuggaaggucgccggugacccucgcuacgaagagucacugcaaaauccauaucccgauuaccauugguugcgaacugugaagacaaccaaagagagccucauaaucauuaguccuuccguagcagaccuggauccauacgacaagucucugcguagcagaaucuuccccgggggaaaaugucucggcauuacgguuuccucaacuuauugcaguaccaaccacgauuacacaaucuggaugccggaagaggccagguuaggcacuagcugugacauauuuaccaauucuaaggggaaacgggcuuccaagggagguaagauuugcggcuucguggaugaacgcgggcuguauaaaucacuuaagggagcauguagauugaaacugugcggcgucagcggucuaaggcucauggacgggacauggguggccauccagaccagugaggagacgaagugguguccuucugaucagcuggugaaccuucaugacuuucacuccgacgaaauugagcaccuggucguugaagaguuggugaaaaagcgggaagagugccucgauacucuggagagcaucaugacaaccaaaucgguaucuuuccgccgauuaucccaucugagaaagcucgugccaggauuuggcaaggcuuacacuaucuucaauaaaacacuuauggaagccgacgcgcacuauaacucagucaggaccuggaaugagauuauacccaguaagggcugccugaaaguugggggacggugucauccucacguggaugguguguuuuucaacggcaucauuuuggggccagacggaaauguccuaauccccgaaaugcagagcucccugcuccaacagcacauggagcugcuugaaucuagcgugauaccgcugaugcauccuuuggcagaucccucaacgguauucaaggagggcgacgaggccgaaaacuuuguugaggugcaccucccagauauucauaaacaggucagugguaucgaccugggguuaccuaauuggggcaaguaccugcuaauguccgcuggagcccucgcagcucugauccuuaccauuuucuugaucacaugcugucgucgcgugaacagaacugaaagcauuaagaggggccccgaggaaucucggcgaaaagucucagugaccccacagaacgggaagguuauaaguagcugggagcuguauaaaaauggaggugagacaaagcucuga

SEQ ID NO: 159735 - RNA, 1575 nt, Artificial Sequence
  derived and/or modified CDS sequence (opt3) from glycoprotein__RABV__KM594036.1
augaucccccaggcccugcuccuugugccucuggucauuagcuccuugugcuuaggcaaguucccaauauacaccaucccggacaaacuggggcccuggucuccuauugauauccaccaucuaucauguccaaacaaucucguuguggaggacgaaggaugcacaagucugagcgguuuuuccuauauggagcuuaagguaggcuacauuucugcuaucaaagugaacggguucacuuguacgggagucgugaccgaagcagagacauauacuaauuuuguuggcuacgugaccacaaccuucaagagaaaacacuuuaggcccaugucggaugccugccgggcggcuuauaacuggaaggucgccggugacccucgcuacgaagagucacugcaaaauccauaucccgauuaccauugguugcgaacugugaagacaaccaaagagagccucauaaucauuaguccuuccguagcagaccuggauccauacgacaagucucugcguagcagaaucuuccccgggggaaaaugucucggcauuacgguuuccucaacuuauugcaguaccaaccacgauuacacaaucuggaugccggaagaggccagguuaggcacuagcugugacauauuuaccaauucuaaggggaaacgggcuuccaagggagguaagauuugcggcuucguggaugaacgcgggcuguauaaaucacuuaagggagcauguagauugaaacugugcggcgucagcggucuaaggcucauggacgggacauggguggccauccagaccagugaggagacgaagugguguccuucugaucagcuggugaaccuucaugacuuucacuccgacgaaauugagcaccuggucguugaagaguuggugaaaaagcgggaagagugccucgauacucuggagagcaucaugacaaccaaaucgguaucuuuccgccgauuaucccaucugagaaagcucgugccaggauuuggcaaggcuuacacuaucuucaauaaaacacuuauggaagccgacgcgcacuauaacucagucaggaccuggaaugagauuauacccaguaagggcugccugaaaguugggggacggugucauccucacguggaugguguguuuuucaacggcaucauuuuggggccagacggaaauguccuaauccccgaaaugcagagcucccugcuccaacagcacauggagcugcuugaaucuagcgugauaccgcugaugcauccuuuggcagaucccucaacgguauucaaggagggcgacgaggccgaaaacuuuguugaggugcaccucccagauauucauaaacaggucagugguaucgaccugggguuaccuaauuggggcaaguaccugcuaauguccgcuggagcccucgcagcucugauccuuaccauuuucuugaucacaugcugucgucgcgugaacagaacugaaagcauuaagcagggccccgaggaaucuaggcggaaagucucagugaccccacaaaacgggaagguuauaaguagcugggagcuguauaaaaauggaggugagacaaagcucuga

SEQ ID NO: 159736 - RNA, 1575 nt, Artificial Sequence
  derived and/or modified CDS sequence (opt3) from glycoprotein__RABV__KM594037.1
augauccugcaggcccuccuuuucgugccccuguugauuagcuccuuaugcuuuggcaaguucccuauauacaccaucccagacaaacuggggccguggucucccauugauauccaccaucuaucauguccuaacaaucucgucguugaggacgaaggaugcacaagucugagcgguuuuuccuauauggagcuuaaggugggcuacauuucugcuaucaaaguaaacggguucacuuguacgggaguggucaccgaagcagagacauauacuaauuuugugggcuacguuaccacaaccuucaagagaaaacacuuuaggccaacucccgaugccugccgggcggcuuauaacuggaagguggccggugacccucgcuacgaagagucgcugcaaaauccauaucccgauuaccauugguugcgaacagucaagaccacgaaagagucacucauaaucauuagcccuaguguggcagaccuggauccauacgacaagucccugcacucucguguauucccgagcgggaaaugucucggaaucacuauuuccucaaccuauugcaguacaaaccaugauuacacuaucuggaugcccgaagaggccagauuaggcaccagcugugacauauuuacaucuuccaagggcaaaaaggcuucaaaagggggaaagaccugcgguuucguugaugaaaggggccuguauaagagccuuaaaggggcauguaaguugaaacugugcggagugccuggccuacggcucauggacgguacgugggucacuauucagacaagugaugagaccaagugguguccacccgaccagcuggugaaucuucacgacuuucacucugaugagaucgaacaucugguggucgaggaauugguuaaaaagcgcgaggaaugccucgacgcccuggaguccauuaugacuacaaagagcgugucguucagaagguuaucucaucugcggaaacucguaccuggguuuggaaaggcuuacaccaucuucaacaaaacgcuuauggaggccgaugcgcacuauaaguccgugcgcaccuggaaugaaaucauuccaucaaaaggcugccugaaggucggcgggcgaugucacccccacguggacggaguuuucuuuaacgguauaaucuugggcccggaugggaaugugcuaauuccugagaugcagaguagccugcuccaacagcauauggaacugcuugaguccucugucaucccccugaugcacccauuggcagacccuagcacaguguucaaggauggagacgaagccgaggauuuuguagagguucaucuccccgacgugcacaaacagauaucaggcgucgaucuggguuuaccaaguugggggaaguaccugcuaaugauugcuggcgcccucgcaggacugauccuuaucauuuucuugauggcuugcuguagaagggccaaacggacugaaucccgucgcagaggcagcggggagucugaaaggaaggugcccgucccuccacagaacggaaaagugaucucaaguugggagcuguauaagagcgaaggugagaccggccucuga

SEQ ID NO: 159737 - RNA, 1575 nt, Artificial Sequence
  derived and/or modified CDS sequence (opt3) from glycoprotein__RABV__KM594038.1
augauccugcaggcccuccuuuucgugccccuguugauuagcuccuuaugcuuuggcaaguucccuauauacaccaucccagacaaacuggggccguggucucccauugauauccaccaucuaucauguccuaacaaucucgucguugaggacgaaggaugcacaagucugagcgguuuuuccuauauggagcuuaaggugggcuacauuucugcuaucaaaguaaacggguucacuuguacgggaguggucaccgaagcagagacauauacuaauuuugugggcuacguuaccacaaccuucaagagaaaacacuuuaggccaacucccgaugccugccgggcggcuuauaacuggaagguggccggugacccucgcuacgaagagucgcugcaaaauccauaucccgauuaccauugguugcgaacagucaagaccacgaaagagucacucauaaucauuagcccuaguguggcagaccuggauccauacgacaagucccugcacucucguguauucccgagcgggaaaugucucggaaucacuauuuccucaaccuauugcaguacaaaccaugauuacacuaucuggaugcccgaagaggccagauuaggcaccagcugugacauauuuacaucuuccaagggcaaaaaggcuucaaaagggggaaggaccugcgguuucguugaugaacggggccuguauaaaagccuuaagggggcauguaaauugaagcugugcggagugccuggccuacgccucauggacgguacgugggucacuauucagacaagugaugagaccaaaugguguccacccgaccagcuggugaaucuucacgacuuucacucugaugagaucgaacaucugguggucgaggaauugguuaagaaaagagaggaaugccucgacgcccuggaguccauuaugacuacaaagagcgugucguucaggcgguuaucucaucugcgcaagcucguaccuggguuuggaaaggcuuacaccaucuucaacaagacgcuuauggaggccgaugcgcacuauaaauccgugcgaaccuggaaugaaaucauuccaucaaagggcugccugaaagucggcgggagaugucacccccacguggacggaguuuucuuuaacgguauaaucuugggcccggaugggaaugugcuaauuccugagaugcagaguagccugcuccaacagcauauggaacugcuugaguccucugucaucccccugaugcacccauuggcagacccuagcacaguguucaaggauggagacgaagccgaggauuuuguagagguucaucuccccgacgugcacaagcagauaucaggcgucgaucuggguuuaccaaguugggggaaauaccugcuaaugauugcuggcgcccucgcaggacugauccuuaucauuuucuugauggcuugcuguaggcgggccaagcguacugaaucccgcagaaggggcagcggggagucugaacggaaagugcccgucccuccacagaacggaaaggugaucucaaguugggagcuguauaaaagcgaaggugagaccggccucuga

SEQ ID NO: 159738 - RNA, 1575 nt, Artificial Sequence; identical to SEQ ID NO: 158573
  derived and/or modified CDS sequence (opt3) from glycoprotein__RABV__KM594039.1

SEQ ID NO: 159739 - RNA, 1575 nt, Artificial Sequence; identical to SEQ ID NO: 158589
  derived and/or modified CDS sequence (opt3) from glycoprotein__RABV__KM594040.1

SEQ ID NO: 159740 - RNA, 1575 nt, Artificial Sequence
  derived and/or modified CDS sequence (opt3) from glycoprotein__RABV__KM594041.1
augauccugcaggcccuccuuuucgugccccuguugauuagcuccuuaugccugggcaaguuuccuauauacaccaucccagacaaacuagggccguggucucccauugauauccaccaucucucauguccuaacaaucuggucguugaggacgaaggaugcacaaaccuuagugguuucagcuauauggagcugaaggugggcuacauuuccgcuaucaaaguaaauggguuuacuuguacgggaguggucaccgaagcagagacauauacuaacuucgugggcuacguuaccacaaccuuuaagagaaaacacuucaggccaauacccgaugccugccgggcggcuuauaauuggaagauggccggugacccucgcuacgaagagucuuugcaaaacccauaucccgauuaccauuggcuccgaacugugaagacaaccaaagagucgcugaucauuaucucaccuagcgucgcagaccuggauccauacgacaagagucuccacucccguguguuucccgggggaaaauguuuaggcauuacgguaucuagcacuuauugcuccaccaaucaugauuacacaaucuggaugccggaagaaccuagacugggcacuucaugugacauauucaccaguagcaaggggaaaaaggccucuaagggagguaaaacaugcggcuuuguugaugaaagggggcuuuauaaguccuugaaaggagcuuguaagcugaaacuaugcggcgugcucggucugcggcuuauggacgggaccugggucucaauucagacgagcgaugacacuaagugguguccacccgaccagcuggugaacuugcacgauuuccacagugacgagaucgagcaucucguggucgaggagcugguuaaaaagcgcgaagagugcuuagaugcacuggaaucuauuaugacaaccaaguccgugagcuuuagaaggcucucguaccuucggaaacugguaccuggauucggcaaggccuauacuaucuuuaauaaaacauugauggaggcugacgcccacuacaagucugugcgcaccuggaacgagaucauuccauccaaaggcugccuaaagguccgagaaagaugucaucccccgguggaugggguuuucuucaauggaauaauccuggguccugacggcaacgugcucauucccgagaugcagucaagucugcuucaacagcacauggaacuguuggagagcuccgucaucccacucaugcacccucuggcggaucccucuacgguguuuaaggaaggggacgaggcagaggauuucguagaaguucauuuaccagacgugcacaaacagauaagcggagucgaucugggccuacccucaugggguaaguaucuccugaugauugccgggggccuugcuaccuuggugcugaucaucugcaguauggccuguugcaggcggacaaaacguacugagucccgcagaaggggaagccgggaaucugagaagaaagucaccgcagcuccucagacacgaaaggugguuucaaguugggaacucuacaagagcgagggcgacgcccgccuguga

SEQ ID NO: 159741 - RNA, 1575 nt, Artificial Sequence; identical to SEQ ID NO: 158589
  derived and/or modified CDS sequence (opt3) from glycoprotein__RABV__KM594042.1

SEQ ID NO: 159742 - RNA, 1575 nt, Artificial Sequence
  derived and/or modified CDS sequence (opt3) from glycoprotein__RABV__KM594043.1
augauccugcaggcccuccuuuucgugccccuguugauuagcuccuuaugccugggcaaguuuccuauauacaccaucccagacaaacuagggccguggucucccauugauauccaccaucucucauguccuaacaaucuggucguugaggacgaaggaugcacaaaccuuagugguuucagcuauauggagcugaaggugggcuacauuuccgcuaucaaaguaaauggguuuacuuguacgggaguggucaccgaagcagagacauauacuaacuucgugggcuacguuaccacaaccuuuaagagaaaacacuucaggccaauacccgaugccugccgggcggcuuauaauuggaagauggccggugacccucgcuacgaagagucuuugcaaaacccauaucccgauuaccauuggcuccgaacugugaagacaaccaaagagucgcugaucauuaucucaccuagcgucgcagaccuggauccauacgacaagagucuccacucccguguguuucccgggggaaaauguuuaggcacgacuguaucuagcaccuauugcuccacaaaucaugauuacacuauuuggaugccggaagaaccuagacugggcaccucaugugacaucuucacaaguagcaaggggaaaaaggccucuaagggagguaaaaccugcggcuuuguugaugaaagggggcuuuauaaguccuugaaaggagcuuguaagcugaaacuaugcggcgugcucggucugcggcuuauggacgggacgugggucucaauacagacuagcgaugacacaaagugguguccacccgaccagcuggugaacuugcacgauuuccacagugacgagauugagcaucucguggucgaggagcugguuaaaaagcgcgaagagugcuuagaugcacuggaaucuaucaugaccacuaaguccgugagcuuuagaaggcucucguaccuucggaaacugguaccuggauucggcaaggccuauacaauuuuuaauaaaaccuugauggaggcugacgcccacuacaagucugugcgcacguggaacgagaucaucccauccaaaggcugccuaaagguccgagaaagaugucaucccccgguggaugggguuuucuucaauggaauuauacuggguccugacggcaacgugcucauccccgagaugcagucaagucugcuucaacagcacauggaacuguuggagagcuccgucauuccacucaugcacccucuggcggaucccucuaccguguuuaaggaaggggacgaggcagaggauuucguagaaguucauuuaccagacgugcacaaacagaucagcggagucgaucugggccuacccucaugggguagguaucuccugaugauagccgggggccuugcuacauuggugcugauuaucugcaguauggccuguugccggcguacuaagcgcaccgaguccagaaggcgggacagccgagaaucugagaaaaaggucacagugacuccucagacccgcaaaguugugucaaguugggaacucuacaagagcgagggagacgcaucccuguga

SEQ ID NO: 159743 - RNA, 1575 nt, Artificial Sequence
  derived and/or modified CDS sequence (opt3) from glycoprotein__RABV__KP723638.1
auggugcugcagacccuccuuuucguccccuuucugguuuucagcuugugcuuuggcaaguucccuaucuacacaauuccagacaaauuagggccguggucccccauagauauccaccaucugucuuguccuaacaaucuagugguagaggacgaaggaugcacuaaccucucagguuuuaguuauauggagcugaaggugggcuacauuagcgccaucaaagucaauggguucacguguaccggagugguuacagaagcugagacuuauaccaacuuugugggcuacgucacaaccacuuucaagagaaaacacuuuaggccaacacccgaugcaugccgggccgcguauaauuggaagauggcuggugacccucgcuacgaagagucccuucauaacccauaucccgauuaccacuggcugcgaaccgugaagacgacuaaagagucuuugguaauuaucucgccuucaguugccgaccucgauccauacgacaagagccugcauagucguguguucccguccgggaaauguucuggaauaaccgucagcuccacauauugcucaacuaaucacgauuacaccaucuggaugcccgaaaacccuagacugggcacaaguugugacauuuuugcaaauagcaggggcaagcgggccucuaaaggguccaagaccugcggauucguggaugagcgcggucucuauaagucauuaaaaggcgcuuguaagcugaaacuuugcgggguguugggacugagacuaauggacggcacgugggucgcaaugcaaacuagcgaagagacaaagugguguccacccgaucagcucguuaaccugcacgacuuuaggagugacgagaucgaacaucuugugguagaggaacuggugaaaaagcgggaggaaugcuuggaugcccucgagucuauuaugaccacuaaauccgucagcuuccgccgacugucgcacuuaagaaagcuggugccugguuucgggaaggcuuacacaaucuuuaauaaaacccucauggaggccgacgcgcauuauaagucuguuaggacguggaacgaaauaauuccauccaaaggaugccuucgggugggcggccguugucacccccacgucaaugggguguucuuuaacggaaucauucuggguccggauggccauguauugaucccugagaugcagucaagucuacugcagcaacacauggaacuccuggagagcuccguuaucccccuuaugcauccacuggcagacccuucuaccguguucaaggauggggacgaagccgaggauuuugucgaggugcacuugcccgacguccauaaacaggugagcggaguugaucucggccugccaaauugggguaaguacguguuacugucagcugggacacuaauuguacucaugcugauaaucuuccuuaugacuugcugucgcagagucaacaggcccaagccuacccagcggaguuugggcggaacaggccgaaaaguguccguuacuagccagucugggaaggugauuucaaguugggaaagcuauaaauccggaucugagacccgccuguga

SEQ ID NO: 159744 - RNA, 1575 nt, Artificial Sequence
  derived and/or modified CDS sequence (opt3) from glycoprotein__RABV__KR105372.1
auggugccccagguccuccuguucguuccucuucugggcuuuagcuugugcuucgggaaguuuccaaucuacaccauuccggacgaguuaggacccugguccccuauagauauccaccaucugucuuguccaaacaaucuagugguagaagacgaggguugcacaaaccucucagaguucaguuauauggagcugaaagugggcuacauuagcgccaucaaggucaauggguuuacuuguacgggagugguuaccgaagcugagacauauacuaacuucgugggcuacgucaccacaaccuuuaaaagaaagcacuucaggcccacuccugaugcaugccgggccgcguauaauuggaaaauggcuggugacccacgcuacgaggaaucccuucauaaccccuauccugauuaccacuggcugcgaacagugcguaccacgaaggagucuuugauuaucauaucgccaucaguaacugaccucgauccguacgacaagagccugcauaguagaguuuuucccgggggaaaauguuccggcaucaccgugucuagcacauauugcuccacuaaucacgauuacaccauuuggaugccugaagacccaaggccccggacaccuugugauaucuucaccaacucacgcggcaagagagccaguaaagggaauaagacgugcggauuugucgacgagaggggucuguauaaaagccucaagggcgcaugucgguuaaagcugugcggggugcuuggauugcgccugauggauggcacuuggguggccaugcaaacaucugacgagaccaaaugguguccacccgaccagcuagucaaccuccacgauuuccauuccgacgaaauugagcaccugguuguggaagaacuuguaaagaaacgagaagagugccuggaugcuuuggagucaaucaugacuacaaagagcgugaguuuuagaaggcucucucaucugcggaaauuagucccggguuucgggaaggcauacaccauauucaauaaaacgcugauggaagccgacgcucacuauaaguccgugcguaccuggaacgagauuaucccuagcaagggaugccucaaaguuggcggccgcugucacccccaugugaauggggucuuuuucaacggaauuauccuugguccagauggccacgugcugaucccugaaaugcagucgucuuugcuacagcaacauauggagcugcucaaguccucaguaauuccccugaugcacccacuugccgaccccaguacaguuuuuaaagaaggggaugaggcggaggacuucguggaaguccaucugccugauguguacaagagaauaagcggagucgacuugggccucccaaauugggguaaauaugugcugaugacugcaggggccaugaucggcuuaguucugauuuuuagucuaaugaccuggugcaggcgggcuaaccgaccggagucuaagcagcgcagcuucggaggcacagggagaaacgugucaguaacuucccaguccggaaaggucauccccagcugggaaucuuacaaaucagguggcgagaccaggcucuga

SEQ ID NO: 159745 - RNA, 1575 nt, Artificial Sequence
  derived and/or modified CDS sequence (opt3) from glycoprotein__RABV__KR906734.1
auggugccccaggcccuucucuucgucccucuucugguuuuuccauugugcuucggcaaguuuccgaucuacaccauucccgacaaauuagggccuuggagcccaauagauauccaccaucuguccugucccaacaaucuagugguagaggacgaaggaugcacaaaccucucugguuucucauauauggagcugaaggugggcuacauuagugcuaucaaagucaauggguuuacuuguacgggagugguuaccgaagcagagacauauacuaacuucgugggcuacgucaccacaaccuuuaagagaaaacacuucaggccuauuccagaugccugccgggcggcuuauaauuggaagauggccggugacccccgcuacgaagagagccuucauaacccuuauccagauuaccacuggcugcgaacugugaagacaaccaaagaguccuugguaaucauaucuccgucgguugcagaccucgaucccuacgacaagucacugcauagccguguguuuccuagugggaaauguuccggaaucacggucucuagcacuuauugcuccaccaaucacgauuacacaauuuggaugccagaaaaccccagacugggcacuucaugugacaucuucaccaauaguaggggcaagcgggccagcaaagggggaaagacaugcgguuuuguggaugagcgcggccucuauaagucuuuaagaggggcuuguaaacugaagcugugcggaguguugggccugaggcuaauggacgguaccugggucgcaaugcaaacguccgaugaaacuaaaugguguccuccagaccagcucguuaacaugcacgacuuccggucagaugagauugagcaucuggugguagaggaacuugugaagaaacgcgaagagugccuggacgccuuggaaagcaucaugacaaccaagagugucucuuuucgaagacucucccaccugaggaaauuagugcccggguucggaaaggcuuacacuauauucaauaagacacugauggaggccgaugcgcauuauaaaagcguucggaccuggaacgagauuaucccgucgaagggcugccuccgugugggcgggcgcugucacccucacgucaauggaguguuuuucaacgguauuauccuuggccccgacgggcauguacugaucccagaaaugcagucuuccuugcuacagcaacacauggagcugcucgaaucaaguguuauuccucugaugcauccccuugcagauccaagcacgguguuuaaagagggagacgaagccgaggauuucgucgaggugcaucugcccgacguccacaaacagguguccggcguugauuugggucucccuaauugggggaaguacgugcuguuaucugcuggcacccugauagcccuaaugcucaucauuuuucugaugacaugcuguagaaggguaaaccggccagaaccgacucagcgaagccuuggaggcaccgggcgcaaggucucagugacaagucaguccggaaagguuaucagcucuugggagucauauaaaagugguggcgaaacuagauuguga

SEQ ID NO: 159746 - RNA, 1575 nt, Artificial Sequence
  derived and/or modified CDS sequence (opt3) from glycoprotein__RABV__KR906735.1
auggugccccagacccugcuguucgucccucuucugguuuuuagcuugugcuucggcaaguuuccaaucuacacaauuccggacaaauuagggcccugguccccuauagauauccaccaucugucuuguccaaacaaucuagugguagaggacgaaggaugcacuaaccucucagguuucaguuauauggagcugaaggugggcuacauuagcgccaucaaagucaauggguuuacguguaccggagugguuacagaagcugagacuuauaccaacuucgugggcuacgucacaaccacuuuuaagagaaaacacuucaggcccauuccugaugcaugccgggccgcguauaauuggaagauggcuggugacccacgcuacgaagagucccuucauaaccccuauccugauuaccacuggcugcgaacagugaagaccacgaaagagucuuugguaaucauaucgccaucaguugccgaccucgauccguacgacaagagccugcauagucguguguuucccuccgggaaauguucuggaaucacugucagcuccaccuauugcucaacaaaucacgauuacacuauuuggaugccugaaaacccaagacugggcaccaguuguaauaucuucacaaacagcaggggcaagcgggcaucuaaagggggaaagaccugcgguuuuguggacgagcgcggccucuauaaguccuuaaaaggggccuguaagcugaaacuuugcggaguguugggccugagacuaauggaugguacgugggucgcuaugcaaacuucagacgaaacaaaguggugucccccugaucagcucguuaauaugcacgacuucaggagcgacgagauugagcaucuggugguagaggaacuugugaaaaagcgggaagagugccuggaugcauuggaaaguaucaugaccacuaaaucugucuccuuucgccgacucagccaccugagaaaguuagugccaggguucggaaaggccuacacaauauucaacaaaacccugauggaggcugacgcccauuauaagucgguuaggacguggaaugagauuauccccucuaaaggcugccuccgggugggcgggcguugucacccgcacgucaacggaguguuuuucaaugguauuauccuuggcccugaugggcauguacugauccccgaaaugcaguccucauugcuacagcaacacauggagcugcucgaaaguagcguuauuccacugaugcauccucuugcggaccccuccaccguguuuaaggauggagacgaggcagaagauuucgucgaggugcaccucccagacguccauaaacaggugucuggcguugauuugggucuccccaacugggggaaguacgugcuguuaagcgccggcacacugauagcucuaaugcucaucauuuuucugaugacuugcugucgcagaguaaacaggccugagucaacccagcggagucuuggaggcacacgacgcaaggucuccgugacuagccagucugggaaaguuaucucaaguugggaaagcuauaaguccggaggugagaccagauuguga

SEQ ID NO: 159747 - RNA, 1575 nt, Artificial Sequence; identical to SEQ ID NO: 159746
  derived and/or modified CDS sequence (opt3) from glycoprotein__RABV__KR906736.1

SEQ ID NO: 159748 - RNA, 1575 nt, Artificial Sequence
  derived and/or modified CDS sequence (opt3) from glycoprotein__RABV__KR906737.1
auggugccccaggcccuucucuucgucccucuucugguuuuuccauugugcuucggcaaguuuccgaucuacaccauucccgacaaauuagggccuuggagcccaauagauauccaccaucuguccugucccaacaaucuagugguagaggacgaaggaugcacaaaccucucugguuucucauauauggagcugaaggugggcuacauuagugcuaucaaagucaauggguuuacuuguacgggagugguuaccgaagcagagacauauacuaacuucgugggcuacgucaccacaaccuuuaagagaaaacacuucaggccuauuccagaugccugccgggcggcuuauaauuggaagauggccggugacccccgcuacgaagagagccuucauaacccuuauccagauuaccacuggcugcgaacugugaagacaaccaaagaguccuugguaaucauaucuccgucgguugcagaccucgaucccuacgacaagucacugcauagccguguguuuacgagugggaaauguuccggaaucacugucucuagcaccuauugcuccacaaaucacgauuacacuauuuggaugccugaaaacccaagacugggcaccucauguaauaucuucgugaacaguaagggcaaaagggccagcaaagggggaaagacaugcgguuuuguggacgagcggggccucuauaaaucuuuaaagggggcuuguaaacugaagcugugcggagucuugggccugcgccuaauggaugguaccuggguugcaaugcaaacguccgacgaaacuaaaugguguucacccgaucagcucgugaauaugcacgacuucagaagcgacgagauugagcaucugguaguggaggaacuugucaagaaaagggaagagugccuggaugccuuggaaaguaucaugacaaccaagucuguguccuuucggcgccucagccaucugcgaaaguuaguuccuggguucggaaaggcuuacacuauauucaacaagacacugauggaggccgacgcgcacuauaaaucggugagaaccuggaaugagauuaucccaucuaagggcugccucagggucggcgggcggugucacccccacgugaacggaguauuuuucaaugguauuauccuuggcccggaugggcauguucugaucccugaaaugcaguccucauugcuacagcaacacauggagcugcucgaaaguagcgugauuccccugaugcauccacuugcagacccuuccacggucuuuaaagauggagacgaggccgaagauuucguggagguccaucugcccgacgugcacaagcagguuucuggcguggauuugggucucccaaacugggggaaguacguacuguuaagcgcuggcacccugauagcccuaaugcucaucauuuuucugaugacaugcugucgucgcgucaacagacccgagucaacucagaggagucuuggaggcaccgggcggaaaguguccguuacaagccagucuggaaaggugaucucaaguugggaaagcuauaaauccgguggcgagacucgauuguga

SEQ ID NO: 159749 - RNA, 1575 nt, Artificial Sequence; identical to SEQ ID NO: 159748
  derived and/or modified CDS sequence (opt3) from glycoprotein__RABV__KR906738.1

SEQ ID NO: 159750 - RNA, 1575 nt, Artificial Sequence
  derived and/or modified CDS sequence (opt3) from glycoprotein__RABV__KR906739.1
auggugccccaggcccugcuguucgucccucuucugguuuuuccauugugcuucggcaaguuuccgaucuacaccauucccgacaaauuagggccuuggagcccaauagauauccaccaucuguccugucccaacaaucuagugguagaggacgaaggaugcacaaaccucucugguuucucauauauggagcugaaggugggcuacauuagugcuaucaaagucaauggguuuacuuguacgggagugguuaccgaagcagagacauauacuaacuucgugggcuacgucaccacaaccuuuaagagaaaacacuucaggccuauuccagaugccugccgggcggcuuauaauuggaagauggccggugacccccgcuacgaagagagccuucauaacccuuauccagauuaccacuggcugcgaacugugaagacaaccaaagaguccuugguaaucauaucuccgucgguugcagaccucgaucccuacgacaagacgcugcauucacguguguuuccuagcgggaaauguaguggaaucacugucuccucuaccuauugcagcacaaaucacgauuacacuauuuggaugccagaaaaccccagacugggcaccuccugugacaucuucacaaauucaaggggcaagcgggccaguaaagggggaaagaccugcgguuuuguggaugagcgcggccucuauaagagcuuaaaaggggcuuguaagcugaaacuuugcggaguguugggccugagacuaauggacgguacgugggucgcaaugcaaacuucugaugaaacaaagugguguccuccagacaggcucguuaacaugcacgacuuccgguccgaugagauugagcaucuggugguagaggaacuugugaaaaagcgcgaagagugccuggacgccuuggaaucaaucaugaccacuaaaagcgucaguuuucgaagacucucucaccugaggaaguuagugcccggguucggaaaggcuuacacaauauucaauaaaacccugauggaggccgaugcgcauuauaaguccguucggacguggaacgagauuaucccgagcaaaggcugccuccgugugggcgggcgcugucacccucacgucaauggaguguuuuucaacgguauuauccuuggccccgacgggcauguacugaucccagaaaugcagucgucuuugcuacagcagcacauggagcugcucgaauccucaguuauuccucugaugcauccccuugcagauccaaguaccguguuuaaggacggagaugaggccgaagacuucgucgaggugcaccuccccgauguccauaaacaagugagcggcguugacuugggucucccuaauugggggaaguacgugcuguuauccgcuggcacacugauagcccuaaugcucaucauuuuucugaugacuugcuguagaaggguaaaccggccagagccgacccagcgaucucuuggaggcacagggcgcaaggucagcgugacuucacagaguggaaaaguuaucuccagcugggaaucuuauaagucagguggcgagaccaaauuguga

SEQ ID NO: 159751 - RNA, 1575 nt, Artificial Sequence
  derived and/or modified CDS sequence (opt3) from glycoprotein__RABV__KR906740.1
auggugccccaggccagacuguucgucccucuccuuguuuuuccacugugcuucggcaaguuuccgaucuacaccauucccgacaaauuggggccuuggagcccaauagauauccaccauuuauccugucccaacaaucuggugguagaggacgaaggaugcacaaaccuaucugguuucucauauauggagcucaaggugggcuacauuagugcuaucaaagucaauggguuuacuuguacgggagugguuaccgaagcagagacauauacuaacuucgugggcuacgucaccacaaccuuuaagaggaaacacuuccggccuauuccagaugccugccgcgcggcuuauaauuggaagauggccggugacccccgauacgaagagagccugcauaacccuuauccagauuaccacuggcuucguacugugaagacaaccaaagagucccugguaaucauaucuccgucgguugcagacuuggaucccuacgacagaucacuccauagcaggguguuuacugggggaaaguguaguggcaucacggucuccucuaccuauugcagcacaaaucacgauuacacuauuuggaugccugaaaacccacggcugggcaccuccuguaauaucuucgccaacucaaaagggaagcgcgcuaguaaaggagguaagacaugcggcuuuguggacgagagagggcuguauaagagccucaaaggagcauguaaguuaaaacugugcggcgugcuugguuugaggcugauggaugggaccugggucgccaugcaaacgucugacgaaacuaaguggugucccccugaucagcuaguuaauaugcacgacuuccgguccgacgagauugagcaucucgugguagaggaacuggugaaaaagcgcgaagagugccuugaugcucuggaaucaaucaugacaaccaaaagcgucaguuuucgaagauugucucaccucaggaagcuggugccaggauucggcaaggccuacacuauauucaacaaaacauuaauggaggcggacgcacauuauaaguccguucggaccuggaaugagauuauccccagcaaaggcugccugcgugucgggggacgcugucacccgcacgugaacgguguguuuuucaauggcauuauccucgggccugauggacauguacuuauccccgaaaugcagucgucucuguugcagcaacacauggagcuacuggaauccucaguuauuccacucaugcauccucuggccgaccccaguacgguguuuaaggauggcgacgaggcugaagauuucgucgaggugcaccuuccagacguccauaaacaggugagcgguguugaucugggguugcccaacuggggcaaguacgugcuccuguccgccggaaccuuaauagcacugaugcuaaucauuuuucucaugacaugcuguagaaggguaucucggccugagagcacucagcgaucacugggccgcaucgggagaaaggucagugugaccucccagagcggaaaaguuauaucuucaugggaaaguuauaagagcgguggcgagacaaggcuuuga

SEQ ID NO: 159752 - RNA, 1575 nt, Artificial Sequence
  derived and/or modified CDS sequence (opt3) from glycoprotein__RABV__KR906741.1
auggugccccaggcccugcuguucgucccucuucugguuuuuccauugugcuucggcaaguuuccgaucuacaccauucccgacaaauuagggccuuggagcccaauagauauccaccaucuguccugucccaacaaucuagugguagaggacgaaggaugcacaaaccucucugguuucucauauauggagcugaaggugggcuacauuagugcuaucaaagucaauggguuuacuuguacgggagugguuaccgaagcagagacauauacuaacuucgugggcuacgucaccacaaccuuuaagagaaaacacuucaggccuauuccagaugccugccgggcggcuuauaauuggaagauggccggugacccccgcuacgaagagagccuucauaacccuuauccagauuaccacuggcugcgaacugugaagacaaccaaagaguccuugguaaucauaucuccgucgguugcagaccucgaucccuacgacaagucacugcauagccguguguuuacgagugggaaauguuccggaaucacugucucuagcaccuauugcuccacaaaucacgauuacacuauuuggaugccugaaaacccaagacugggcaccucauguaauaucuucgccaacaguaagggcaaaagggcuagcaaagggggaaagacaugcgguuuuguggacgagcggggccucuauaagucuuuaaagggggcauguaaacugaagcugugcggaguguugggccugcgccuaauggaugguaccugggucgccaugcaaacguccgacgaaacuaaauggugucccccugaucagcucguuaauaugcacgacuucagaucagacgagauugagcaucuggugguagaggaacuugugaagaaaagggaagagugccuggaugcuuuggaaagcaucaugacaaccaagagugucucuuuucggcgccucucccaccuccgaaaguuagugccaggguucggaaaagccuacacuauauucaacaagacacugauggaggcggacgcacauuauaaaagcguuagaaccuggaaugagauuauccccucgaagggcugccucagggugggcgggcggugucacccgcacgucaacggaguguuuuucaaugguauuauccuuggcccugaugggcauguacugauccccgaaaugcagucuuccuugcuacagcaacacauggagcugcucgaaucaaguguuauuccacugaugcauccucuugccgaccccagcacgguguuuaaagauggagacgaggcugaagauuucgucgaggugcaccuuccagacguccauaaacagguguccggcguugauuugggucuccccaacugggggaaguacgugcuguuaucugccggcacccugauagcacuaaugcucauccuguuucuuaugacaugcugucgucgcguaaacagaccugagagcacucagaggucauugggaggcaccgggcggaaggucagugugacaucccagagcggaaagguuauuucuucaugggaaaguuauaaaagcgguggcgagacucgacuguga

SEQ ID NO: 159753 - RNA, 1575 nt, Artificial Sequence; identical to SEQ ID NO: 159540
  derived and/or modified CDS sequence (opt3) from glycoprotein__RABV__KR906742.1

SEQ ID NO: 159754 - RNA, 1575 nt, Artificial Sequence; identical to SEQ ID NO: 159745
  derived and/or modified CDS sequence (opt3) from glycoprotein__RABV__KR906743.1

SEQ ID NO: 159755 - RNA, 1575 nt, Artificial Sequence
  derived and/or modified CDS sequence (opt3) from glycoprotein__RABV__KR906744.1
auggugccccaggcccugcuguucgucccucuucugguuuuuccauugugcuucggcaaguuuccgaucuacaccauucccgacaaauuagggccuuggagcccaauagauauccaccaucuguccugucccaacaaucuagugguagaggacgaaggaugcacaaaccucucugguuucucauauauggagcugaaggugggcuacauuagugcuaucaaagucaauggguuuacuuguacgggagugguuaccgaagcagagacauauacuaacuucgugggcuacgucaccacaaccuuuaagagaaaacacuucaggccuauuccagaugccugccgggcggcuuauaauuggaagauggccggugacccccgcuacgaagagagccuucauaacccuuauccagauuaccacuggcugcgaacugugaagacaaccaaagaguccuugguaaucauaucuccgucgguugcagaccucgaucccuacgacaagacgcugcauucacguguguuuccuagcgggaaauguaguggaaucacugucuccucuaccuauugcagcacaaaucacgauuacacuauuuggaugccagaaaaccccagacugggcaccuccugugacaucuucacaaauucaaggggcaagcgggccaguaaagggggaaagaccugcgguuuuguggaugagcgcggccucuauaagagcuuaaaaggggcuuguaagcugaaacuuugcggaguguugggccugagacuaauggacgguacgugggucgcaaugcaaacuucugaugaaacaaagugguguccuccagaccagcucguuaacaugcacgacuucagguccgaugagauugagcaucuggugguagaggaacuugugaaaaagcgggaagagugccuggacgccuuggaaucaaucaugaccacuaaaagcgucaguuuucgccgacucucucaccugagaaaguuagugcccggguucggaaaggcuuacacaauauucaauaaaacccugauggaggccgaugcgcauuauaaguccguuaggacguggaacgagauuaucccgagcaaaggcugccuccgggugggcgggcguugucacccucacgucaauggaguguuuuucaacgguauuauccuuggccccgacgggcauguacugaucccagaaaugcagucgucuuugcuacagcaacacauggagcugcucgaauccucaguuauuccucugaugcauccccuugcagauccaaguaccguguuuaaggacggagaugaggccgaagacuucgucgaggugcaccuccccgauguccauaaacaggugagcggcguugacuugggucucccuaauugggggaaguacgugcuguuauccgcuggcacacugauagcccuaaugcucaucauuuuucugaugacuugcugucgcagaguaaacaggccagagccgacccagcggucucuuggaggcacagggcgaaaggucagcgugacuucacagaguggaaaaguuaucuccagcugggaaucuuauaagucagguggcgagaccaaauuguga

SEQ ID NO: 159756 - RNA, 1575 nt, Artificial Sequence; identical to SEQ ID NO: 159748
  derived and/or modified CDS sequence (opt3) from glycoprotein__RABV__KR906745.1

SEQ ID NO: 159757 - RNA, 1575 nt, Artificial Sequence
  derived and/or modified CDS sequence (opt3) from glycoprotein__RABV__KR906746.1
auggugccccaggcccugcuguucgucacccuucugguuuuuagcuugugcuucggcaaguuuccuaucuacacaauuccagacaaauuagggccguggucccccauagauauccaccaucugucuuguccuaacaaucuagugguagaggacgaaggaugcacuaaccucucagguuucaguuauauggagcugaaggugggcuacauuagcgcuaucaaagucaauggguuuacguguaccggagugguuacagaagcagagacuuauaccaacuucgugggcuacgucacaaccacuuuuaagagaaaacacuucaggccaauucccgaugccugccgggcggcuuauaauuggaagauggccggugacccucgcuacgaagagucccuucauaacccauaucccgauuaccacuggcugcgaacagugaagaccacgaaagagucuuugguaaucauaucgccuucaguugcagaccucgauccauacgacaagagccugcauagucguguguuucccgggggaaaauguuccggcaucacugucucuagcaccuucugcuccacaaaucacgauuauacuauuuggaugccggaaaacccuagacugggcaccucaugugacaucuuugccaauaguagggggaagcgggcuagcaaaggagguaagacaugcggcuucguggaugagcgcgggcucuacaagucuuuaaaaggagcauguaagcugaaacuuugcggcguguugggucugagacuaauggacgggaccugggucgccaugcaaacguccgaugaaacuaagugguguccacccgaccagcucguuaacaugcacgacuuuaggucagaugagauugagcaucuggugguagaggaacuugugaaaaagcgggaagagugccuggacgcuuuggaaagcaucaugacaaccaaaagugucucuuuccgccgacucucccaccugagaaaguuagugccuggauucggcaaggccuauacuauguuuaauaaaacacugauggaggcggaugcacauuacaagagcguuaggaccuggaacgagauaauuccaucgaaaggcugccuccgggucgggggacguugucacccccacgugaaugguguguucuuuaacggcaucauucuugggccggacggacauguacugaucccugaaaugcagucuuccuugcuacagcaacacauggagcugcucgaaucaaguguuaucccccugaugcauccacuugccgauccuagcacgguguucaaggacggcgaugaggcugaagacuuugucgaggugcaccuccccgauguccauaaacagguguccgguguugacuuggggcucccaaauuggggcaaguaugugcuguuaucugccggaacccugauugcacuaaugcucauaaucuuccugaugacaugcugucgcagaguaaacaggcccgagagcacugaucggucacuuggcgggaccggacgaaaggucagugugacaucccagagcgguaaaguuauuucuucaugggaaaguuacaagagcggcggggagacucgcuuguga

SEQ ID NO: 159758 - RNA, 1575 nt, Artificial Sequence; identical to SEQ ID NO: 159757
  derived and/or modified CDS sequence (opt3) from glycoprotein__RABV__KR906747.1

SEQ ID NO: 159759 - RNA, 1575 nt, Artificial Sequence
  derived and/or modified CDS sequence (opt3) from glycoprotein__RABV__KR906748.1
auggugccccaggcccuccuguucgucccucuucugguuuuuagcuugugcuucggcaaguuuccaaucuacaccauuccggacaaauuagggcccugguccccuauagauauccaccaucugucuuguccaaacaaucuagugguagaggacgaaggaugcacaaaccucucagguuucaguuauauggagcugaaggugggcuacauuagcgcuaucaaagucaauggguuuacuuguacgggagugguuaccgaagcagagacauauacuaacuucgugggcuacgucaccacaaccuuuaagagaaaacacuucaggcccauuccugaugccugccgggcgacuuauaauuggaagaucgcuggugacccacgcuacgaagagucccuucauaaccccuauccugauuaccacuggcugcgaacagugaagaccacgaaagagucuuugguaauaaucucgccaucaguugccgaccucgauccguacgacaagagccugcauagucguguguuucccuccgggaaauguucuggaauuacugucagcuccacccacugcucaacaaaucacgauuauacuaucuggaugccugaaaacccaagacugggcaccaguugugacauuuucacaaauagcaggggcaagcgggcaucuaaaggguccaagaccugcggauuuguggaugagcgcggucucuacaagucauuaaaaggcgccuguaagcugaaacuuugcgggguguugggacugagacuaauggacggcacgugggucgcuaugcaaacuagcgaugaaacaaaguggugucccccugaccagcucguuaaccugcaugacuucaggagugaugagaucgagcaccuugugguagaggaacuggugaaaaagcgggaagagugcuuggacgcacucgaaucuauaaugaccacuaaauccgucagcuuucgccgacugucgcauuuaagaaagcuggugccagguuucgggaaggccuauacaauuuucaauaaaacccucauggaggcugaugcccacuacaagucuguuaggacguggaacgagaucauucccuccaaaggaugccuucgggugggcggccguugucacccgccugucaaugggguguuuuucaacggaaucauccugggucccgacggccauguauugauuccagaaaugcagucaagucuacugcagcaacacauggagcuccuggaaagcuccguuauaccucuuaugcauccccuggcggauccaucugcaguguuuaaggacggggaugaggccgaagacuucgucgaggugcacuugcccgauguccauaaacaggugagcggaguugaccucggccugccuaauugggguaaguauguguuacugucagcugggacccuaaucgcccucaugcugauuaucuuucuuaugacaugcugucgcggcguaaacagaccagagaguaagcagugcuccuugggaggcacuaggcggaaagucagcgugaccucucagucagggaagguuauaaguagcugggaauccuacaaaucuggaggugagacacgacuguga

SEQ ID NO: 159760 - RNA, 1575 nt, Artificial Sequence
  derived and/or modified CDS sequence (opt3) from glycoprotein__RABV__KR906749.1
auggugccccaggaccuccuguucgucccucuucugguuuugccauuaugcuuuggcaaguucccgaucuacaccauucccgauaaacuggggccuuggagcccaauagacauccaccaucuauccugucccaacaaucucgugguagaggaugaaggaugcacaaaccugucugguuuuucauauauggagcuuaaggugggcuacauuagugccaucaaagucaauggguucacuuguacgggagugguuaccgaagcugagacauauacuaacuuugugggcuacgucaccacaaccuucaagagaaaacacuuuaggccuauuccagacgcaugccgggccgcguauaauuggaagauggcuggugauccccgcuacgaagagagccugcauaacccuuauccagacuaccacugguugcgaacugugaagacaaccaaagagucccucguaaucauaucuccgucgguugccgaucuggaccccuacgauaagucacugcauagccguguguucacgagugggaaauguuccggaaucacugucucuagcaccuauugcuccacaaaucacgacuacacuauuuggaugccugaaaacccaagacucggcaccucauguaauaucuuugcaaacaguaagggcaaaagggccagcaaagggggaaagacaugcgguuucguggaugagcggggcuuauauaaaucucugaagggggcuuguaaacuuaaguugugcggagugcugggccuacgccucauggacgguaccugggucgcaaugcaaacguccgaugaaacuaaauggugucccccugaccagcugguuaauaugcacgacuuuagaucagaugagauugagcaucuugugguagaggaacuggugaagaaaagggaagagugcuuggacgcccucgaaagcaucaugacaaccaagagugucucuuuccggcgccugucccacuuacgaaagcuggugccaggguuuggaaaggcuuacacuauauucaacaagacacucauggaggccgaugcgcauuauaaaagcguuagaaccuggaaugagauuauccccucgaagggcugccuuagggugggcgggcggugucacccgcacgucaacggaguguucuuuaaugguauuauccugggcccugacgggcauguauugauccccgaaaugcagucuucccuacugcagcaacacauggagcuccuggaaucaaguguuauuccacuuaugcauccucuggcagaucccagcacgguguucaaagacggagaugaggccgaagacuuugucgaggugcacuugccagauguccauaaacagguguccggcguugaccucggucugcccaacugggggaaguacguguuacugucugcuggcacccuaauagcccucaugcugaucauuuuccuuacaacuugcugucgucgcguaaacagaccugagagcacccagaggucauugggaggcacagggcggaaggucagugugacuucccagagcggaaagguuaucucuucaugggaaaguuauaaaagcgguggcgagacccgacuguga

SEQ ID NO: 159761 - RNA, 1575 nt, Artificial Sequence; identical to SEQ ID NO: 159540
  derived and/or modified CDS sequence (opt3) from glycoprotein__RABV__KR906750.1

SEQ ID NO: 159762 - RNA, 1575 nt, Artificial Sequence
  derived and/or modified CDS sequence (opt3) from glycoprotein__RABV__KR906751.1
auggugccccaggcccuucucuucgucacccuucugguuuuuagcuugugcuucggcaaguuuccuaucuacacaauuccagacaaauuagggccguggucccccauagauauccaccaucugucuuguccuaacaaucuagugguagaggacgaaggaugcacuaaccucucagguuucaguuauauggagcugaaggugggcuacauuagcgcuaucaaagucaauggguuuacguguaccggagugguuacagaagcagagacuuauaccaacuucgugggcuacgucacaaccacuuuuaagagaaaacacuucaggccaauucccgaugccugccgggcggcuuauaauuggaagauggccggugacccucgcuacgaagagucccuucauaacccauaucccgauuaccacuggcugcgaacagugaagaccacgaaagagucuuugguaaucauaucgccuucaguugcagaccucgauccauacgacaagagccugcauagucguguguuucccgggggaaaauguuccggcaucacugucucuagcaccuucugcuccacaaaucacgauuauacuauuuggaugccggaaaacccuagacugggcaccucaugugacaucuuugccaauaguaaggggaaaagggcuagcaagggagguaagacaugcggcuucguggaugagcgggggcucuacaaaucuuuaaagggagcauguaaacugaagcugugcggcguguugggucugcgccuaauggacgggaccugggucgccaugcaaacguccgaugaaacuaaaugguguccacccgaccagcucguuaacaugcacgacuuuagaucagaugagauugagcaucuggugguagaggaacuugugaagaaaagggaagagugccuggacgcuuuggaaagcaucaugacaaccaagagugucucuuuccggcgccucucccaucugcgaaaguuagugccuggauucggcaaagccuauacuauguuuaauaagacacugauggaggcggaugcacacuacaaaagcguuagaaccuggaacgagauaauuccaucgaagggcugccucagggucgggggacggugucacccccacgugaaugguguguucuuuaacggcaucauucuugggccggacggacauguacugaucccugaaaugcagucuuccuugcuacagcaacacauggagcugcucgaaucaaguguuaucccccugaugcauccacuugccgauccuagcacgguguucaaagacggcgaugaggcugaagacuuugucgaggugcaucugcccgauguccacaaacagguguccgguguugacuuggggcucccaaauuggggcaaguaugugcuguuaucugccggaacccugauugcacuaaugcucauaaucuuccugaugacaugcugucgucgcguaaacagacccgagagcacucacaggucacuuggccggaccgggcgaaaggucagugugacaucccagagcggaaagguuauuucuucaugggaaaguuacaaaagcgguggcgagacucgcuuguga

SEQ ID NO: 159763 - RNA, 1575 nt, Artificial Sequence; identical to SEQ ID NO: 159752
  derived and/or modified CDS sequence (opt3) from glycoprotein__RABV__KR906753.1

SEQ ID NO: 159764 - RNA, 1575 nt, Artificial Sequence
  derived and/or modified CDS sequence (opt3) from glycoprotein__RABV__KR906755.1
auggugccccaggcccuccuguucguccuucuguugguuuuuccuuuaugcuucggcaaguuuccaaucuacaccauuccggacaaacuggggcccuggagcccuauagauauccaccaucuauccuguccaaacaaucucgugguagaggacgaaggaugcacaaaccugucugguuucucauauauggagcuuaaggugggcuacauuagugcuaucaaagucaauggguuuacuuguacgggagugguuaccgaagcagagacauauacuaacuucgugggcuacgucaccacaaccuuuaagagaaaacacuucaggcccauuccugaugccugccgggcggcuuauaauuggaagauggccggugacccacgcuacgaagagagccugcauaaccccuauccugauuaccacugguugcgaacugugaagacaaccaaagagucccucguaaucauaucuccaucgguugcagaccuggauccguacgacaagucacugcauagccguguguuuacgagugggaaauguuccggaaucacugucucuagcaccuauugcuccacaaaucacgauuacacuauuuggaugcccgaaaacccuagacucggcaccucauguaauaucuucgugaacaguaagggcaaaagggccagcaaagggggaaagacaugcgguuuuguggacgagcggggcuuauauaaaucucugaagggggcuuguaaacuuaaguugugcggaguccugggccuacgccucauggaugguaccuggguugcaaugcaaacguccgacgaaacuaaaugguguucaccagaucagcuggugaauaugcacgacuucagaagcgacgagauugagcaucuuguaguggaggaacuggucaagaaaagggaagagugcuuggaugcccucgaaaguaucaugacaaccaagucuguguccuuucggcgccugagccacuuacgaaagcugguucccggguucggaaaggcuuacacuauauucaacaagacacucauggaggccgacgcgcauuauaaaucggugagaaccuggaaugagauuaucccuucuaagggcugccuuagggucggcgggcggugucacccacacgugaacggaguauuuuucaaugguauuauccugggccccgaugggcauguuuugaucccggaaaugcaguccucacuacugcagcaacacauggagcuccuggaaaguagcgugauuccucuuaugcauccccuggcagacccauccacggucuuuaaagauggagacgaggccgaagauuucguggagguccacuugccugacgugcauaagcagguuucuggcguggaucucggucugcccaacugggggaaguacguauuacugagcgcuggcacccuaauagcccucaugcugaucauuuuucuuaugacaugcugucgucgcgucaacagaccagagucaacucagaggaguuugggaggcaccgggcggaaaguguccguuacaagccagucuggaaaggugaucucaaguugggaaagcuauaaauccgguggcgagacucgacuguga

SEQ ID NO: 159765 - RNA, 1575 nt, Artificial Sequence
  derived and/or modified CDS sequence (opt3) from glycoprotein__RABV__KR906756.1
auggugccccaggcccuccuguucguccuucuguugguuuuuccuuuaugcuucggcaaguuuccaaucuacaccauuccggacaaacuggggcccuggagcccuauagauauccaccaucuauccuguccaaacaaucucgugguagaggacgaaggaugcacaaaccugucugguuucucauauauggagcuuaaggugggcuacauuagugcuaucaaagucaauggguuuacuuguacgggagugguuaccgaagcagagacauauacuaacuucgugggcuacgucaccacaaccuuuaagagaaaacacuucaggcccauuccugaugccugccgggcggcuuauaauuggaagauggccggugacccacgcuacgaagagagccugcauaaccccuauccugauuaccacugguugcgaacugugaagacaaccaaagagucccucaucauaaucucuccaucgguagcagaccuggauccguacgacaagucacugcauagccguguuuuuacgagugggaaauguuccggaauuacugugucuagcaccuauugcuccacaaaucacgauuacacuaucuggaugcccgaaaacccuagacucggcaccucauguaauauuuucgucaacaguaagggcaaaagggccagcaaagggggaaagacaugcgguuuuguggacgagcggggcuuauauaaaucucugaagggggcuuguaaacuuaaguugugcggagugcugggccuacgccucaucgaugguaccugggucgcaaugcaaacguccgacgaaacuaaaugguguucaccagaucagcugguuaauaugcacgacuucagaagcgacgagauagagcaucuugugguagaggaacuggugaagaaaagggaagagugcuuggaugcccucgaaaguauuaugacaaccaagucugucuccuuucggcgccugagccacuuacgaaagcuggugcccggguucggaaaggcuuacacuaucuucaacaagacacucauggaggccgacgcgcauuauaaaucgguuagaaccuggaaugagauuaucccuucuaagggcugccuuagggugggcgggcggugucacccacacgucaacggaguguuuuucaaugguaucauucugggccccgaugggcauguauugauaccggaaaugcaguccucacuacugcagcaacacauggagcuccuggaaaguagcguuaucccucuuaugcauccccuggcagacccauccacgguguuuaaagauggagacgaggccgaagauuucgucgaggugcacuugccugacguccauaaacaggugucuggcguugaucucggucugcccaacugggggaaguacguguuacugagcgcuggcacccuaauugcccucaugcugaucauauuucuuaugacaugcugucgucgcguaaacagaccagagucaacucagaggaguuugggaggcaccgggcggaaggucuccgugacaagccagucuggaaagguuauuucaaguugggaaagcuauaaauccgguggcgagacucgacuguga

SEQ ID NO: 159766 - RNA, 1575 nt, Artificial Sequence; identical to SEQ ID NO: 159765
  derived and/or modified CDS sequence (opt3) from glycoprotein__RABV__KR906760.1

SEQ ID NO: 159767 - RNA, 1575 nt, Artificial Sequence
  derived and/or modified CDS sequence (opt3) from glycoprotein__RABV__KR906762.1
auggugccccaggccagacuguucgucccucuccuuguuuuuccacugugcuucggcaaguuuccgaucuacaccauucccgacaaauuggggccuuggagcccaauagauauccaccauuuauccugucccaacaaucuggugguagaggacgaaggaugcacaaaccuaucugguuucucauauauggagcucaaggugggcuacauuagugcuaucaaagucaauggguuuacuuguacgggagugguuaccgaagcagagacauauacuaacuucgugggcuacgucaccacaaccuuuaagaggaaacacuuccggccuauuccagaugccugccgcgcggcuuauaauuggaagauggccggugacccccgauacgaagagagccugcauaacccuuauccagauuaccacuggcuucguacugugaagacaaccaaagagucccugguaaucauaucuccgucgguugcagacuuggaucccuacgacaagucacuccauagcagaguguuuacugggggaaaauguaguggcaucacggucuccucuaccuauugcagcacaaaucacgauuacacuauuuggaugccugaaaacccaaggcugggcaccuccuguaauaucuucgccaacucaaaggggaaacgggcuaguaagggagguaagacaugcggcuuuguggacgagcgcgggcuguauaaaagccucaagggagcauguaaauuaaagcugugcggcgugcuugguuugagacugauggaugggaccugggucgccaugcaaacgucugacgaaacuaaauggugucccccugaucagcuaguuaauaugcacgacuucagguccgacgagauugagcaucucgugguagaggaacuggugaagaaacgggaagagugccuugaugcucuggaaucaaucaugacaaccaagagcgucaguuuucgccgauugucucaccucagaaagcuggugccaggauucggcaaagccuacacuauauucaacaagacauuaauggaggcggacgcacauuauaaauccguuaggaccuggaaugagauuauccccagcaagggcugccugcgggucgggggacguugucacccgcacgugaacgguguguuuuucaauggcauuauccucgggccugauggacauguacuuauccccgaaaugcagucgucucuguugcagcaacacauggagcuacuggaauccucaguuauuccacucaugcauccucuggccgaccccaguacgguguuuaaagauggcgacgaggcugaagauuucgucgaggugcaccuuccagacguccauaaacaggugagcgguguugaucugggguugcccaacuggggcaaguacauacuccuguccgccggaaccuuaaucgcacugaugcuaauuaucuuucucaugacaugcugucgcagagugucuaggccugagagcacucagcggucacugggccgaaccgggcgcaagguaagugucacaucccagagcggaaaggugauaucuucaugggaaaguuauaaaagcgguggcgagacuagacuuuga

SEQ ID NO: 159768 - RNA, 1575 nt, Artificial Sequence; identical to SEQ ID NO: 159746
  derived and/or modified CDS sequence (opt3) from glycoprotein__RABV__KR906763.1

SEQ ID NO: 159769 - RNA, 1575 nt, Artificial Sequence
  derived and/or modified CDS sequence (opt3) from glycoprotein__RABV__KR906766.1
auggugccccagacccuucucuucgucccucuucugguuuuuagcuugugcuucggcaaguuuccaaucuacacaauuccggacaaauuagggcccugguccccuauagauauccaccaucugucuuguccaaacaaucuagugguagaggacgaaggaugcacuaaccucucagguuucaguuauauggagcugaaggugggcuacauuagcgccaucagagucaauggguuuacguguaccggagugguuacagaagcugagacuuauaccaacuucgugggcuacgucacaaccacuuuuaaaaggaagcacuuccggcccauuccugaugcaugccgcgccgcguauaauuggaaaauggcuggugacccacgauacgaagagucccuucauaaccccuauccugauuaccacuggcugcguacagugaagaccacgaaggagucuuugguaaucauaucgccaucaguugccgaccucgauccguacgacaaaagccugcauaguagaguguuucccuccgggaaguguucuggaaucacugucagcuccaccuauugcucaacaaaucacgauuacacuauuuggaugccugaaaacccaaggcugggcaccaguuguaauaucuucacaaacagccggggcaaacgcgcaucuaaagggggaaagaccugcgguuuuguggacgagagaggccucuauaaguccuuaaagggggccuguaaacugaagcugugcggaguguugggccugaggcuaauggaugguacgugggucgcuaugcaaacuucagacgaaacaaaauggugucccccugaucagcucguuaauaugcacgacuuccggagcgacgagauugagcaucuggugguagaggaacuugugaagaaacgcgaagagugccuggaugcauuggaaaguaucaugaccacuaagucugucuccuuucgaagacucagccaccugaggaaauuagugccaggguucggaaaggccuacacaauauucaacaagacccugauggaggcugacgcccauuauaaaucgguucggacguggaaugagauuauccccucuaagggcugccuccgugugggcgggcgcugucacccgcacgucaacggaguguuuuucaaugguauuauccuuggcccugaugggcauguacugauccccgaaaugcaguccucauugcuacagcaacacauggagcugcucgaaaguagcguuauuccacugaugcauccucuugcggaccccuccaccguguuuaaagauggagacgaggcagaagauuucgucgaggugcaucugccagacguccacaaacaggugucuggcguugauuugggucuccccaacugggggaaguacgugcuguuaagcgccggcacacugauagcucuaaugcucaucauuuuucugaugacuugcuguagaaggguaaaccggccugagucaacccagcgaagucuuggaggcacacgcagaaaggucuccgugacuagccagucugggaagguuaucucaaguugggaaagcuauaaauccggaggugagaccagguuguga

SEQ ID NO: 159770 - RNA, 1575 nt, Artificial Sequence
  derived and/or modified CDS sequence (opt3) from glycoprotein__RABV__KR906767.1
auggugccccaggcccugcuguucgucccucuucugguuuuuccauugugcuucggcaaguuuccgaucuacaccauucccgacaaauuagggccuuggagcccaauagauauccaccaucuguccugucccaacaaucuagugguagaggacgaaggaugcacaaaccucucugguuucucauauauggagcugaaggugggcuacauuagugcuaucaaagucaauggguuuacuuguacgggagugguuaccgaagcagagacauauacuaacuucgugggcuacgucaccacaaccuuuaagagaaaacacuucaggccuauuccagaugccugccgggcggcuuauaauuggaagauggccggugacccccgcuacgaagagagccuucauaacccuuauccagauuaccacuggcugcgaacugugaagacaaccaaagaguccuugguaaucauaucuccgucgguugcagaccucgaucccuacgacaagucacugcauagccguguguuuacgagugggaaauguuccggaaucacugucucuagcaccuauugcuccacaaaucacgauuacacuauuuggaugccugaaaacccaagacugggcaccucauguaauaucuucgccaacaguaagggcaaaagggcuagcaaagggggaaagacaugcgguuuuguggacgagcggggccucuauaagucuuuacgcggggcauguaagcugaaacuuugcggaguguugggccugagacuaauggaugguaccugggucgccaugcaaacguccgacgaaacuaaguggugucccccugaucagcucguuaauaugcacgacuucaggucagacgagauugagcaucuggugguagaggaacuugugaaaaagcgggaagagugccuggaugcuuuggaaagcaucaugacaaccaaaagugucucuuuucgccgacucucccaccugagaaaguuagugccaggguucggaaaggccuacacuauauucaacaaaacacugauggaggcggacgcacauuauaagagcguuaggaccuggaaugagauuauccccucgaaaggcugccuccgggugggcgggcguugucacccgcacgucaacggaguguuuuucaaugguauuauccuuggcccugaugggcauguacugauccccgaaaugcagucuuccuugcuacagcaacacauggagcugcucgaaucaaguguuauuccacugaugcauccucuugccgaccccagcacgguguuuaaggauggagacgaggcugaagauuucgucgaggugcaccucccagacguccauaaacagguguccggcguugauuugggucuccccaacugggggaaguacgugcuguuaucugccggcacccugauagcacuaaugcucaucauuuuucugaugacaugcugucgcagaguaagcaggccugagucaacucagcggagucuuggaggcaccgggcgaaaggucuccgugacaagccagucuggaaaaguuaucucaaguugggaaagcuauaaguccgguggcgagacucgcuuguga

SEQ ID NO: 159771 - RNA, 1575 nt, Artificial Sequence; identical to SEQ ID NO: 159540
  derived and/or modified CDS sequence (opt3) from glycoprotein__RABV__KR906768.1

SEQ ID NO: 159772 - RNA, 1575 nt, Artificial Sequence
  derived and/or modified CDS sequence (opt3) from glycoprotein__RABV__KR906769.1
auggugccccaggcccugcuguucgucccucuucugguuuuuccauugugcuucggcaaguuuccgaucuacaccauucccgacaaauuagggccuuggagcccaauagauauccaccaucuguccugucccaacaaucuagugguagaggacgaaggaugcacaaaccucucugguuucucauauauggagcugaaggugggcuacauuagugcuaucaaagucaauggguuuacuuguacgggagugguuaccgaagcagagacauauacuaacuucgugggcuacgucaccacaaccuuuaagagaaaacacuucaggccuauuccagaugccugccgggcggcuuauaauuggaagauggccggugacccccgcuacgaagagagccuucauaacccuuauccagauuaccacuggcugcgaacugugaagacaaccaaagaguccuugguaaucauaucuccgucgguugcagaccucgaucccuacgacaagucacugcauagccguguguuuccuagugggaaauguuccggaaucacggucucuagcacuuauugcuccaccaaucacgauuacacaauuuggaugccagaaaaccccagacugggcacuucauguaauaucuucgccaacaguaagggcaaaagggcuagcaaagggggaaagaccugcgguuuuguggacgagcggggccucuauaagucuuuaaagggggcauguaaacugaagcugugcggaguguugggccugcgccuaauggaugguacaugggucgccaugcaaaccuccgacgaaacgaaaugguguccuccagaucagcucguuaauaugcacgacuucagaucagacgagauugagcaucuggugguagaggaacuugugaagaaaagggaagagugccuggaugcuuuggaaagcaucaugacuacaaagagugucucuuuucggcgccucucccaccuccgaaaguuagugcccggguucggaaaagccuacaccauauucaacaagacucugauggaggcggacgcacauuauaaaagcguuagaacauggaaugagauuaucccgucgaagggcugccucagggugggcgggcggugucacccucacgucaacggaguguuuuucaaugguauuauccuuggccccgaugggcauguacugaucccagaaaugcagucuuccuugcuacagcaacacauggagcugcucgaaucaaguguuauuccucugaugcauccccuugccgacccaagcaccguguuuaaagauggagacgaggcugaagauuucgucgaggugcaccuucccgacguccauaaacagguguccggcguugauuugggucucccuaacugggggaaguacgugcuguuaucugccggcacgcugauagcacuaaugcucaucauuuuucugaugaccugcugucgucgcguaagcagaccagagucaacacagaggagucuuggacggacuggccgaaaggucuccgugaccagccagucugggaagguuaucucaaguugggaaagcuauaaauccggaggugagacacgcuuguga

SEQ ID NO: 159773 - RNA, 1575 nt, Artificial Sequence; identical to SEQ ID NO: 159745
  derived and/or modified CDS sequence (opt3) from glycoprotein__RABV__KR906770.1

SEQ ID NO: 159774 - RNA, 1575 nt, Artificial Sequence
  derived and/or modified CDS sequence (opt3) from glycoprotein__RABV__KR906771.1
auggugccccaggcccuccuguucguccuucuguugguuuuuccuuuaugcuucggcaaguuuccaaucuacaccauuccggacaaacuggggcccuggagcccuauagauauccaccaucuauccuguccaaacaaucucgugguagaggacgaaggaugcacaaaccugucugguuucucauauauggagcuuaaggugggcuacauuagugcuaucaaagucaauggguuuacuuguacgggagugguuaccgaagcagagacauauacuaacuucgugggcuacgucaccacaaccuuuaagagaaaacacuucaggcccauuccugaugccugccgggcggcuuauaauuggaagauggccggugacccacgcuacgaagagagccugcauaaccccuauccugauuaccacugguugcgaacugugaagacaaccaaagagucccucguaaucauaucuccaucgguugcagaccuggauccguacgacaagucacugcauagccguguguuuacgagugggaaauguuccggaaucacugucucuagcaccuauugcuccacaaaucacgauuacacuauuuggaugcccgaaaacccuagacucggcaccucauguaauaucuucgugaacaguaagggcaaaagggccagcaaagggggaaagacaugcgguuuuguggacgagcggggcuuauauaaaucucugaagggggcuuguaaacuuaaguugugcggaguccugggccuacgccucauggaugguaccuggguugcaaugcaaacguccgacgaaacuaaaugguguucaccagaucagcuggugaauaugcacgacuucagaagcgacgagauugagcaucuuguaguggaggaacuggucaagaaaagggaagagugcuuggaugcccucgaaaguaucaugacaaccaagucuguguccuuucggcgccugagccacuuacgaaagcugguucccggguucggaaaggcuuacacuauauucaacaagacacucauggaggccgacgcgcauuauaaaucggugagaaccuggaaugagauuaucccuucuaagggcugccuuagggucggcgggcggugucacccacacgugaacggaguauuuuucaaugguauuauccugggccccaacgggcauguuuugaucccggaaaugcaguccucacuacugcagcaacacauggagcuccuggaaaguagcgugauuccucuuaugcauccccuggcagauccauccacggucuuuaaagacggagaugaggccgaagacuucguggagguccacuugccugaugugcauaagcagguuucuggcguggaccucggucugcccaacugggggaaguacguauuacugagcgcuggcacccuaauagcccucaugcugaucauuuuucuuaugacaugcugucgucgcgucaauagaccagagucaacucagaggaguuugggaggcaccgggcggaaaguguccguuacaagccagucuggaaaggugaucucaaguugggaaagcuauaaauccgguggcgagacucgacuguga

SEQ ID NO: 159775 - RNA, 1575 nt, Artificial Sequence; identical to SEQ ID NO: 159748
  derived and/or modified CDS sequence (opt3) from glycoprotein__RABV__KR906773.1

SEQ ID NO: 159776 - RNA, 1575 nt, Artificial Sequence; identical to SEQ ID NO: 159745
  derived and/or modified CDS sequence (opt3) from glycoprotein__RABV__KR906776.1

SEQ ID NO: 159777 - RNA, 1575 nt, Artificial Sequence; identical to SEQ ID NO: 159748
  derived and/or modified CDS sequence (opt3) from glycoprotein__RABV__KR906778.1

SEQ ID NO: 159778 - RNA, 1575 nt, Artificial Sequence
  derived and/or modified CDS sequence (opt3) from glycoprotein__RABV__KR906779.1
auggugccccaggcccugcuguucgucccucuucugguuuuuccauugugcuucggcaaguuuccgaucuacaccauucccgacaaauuagggccuuggagcccaauagauauccaccaucuguccugucccaacaaucuagugguagaggacgaaggaugcacaaaccucucugguuucucauauauggagcugaaggugggcuacauuagugcuaucaaagucaauggguuuacuuguacgggagugguuaccgaagcagagacauauacuaacuucgugggcuacgucaccacaaccuuuaagagaaaacacuucaggccuauuccagaugccugccgggcggcuuauaauuggaagauggccggugacccccgcuacgaagagagccuucauaacccuuauccagauuaccacuggcugcgaacugugaagacaaccaaagaguccuugguaaucauaucuccgucgguugcagaccucgaucccuacgacaagucacugcauagccguguguuuccuagugggaaauguuccggaaucacggucucuagcacuuauugcuccaccaaucacgauuacacaauuuggaugccagaaaaccccagacugggcacuucaugugacaucuucaccaauaguaggggcaagcgggccagcaaagggggaaagacaugcgguuuuguggaugagcgcggccucuauaagucuuuaaaaggggcuuguaagcugaaacuuugcggaguguugggccugagacuaauggacgguaccugggucgcaaugcaaacguccgaugaaacuaagugguguccuccagaccagcucguuaacaugcacgacuucaggucagaugagauugagcaucuggugguagaggaacuugugaaaaagcgggaagagugccuggacgccuuggaaagcaucaugacaaccaaaagugucucuuuucgccgacucucccaccugagaaaguuagugcccggguucggaaaggcuuacacuauauucaauaaaacacugauggaggccgaugcgcauuauaagagcguuaggaccuggaacgagauuaucccgucgaaaggcugccuccgggugggcgggcguugucacccucacgucaauggaguguuuuucaacgguauuauccuuggccccgacgggcauguacugaucccagaaaugcagucuuccuugcuacagcaacacauggagcugcucgaaucaaguguuauuccucugaugcauccccuugcagauccaagcacgguguuuaaggacggagaugaggccgaagacuucgucgaggugcaccuccccgauguccauaaacagguguccggcguugacuugggucucccuaauugggggaaguacgugcuguuaucugcuggcacccugauagcccuaaugcucaucauuuuucugaugacaugcugucgcagaguaaacaggccagagagcacucagcggucacuuggaggcaccgggcgaaaggucagugugacaucccagagcggaaaaguuaucucuucaugggaaaguuauaagagcgguggcgagacucgcuuguga

SEQ ID NO: 159779 - RNA, 1575 nt, Artificial Sequence; identical to SEQ ID NO: 159748
  derived and/or modified CDS sequence (opt3) from glycoprotein__RABV__KR906780.1

SEQ ID NO: 159780 - RNA, 1575 nt, Artificial Sequence; identical to SEQ ID NO: 159748
  derived and/or modified CDS sequence (opt3) from glycoprotein__RABV__KR906781.1

SEQ ID NO: 159781 - RNA, 1575 nt, Artificial Sequence; identical to SEQ ID NO: 159764
  derived and/or modified CDS sequence (opt3) from glycoprotein__RABV__KR906782.1

SEQ ID NO: 159782 - RNA, 1575 nt, Artificial Sequence; identical to SEQ ID NO: 159745
  derived and/or modified CDS sequence (opt3) from glycoprotein__RABV__KR906784.1

SEQ ID NO: 159783 - RNA, 1575 nt, Artificial Sequence
  derived and/or modified CDS sequence (opt3) from glycoprotein__RABV__KR906785.1
auggugccccaggcccuucucuucgucccucuucugguuuuuccauugugcuucggcaaguuuccgaucuacaccauucccgacaaauuagggccuuggagcccaauagauauccaccaucuguccugucccaacaaucuagugguagaggacgaaggaugcacaaaccucucugguuucucauauauggagcugaaggugggcuacauuagugcuaucaaagucaauggguuuacuuguacgggagugguuaccgaagcagagacauauacuaacuucgugggcuacgucaccacaaccuuuaagagaaaacacuucaggccuauuccagaugccugccgggcggcuuauaauuggaagauggccggugacccccgcuacgaagagagccuucauaacccuuauccagauuaccacuggcugcgaacugugaagacaaccaaagaguccuugguaaucauaucuccgucgguugcagaccucgaucccuacgacaagucacugcauagccguguguuuccuagugggaaauguuccggaaucacggucucuagcacuuauugcuccaccaaucacgauuacacaauuuggaugccagaaaaccccagacugggcacuucaugugacaucuucaccaauaguaggggcaagcgggccagcaaagggggaaagacaugcgguuuuguggaugagcgcggccucuauaagucuuuaagaggggcuuguaaacugaagcugugcggaguguugggccugaggcuaauggacgguaccugggucgcaaugcaaacguccgaugaaacuaaaugguguccuccagaccagcucguuaacaugcacgacuuccggucagaugagauugagcaucuggugguagaggaacuugugaagaaacgcgaagagugccuggacgccuuggaaagcaucaugacaaccaagagugucucuuuucgaagacucucccaccugaggaaauuagugcccggguucggaaaggcuuacacuauauucaauaagacacugauggaggccgaugcgcauuauaaaagcguucggaccuggaacgagauuaucccgucgaagggcugccuccgugugggcgggcgcugucacccucacgucaauggaguguuuuucaacgguauuauccuuggccccgacgggcauguacugaucccagaaaugcagucuuccuugcuacagcaacacauggagcugcucgaaucaaguguuauuccucugaugcauccccuugcagauccaagcacgguguuuaaagagggagacgaagccgaggauuucgucgaggugcaucugcccgacguccacaaacagguguccggcguugauuugggucucccuaauugggggaaguacgugcuguuaucugcuggcacccugauagccagcaugcuaaucauuuuucucaugacaugcuguagaaggguaaaccggccagaaccgacucagcgaucacugggaggcaccgggcgcaaggucagugugacaucccagagcggaaagguuaucucuucaugggagaguuauaaaagcgguggcgaaacuagacuuuga

SEQ ID NO: 159784 - RNA, 1575 nt, Artificial Sequence
  derived and/or modified CDS sequence (opt3) from glycoprotein__RABV__KR906787.1
auggugccccaggcccuccuguucguccuucuguugguuuuuccuuuaugcuucggcaaguuuccaaucuacaccauuccggacaaacuggggcccuggagcccuauagauauccaccaucuauccuguccaaacaaucucgugguagaggacgaaggaugcacaaaccugucugguuucucauauauggagcuuaaggugggcuacauuagugcuaucaaagucaauggguuuacuuguacgggagugguuaccgaagcagagacauauacuaacuucgugggcuacgucaccacaaccuuuaagagaaaacacuucaggcccauuccugaugccugccgggcggcuuauaauuggaagauggccggugacccacgcuacgaagagagccugcauaaccccuauccugauuaccacugguugcgaacugugaagacaaccaaagagucccucguaaucauaucuccaucgguugcagaccuggauccguacgacaagucacugcauagccguguguuuacgagugggaaauguuccggaaucacugucucuagcaccuauugcuccacaaaucacgauuacacuauuuggaugcccgaaaacccuagacucggcaccucauguaauaucuucgugaacaguaagggcaaaagggccagcaaagggggaaagacaugcgguuuuguggacgagcggggcuuauauaaaucucugaagggggcuuguaaacuuaaguugugcggaguccugggccuacgccucauggaugguaccuggguugcaaugcaaacguccgacgaaacuaaaugguguucaccagaucagcuggugaauaugcacgacuucagaagcgacgagauugagcaucuuguaguggaggaacuggucaagaaaagggaagagugcuuggaugcccucgaaaguaucaugacaaccaagucuguguccuuucggcgccugagccacuuacgaaagcugguucccggguucggaaaggcuuacacuauauucaacaagacacucauggaggccgacgcgcauuauaaaucggugagaaccuggaaugagauuaucccuucuaagggcugccuuagggucggcgggcggugucacccacacgugaacggaguauuuuucaaugguauuauccugggccccgaugggcauguuuugaucccggaaaugcaguccucacuacugcagcaacacauggagcuccuggaaaguagcgugauuccucuuaugcauccccuggcagacccauccacggucuuuaaagauggagacgaggccgaagauuucguggagguccacuugccugacgugcauaagcagguuucuggcguggaucucggucugcccaacugggggaaguacguauuacugagcgcuggcacccuaauagcccucaugcugaucauuuuucuuaugacaugcugucgucgcgucaacagaccagagucaacucagaggaguuugcggggaaccggccgaaaaguguccguuacaagccagucugggaaggugaucucaaguugggaaagcuauaaauccggaggugagacucgccuguga

SEQ ID NO: 159785 - RNA, 1575 nt, Artificial Sequence
  derived and/or modified CDS sequence (opt3) from glycoprotein__RABV__KR906788.1
auggugccccaggcccuucucuucgucccucuucugguuuuuccauugugcuucggcaaguuuccgaucuacaccauucccgacaaauuagggccuuggagcccaauagauauccaccaucuguccugucccaacaaucuagugguagaggacgaaggaugcacaaaccucucugguuucucauauauggagcugaaggugggcuacauuagugcuaucaaagucaauggguuuacuuguacgggagugguuaccgaagcagagacauauacuaacuucgugggcuacgucaccacaaccuuuaagagaaaacacuucaggccuauuccagaugccugccgggcggcuuauaauuggaagauggccggugacccccgcuacgaagagagccuucauaacccuuauccagauuaccacuggcugcgaacugugaagacaaccaaagaguccuugguaaucauaucuccgucgguugcagaccucgaucccuacgacaagucacugcauagccguguguuuacgagugggaaauguuccggaaucacugucucuagcaccuauugcuccacaaaucacgauuacacuauuuggaugccugaaaacccaagacugggcaccucauguaauaucuucgugaacaguaagggcaaaagggccagcaaagggggaaagacaugcgguuuuguggacgagcggggccucuauaaaucuuuaaagggggcuuguaaacugaagcugugcggagucuugggccugcgccuaauggaugguaccuggguugcaaugcaaacguccgacgaaacuaaaugguguucacccgaucagcucgugaauaugcacgacuucagaagcgacgagauugagcaucugguaguggaggaacuugucaagaaaagggaagagugccuggaugccuuggaaaguaucaugacaaccaagucuguguccuuucggcgccucagccaucugcgaaaguuaguuccuggguucggaaaggcuuacacuauauucaacaagacacugauggaggccgacgcgcacuauaaaucggugagaaccuggaaugagauuaucccaucuaagggcugccucagggucggcgggcggugucacccccacgugaacggaguauuuuucaaugguauuauccuuggcccggaugggcauguucugaucccugaaaugcaguccucauugcuacagcaacacauggagcugcucgaaaguagcgugauuccccugaugcauccacuugcagacccuuccacggucuuuaaagauggagacgaggccgaagauuucguggagguccaucugcccgacgugcacaagcagguuucuggcguggauuugggucucccaaacugggggaaguacguacuguuaagcgcuggcacccugauagcccuaaugcucacaaucuuucugaugacuugcugucgucgcgucaacagacccgagucaacccagaggagucuuggaggcacagggcggaaaguguccguuacuagccagucuggaaaggugauuucaaguugggaaagcuauaaauccgguggcgagacccgauuguga

SEQ ID NO: 159786 - RNA, 1575 nt, Artificial Sequence; identical to SEQ ID NO: 159778
  derived and/or modified CDS sequence (opt3) from glycoprotein__RABV__KR906790.1

SEQ ID NO: 159787 - RNA, 1575 nt, Artificial Sequence; identical to SEQ ID NO: 159740
  derived and/or modified CDS sequence (opt3) from glycoprotein__RABV__KT023100.1

SEQ ID NO: 159788 - RNA, 1575 nt, Artificial Sequence
  derived and/or modified CDS sequence (opt3) from glycoprotein__RABV__KT221112.1
augaucccccaggcccuccuguucgugccucuucuggucuuuagcuugugcuucggcaaguuuccaauuuacaccauaccggacaaauuagggcccugguccccuaucgauauucaccaucugucuuguccaaacaaucuaguuguggaggacgaaggaugcacaaaccucucagguuucaguuauauggagcugaagguaggcuacaucagcgcuauuaaagugaauggguuuacuuguacgggagucgugaccgaagcagagacauauacuaacuucguuggcuacgugaccacaaccuuuaagagaaaacacuucaggcccacuccugaugccugccgggcggcuuauaauuggaagauggccggugacccacgcuacgaagagucccuuaacaaucccuauccugauuaccauuggcugcgaacagucaagaccacgaaagagucuuuggugguaaucucgccaucaguugcagaccucgauccguacgacaagagccugcacagucguguguuucccuccgggaaauguucuggaauaacugucagcucaaccugcuguuccacaaaccaugauuauacuaucuggaugccugaaaauccaagacugggcaccaguugcgacauuuucgugaacagcaggggcaagcgggccucuaaaggguccaagacauguggauuuguggaugagcgcggucucuacaagucauuaaaaggcgcuugcaagcugaaacuuuguggggucuugggacugagacuaauggacggcaccuggguugcaauccaaacgagcgaugaaacuaaguggugucccccugaccagcucgugaaucugcacgacuucaggagugaugagauugagcaccuuguaguggaggaacuggucaaaaagcgggaagagugcuuggacgcccucgaaucuaucaugacaaccaaauccgugagcuuucgccgacugucgcauuuaagaaagcugguuccagguuucgggaaggcuuauacuauauucaacaaaacacucauggaggccgaugcgcacuacaagucugugaggaccuggaaugagauuauccccuccaaaggaugccuucgggucggcggccguugccauccgcacgugaacgggguauuuuucaauggaauuauccuggguccugacggccacguuuugauccccgaaaugcagucaagucuacugcagcaacauauggagcuccuggaaagcuccgugauuccacuuaugcacccucuggcagaucccucuacgauauuuaaggacggggaugaggccgaagacuucgucgaggugcauuugccagauguccacaaacaggugagcggaguugaccucggccugcccaacugggguaaguauguguuaaugucagcuggggcccugaucgcacuaaugcucaugauuuuuaguaugaccuguugccgcaagacagauagaaucggcuccacucaucacggaccuggcgagaccgggaggaaaguaagcgucacaucucagaacggacgggugauagcuucaugggaaaguuacaagagcgguggcgagacuaaacuguga

SEQ ID NO: 159789 - RNA, 1575 nt, Artificial Sequence
  derived and/or modified CDS sequence (opt3) from glycoprotein__RABV__KT221113.1
augaucccccaggcccuucucuucgugccucuucuggucuuuagcuugugcuucggcaaguuuccaauuuacaccauaccggacaaauuagggcccugguccccuaucgauauucaccaucugucuuguccaaacaaucuaguuguggaggacgaaggaugcacaaaccucucagguuucaguuauauggagcugaagguaggcuacaucagcgcuauuaaagugaauggguuuacuuguacgggagucgugaccgaagcagagacauauacuaacuucguuggcuacgugaccacaaccuuuaagagaaaacacuucaggcccacuccugaugccugccgggcggcucauaauuggaagauggccggugacccacgcuaugaagagucccuucacaaccccuacccugauuaucauuggcugcgaacagucaagaccacgaaagagucuuuggugaucauaucgccaucaguagcagaccucgauccguacgacaagagccugcacagucguguuuuucccuccgggaaauguucuggaaucacugugagcuccaccuacugcucaacaaaucacgauuauacuauuuggaugccugaaaacccaagacugggcaccaguugugacaucuucgucaauagcaggggcaagcgggccucuaaaggguccaagacaugcggauuuguggaugagcgcggucucuacaagucauuaaaaggcgcuuguaagcugaaacuuugcgggguguugggacugagacuaauggacggcaccugggucgcaauucaaacgagcgaugaaacuaaguggugucccccugaccagcucguuaaccugcaugacuucaggagugaugagaucgagcaccuugugguagaggaacuggugaaaaagcgggaagagugcuuggacgcccucgaaucuauaaugacaaccaaauccgucagcuuucgccgacugucgcauuuaagaaagcuggugccagguuucgggaaggcuuauacuauuuucaauaaaacacucauggaggccgaugcgcacuacaagucuguuaggaccuggaacgagaucauucccuccaaaggaugccuucgggugggcggccguugucacccgcaugucaaugggguguuuuucaacggaaucauccuggguccugacggccacguauugauucccgaaaugcagucaagucuacugcagcaacauauggagcuccuggaaagcuccguuauaccacuuaugcacccucuggcagaucccucuacgaucuuuaaggacggggaugaggccgaagacuucguggagguccauuugccagaugugcaccgccaggucagcggaguggaccucggccugcccaauugggguaaauauguuuuaaugucagcuggggcccugguggcacuaaugcucaugauuuuucugaugaccugcuguguaaagacagauagaacuggcaguacccaccauuccccuggagagacaggcaggaaggucagcgugacuucucagaacgggcggguuaucgcuucaugggaaaguuacaaaagcggaggugagaccaagcuguga

SEQ ID NO: 159790 - RNA, 1575 nt, Artificial Sequence
  derived and/or modified CDS sequence (opt3) from glycoprotein__RABV__KT221114.1
augaucccccaggcccuucucuucgugccucuucuggucuuuagcuugugcuucggcaaguuuccaauuuacaccauaccggacaaauuagggcccugguccccuaucgauauucaccaucugucuuguccaaacaaucuaguuguggaggacgaaggaugcacaaaccucucagguuucaguuauauggagcugaagguaggcuacaucagcgcuauuaaagugaauggguuuacuuguacgggagucgugaccgaagcagagacauauacuaacuucguuggcuacgugaccacaaccuuuaagagaaaacacuucaggcccacuccugaugccugccgggcggcucauaauuggaagauggccggugacucccgcuaugaagagucucuucacaacccauaccccgauuaucauuggcugcgaacagucaagaccacgaaagagucguuggugaucauaucaccuagcguagcagaccucgauccauacgacaagagucugcacucccguguuuuuccgucugggaaauguagcggaaucacuguguccucaaccuacugcaguacaaaucacgauuauacuauuuggaugcccgaaaacccuagacugggcaccagcugugacaucuucgucaauucuaggggcaagcgggccuccaaagggucaaagacaugcggauuuguggaugagcgcggucucuacaagagcuuaaaaggcgcuuguaagcugaaacuuugcgggguguugggacugagacuaauggacggcaccugggucgcaauucaaacgagugaugaaacuaagugguguccacccgaccagcucguuaaccugcaugacuucaggucugaugagaucgagcaccuugugguagaggaacuggugaaaaagcgggaagagugcuuggacgcccucgaauccauaaugacaaccaaaagcgucucguuucgccgacugucucauuuaagaaagcuggugccugguuucgggaaggcuuauacuauuuucaauaaaacacucauggaggccgaugcgcacuacaaguccguuaggaccuggaacgagaucauuccaucaaaaggaugccuucgggugggcggccguugucacccccaugucaaugggguguuuuucaacggaaucauccuggguccggacggccacguauugauuccugaaaugcagaguagccuacugcagcaacauauggagcuccuggaauccucuguuauaccccuuaugcacccacuggcagauccuagcacgaucuuuaaggacggggaugaggccgaagacuucguggagguccauuugcccgaugugcaccgccaggucucaggaguggaccucggccugccaaauugggguaaauauguuuuaaugagugcuggggcccugguggcacuaaugcucaugauuuuucugaugaccugcuguguaaagacagauagaacuggcuccacccaccauagccccggagagacaggcaggaaggucucugugacuucacagaacgggcggguuaucgcuaguugggaaagcuacaaauccggaggugagaccaagcuguga

SEQ ID NO: 159791 - RNA, 1575 nt, Artificial Sequence; identical to SEQ ID NO: 159789
  derived and/or modified CDS sequence (opt3) from glycoprotein__RABV__KT221115.1

SEQ ID NO: 159792 - RNA, 1575 nt, Artificial Sequence
  derived and/or modified CDS sequence (opt3) from glycoprotein__RABV__KT221117.1
augaucccccaggcccuccuguucgugccucuucuggucuuuagcuugugcuucggcaaguuuccaauuuacaccauaccggacaaauuagggcccugguccccuaucgauauucaccaucugucuuguccaaacaaucuaguuguggaggacgaaggaugcacaaaccucucagguuucaguuauauggagcugaagguaggcuacaucagcgcuauuaaagugaauggguuuacuuguacgggagucgugaccgaagcagagacauauacuaacuucguuggcuacgugaccacaaccuuuaagagaaaacacuucaggcccacuccugaugccugccgggcggcuuauaauuggaagauggccggugacccacgcuacgaagagucccuucauaaccccuauccugauuaccacuggcugcgaacagucaagaccacgaaagagucuuuggugguaaucucgccaucaguugcagaccucgauccguacgacaagagccugcauagucguguguuucccuccgggaaauguucuggaauaacugucagcuccaccuauugcucaacaaaucacgauuacacuaucuggaugccugaaaacccaagacugggcaccaguugugacauuuucgugaauagcaggggcaagcgggccucuaaaggguccaagacaugcggauuuguggaugagcgcggucucuauaagucauuaaaaggcgcuuguaagcugaaacuuugcggggucuugggacugagacuaauggacggcaccuggguugcaauccaaacgagcgaugaaacuaaguggugucccccugaccagcucgugaaccugcacgacuucaggagugaugagauugagcaucuuguaguggaggaacuggucaaaaagcgggaagagugcuuggacgcccucgaaucuaucaugacaaccaaauccgugagcuuucgccgacugucgcacuuaagaaagcugguuccagguuucgggaaggcuuacacuauauucaauaaaacacucauggaggccgaugcgcauuauaagucugugaggaccuggaacgagauuauccccuccaaaggaugccuucgggucggcggccguugucacccgcacgugaaugggguauuuuucaacggaauuauccuggguccugacggccauguuuugauccccgaaaugcagucaagucuacugcagcaacacauggagcuccuggaaagcuccgugauuccacuuaugcauccucuggcagaucccucuacgauauuuaaggacggggaugaggccgaagacuucgucgaggugcacuugccagauguccauaaacaggugagcggaguugaccucggccugcccaauugggguaaguacguguuaaugucagcuggggcccugaucgcacuaaugcucaugguauuucugaugaccugcugucgcaagacagauagaacuggcaguacccaccacuccccuggagagacaggcaggaaagucagcgugacuucucagaacgaacggguuauugcuucaugggagaguuauaagagcgggggagaaaccaaacuuuga

SEQ ID NO: 159793 - RNA, 1575 nt, Artificial Sequence
  derived and/or modified CDS sequence (opt3) from glycoprotein__RABV__KT221118.1
auggugccccaggcccuucucuucgucccucuucuggcuguuccauugugcuuuggcaaguucccgaucuacaccauucccgacaaauuagggccuuggagcccaauagauauccaccaucuguccugucccaacaaucuagugguagaggacgaaggaugcacaaaccucucugguuuuucauauauggagcugaaggugggcuacauuagugcaaucaaagucaauggguucacuuguacgggagugguuaccgaagccgagacauauacuaacuuugugggcuacgucaccacaaccuucaagagaaaacacuuuaggccuacuccagaugcgugccggagcgcuuauaauuggaagauggccggugacccccgcuacgaagagucccuucauaacccuuauccagauuaccacuggcugcgaacagugaagaccacgaaagagucuuucguaauuaucucgccgucaguugcagacuuggaucccuacgacaagagccuccauagucguguguuuccuagagggaaauguuccggaauaacugucucuagcaccuauugcuccacaaaucacgauuacacuaucuggaugccagaaaaccccaggcugggcaccucaugugacauuuucacaaauagucggggcaagcgcgccagcaaagggucuaagaccugcggauuuguggaugagagaggucuguauaagucccucaaaggcgcuuguaaguuaaaacugugcggggugcuuggauugaggcugauggacggcacgugggucgcaauccaaacuucagaugaaacaaagugguguccuccagaccagcuaguuaaccuccacgacuuccauagcgaugagauugagcaccuggugguagaagugcuugucaaaaagcgggaggaaugccuggacgccuuggagaguaucaugaccacuaaaucuguguccuuucgccgacucagccaucugagaaaguuaguucccgguuucgggaaggcuuacacaauauucaauaaaacccugauggaagccgaugcgcacuauaagucggugaggacguggaacgagauuaucccgucuaaaggaugccuccgggucggcggccguugucacccucaugugaaugggguauuuuucaacggaauuauccuuggucccgacggccacguucugaucccagagaugcaguccucauugcuacagcaacauauggaacugcucgagaguagcgugauuccucugaugcacccccuugcagauccauccaccgucuuuaaggacggggaugaagccgaggacuucguggaaguccaucugcccgaugugcacaaacagguuucuggaguggacuugggccucccuagcugggguaaguacguacugaugucagcugggauauuaacagcccugaugcuaaugaucuuucucaugacuugcugucgcagaaccaauagggcagagaguauucagcacucccugggcgagacaggacggaaggucagcgugacuucucagaacggccgaguuaucucaaguugggaaagcuauaaauccgggggagagaccaagcuguga

SEQ ID NO: 159794 - RNA, 1575 nt, Artificial Sequence; identical to SEQ ID NO: 158875
  derived and/or modified CDS sequence (opt3) from glycoprotein__RABV__KT221120.1

SEQ ID NO: 159795 - RNA, 1575 nt, Artificial Sequence
  derived and/or modified CDS sequence (opt3) from glycoprotein__RABV__KT221122.1
augaucccccaggugcuccuguucgucccuuuucuuguuuucagcuccugcuuuggcaaguucccaauuuacaccauaccggacaaacuggggcccuggucuccuaucgauauucaccauuugucauguccaaacaauuuagugguagaggacgaaggaugcacaaaccugagugguuuuagcuauauggagcuaaaggugggcuacaucuccgccauuaaagucaauggguucacuuguacgggagugguuaccgaagcugagacauauacuaacuuugugggcuacgucaccacaaccuucaagagaaaacacuuuaggcccacuccugaugcaugccgggccgcguauaauuggaagauggcuggugacccacgcuacgaagagucucuccauaaccccuauccugauuaccacuggcugcgaacagugaagaccucgaaagagucacuuguaaucauaagcccaaguguugccgaccuggauccguacgacaaguccuugcauucucguguguuccccgggggaaaauguagcggcaucacggucuccucaacuugcuguaguaccaaucacgauuauacaauuuggaugccugaaaacccaagacucggcacuagcugcgacaucuuuaccaauucuagggggaagcgggcauccaaaggagguaagacauguggcuucguggaugagcgcgggcuguacaagucacugaaaggagccugcaagcucaaauuauguggcgugcugggucuuagauugauggacgggaccugggucgcuauucaaacgagcgaugaaaucaaguggugcagucccgaccagcugguuaaccuacacgacuuucauucugaugagauagagcaccucgugguagaggaacuggugaaaaagagggaagagugccuugacgcacuggaaacuauuaugacaaccaaauccgucagcuuccggcgcuugucgcaucuccgaaagcuggugccuggauucggcaaggccuauacuaucuuuaauaaaacauuaauggaggcugaugcccacuacaagucuauuagaaccuggaacgagaucaucccauccaaaggcugucugaggguugggggacggugccacccccaugugaauggugucuucuuuaacggcauuauacucgggccggacggacacgugcuuaucccugaaaugcagucaagucuguugcaucagcacauggagcuacuggaaagcuccguaauuccccucaugcauccacuggcggauccuucuacgguuuucaaggacggcgaugaggcagaagacuuuguggagguccaccuucccgaugugcacaaacaaaucagcggugucgaccugggguugccaaauuggggcaaguaugugcucguuucagccggagcucugaccgccuuaaugcugaugauauuccuaaugacauguugccguaagacuaaccgcgcagagaguauucagcauucccccggcgaaaccgggagaaaagugagcguaacaucucacaacggaagggucaucucaaguugggagagcuacaaguccgguggcgaaacuaaacucuga

SEQ ID NO: 159796 - RNA, 1575 nt, Artificial Sequence; identical to SEQ ID NO: 159004
  derived and/or modified CDS sequence (opt3) from glycoprotein__RABV__KT221125.1

SEQ ID NO: 159797 - RNA, 1575 nt, Artificial Sequence; identical to SEQ ID NO: 159004
  derived and/or modified CDS sequence (opt3) from glycoprotein__RABV__KT221126.1

SEQ ID NO: 159798 - RNA, 1575 nt, Artificial Sequence; identical to SEQ ID NO: 159223
  derived and/or modified CDS sequence (opt3) from glycoprotein__RABV__KT221127.1

SEQ ID NO: 159799 - RNA, 1575 nt, Artificial Sequence; identical to SEQ ID NO: 158894
  derived and/or modified CDS sequence (opt3) from glycoprotein__RABV__KT221128.1

SEQ ID NO: 159800 - RNA, 1575 nt, Artificial Sequence; identical to SEQ ID NO: 158894
  derived and/or modified CDS sequence (opt3) from glycoprotein__RABV__KT221129.1

SEQ ID NO: 159801 - RNA, 1575 nt, Artificial Sequence
  derived and/or modified CDS sequence (opt3) from glycoprotein__RABV__KT221130.1
auggugcccccuguccugcuguucguuccacuucuguuuuucagcuccugcuuuggcaaguucccgaucuaccccauuccugacaaauuggggccauggucucccauagauauccaccauuuaaccuguccuaacaaucuggugguagagaacgaaggaugcacaauucuaucagguuuuaguuauauggagcucaaggugggcuacaucagcccaauuaaagucaauggguucacuuguacgggagugguuaccaaggccaaaacauauacuaacuuugugggcuacgucaccacaaccuucaagaagaaacacuuucccccuaugccagacgcuugcaaggcagccuauaauuggaaaauggcgggugauccgagauacgaaaagucccugcauaaccccuauccugacuaccacuggcuucagacugugaaaacaaccaaggagucucugguaaucauaucgccaucaguugcuaauuuggaucccuacgacaagagccuccauaguaggguguucccugggggaaaauguuccggcaucacggucucuagcacuugcuguuccaccaaccacgauuauacaauuuggaugccagaaaaucccaagcugggcacuucaugcgacaucuuuaccaacagucgggggaaacgcgccagcaagggagguaaaacauguggcuucguggaugagcgagggcuguacaagucucucaaaggagcaugcaaguuaaagcuguguggcgugcuugguuugcgucugauggacgggaccugggucgccauucaaacguccgaugagaucaaauggugcucaccggaccagcuaguuaaucuccacgauuuucauagcgacgaaauagagcaccuggugguagaggaacuugugaagaaaagagaggaaugccuggacgcuuuggagacuauuaugacaaccaagagugucucuuucaggcggcucucccaucugcgcaaauuagugccuggauucggcaaggcauauacuaucuuuaacaagacacugauggaagccgaugcucacuacaaaagcauuagaaccuggaaugagaucauccccucgaagggcugucucaggguugggggacggugccacccacaugugaacggugucuucuuuaauggcauuauacuugggccugacggacacgugcugauccccgaaaugcagucuuccuugcuacaucagcacauggagcugcucgagucaaguguaauuccacugaugcauccccuugccgauccuagcacgguuuucaaagacggcgaugaagcggaggacuuuguggaaguccaccucccagaugugcacaagcaaaucuccggugucgacuuggggcucccgaacuggggcaaauaugugcugauaucugcaggagccuuaaccgcucugaugcuaaugauuuuccucaugacauguugccgcaaggccaaccgagcagagagcauccagcauaaucccggcgaaacugggagaaagguuucagugaccagucacaacggaaggguaaucuccagcugggagucuuacaaaucagguggcgagacaaagcuguga

SEQ ID NO: 159802 - RNA, 1575 nt, Artificial Sequence
  derived and/or modified CDS sequence (opt3) from glycoprotein__RABV__KT221132.1
augaucccccaggugcugcuguucguccaccuucugguuuuuagcuccugcuucggcaaguuuccuauuuacaccauaccagacaaauuggggccguggucucccaucgauauucaucacuuaucauguccuaacaaucuggugguagaggacgaaggaugcacaaaccuaagugguuucagcuauauggagcucaaggugggcuacaucuccgccauuaaagucaauggguuuacuuguacgggagugguuaccgaagcugagacauauacuaacuucgugggcuacgucaccacaaccuuuaagagaaaacauuucaggccaaugcccgaugcaugccgggccgcguauaauuggaagauggcuggugacccucgcuacgaagagucucugcacaacccauaucccgauuaccauuggcuucgaacugugaagacaaccaaagagucgcugguaaucauaucaccuagcguugccgacuuggauccauacgacaagagucuccacucccguguguuucccgggggaaaauguucuggcaucacggucagcuccacuugcuguucaaccaaucacgauuauacaauuuggaugccggaaaacccuagacugggcaccaguugcgacaucuucacuaauagcagggggaagcgggcaucuaaaggagguaagacauguggcuuuguggaugagcgcgggcuguacaagucccucaaaggagccugcaaguuaaaacuguguggcgugcuugguuugagacugauggacgggaccugggucgcuauucaaacgucagaugaaaucaaguggugcagcccagaccagcuaguuaaccuccaugacuuccacagugaugagauagagcaucuggugguagaggaacuugugaaaaagagggaagagugccuggacgcauuggaaacuauuaugacaaccaaaucugucuccuuucggcgccucagccaccuccgaaaguuagugcccggauucggcaaggccuauacuaucuucaauaaaacacugauggaggcugaugcccacuacaagucgauuagaaccuggaacgagaucaucccuucuaaaggcugucucaggguugggggacggugccauccacacgugaauggugucuuuuucaacggcauuauacuugggcccgacggacaugugcugaucccggaaaugcaguccucauugcuacaccagcauauggagcugcucgaaaguagcguaauuccucugaugcacccccuugcggauccauccacgguuuuuaaggacggcgaugaggcagaagacuucguggagguccaucugccugaugugcacaaacaaaucucuggugucgacuuggggcuccccaauuggggcaaguaugugcugauaagcgccggagcuuuaaccgcccugaugcuaacaauuuuucucaugacuuguugccguaagaccaaccgcgcaggcucaauccagcacaguccaggggagacaggaagaaaaguuuccgugacuagccauaacgguaggguaaucucuucaugggaaaguuacaagagcggcuccgagaccaaacuguga

SEQ ID NO: 159803 - RNA, 1575 nt, Artificial Sequence; identical to SEQ ID NO: 158875
  derived and/or modified CDS sequence (opt3) from glycoprotein__RABV__KT221133.1

SEQ ID NO: 159804 - RNA, 1575 nt, Artificial Sequence; identical to SEQ ID NO: 158875
  derived and/or modified CDS sequence (opt3) from glycoprotein__RABV__KT221134.1

SEQ ID NO: 159805 - RNA, 1575 nt, Artificial Sequence
  derived and/or modified CDS sequence (opt3) from glycoprotein__RABV__KT221136.1
auggugccccaggcccuccuguucgucccucuucuggcuaucccauugugcuuuggcaaguucccgauuuacaccauacccgacaaauuagggccuuggagcccaaucgauauucaccaucuguccugucccaacaaucuaguuguggaggacgaaggaugcacaaaccucucugguuuuucauauauggagcugaagguaggcuacaucagugcaauuaaagugaauggguucacuuguacgggagucgugaccgaagccgagacauauacuaacuuuguuggcuacgugaccacaaccuucaagagaaaacacuuuaggccuacuccagaugcgugccggagcgcuuauaauuggaagauggccggugacccccgcuacgaagagucccuucauaacccuuauccagauuaccacuggcugcgaacagucaagaccacgaaagagucuuucgugaucauaucgccgucaguagcagacuuggaucccuacgacaagagccuccauagucguguuuuuccuagagggaaauguuccggaaucacugugucuagcaccuauugcuccacaaaucacgauuacacuauuuggaugccagaaaaccccaggcugggcaccucaugugacaucuucacaaauagucggggcaagcgcgccagcaaagggucuaagaccugcggauuugucgaugagagaggucuguauaagucccucaaaggcgcuuguaaguuaaaacugugcggggugcuuggauugaggcugauggacggcacguggguggcaauucaaacuucagaugaaacaaagugguguccuccagaccagcuagucaaccuccacgacuuccauagcgaugagaucgagcaccugguuguggaggaacuuguaaagaagcgggaagagugccuggacgccuuggaaaguauaaugaccacuaaaucuguguccuuucgccgacucagccaucugagaaaguuaguccccgguuucgggaaggcuuacacaauuuucaauaaaacccugauggaggccgaugcgcacuauaagucggugaggacguggaacgagaucauuccgucuaaaggaugccuccggguuggcggccguugucacccucaugugaauggggucuuuuucaacggaaucauccuuggucccgacggccacgugcugauuccagaaaugcaguccucauugcuacagcaacauauggagcugcucgaaaguagcguaauaccucugaugcacccccuugcagauccauccaccguuuuuaaggacggggaugaggccgaagacuucguggagguccaucugcccgaugugcacaaacaggucucuggaguggacuugggccucccuagcugggguaaguacguucugaugucagcugggaucuuaacagcccugaugcuaaugauuuuucucaugacuugcugucgcagaaccaauagggcagagaguauccagcggucccugggcgaaacaggacgaaaggugagcguaacuucucagucaggccgcgucauaaguagcugggaguccuauaaaucugggggagaaaccaaacuuuga

SEQ ID NO: 159806 - RNA, 1575 nt, Artificial Sequence; identical to SEQ ID NO: 159004
  derived and/or modified CDS sequence (opt3) from glycoprotein__RABV__KT221138.1

SEQ ID NO: 159807 - RNA, 1575 nt, Artificial Sequence
  derived and/or modified CDS sequence (opt3) from glycoprotein__RABV__KT221139.1
augaucccccaggugcugcuguucgucacccuucugguuuuuagcuccugcuucggcaaguuuccuauuuacacaauaccagacaaauuggggccguggucucccaucgauauucaccauuuaucauguccuaacaaucuggugguagaggacgaaggaugcacuaaccuaagugguuucagcuauauggagcucaaggugggcuacaucuccgccauuaaagucaauggguuuacguguaccggagugguuacagaagcugagacuuauaccaacuucgugggcuacgucacaaccacuuuuaagagaaaacacuucaggccaaugcccgaugcaugccgggccgcguauaauuggaagauggcuggugacccucgcuacgaagagucucugcauaacccauaucccgauuaccacuggcuucgaacagugaagaccacgaaagagucgcugguaaucauaucaccuagcguugccgacuuggauccauacgacaagagucuccauucccguguguuucccgggggaaaauguucuggcaucacugucagcucaaccugcuguuccacaaaucacgauuauacuauuuggaugccggaaaacccuagacugggcaccaguugcgacaucuucacaaauagcagggggaagcgggcaucuaaaggagguaagaccuguggcuuuguggaugagcgcgggcuguacaagucccucaaaggagccugcaaguuaaaacuguguggcgugcuugguuugagacugauggacgggacgugggucgcuauucaaacuucagaugaaaucaaguggugcccacccgaccagcuaguuaaccuccacgacuuccauagcgaugagauagagcaccuggugguagaggaacuugugaaaaagagggaagagugccuggacgcauuggaaacaauuaugaccacuaaaagugucucuuuucggcgccucucccaucugcgaaaguuagugccuggauucggcaaggccuauacaaucuucaauaaaacccugauggaggcugaugcccacuacaagagcauuagaacguggaacgagaucaucccaucgaaaggcugucucaggguugggggacggugccacccccaugugaauggugucuuuuucaacggcauuauacuugggccggacggacacgugcugaucccugaaaugcagucuuccuugcuacaucagcacauggagcugcucgaaucaaguguaauuccccugaugcauccacuugcggauccuagcaccguuuuuaaggacggcgaugaggcagaagacuucguggagguccaccuccccgaugugcacaaacaaaucuccggugucgacuuggggcucccaaauuggggcaaguaugugcugauaucugccggagcuuuaacagcccugaugcuaacuauuuuucucaugaccuguugccguaagacaaacggcgcagggagcauccagcauucacccggagagacuggucgcaaaguuagugugaccucccacaacggcagaguaaucagcucuugggaaucauacaagagugggagcgagacaaaacuguga

SEQ ID NO: 159808 - RNA, 1575 nt, Artificial Sequence; identical to SEQ ID NO: 159807
  derived and/or modified CDS sequence (opt3) from glycoprotein__RABV__KT221140.1

SEQ ID NO: 159809 - RNA, 1575 nt, Artificial Sequence
  derived and/or modified CDS sequence (opt3) from glycoprotein__RABV__KT276368.1
augauccugcaggcccuccuuuucgugccccuguugauuagcuccuuaugccugggcaaguuuccuauauacaccaucccagacaaacuagggccguggucucccauugauauccaccaucucucauguccuaacaaucuggucguugaggacgaaggaugcacaaaccuuagugguuucagcuauauggagcugaaggugggcuacauuuccgcuaucaaaguaaauggguuuacuuguacgggaguggucaccgaagcagagacauauacuaacuucgugggcuacguuaccacaaccuuuaagagaaaacacuucaggccaauacccgaugccugccgggcggcuuauaauuggaagauggccggugacccucgcuacgaagagucuuugcaaaacccauaucccgauuaccauuggcuccgaacugugaagacaaccaaagagucgcugaucauuaucucaccuagcgucgcagaccuggauccauacgacaagagucuccacucccguguguuucccgggggaaaauguuuaggcauuacgguaucuagcacuuauugcuccaccaaucaugauuacacaaucuggaugccggaagaaccuagacugggcacuucaugugacauauucaccaguagcaaggggaaaaaggccucuaagggagguaaaacaugcggcuuuguugaugaaagggggcuuuauaaguccuugaaaggagcuuguaagcugaaacuaugcggcgugcucggucugcggcuuauggacgggaccugggucucaauucagacgagcgaugacacuaagugguguccacccgaccagcuggugaacuugcacgauuuccacagugacgagaucgagcaucucguggucgaggagcugguuaaaaagcgcgaagagugcuuagaugcacuggaaucuauuaugacaaccaaguccgugagcuuuagaaggcucucguaccuucggaaacugguaccuggauucggcaaggccuauacuaucuuuaauaaaacauugauggaggcugacgcccacuacaagucugugcgcaccuggaacgagaucauuccauccaaaggcugccuaaagguccgagaaagaugucaucccccgguggaugggguuuucuucaauggaauaauccuggguccugacggcaacgugcucauucccgagaugcagucaagucugcuucaacagcacauggaacuguuggagagcuccgucaucccacucaugcacccucuggcggaucccucuacgguguuuaaggaaggggacgaggcagaggauuucguagaaguucauuuaccagacgugcacaaacagauaagcggagucgaucugggccuacccucaugggguaaguaucuccugaugauugccgggggccuugcuaccuuggugcugaucaucugcaguauggccuguugcaggcggacaaaacagacugagucccgucgcagaggaagcagggaaucugagaagaaagucaccgcagcuccucaaacacggaaggugguuucaaguugggaacucuacaagagcgagggcgacgcccgacuguga

SEQ ID NO: 159810 - RNA, 1575 nt, Artificial Sequence
  derived and/or modified CDS sequence (opt3) from glycoprotein__RABV__KT336432.1
auggugccccaggcccuucucuucgucccucuucugguuuuuccauugugcuucggcaaguuuccgaucuacaccauucccgacaaauuagggccuuggagcccaauagauauccaccaucuguccugucccaacaaucuagugguagaggacgaaggaugcacaaaccucucugguuucucauauauggagcugaaggugggcuacauuagugcuaucaaagucaauggguuuacuuguacgggagugguuaccgaagcagagacauauacuaacuucgugggcuacgucaccacaaccuuuaagagaaaacacuucaggccucuuccagaugccugccgggcggcuuauaauuggaagauggccggugacccccgcuacgaagagagccugcauaacccuuauccagauuaccacugguugcgaacugugaagacaaccaaagagucccucguaauuaucucuccgucgguugcagaccuggaucccuacgacaagucacugcauagccguguguuuccuagugggaaauguuccggaauaacggucucuagcacuuucugcuccaccaaucacgauuauacaaucuggaugccagaaaaccccagacucggcacuucaugugacauuuuugccaauaguaggggcaagcgggcuagcaaagggggaaagaccugcgguuucguggaugagcgcggcuuauacaagucucugaaaggggcauguaagcugaaauugugcggagugcugggccuaagacucauggacgguacaugggucgccauccaaaccuccgaugaaacgaagugguguccuccagaccagcugguuaacaugcacgacuuuaggucagaugagauugagcaucuugugguagaggaacuggugaaaaagcgggaagagugcuuggacgcucucgaaagcaucaugacuacaaaaagugucucuuuccgccgacugucccacuuaagaaagcuggugcccggguucggaaaggccuauaccauauuuaauaaaacucucauggaggcggaugcacauuacaagagcguuaggacauggaacgagauuaucccgucgaaaggcugccuucgggugggcgggcguugucacccucacgucaauggaguguucuuuaacgguauuauccugggccccgacgggcauguauugaucccagaaaugcagucuucccuacugcagcaacacauggagcuccuggaaucaaguguuauuccucuuaugcauccccuggccgauccaagcaccguguucaaggacggagaugaggcugaagacuuugucgaggugcacuugcccgauguccauaaacagguguccggcguugaccucggucugccuaauugggggaaguauguguuacugucugccggcacgcuaauagcacucaugcugaucaccuuccuuaugacaugcugucgcagaguaaacaggccagagagcacuaagcggucauugggaggcaccgggcgaaaagucagugugacaucccagagcggaaagguuauuucuucaugggaaaguuacaaaagcgguggcgagacucgccuguga

SEQ ID NO: 159811 - RNA, 1575 nt, Artificial Sequence
  derived and/or modified CDS sequence (opt3) from glycoprotein__RABV__KT336433.1
auggugccccaggcccuccuguucgucccucuucugguuuuuagcuugugcuucggcaaguuuccaaucuacaccauuccggacaaauuagggcccugguccccuauagauauccaccaucugucuuguccaaacaaucuagugguagaggacgaaggaugcacaaaccucucagguuucaguuauauggagcugaaggugggcuacauuagcgcuaucaaagucaauggguuuacuuguacgggagugguuaccgaagcagagacauauacuaacuucgugggcuacgucaccacaaccuuuaagagaaaacacuucaggcccauuccugaugccugccgggcggcuuauaauuggaagauggccggugacccacgcuacgaagagucccuucauaaccccuauccugauuaccacuggcugcgaacugugaagacaaccaaagagucuuugguaaucauaucgccaucaguugcagaccucgauccguacgacaagagccugcauagucguguguuucccuccgggaaauguucuggaaucacggucagcuccacuuauugcucaaccaaucacgauuacacaauuuggaugccugaaaacccaagacugggcaccaguugugacaucuucgccaauagcaggggcaagcgggcuucuaaagggggaaagacuugcgguuuuguggaugagcgcggccucuauaaguccuuaaaaggggcauguaagcugaaacuuugcggaguguugggccugagacuaauggacgguacaugggucgccaugcaaaccucagaugaaacgaaguggugucccccugaccagcucguuaacaugcacgacuucaggagcgaugagauugagcaucuggugguagaggaacuugugaaaaagcgggaagagugccuggacgcuuuggaaaguaucauaacuacaaaagccgucucuuuucgccgacucucccaccugagaaaguuagugccaggguucggaaaggcguacaccauuuucaauaaaacucugauggaggcagaugcccauuauaagagcguuaggacauggaacgagaucauucccucgaaaggcugccuccgggugggcgggcguugucacccgcacgucaauggaguguuuuucaacgguaucauccuuggcccugacgggcgcguacugauucccgaaaugcagucuuccuugcuacagcaacauauggagcugcucgaaucaaguguuauaccacugaugcacccucuugcugaucccagcaccguguuuaaggacggagaugaggccgaagacuucgucgaggugcaucugccagauguccacaaacagguguccggcguugacuugggucuccccaauugggggaaguacgugcuguuaucugcaggcacgcugaucgcucuaaugcucaccauuuuucugaucacaugcuguagaaggguaaaccggccugaguucacucagcgaagccuuggaggcaccgggcgcaaggucucagugacaagucaguccggaaaaguuauaagcucuugggaaucauauaagagugguggcgagacuagauuguga

SEQ ID NO: 159812 - RNA, 1575 nt, Artificial Sequence
  derived and/or modified CDS sequence (opt3) from glycoprotein__RABV__KT336434.1
auggugccccaggcccugcuguucgucccucuucugguuuuuagcuugugcuucggcaaguuuccaaucuacaccauuccggacaaauuagggcccugguccccuauagauauccaccaucugucuuguccaaacaaucuagugguagaggacgaaggaugcacaaaccucucagguuucaguuauauggagcugaaggugggcuacauuagcgcuaucaaagucaauggguuuacuuguacgggagugguuaccgaagcagagacauauacuaacuucgugggcuacgucaccacaaccuuuaagagaaaacacuucaggcccauuccugaugccugccgggcggcuuauaauuggaagauggccggugacccacgcuacgaagagucccuucauaaccccuauccugauuaccacuggcugcgaacugugaagacaaccaaagagucuuugguaaucauaucgccaucaguugcagaccucgauccguacgacaagagccugcauagucguguguuucccuccgggaaauguucuggaaucacggucagcuccacuuucugcucaaccaaucacgauuauacaauuuggaugccugaaaacccaagacugggcaccaguugugacaucuuugccaauagcaggggcaagcgggcuucuaaagggggaaagacuugcgguuucguggaugagcgcggccucuacaaguccuuaaaaggggcauguaagcugaaacuuugcggaguguugggccugagacuaauggacgguacaugggucgccaugcaaaccucagaugaaacgaaguggugucccccugaccagcucguuaacaugcacgacuuuaggagcgaugagauugagcaucuggugguagaggaacuugugaaaaagcgggaagagugccuggacgcuuuggaaaguaucaugacuacaaaaucugucuccuuccgccgacucagccaccugagaaaguuagugccaggguucggaaaggccuauaccauauuuaauaaaacucugauggaggcggaugcacauuacaagucgguuaggacauggaacgagauuauccccucuaaaggcugccuccgggugggcgggcguugucacccgcacgucaauggaguguucuuuaacgguauuauccuuggcccugacgggcauguacugauccccgaaaugcaguccucauugcuacagcaacacauggagcugcucgaaaguagcguuauuccacugaugcauccucuugccgaucccuccaccguguucaaggacggagaugaggcugaagacuuugucgaggugcaccucccagauguccauaaacaggugucuggcguugacuugggucuccccaauugggggaaguaugugcuguuaagcgccggcacgcugauagcacuaaugcucaucauuuuccugaugaccugcugucgcagaguaaacaggccugagucaacagaucggagucuuggaggcacugggcgaaaggucuccgugaccagccagucuggaaaaguuaucucaaguugggaaagcuacaaguccgguggcgagacacgcuuguga

SEQ ID NO: 159813 - RNA, 1575 nt, Artificial Sequence
  derived and/or modified CDS sequence (opt3) from glycoprotein__RABV__KT336435.1
auggugccccaggcccuccuguuccuuccucuguuggucuuuccauuaugcuucggcaaguuuccgaucuacaccauucccgacaaacuggggccuuggagcccaauagauauccaccaucuauccugucccaacaaucucguuguggaggacgaaggaugcacaaaccugucugguuucucauauauggagcuuaagguaggcuacauuagugcuaucaaagugaauggguuuacuuguacgggagucgugaccgaagcagagacauauacuaacuucguuggcuacgugaccacaaccuuuaagagaaaacacuucaggccuauuccagaugccugccgggcggcuuauaauuggaagauggccggugacccccgcuacgaagagagccugcauaacccuuauccagauuaccacugguugcgaacugucaagacaaccaaagagucccucgugaucauaucuccgucgguagcagaccuggaucccuacgacaagucacugcauagccguguuuuuccuagugggaaauguuccggaaucacggugucuagcacuuucugcuccaccaaucacgauuauacaauuuggaugccagaaaaccccagacucggcacuucaugugacaucuuugccaauaguaggggcaagcgggcuagcaaagggggaaagaccugcgguuucgucgaugagcgcggcuuauacaagucucugaaaggggcauguaaacuuaaauugugcggagugcugggccuaagacucauggacgguacauggguggccaugcaaaccuccgaugaaacgaagugguguccuccagaccagcuggucaacauucacgacuuuaggucagaugagaucgagcaucuuguuguggaggaacugguaaagaagcgggaagagugcuuggacgcucucgaaagcauaaugacuacaaaaagugugucuuuccgccgacugucccacuuaagaaagcugguccccggguucggaaaggccuauaccauuuuuaauaaaacucucauggaggcggaugcacauuacaagagcgugaggacauggaacgagaucauuccgucgaaaggcugccuucggguuggcgggcguugucacccucacgugaauggagucuucuuuaacgguaucauccugggccccgacgggcauguguugauuccagaaaugcagucuucccuacugcagcaacacauggagcuccuggaaucaaguguaauaccucuuaugcauccccuggccgauccaagcaccguuuucaaggacggagaugaggcugaagacuuuguggagguccacuugcccgaugugcauaaacaggucuccggcguggaccucggucugccuaauugggggaaguauguuuuacugucugccggcacgcuaaucgcacucaugcugauuaucuuccuuaugaccugcugucgcagagugaacaggccagagagcacagaacggucauugggacgaacuggccgcaagguaagugucaccucccagagcgggaaagugauaucuucaugggagaguuacaagagcggaggugaaacaagacuguga

SEQ ID NO: 159814 - RNA, 1575 nt, Artificial Sequence
  derived and/or modified CDS sequence (opt3) from glycoprotein__RABV__KT336436.1
auggugccccaggcccugcuguucgucccucuucugguuuuuccauugugcuucggcaaguuuccgaucuacaccauucccgacaaauuagggccuuggagcccaauagauauccaccaucuguccugucccaacaaucuagugguagaggacgaaggaugcacaaaccucucugguuucucauauauggagcugaaggugggcuacauuagugcuaucaaagucaauggguuuacuuguacgggagugguuaccgaagcagagacauauacuaacuucgugggcuacgucaccacaaccuuuaagagaaaacacuucaggccuauuccagaugccugccgggcggcuuauaauuggaagauggccggugacccccgcuacgaagagagccuucauaacccuuauccagauuaccacuggcugcgaacugugaagacaaccaaagaguccuugguaaucauaucuccgucgguugcagaccucgaucccuacgacaagucacugcauagccguguguuuccuagugggaaauguuccggaaucacggucucuagcacuuucugcuccaccaaucacgauuauacaauuuggaugccagaaaaccccagacugggcacuucaugugacaucuuugccaauaguaggggcaagcgggcuagcaaagggggaaagaccugcgguuucguggaugagcgcggccucuacaagucuuuaaaaggggcauguaagcugaaacuuugcggaguguugggccugagacuaauggacgguacaugggucgccaugcaaaccuccgaugaaacgaagugguguccuccagaccagcucguuaacaugcacgacuuuaggucagaugagauugagcaucuggugguagaggaacuugugaaaaagcgggaagagugccuggacgcuuuggaaagcaucaugacuacaaaaagugucucuuuccgccgacucucccaccugagaaaguuagugcccggguucggaaaggccuauaccauauuuaauaaaacucugauggaggcggaugcacauuacaagagcguuaggacauggaacgagauuaucccgucgaaaggcugccuccgggugggcgggcguugucacccucacgucaauggaguguucuuuaacgguauuauccuuggccccgacgggcauguacugaucccagaaaugcagucuuccuugcuacagcaacacauggagcugcucgaaucaaguguuauuccucugaugcauccccuugccgauccaagcaccguguucaaggacggagaugaggcugaagacuuugucgaggugcaccuccccgauguccauaaacagguguccggcguugacuugggucucccuaauugggggaaguaugugcuguuaucugccggcacgcugauagcacuaaugcucaucaccuuccugaugacaugcugucgcagaguaaacaggccagagagcacuaagcggcgacuuggaggcaccgggcgcaaagucucagugacaagucaguccggaaagguuauuagcucuugggaaucauacaaaagugguggcgagacuagauuguga

SEQ ID NO: 159815 - RNA, 1575 nt, Artificial Sequence
  derived and/or modified CDS sequence (opt3) from glycoprotein__RABV__KT336437.1
auggugccccaggcccuccuguuccuuccucuguuggucuuuccauuaugcuucggcaaguuuccgaucuacaccauucccgacaaacuggggccuuggagcccaauagauauccaccaucuaaacugucccaauaaccucguuguggaggacgaaggaugcacaaaucuguccgguuucucuuauauggagcuuaagguaggcuacauuucagcuaucaaagugaacggguuuacuuguacgggagucgugaccgaagcagagacauauacuaauuucguuggcuacgugaccacaaccuuuaagagaaaacacuucaggccuauuccagaugccugccgggcggcuuauaacuggaagauggccggugacccccgcuacgaagagagucugcauaauccuuauccagauuaccacugguugcgaacugucaagacaaccaaagagagccucgugaucauauccccgucuguagcagaccuggaucccuacgacaagucgcugcauucacguguuuuuccuagcgggaaauguaguggaaucacgguguccucuacuuucugcagcaccaaccacgauuauacaauuuggaugccagaaaaucccagacucggcacuuccugugacaucuuugccaacucaaggggcaagcgggcuaguaaagggggaaagaccugcgguuucgucgaugagcgcggcuuauacaagagccugaaaggggcauguaaacuuaaauugugcggagugcugggccuaagacucauggacgguacauggguggccaugcaaaccucugaugaaacgaagugguguccuccagaccagcuggucaauauucacgacuuuagguccgaugagaucgagcaucuuguuguggaggaacugguaaagaagcgggaagagugcuuggacgcucucgaaucaauaaugacuacaaaaagcgugaguuuccgccgacugucucacuuaagaaagcugguccccggguucggaaaggccuauaccauuuuuaacaaaacucucauggaggcggaugcacauuacaaguccgugaggacauggaaugagaucauuccgagcaaaggcugccuucggguuggcgggcguugucacccucacgugaacggagucuucuuuaaugguaucauccugggccccgacgggcauauuuugauaccagaaaugcagucgucucuacugcagcaacacauggagcuccuggaauccucagugaucccucuuaugcauccccuggccgauccaaguaccguauucaaggacggagaugaggcugaagacuuuguugaggugcacuugcccgauguccauaaacaggugagcggcgucgaccucggucugccuaacugggggaaguauguguuacuguccgccggcacgcuaauugcacucaugcugaucauauuccuuaugaccugcugucgcagaguuaacaggccagagucuacagaacggagcuugggaggcacugggcgaaaggugucaguaaccagucaguccggaaaagucauuagcucuugggagucauacaagagugguggcgaaacacgccuguga

SEQ ID NO: 159816 - RNA, 1575 nt, Artificial Sequence
  derived and/or modified CDS sequence (opt3) from glycoprotein__RABV__KU198460.1
auggugccccaggcccuucucuucgucccucuucuggcuuuuccaaugugcuucggcaaguuuccgaucuacaccauucccgacaaauuggggccuuggagcccaauagauauccaccauuuauccugucccaacaaucugguuguggaggacgaaggaugcacaaaccuaucugguuucucauauauggagcucaagguaggcuacauuagugcaaucaaagugaauggguuuacuuguacgggagucgugaccgaagccgagacauauacuaacuucguuggcuacgugaccacaaccuuuaagagaaaacacuucaggccuacuccagaugcgugccgggcugccuauaauuggaagauggccggugacccccgcuacgaagagagccugcauaacccuuauccagauuaccacuggcuucgaacagucaagaccacgaaagagucccugauuaucauaucuccgucgguggcagacuuggaucccuacgacaagucacuccauagccguguauuuccuagugggaaaugucugggaaucacuauuuccucuaccuauugcagcacaaaucacgauuacacuaucuggaugccagaaaaccugagacucggcaccuccugugacauuuucacaaauucaaggggcaagcgggcuaguaaagggagcaagaccugcggauuuguugaugagcgcgguuuauauaagucucugaaaggcgcauguaagcugaaauugugcggggugcugggacuaagacucauggacggcacgugggucgccaugcaaacuuccgaugaaacaaagugguguucacccgaccagcuggugaaccuucacgacuucaggagcgaugagaucgagcaucugguggucgaagaguugguuaaaaagcgggaagagugccucgacgcucuggaaaguauaaugaccacuaaaucuguguccuuucgccgauuaagccaccugagaaagcucguaccugguuucgggaaggccuacacaauuuucaauaaaacccuuauggaggcggaugcacauuauaagucggugaggacguggucugagaucauuccauccaaaggaugccugcgggucggcggccguugucacccccacgugaacgggguguuuuucaauggaaucaucuuggguccggacggccauguucuaauuccugaaaugcagucaagucugcuccagcaacacauggagcugcuugaaagcuccgucauaccccugaugcauccauuggccgauccuucuaccguguuuaaggacggggaugaggcugaagacuucguagagguucaccuccccgaugugcauaaacagaucagcggagucgaccugggcuuaccaaacuggggucgcuacgugcugauuaucgccgggguccuaauagcaaugauucucacaaucuuucugaugacuugcuguggcagaggaaauaggcccaagucaacccagcacagucuuggcgggaucggacggaagguguccgcuacaagccagucugguaaaguuauuucaaguugggagagcuauaaguccggcggggaaacucgauuguga

SEQ ID NO: 159817 - RNA, 1575 nt, Artificial Sequence
  derived and/or modified CDS sequence (opt3) from glycoprotein__RABV__KU198461.1
auggugccccaggcccuucucuucgucccucuucuggcuuuuccaaugugcuucggcaaguuuccgaucuacaccauucccgacaaauuggggccuuggagcccaauagauauccaccauuuauccugucccaacaaucugguuguggaggacgaaggaugcacaaaccuaucugguuucucauauauggagcucaagguaggcuacauuagugcaaucaaagugaauggguuuacuuguacgggagucgugaccgaagccgagacauauacuaacuucguuggcuacgugaccacaaccuuuaagagaaaacacuucaggccuacuccagaugcgugccgggcugccuauaauuggaagauggccggugacccccgcuacgaagagagccugcauaacccuuauccagauuaccacuggcuucgaacagucaagaccacgaaagagucccugauuaucauaucuccgucgguggcagacuuggaucccuacgacaagucacuccauagccguguauuuccuagugggaaaugucugggaaucacuauuuccucuaccuauugcagcacaaaucacgauuacacuaucuggaugccagaaaaccugagacucggcaccuccugugacauuuucacaaauucaaggggcaagcgggcuaguaaagggagcaagaccugcggauuuguugaugagcgcgguuuauauaagucucugaaaggcgcauguaagcugaaauugugcggggugcugggacuaagacucauggacggcacgugggucgccaugcaaacuuccgaugaaacaaagugguguucacccgaccagcuggugaaccuucacgacuucaggagcgaugagaucgagcaucugguggucgaagaguugguuaaaaagcgggaagagugccucgacgcucuggaaaguauaaugaccacuaaaucuguguccuuucgccgauuaagccaccugagaaagcucguaccugguuucgggaaggccuacacaauuuucaauaaaacccuuauggaggcggaugcacauuauaagucggugaggacguggaacgagaucauuccaucuaaaggaugccugcgggucggcggccguugucacccccacgugaaugggguguuuuucaacggaaucaucuuggguccggacggccauguucuaauuccugaaaugcaguccucacugcuccagcaacacauggagcugcuugaaaguagcgucauaccccugaugcauccauuggccgauccuuccaccguguuuaaggacggggaugaggcugaagacuucguagagguucaccuccccgaugugcauaaacagaucucuggagucgaccugggcuuaccaaauugggguaaguacgugcugauuaucgccgggguccuaauagcaaugauucucacaaucuuucugaugacuugcuguggccgcggaaacagacccaagagcacccagcacucacuuggcgggaucggaaggaaagugagugcuacaucccagagcgguaagguuauuucuucaugggagaguuauaaaagcggcggggaaacucgguuguga

SEQ ID NO: 159818 - RNA, 1575 nt, Artificial Sequence
  derived and/or modified CDS sequence (opt3) from glycoprotein__RABV__KU198462.1
auggugccccaggcccuucucuucgucccucuucuggcuuuuccaaugugcuucggcaaguuuccgaucuacaccauucccgacaaauuggggccuuggagcccaauagauauccaccauuuauccugucccaacaaucugguuguggaggacgaaggaugcacaaaccuaucugguuucucauauauggagcucaagguaggcuacauuagugcaaucaaagugaauggguuuacuuguacgggagucgugaccgaagccgagacauauacuaacuucguuggcuacgugaccacaaccuuuaagagaaaacacuucaggccuacuccagaugcgugccgggcugccuauaauuggaagauggccggugacccccgcuacgaagagagccugcauaacccuuauccagauuaccacuggcuucgaacagucaagaccacgaaagagucccugauuaucauaucuccgucgguggcagacuuggaucccuacgacaagucacuccauagccguguauuuccuagugggaaaugucugggaaucacuauuuccucuaccuauugcagcacaaaucacgauuacacuaucuggaugccagaaaaccugagacucggcaccuccugugacauuuucacaaauucaaggggcaagcgggcuaguaaagggagcaagaccugcggauuuguugaugagcgcgguuuauauaagucucugaaaggcgcauguaagcugaaauugugcggggugcugggacuaagacucauggacggcacgugggucgccaugcaaacuuccgaugaaacaaaguggugucccccugaccagcuggugaaccuucacgacuucaggucagaugagaucgagcaucugguggucgaagaguugguuaaaaagcgggaagagugccucgacgcucuggaaagcauaaugaccacuaaaagugugucuuuucgccgauuaucccaccugagaaagcucguaccagguuucgggaaggccuacacaauuuucaauaaaacccuuauggaggcggaugcacauuauaagagcgugaggacguggaacgagaucauucccucgaaaggaugccugcgggucggcggccguugucacccgcacgugaaugggguguuuuucaacggaaucaucuuggguccugacggccauguucuaauucccgaaaugcagucuucccugcuccagcaacacauggagcugcuugaaucaagugucauaccacugaugcauccuuuggccgaucccagcaccguguuuaaggacggggaugaggcugaagacuucguagagguucaccucccagaugugcauaaacagaucuccggagucgaccugggcuuacccaauugggguaaguacgugcugauuaucgccgggguccuaauagcaaugauucucacaaucuuucugaugacuugcuguggccgcggaaacagaccuaagucuacccagcacagcccaggcgggaucggaaggaaagugucagcuacaagucaguccgguaagguuauuagcucuugggagucauauaaaaguggcggggaaacucggcuuuga

SEQ ID NO: 159819 - RNA, 1575 nt, Artificial Sequence
  derived and/or modified CDS sequence (opt3) from glycoprotein__RABV__KU198463.1
auggugccccaggcccuucucuucgucccucuucuggcuuuuccaaugugcuucggcaaguuuccgaucuacaccauucccgacaaauuggggccuuggagcccaauagauauccaccauuuauccugucccaacaaucugguuguggaggacgaaggaugcacaaaccuaucugguuucucauauauggagcucaagguaggcuacauuagugcaaucaaagugaauggguuuacuuguacgggagucgugaccgaagccgagacauauacuaacuucguuggcuacgugaccacaaccuuuaagagaaaacacuucaggccuacuccagaugcgugccgggcugccuauaauuggaagauggccggugacccccgcuacgaagagagccugcauaacccuuauccagauuaccacuggcuucgaacagucaagaccacgaaagagucccugauuaucauaucuccgucgguggcagacuuggaucccuacgacaagucacuccauagccguguauuuccuagugggaaaugucugggaaucacuauuuccucuaccuauugcagcacaaaucacgauuacacuaucuggaugccagaaaaccugagacucggcaccuccugugacauuuucacaaauucaaggggcaagcgggcuaguaaagggagcaagaccugcggauuuguugaugagcgcgguuuauauaagucucugaaaggcgcauguaagcugaaauugugcggggugcugggacuaagacucaucgacggcacgugggucgccaugcaaacuuccgaugaaacaaaguggugucccccugaccagcuggugaaccuucacgacuucaggucagaugagauagagcaucugguggucgaagaguugguuaaaaagcgggaagagugccucgacgcucuggaaagcauuaugaccacuaaaagugugucuuuucgccgauuaucccaccugagaaagcucguaccagguuucgggaaggccuacacaaucuucaauaaaacccuuauggaggcggaugcacauuauaagagcgugaggacguggaacgagauuauccccucgaaaggaugccugcgggucggcggccguugucacccgcacgugaaugggguguuuuucaacggaaucauuuuggguccugacggccauguucuaauacccgaaaugcagucuucccugcuccagcaacacauggagcugcuugaaucaagugucaucccacugaugcauccuuuggccgaucccagcaccguguuuaaggacggggaugaggcugaagacuucguagagguucaccucccagaugugcauaaacagauuuccggagucgaccugggcuuacccaauugggguaaguacgugcugaucauagccgggguccuaauugcaaugauccucacaaucuuucugaugacuugcuguggccgcggaaacagaccuaagucuacccagcacagccuuggcgggauuggaaggaaagugucagcuacaagucaguccgguaagguuaucagcucuugggagucauauaaaaguggcggggaaacucgguuguga

SEQ ID NO: 159820 - RNA, 1575 nt, Artificial Sequence
  derived and/or modified CDS sequence (opt3) from glycoprotein__RABV__KU198464.1
auggugccccaggcccuucucuucgucccucuucuggcuuuuccaaugugcuucggcaaguuuccgaucuacaccauucccgacaaauuggggccuuggagcccaauagauauccaccauuuauccugucccaacaaucugguuguggaggacgaaggaugcacaaaccuaucugguuucucauauauggagcucaagguaggcuacauuagugcaaucaaagugaauggguuuacuuguacgggagucgugaccgaagccgagacauauacuaacuucguuggcuacgugaccacaaccuuuaagagaaaacacuucaggccuacuccagaugcgugccgggcugccuauaauuggaagauggccggugacccccgcuacgaagagagccugcauaacccuuauccagauuaccacuggcuucgaacagucaagaccacgaaagagucccugauuaucauaucuccgucgguggcagacuuggaucccuacgacaagucacuccauagccguguauuuccuagugggaaaugucugggaaucacuauuuccucuaccuauugcagcacaaaucacgauuacacuaucuggaugccagaaaaccugagacucggcaccuccugugacauuuucacaaauucaaggggcaagcgggcuaguaaagggagcaagaccugcggauuuguugaugagcgcgguuuauauaagucucugaaaggcgcauguaagcugaaauugugcggggugcugggacuaagacucauggacggcacgugggucgccaugcaaacuuccgaugaaacaaaguggugucccccugaccagcuggugaaccuucacgacuucaggucagaugagaucgagcaucugguggucgaagaguugguuaaaaagcgggaagagugccucgacgcucuggaaagcauaaugaccacuaaaagugugucuuuucgccgauuaucccaccugagaaagcucguaccagguuucgggaaggccuacacaauuuucaauaaaacccuuauggaggcggaugcacauuauaagagcgugaggacguggucggagaucauucccucuaaaggaugccugcgggucggcggccguugucacccgcacgugaacgggguguuuuucaauggaaucaucuuggguccugacggccauguucuaauucccgaaaugcaguccucacugcuccagcaacacauggagcugcuugaaaguagcgucauaccacugaugcauccuuuggccgaucccuccaccguguuuaaggacggggaugaggcugaagacuucguagagguucaccucccagaugugcauaaacagaucucuggagucgaccugggcuuacccaacugggguaaguacgugcugauuaucgccgggguccuaauagcaaugauucucacaaucuuucugaugacuugcuguggccgcugcaauagaccuaagagcacccagcacucacuuggaggcaucgggaggaaagugagugcuacaucccagagcggaaagguuauuucuucaugggagaguuauaaaagcgguggcgaaacucgguuguga

SEQ ID NO: 159821 - RNA, 1575 nt, Artificial Sequence
  derived and/or modified CDS sequence (opt3) from glycoprotein__RABV__KU198465.1
auggugccccaggcccugcuccuugucccucuguuggcuuucccaaugugcuuuggcaaguucccgaucuacaccauucccgacaaauuagggccuuggagcccaauagauauccaccaucuguccugucccaacaaucuaguuguggaggacgaaggaugcacaaaccucucugguuuuucauauauggagcugaagguaggcuacauuagugcaaucaaagugaauggguucacuuguacgggagucgugaccgaagccgagacauauacuaacuuuguuggcuacgugaccacaaccuucaagagaaaacacuuuaggccuacuccagaugcgugccgggcugccuauaauuggaagauggccggugacccccgcuacgaagagagccuucauaacccuuauccagauuaccacuggcugcgaacagucaagaccacgaaagaguccuugauuaucauaucuccgucgguggcagaccucgaucccuacgacaagucacugcauagccguguauucccuagugggaaaugucugggaaucacuauuuccucuaccuauugcagcacaaaucacgauuacacuaucuggaugccagaaaaccucagauuaggcaccuccugugacauuuuuacaaauucaaggggcaagcgggcuaguaaagggagcaagaccugcggauucguugaugagcgcggucuguauaagucucuuaaaggcgcauguaaguugaaacugugcggggugcuaggacucagacugauggacggcacgugggucgccaugcaaacuuccgaugaaacaaaguggugucccccugaccagcuugugaaccugcacgacuuuaggucagaugagaucgagcauuugguggucgaggaacucguuaaaaagcgggaagagugccuggacgcuuuagaaagcauaaugaccacuaaaagugugucuuuccgccgacugucccaccucagaaagcugguaccagguuuugggaaggccuacacaauuuucaauaaaacccugauggaggcggaugcacauuauaagagcgugaggacguggucggagaucauucccucuaaaggaugcuugcgggucggcggccguugucacccgcacgugaacgggguuuucuuuaauggaaucauccuagguccugacggccaugugcugauucccgaaaugcaguccucacuccugcagcaacacauggagcuucuggaaaguagcgucauaccauugaugcauccucucgccgaucccuccaccguguucaaggacggggaugaggcugaagacuuuguagagguucaccuuccagaugugcauaaacagaucucuggagucgacuuaggccugcccaacugggguaaguacgugcuaauuaucgccgggguccucauagcaaugauucugacaaucuuccuuaugacuugcuguggccgcggaaauagaccuaagagcacccagcacucauugggcgggaucggaaggaaagugagugcuacaucccagagcgguaagguuauuucuucaugggagaguuauaaaagcggcuccgaaacucggcuguga

SEQ ID NO: 159822 - RNA, 1575 nt, Artificial Sequence; identical to SEQ ID NO: 159532
  derived and/or modified CDS sequence (opt3) from glycoprotein__RABV__KU198466.1

SEQ ID NO: 159823 - RNA, 1575 nt, Artificial Sequence; identical to SEQ ID NO: 159532
  derived and/or modified CDS sequence (opt3) from glycoprotein__RABV__KU198467.1

SEQ ID NO: 159824 - RNA, 1575 nt, Artificial Sequence
  derived and/or modified CDS sequence (opt3) from glycoprotein__RABV__KU198468.1
auggugccccaggcccuucucuucgucccucuucuggcuuuuccaaugugcuucggcaaguuuccgaucuacaccauucccgacaaauuggggccuuggagcccaauagauauccaccauuuauccugucccaacaaucugauuguugaggacgaaggaugcacaaaccuaucugguuucucauauauggagcucaaggugggcuacaucagugcaauuaaaguaaauggguuuacuuguacgggaguggucaccgaagccgagacauauacuaacuucgugggcuacguuaccacaaccuuuaagagaaaacacuucaggccuacuccagaugcgugccgggcugccuauaauuggaagauggccggugacccccgcuacgaagagagccugcauaacccuuauccagauuaccacuggcuucgaacagugaagaccacgaaagagucccugaucauaaucucuccgucggucgcagacuuggaucccuacgacaagucacuccauagccguguguuuccuagugggaaaugucugggaauuacuaucuccucuaccuauugcagcacaaaucacgauuacacuauuuggaugccagaaaaccugagacucggcaccuccugugacaucuucacaaauucaaggggcaagcgggcuaguaaagggagcaagaccugcggauuuguagaugagcgcgguuuauauaagucucugaaaggcgcauguaagcugaaauugugcgggguucugggacuaagacucauggacggcacguggguggccaugcaaacuuccgaugaaacaaaguggugucccccuaaccagcuggucaaucuucacgacuucaggucagacgagauagagcaucuggugguggaagaguuggucaaaaagcgggaagagugccucgaugcucuggaaagcauuaugaccacuaaaaguguuucuuuucgccgauuaucccaccugagaaagcucgugccagguuucgggaaggccuacacaaucuucaacaaaacccuuauggaggcggacgcacauuauaagagcguaaggacguggaaugagauuauccccucgaaaggaugccugcgggugggcggccguugucacccgcacgucaacgggguguuuuucaauggaaucauuuuggguccugauggccauguucuaauacccgaaaugcagucuucccugcuccagcaacacauggagcugcuugaaucaagugugaucccacugaugcauccuuuggccgaccccagcaccgucuuuaaggauggggacgaggcugaagauuucguggagguacaccucccagacguucauaaacagauuuccggaguggaucugggcuuacccaacugggguaaguacguccugaucauagccggggugcuaauugcaaugauccucacaaucuuucugaugacuugcuguggccgcggaaacagaccuaagucuacccagcacagccuuggcgggauuggaaggaaagucucagcuacaagucaguccgguaaggugaucagcucuugggagucauauaaaaguggcggggaaacucgguuguga

SEQ ID NO: 159825 - RNA, 1575 nt, Artificial Sequence
  derived and/or modified CDS sequence (opt3) from glycoprotein__RABV__KU198469.1
auggugccccaggcccuucucuucgucccucuucuggcuuuuccaaugugcuucggcaaguuuccgaucuacaccauucccgacaaauuggggccuuggagcccaauagauauccaccauuuauccugucccaacaaucugguuguggaggacgaaggaugcacaaaccuaucugguuucucauauauggagcucaagguaggcuacauuagugcaaucaaagugaauggguuuacuuguacgggagucgugaccgaagccgagacauauacuaacuucguuggcuacgugaccacaaccuuuaagagaaaacacuucaggccuacuccagaugcgugccgggcugccuauaauuggaagauggccggugacccccgcuacgaagagagccugcauaacccuuauccagauuaccacuggcuucgaacagucaagaccacgaaagagucccugauuaucauaucuccgucgguggcagacuuggaucccuacgacaagucacuccauagccguguauuuccuagugggaaaugucugggaaucacuauuuccucuaccuauugcagcacaaaucacgauuacacuaucuggaugccagaaaaccugagacucggcaccuccugugacauuuucacaaauucaaggggcaagcgggcuaguaaagggagcaagaccugcggauuuguugaugagcgcgguuuauauaagucucugaaaggcgcauguaagcugaaauugugcggggugcugggacuaagacucauggacggcacgugggucgccaugcaaacuuccgaugaaacaaaguggugucccccugaccagcuggugaaccuucacgacuucaggucagaugagaucgagcaucugguggucgaagaguugguuaaaaagcgggaagagugccucgacgcucuggaaagcauaaugaccacuaaaagugugucuuuucgccgauuaucccaccugagaaagcucguaccagguuucgggaaggccuacacaauuuucaauaaaacccuuauggaggcggaugcacauuauaagagcgugaggacguggaacgagaucauucccucgaaaggaugccugcgggucggcggccguugucacccgcacgugaaugggguguuuuucaacggaaucaucuuggguccugacggccauguucuaauucccgaaaugcagucuucccugcuccagcaacacauggagcugcuugaaucaagugucauaccacugaugcauccuuuggccgaucccagcaccguguuuaaggacggggaugaggcugaagacuucguagagguucaccucccagaugugcauaaacagaucuccggagucgaccugggcuuacccaauugggguaaguacgugcugauuaucgccgggguccuaauagcaaugauucucacaacuuuucugaugaccugcuguggccgcggaaacagaccuaagucuacacagcacagccuuggcgggaucggaaggaaagugucagcuaccagucaguccgguaagguuaucagcucuugggagucauauaaaaguggcggggaaacucgguuguga

SEQ ID NO: 159826 - RNA, 1575 nt, Artificial Sequence; identical to SEQ ID NO: 159522
  derived and/or modified CDS sequence (opt3) from glycoprotein__RABV__KU198470.1

SEQ ID NO: 159827 - RNA, 1575 nt, Artificial Sequence; identical to SEQ ID NO: 159523
  derived and/or modified CDS sequence (opt3) from glycoprotein__RABV__KU198471.1

SEQ ID NO: 159828 - RNA, 1575 nt, Artificial Sequence
  derived and/or modified CDS sequence (opt3) from glycoprotein__RABV__KU198472.1
auggugccccaggcccuccuguucgucccucuucuggcuuuuccaaugugcuucggcaaguuuccgaucuacaccauucccgacaaauuggggccuuggagcccaauagauauccaccauuuauccugucccaacaaucugguuguggaggacgaaggaugcacaaaccuaucugguuucucauauauggagcucaagguaggcuacauuagugcaaucaaagugaauggguuuacuuguacgggagucgugaccgaagccgagacauauacuaacuucguuggcuacgugaccacaaccuuuaagagaaaacacuucaggccuacuccagaugcgugccgggcugccuauaauuggaagauggccggugacccccgcuacgaagagagccugcauaacccuuauccagauuaccacuggcuucgaacagucaagaccacgaaagagucccugauuaucauaucuccgucggugucagacuuggaucccuacgacaagagccuccauagucguguauuuccuuccgggaaaugucugggaaucacuauuucuagcaccuauugcuccacaaaucacgauuacacuaucuggaugccagaaaacguuagacugggcaccucaugugacauuuucacaaauaguaggggcaagcgggcaagcaaagggucuaagaccugcggauuuguggaugagcgcggucucuauaaguccuuaaaaggcgcuuguaagcugaaacuuugcggggucuugggacugagacuaauggacggcacgugggugucaaugcccacuagcgaugaaacaaagugguguccuccagaccaacucgugaaccugcacgacuucaggagugaugagaucgagcaucuugucguugaggaacuggugcggaaacgcgaagagugcuuggacgcacucgaaucuauaaugaccacuaaguccgugagcuuucgaagacugucgcacuuaaggaaacugguacccgguuucgggaaggccuacacaauuuucaauaagacccucauggaggcugaugcccauuauaaaucuguccggacgugguccgagaucauuccgucaaagggaugccuucgugugggcggccgcugucacccucacguuaacgggguguuuuucaauggaaucauccugggucccgacggccaugucuugauuccagaaaugcagaguagccuacugcagcagcacauggagcuccuggaauccucugugauaccucuuaugcauccccuggcggauccaagcaccguauuuaaagacggggaugaggcagaagacuucguugaggugcacuugcccgauguccauaagcaaaucucaggaguggaccucggccugccuaacugggguaaauacgucuuaauuaucgccggggugcugauagcuaugauucuaacaauccuccugaugacuugcuguggcagaggaaauaggccaaagaguacccagcacucccuuggcgggaucggacggaagguuagcucuacaucacagagugguaaagugauuagcuccugggagucuuauaagucgggcggggaaacucgauuguga

SEQ ID NO: 159829 - RNA, 1575 nt, Artificial Sequence
  derived and/or modified CDS sequence (opt3) from glycoprotein__RABV__KU198473.1
auggugccccaggcccuccuguucgucccucuucuggcuuuuccaaugugcuucggcaaguuuccgaucuacaccauucccgacaaauuggggccuuggagcccaauagauauccaccauuuauccugucccaacaaucugguuguggaggacgaaggaugcacaaaccuaucugguuucucauauauggagcucaagguaggcuacauuagugcaaucaaagugaauggguuuacuuguacgggagucgugaccgaagccgagacauauacuaacuucguuggcuacgugaccacaaccuuuaagagaaaacacuucaggccuacuccagaugcgugccgggcugccuauaauuggaagauggccggugacccccgcuacgaagagagccugcauaacccuuauccagauuaccacuggcuucgaacagucaagaccacgaaagagucccugauuaucauaucuccgucgguggcagacuuggaucccuacgacaagucacuccauagccguguauuuccuagugggaaaugucugggaaucacuauuuccucuaccuauugcagcacaaaucacgauuacacuaucuggaugccagaaaacguuagacugggcaccuccugugacauuuucacaaauucaaggggcaagcgggcuaguaaagggagcaagaccugcggauuuguggaugagcgcggucucuauaagucuuuaaaaggcgcauguaagcugaaacuuugcggggucuugggacugagacuaauggacggcacguggguguccaugcccacuucagaugaaacaaagugguguccuccagaccaacucgugaaccugcacgacuucaggagcgaugagaucgagcaucuugucguugaggaacuggugcggaaacgcgaagagugcuuggacgcccucgaaaguauaaugaccacuaagucuguauccuuucgaagacugagccacuuaaggaaacuggugcccgguuucgggaaggcuuacacaauuuucaauaagacccucauggaggccgaugcgcauuauaaaucgguccggacguggaacgagaucauuccgucuaagggaugccuucgugugggcggccgcugucacccucacguuaaugggguguuuuucaacggaaucauccugggucccgacggccaugucuugauuccagaaaugcaguccucacuacugcagcagcacauggagcuccuggaaaguagcgugauaccucuuaugcauccccuggcagauccauccaccguauuuaaagacggggaugaggccgaagacuucguugaggugcacuugcccgauguccauaagcaaaucucuggaguggaccucggccugccuaauugggguaaauacgucuuaauuaucgcuggggugcugauagccaugauucuaacaaucuuucucaugacuugcuguggcagaggaaacaggccaaagagcacccagcacucacugggcgggaucggacggaagguuaguuccacaagccagucugguaaagugauuucaaguugggagagcuauaaguccggcggggaaacucgacuuuga

SEQ ID NO: 159830 - RNA, 1575 nt, Artificial Sequence; identical to SEQ ID NO: 159829
  derived and/or modified CDS sequence (opt3) from glycoprotein__RABV__KU198474.1

SEQ ID NO: 159831 - RNA, 1575 nt, Artificial Sequence
  derived and/or modified CDS sequence (opt3) from glycoprotein__RABV__KU198475.1
auggugccccaggcccuccuguucgucccucuucuggcuuuuccaaugugcuucggcaaguuuccgaucuacaccauucccgacaaauuggggccuuggagcccaauagauauccaccauuuauccugucccaacaaucugguuguggaggacgaaggaugcacaaaccuaucugguuucucauauauggagcucaagguaggcuacauuagugcaaucaaagugaauggguuuacuuguacgggagucgugaccgaagccgagacauauacuaacuucguuggcuacgugaccacaaccuuuaagagaaaacacuucaggccuacuccagaugcgugccgggcugccuauaauuggaagauggccggugacccccgcuacgaagagagccugcauaacccuuauccagauuaccacuggcuucgaacagucaagaccacgaaagagucccugauuaucauaucuccgucggugucagacuuggaucccuacgacaagagccuccauagucguguauuuccuuccgggaaaugucugggaaucacuauuucuagcaccuauugcuccacaaaucacgauuacacuaucuggaugccagaaaacguuagacugggcaccucaugugacauuuucacaaauaguaggggcaagcgggcaagcaaagggucuaagaccugcggauuuguggaugagcgcggucucuauaaguccuuaaaaggcgcuuguaagcugaaacuuugcggggucuugggacugagacuaauggacggcacgugggugucaaugcccacuagcgaugaaacaaagugguguccuccagaccaacucgugaaccugcacgacuucaggagugaugagaucgagcaucuugucguugaggaacuggugcggaaacgcgaagagugcuuggacgcacucgaaucuauaaugaccacuaaguccgugagcuuucgaagacugucgcacuuaaggaaacugguacccgguuucgggaaggccuacacaauuuucaauaagacccucauggaggcugaugcccauuauaaaucuguccggacguggaacgagaucauuccguccaagggaugccuucgugugggcggccgcugucacccucacguuaaugggguguuuuucaacggaaucauccugggucccgacggccaugucuugauuccagaaaugcagucaagucuacugcagcagcacauggagcuccuggaaagcuccgugauaccucuuaugcauccccuggcggauccaucuaccguauuuaaagacggggaugaggcagaagacuucguugaggugcacuugcccgauguccauaagcaaaucagcggaguggaccucggccugccuaauugggguaaauacgucuuaauuaucgccggggugcugauagcuaugauucuaacaauccuccugaugacuugcuguggcagaggaaacaggccaaagucaacccagcacagucuuggcgggaucggacggaagguuuccagcacaucucagucagguaaagugauuaguagcugggaguccuauaagucuggcggggaaacucgauuguga

SEQ ID NO: 159832 - RNA, 1575 nt, Artificial Sequence
  derived and/or modified CDS sequence (opt3) from glycoprotein__RABV__KU198476.1
auggugccccaggcccuccuguucgucccucuucuggcuuuuccaaugugcuucggcaaguuuccgaucuacaccauucccgacaaauuggggccuuggagcccaauagauauccaccauuuauccugucccaacaaucugguuguggaggacgaaggaugcacaaaccuaucugguuucucauauauggagcucaagguaggcuacauuagugcaaucaaagugaauggguuuacuuguacgggagucgugaccgaagccgagacauauacuaacuucguuggcuacgugaccacaaccuuuaagagaaaacacuucaggccuacuccagaugcgugccgggcugccuauaauuggaagauggccggugacccccgcuacgaagagagccugcauaacccuuauccagauuaccacuggcuucgaacagucaagaccacgaaagagucccugauuaucauaucuccgucgguggcagacuuggaucccuacgacaagucacuccauagccguguauuuccuagugggaaaugucugggaaucacuauuuccucuaccuauugcagcacaaaucacgauuacacuaucuggaugccagaaaacguuagacugggcaccuccugugacauuuucacaaauucaaggggcaagcgggcuaguaaagggagcaagaccugcggauuuguggaugagcgcggucucuauaagucuuuaaaaggcgcauguaagcugaaacuuugcggggucuugggacugagacuaauggacggcacguggguggccaugcccacuuccgaugaaacaaagugguguccuccagaccaacucgugaaccugcacgacuucaggucagaugagaucgagcaucuugucguugaggaacuggugcggaaacgcgaagagugcuuggacgcucucgaaagcauaaugaccacuaagaguguaucuuuucgaagacugucccacuuaaggaaacuggugcccgguuucgggaaggccuacacaauuuucaauaagacccucauggaggcggaugcacauuauaaaagcguccggacguggaacgagaucauuccgucgaagggaugccuucgugugggcggccgcugucacccucacguuaaugggguguuuuucaacggaaucauccugggucccgacggccaugucuugauuccagaaaugcagucuucccuacugcagcagcacauggagcuccuggaaucaagugugauaccucuuaugcauccccuggccgauccaagcaccguauuuaaagacggggaugaggcugaagacuucguugaggugcacuugcccgauguccauaagcaaaucuccggaguggaccucggccugccuaauugggguaaauacgucuuaauuaucgccggggugcugauagcaaugauucuaacaaucuuucucaugacuugcuguggcagaggaaacaggcugaagucuacccagcacagccuuggcgggaucggacggaagguuucaaguacaucccagagcgguaaagugauuucuucaugggagaguuauaagagcggcggggaaacucgauuguga

SEQ ID NO: 159833 - RNA, 1575 nt, Artificial Sequence; identical to SEQ ID NO: 159522
  derived and/or modified CDS sequence (opt3) from glycoprotein__RABV__KU198478.1

SEQ ID NO: 159834 - RNA, 1575 nt, Artificial Sequence
  derived and/or modified CDS sequence (opt3) from glycoprotein__RABV__KU198479.1
auggugccccaggcccugcucuuugucccucuucuggcuuuuccaaugugcuucggcaaguuuccgaucuacaccauucccgacaaauuggggccuuggagcccaauagauauccaccauuuauccugucccaacaaucugguuguggaggacgaaggaugcacaaaccuaucugguuucucauauauggagcucaagguaggcuacauuagugcaaucaaagugaauggguuuacuuguacgggagucgugaccgaagccgagacauauacuaacuucguuggcuacgugaccacaaccuuuaagagaaaacacuucaggccuacuccagaugcgugccgggcugccuauaauuggaagauggccggugacccccgcuacgaagagagccugcauaacccuuauccagauuaccacuggcuucgaacagucaagaccgcaaaagagucccugauuaucauaucuccgucgguggcugacuuggaucccuacgacaagucacuccauagccguguauuuccuagugggaaaugucugggaaucacgauuuccucuacuuauugcagcaccaaucacgauuacacaaucuggaugccagaaaacguuagacugggcacuuccugugacauuuucaccaauucaaggggcaagcgggcaaguaaagggagcaagacaugcggauuuguggaugagcgcggucucuauaagucuuuaaaaggcgccuguaagcugaaacuuugcggggucuugggacugagacuaauggacggcaccuggguguccaugcccacgucagaugaaacuaagugguguccuccagaccaacucgugaaccugcacgacuucaggagcgaugagaucgagcaucuugucguugaggaacuggugcggaaacgcgaagagugcuuggacgcucucgaaaguauaaugacaaccaagucuguauccuuucgaagacugagccacuuaaggaaacuggugcccgguuucgggaaggccuacacuauuuucaauaagacacucauggaggcggaugcacauuauaaaucgguccggaccuggaacgagaucauuccgucuaagggaugccuucgugugggcggccgcugucacccucacaucaaugggguuuucuucaacggaaucauucugggucccgacggccauguguugauaccagaaaugcaguccucacuacugcagcagcacauggagcuccuggaaaguagcgucaucccucuuaugcauccccuggccgauccauccacgguguuuaaagacggggaugaggcugaagacuucguagagguucacuugcccgaugugcauaagcaaauuucuggagucgaccucggccugccuaauugggguaaauacguguuaaucauagccgggguccugauugcaaugauccuaaccaucuuucucaugacaugcuguggcagaggaaacaggccaaagagcacucagcacucacugggcgggauuggacggaaggugaguuccaccagccagucugguaaaguuaucucaaguugggagagcuauaaguccggcggggaaacacgacuuuga

SEQ ID NO: 159835 - RNA, 1575 nt, Artificial Sequence; identical to SEQ ID NO: 159385
  derived and/or modified CDS sequence (opt3) from glycoprotein__RABV__KU534939.1

SEQ ID NO: 159836 - RNA, 1575 nt, Artificial Sequence
  derived and/or modified CDS sequence (opt3) from glycoprotein__RABV__KU534940.1
auggugccccagguccugcuguucguuccucuucugguguuuagcaugugcuucggcaaguuuccaaucuacaccauuccggacaaauuggggcccugguccccuauagauauccaccauuuaucuuguccaaacaaucugguaguggaggacgaaggaugcacaaaccuaucagguuucaguuauauggagcucaaggucggcuacauuagcgccaucaaagugaauggguuuacuuguacgggaguugugaccgaagcugagacauauacuaacuucgucggcuacgugaccacaaccuuuaagagaaaacacuucaggcccacuccugaugcaugccgggccgcguauaauuggaagauggcuggugacccacgcuacgaagagucccugcauaaccccuauccugauuaccacuggcuucgaacaguaaagaccacgaaagagucucugguuauuaucucgccaucaguggccgacuuggauccguacgacaagagccuccauagucgugucuuucccuccgggaaauguucuggaauaacuaucagcuccaccuauugcucaacaaaucacgauuacacuauuuggaugccugaaaacccaagacugggcaccaguugugacaucuucacaaauagcaggggcaagcgggcaucuaaagggggaaagaccugcgguuuuguggaugagcgcggccuguauaagucccucaaaggggccuguaaguuaaaacugugcggagugcuuggcuugagacugauggacgguacgugggucgcuaugcaaacuucagaugaaacaaaguggugucccccugaccagcuaguuaaccuccacgacuucaggagcgaugagauugagcaucuggugguagaggaacuugugaaaaagcgggaagagugccuggacgcauuggaaaguaucaugaccacuaaaucugucuccuuucgccgacucagccaccugagaaaguuagugccaggguucggaaaggccuacacaauauucaauaaaacccugauggaggcugaugcccauuauaagucgguuaggacguggaacgagauuauccccucuaaaggcugccuccgggugggcgggcguugucacccgcacgucaagggaguguuuuucaaugguauuauccuuggcccugacgggcauguacugauccccgaaaugcaguccucauugcuacagcaacacauggagcugcucgaaaguagcguuauuccacugaugcauccucuugcggaucccuccaccguguuuaaagacggagaugaggcagaagacuucgucgaggugcaccucccagauguccauaagcagauaucuggcguggacuugggucuccccagcugggggaaguacguucuggccucagcuggcguguuaguaguccugaugcuaacaaucuuuauuaucacuugcuguggacgcgugcacagaccuaaaaguacccagcacggccucgggggaacagguaggaagguuuccgugacuagccagucuggcaaagucauaucaaguugggagagcuauaaguccgggggagaaacccggcuguga

SEQ ID NO: 159837 - RNA, 1575 nt, Artificial Sequence; identical to SEQ ID NO: 159386
  derived and/or modified CDS sequence (opt3) from glycoprotein__RABV__KU534941.1

SEQ ID NO: 159838 - RNA, 1575 nt, Artificial Sequence; identical to SEQ ID NO: 159172
  derived and/or modified CDS sequence (opt3) from glycoprotein__RABV__KU534942.1

SEQ ID NO: 159839 - RNA, 1575 nt, Artificial Sequence
  derived and/or modified CDS sequence (opt3) from glycoprotein__RABV__KU739036.1
auggugccccagguccugugguucguuccucuccuuguguuuagcaugugcuucggcaaguuuccaaucuacaccauuccggacaaacuggggcccugguccccuauagauauccaccauuugucuuguccaaacaauuuaguaguggaggacgaaggaugcacaaaccugucagguuucaguuauauggagcuaaaggucggcuacauuagcgccaucaaagugaauggguuuacuuguacgggaguugugaccgaagcugagacauauacuaacuucgucggcuacgugaccacaaccuuuaagagaaaacacuucaggcccacuccugaugcaugccgggccgcguauaauuggaagauggcuggugacccacgcuacgaagagucccuccauaaccccuauccugauuaccacuggcugcgaacaguaaagaccacgaaagagucucuuguuauuaucucgccaucaguggccgaccuggauccguacgacaagagcuugcauagucgugucuuucccuccgggaaauguucuggaauaacuaucagcuccaccuauugcucaacaaaucacgauuacacuauuuggaugccugaaaacccaagacucggcaccaguugugacaucuucgcaaauagcaggggcaagcgggccucuaaaggguccaagacaugcggauuuguggaugagcgcggucuguauaagucacugaaaggcgcuuguaagcucaaauuaugcggggugcugggacuuagauugauggacggcaccugggucgcaaugcaaacgagcgaugaaacuaaguggugucccccugaccagcugguuaaccuacacgacuucaggagugaugagauugagcaucucgugguagaggaacuggugaaaaagcgggaagagugccuugacgcccuggaaucuaucaugacaaccaaauccgucagcuuucgccgauugucgcaccucagaaagcuggugccagguuucgggaaggcuuacacuauauucaauaaaacauuaauggaggccgaugcgcauuauaagucuguuaggaccuggaacgagauuauccccuccaaaggaugccugcgggugggcggccguugucacccgcacgucaaugggguguuuuucaacggaauuauccucgguccugacggccauguacuuauccccgaaaugcagucaagucuguugcagcaacacauggagcuacuggaaagcuccguuauuccacucaugcauccucuggcagaucccucuacgguguuuaaggacggggaugaggccgaagacuucgucgaggugcaccuuccagauguccauaaacagauaagcggaguggaccugggcuugcccaauugggguaaguacguucucgugucagcugggguacuggucguguuaaugcuggccaucuuuauuaugaccugcuguggccgcguuaacagaccuaagaguacacagcacucccuagagggaacuggcaggaaagugagcgucaccucucagucagggaaggugaucaguagcugggaauccuauaaaucuggaggugagacacggcucuga

SEQ ID NO: 159840 - RNA, 1575 nt, Artificial Sequence
  derived and/or modified CDS sequence (opt3) from glycoprotein__RABV__KU739037.1
auggugccccaggcccuccuguucgucccucuucugguuuuuccauugugcuucggcaaguuuccgaucuacaccauucccgacaaauuagggccuuggagcccaauagauauccaccaucuguccugucccaacaaucuagugguagaggacgaaggaugcacaaaccucucugguuucucauauauggagcugaaggugggcuacauuagugcuaucaaagucaauggguuuacuuguacgggagugguuaccgaagcagagacauauacuaacuucgugggcuacgucaccacaaccuuuagaaggaagcacuuccggccuacuccagaugccugccgcgcggcuuauaauuggaaaauggccggugacccccgauacgaagagagccuucauaacccuuauccagauuaccacuggcugcguacagugaagaccacgaaggaguccuugguaauuaucucuccgucgguugcagaccucgaucccuacgacaaaucacugcauagcagaguguuuccugggggaaaguguaguggcauaacugucuccucuaccuauugcagcacaaaucacgauuacacuaucuggcugccagaaaaccccaggcucggcaccuccugugacauuuucacaaauucacgggggaaacgcgccaguaagggaagcaaaaccugcgguuuuguggaugagagaggcuuauauaagucucugaagggggcuuguaaacuuaaguugugcggagugcugggccuaaggcucauggacgguacgugggucgcaaugcaaacuuccgaugaaacaaaaugguguccuccagaccagcugguuaaccuucacgacuuccggucagaugagaucgagcaucuggugguagaagaguuggugaagaaacgcgaagagugccucgacgcccuggaaagcauuaugaccacuaagagugucucuuuucgaagauuaucccaccugaggaaacucgugcccggguucggaaaggcuuacacaaucuucaauaagacccuuauggaggccgaugcgcauuauaaaagcguucggacguggaacgagauaauuccgucgaagggcugccugcgugugggcgggcgcugucaccaccaugucaauggaguguuuuucaacgguaucauuuugggcccugacgggcacguacuaauccccgaaaugcagucuucccugcuccagcaacauauggagcugcuugaaucaaguguuaucccacugaugcacccuuuggcagaucccagcaccguguuuaaagacggagaugaggccgaagacuucgucgaggugcaucucccagauguccacaaacagguguccggcguugaccuggguuuacccaauugggggaaguacgugcugcuaucugcuggcgcccucauugcacugaugcuuauaaucuuuuugaugacaugcuguagaaggguaaaccggccugagagcacucagcgaucauucggaggcaccgaacgcgaggucaguauuacaccacaguccgggaaggugaucagcucuugggaaucauauaagaguggaggugagacuagacuguga

SEQ ID NO: 159841 - RNA, 1575 nt, Artificial Sequence
  derived and/or modified CDS sequence (opt3) from glycoprotein__RABV__KU739038.1
auggugccccuggcccuccuugucguuccucuguugguguuaagccugugcuccggcaaguucccaaucuacaccauuccggacaaacuagggcccuggucuccuauagauauccaccaucucucauguccaaacaaucugguaguggaggacgaaggaugcacaaaccuuagugguuuuagcuauauggagcugaaggucggcuacauuuccgcuaucaaagugaauggguucacuuguacgggaguugugaccgaagcagagacauauacuaacuuugucggcuacgugaccacaaccuucagaaggaagcacuuucggcccacuccugaugccugccgcgcggcuuauaauuggaaaauggccggugacccacgauacgaagagucuuugcauaaccccuauccugauuaccacuggcuccguacaguaaagaccacgaaggagucgcugguuauuaucucaccaagcguggcagaccuggauccguacgacagaagucuccauuccagggucuuccccaaugggaaauguucuggaauaacugugagcuccaccuauugcccuacaaaccacgauuacacuaucuggaugccagaaaauccccgguuaggcaccucaugugacauuuuugugaacagucgcggcaagagagccagcaaagggucuaagacaugcggauucgucgaugagaggggucuguauaaaucccuuaagggcgcuuguaaguugaaacugugcgggguucuaggacuccggcugauggacggcaccuggguggcaaugcgcacgucagaugaaacuaagugguguccuccagaccagcuuguaaauauccacgacuuucgaagcgaugagauugagcaucugguggucgaagaguuggugaaaaagagagaagagugccucgacgcccuggaaaguaucaugacaaccaaaucuguuuccuucaggcgguuaagccaccugaggaagcucgugcccgguuuugggaaggcuuacacuauauucaacaaaacacuuauggaggccgaugcgcauuauaagucgguccgcaccugggacgagauuaucccgucuaaaggaugccugagagugggcggccguugucacccucacguacaugggguguuuuucaauggaauuaucuugggucccgauggccacguucuaaucccagaaaugcaauccucacugcuccagcagcauauggagcugcuugaaaguagcgucauuccucugaugcaccccuuggcagacccauccacgguguucaaggauggggacgaggccgaagauuuugucgaggugcaucuccccgacguucacaaacagauaucuggaguggaucugggcuuaccuaacugggguaaguacguacugaugagcgcuggggcccuaaucgcacucaugcugauuaucuuccuuaugaccugcugucggaaaauaaagcaaccagagucaacacagcacaguuugcgaggcacuggacgcaaggucuccgugaccagccagaauggcaaaguuauuucuucaugggaaaguuauaagagcgggggagagacaagacuguga

SEQ ID NO: 159842 - RNA, 1575 nt, Artificial Sequence
  derived and/or modified CDS sequence (opt3) from glycoprotein__RABV__KU739043.1
auggugccccugacccuccuugucguuccucuguugguguuaagccugugcuccggcaaguucccaaucuacacaauuccggacaaacuagggcccuggucuccuauagauauccaccaucucucauguccaaacaaucugguaguggaggacgaaggaugcacuaaccuuagugguuuuagcuauauggagcugaaggucggcuacauuuccgccaucaaagugaauggguucacguguaccggaguugugacagaagcugagacuuauaccaacuuugucggcuacgugacaaccacuuucagaaggaagcacuuucggcccacaccugaugcaugccgcaccgccuauaauuggaaaauggcgggugacccacgauacgaagagucuuugcauaaccccuauccugauuaccacuggcuccguacgguaaagacuaccaaggagucgcugguuauuaucucaccaagcguggcugaccuggauccguacgacagaagucuccauuccagggucuuccccaaugggaaauguucuggaauaacagugagcuccacuuauugcccuaccaaccacgauuacacaaucuggaugccagaaaauccccgguuaggcaccucaugugacauuuuugugaacagucgcggcaagagagccagcaaagggucuaagacgugcggauucgucgaugagaggggucuguauaaaucccuuaagggcgcauguaaguugaaacugugcgggguucuaggacuccggcugauggacggcacuuggguggccaugcgcacaucagaugaaaccaagugguguccuccagaccagcuuguaaauauccacgacuuucauagcgaugagauugagcaccugguggucgaagaguuggugaaaaagcgagaagagugccucgacgcucuggaaaguaucaugacuacaaaaucuguuuccuucagaagguuaagccaucugcggaagcucgugcccgguuuugggaaagcauacaccauauucaacaagacgcuuauggaggccgaugcucacuauaagucgguccguaccugggacgagauuaucccgucuaaaggaugccugcgcgugggcggcagaugucacccucauguacacgggguguuuuucaauggaauuaucuugggucccgauggccauguucuaaucccagaaaugcaauccucacugcuccagcagcacauggagcugcuugaaaguagcgucauuccucugaugcaucccuuggccgacccauccacaguguucaaggauggggacgaggcggaagauuuugucgaggugcaccuccccgacguucacaaacagauaucuggaguggaucugggcuuaccuaacugggguaaguacguacugaugagcgcaggggcccuaaucgcucucaugcugauuaucuuccuuaugacuugcuguaggaaaauaaagcggccagagucaacccaacauaguccgcgaggcacaggacgcaaggucuccgugacuagccagaauggcaaaguuauuucuucaugggaaaguuauaagagcgggggagagaccagauuguga

SEQ ID NO: 159843 - RNA, 1575 nt, Artificial Sequence
  derived and/or modified CDS sequence (opt3) from glycoprotein__RABV__KU739044.1
auggugccccaggcccuccuguucgucccucuucugguuuuuagcuugugcuucggcaaguuuccaaucuacaccauuccggacaaauuagggcccugguccccuauagauauccaccaucugucuuguccaaacaaucuagugguagaggacgaaggaugcacaaaccucucagguuucaguuauauggagcugaaggugggcuacauuagcgcuaucaaagucaauggguuuacuuguacgggagugguuaccgaagcagagacauauacuaacuucgugggcuacgucaccacaaccuuuaagagaaaacacuucaggcccacuccugaugccugccgggcggcuuauaauuggaagauggccggugacccacgcuacgaagagucccuucauaaccccuauccugauuaccacuggcugcgaacagugaagaccacgaaagagucuuugguaauuaucucgccaucaguugcagaccucgauccguacgacaagagccugcauagucguguguuucccuccgggaaauguucuggaauaacugucagcuccaccuauugcucaacaaaucacgauuacacuaucuggaugccugaaaacccaagacugggcaccaguugugacauuuucacaaauagcaggggcaagcgggccucuaaaggguccaagaccugcggauuuguggaugagcgcggucucuauaagucauuaaaaggcgcuuguaagcugaaacuuugcgggguguugggacugagacuaauggacggcacgugggucgcaaugcaaacuagcgaugaaacaaaguggugucccccugaccagcucguuaaccugcacgacuucaggagugaugagaucgagcaucuugugguagaggaacuggugaaaaagcgggaagagugcuuggacgcccucgaaucuauuaugaccacuaaauccgucagcuuucgccgacugucgcacuuaagaaagcuggugccagguuucgggaaggcuuacacaaucuucaauaaaacccucauggaggccgaugcgcauuauaagucuguuaggacguggaacgagauaauucccuccaaaggaugccuucgggugggcggccguugucacccgcacgucaaugggguguuuuucaacggaaucauucuggguccugacggccauguauugauccccgaaaugcagucaagucuacugcagcaacacauggagcuccuggaaagcuccguuaucccacuuaugcauccucuggcagaucccucuaccguguuuaaggacggggaugaggccgaagacuucgucgaggugcacuugccagauguccauaaacaggugagcggaguugaccucggccugcccaauugggguaaguacguguuacugucagcugggacacuaauugcccucaugcugauaaucuuucuuaugacuugcugucgcagaguaaacaggccuaagaguacccagcggggcccaggagagacaggccgaaaagucuccgugacuagccagucugggaagguuauuucaaguugggaaagcuauaaauccggaggugagacccgcuuguga

SEQ ID NO: 159844 - RNA, 1575 nt, Artificial Sequence; identical to SEQ ID NO: 158603
  derived and/or modified CDS sequence (opt3) from glycoprotein__RABV__KU739045.1

SEQ ID NO: 159845 - RNA, 1575 nt, Artificial Sequence; identical to SEQ ID NO: 159735
  derived and/or modified CDS sequence (opt3) from glycoprotein__RABV__KU739047.1

SEQ ID NO: 159846 - RNA, 1575 nt, Artificial Sequence
  derived and/or modified CDS sequence (opt3) from glycoprotein__RABV__KU739048.1
auggugccccaggcccuccuguucgucccucuucugggcuuuagcuugugcuucgggaaguuuccaaucuacaccauuccggacaaauuaggacccugguccccuauagauauccaccaucugucuuguccaaacaaucuaguuguggaggacgaagguugcacaaaccucucaggcuucaguuauauggagcugaagguaggguacauuagcgcuaucaaagugaauggauuuacuuguacgggcgucgugaccgaagcagagacauauacuaacuucguugguuacgugaccacaaccuuuaagagaaaacacuucaggcccacuccugaugccugccgggcggcuuauaauuggaagauggccggggacccacgcuacgaagagucccuucauaaccccuauccugauuaccacuggcugcgaacagucaagaccacgaaagagucuuuggugauuaucucgccaucaguagcagaccucgauccguacgacaagagccugcauagucguguuuuucccggaggcaaauguuccggcauaacugugucuagcaccuauugcuccacaaaucacgauuacacuaucuggcugccugaaaacccaagacucgggaccucaugugacauuuucacaaauaguaggggaaagcgggccagcaaagguucuaagaccugcggcuuugucgaugagcgcggguuauauaagucccugaaaggagcuuguaaacuuaaauugugcggcgugcugggucuaagacucauggacgggacguggguggcaaugcaaacuucagaugaaacaaagugguguagccccgaccagcuggucaaccuucacgacuucaggagugaugagaucgagcaucugguuguggaagaguugguaaagaagcgggaagagugccucgacacccuggaaucuauuaugacuacaaaauccgugagcuuucgccgauuaucgcaccugagaaagcucgucccuggauucggcaaggccuacaccaucuucaauaaaacgcuuauggaggcugaugcccauuauaagucugugaggaccuggaacgagauaauuccauccaaaggcugccugcggguugggggacguugucaccaccaugugaauggugucuuuuucaacggcaucauuuuggggcccgacggacacgugcuaaucccggaaaugcagucaagucugcuccagcaacauauggagcugcuugaaagcuccguaaucccucugaugcaccccuuggcggauccaucuacaguuuuuaaggacggcgaugaggcagaagacuucguggagguccaucucccugaugugcacaaacaggucagcgguguggaccugggguuacccaauuggggcaaguacguucugcuaucagccggagcucucguggcccugaugcuuauuauauuuuugaugacuugcugucgcagaguaaacaggccagagaguacccagcgguccuucggcgggacagaacgaaaggucagcaucacuccccagucuggaaaagugauuucaaguugggagagcuauaaguccgguucugaaacccgccuguga

SEQ ID NO: 159847 - RNA, 1575 nt, Artificial Sequence
  derived and/or modified CDS sequence (opt3) from glycoprotein__RABV__KU739049.1
auggugccccaggcccugcuccuugucccucuguugggcuucagcuuaugcuuugggaaguucccaaucuacaccauuccggacaaacugggacccugguccccuauagauauccaccaucuaucuuguccaaacaaucucguuguggaggacgaagguugcacaaaccugucaggcuuuaguuauauggagcuuaagguaggguacauuagcuccaucaaagugaauggauucacuuguacgggcgucgugaccgaagcugagacauauacuaacuuuguugguuacgugaccacaaccuucagaaggaagcacuuucggcccacuccugaugcaugccgcgccgcguauaauuggaaaauggcuggggacccacgauacgaagagucucugcauaaccccuauccugauuaccacugguugcguacagucaagaccacgaaggagucgcucgugauuaucucaccaagcguagccgaccuggauccguacgacaaaagucugcauuccagaguuuuccccucuggaaaguguagcggcauaacuguguccucaaccuauugcaguacaaaucacgauuacacuaucuggaugccugaaaaccucagguuaggcaccagcugugacauuuuuacaaauucucgggggaaacgcgcauccaagggaucaaaaaccugcgguuucgucgaugagagaggccuguauaagagccuuaagggggccuguaaauugaagcugugcggagugcuaggccucaggcugauggacgguacguggguggcuaugcaaacaagugaugaaacuaaaugguguccacccgaccagcuugucaaccugcacgacuuucggucugaugagaucgagcauuugguuguggaggaacucguaaagaaacgcgaagagugccuggacgcauuagaauccauuaugaccacuaagagcgugucguuccgaagacugucucaccucaggaaacuugucccuggguuuggaaaggccuacacaaucuucaauaagacccugauggaggcugaugcccauuauaaauccgugcggacguggaacgagguuauaccaucacguggcugcuugcgcgugggcgggagaugucacccccacgucaauggaguguucuuuaacgguauuauccuaggcccggacgggcauguacugauuccugaaaugcagaguagccuccugcagcaacacaucgagcuucuggaauccucuguuauccccuugacccauccacucgcggauccuagcacaguguucaaggacggagaugaggcagaagacuuugucgaggugcaucugcccgauguccacaaacaggugucaggcguugacuuaggucugccaaauugggggaaguacgugcuacucagugccggcgcucugauugcccuuauguugauaaucuuccugauuacuugcuguaggcggguaaaccgacccgaguccacccagcgcagccucagaggagcaggcaggaaagucucuaucacaucacagagugggaaggugauaagcuccugggaaucuuauaagucgggaggugagacucggcuguga

SEQ ID NO: 159848 - RNA, 1575 nt, Artificial Sequence
  derived and/or modified CDS sequence (opt3) from glycoprotein__RABV__KU739050.1
auggugccccaggcccuucucuucgucccucuucugguuuuuagcuugugcuucggcaaguuuccaaucuacaccauuccggacaaauuagggcccugguccccuauagauauccaccaucugucuuguccaaacaaucuagugguagaggacgaaggaugcacaaaccucucagguuucaguuauauggagcugaaggugggcuacauuagcgcuaucaaagucaauggguuuacuuguacgggagugguuaccgaagcagagacauauacuaacuucgugggcuacgucaccacaaccuuuagaaggaagcacuuccggcccacuccugaugccugccgcgcggcuuauaauuggaaaauggccggugacccacgauacgaagagucccuucauaaccccuauccugauuaccacuggcugcguacagugaagaccacgaaggagucuuugguaauuaucucgccaucaguugcagaccucgauccguacgacaaaagccugcauaguagaguguuucccuccgggaaguguucuggaauaacugucagcuccaccuauugcucaacaaaucacgauuacacuaucuggaugccugaaaacccaaggcugggcaccaguugugacauuuucacaaauagccggggcaaacgcgccucuaagggguccaaaaccugcggauuuguggaugagagaggucucuauaagucauuaaagggcgcuuguaaacugaagcugugcgggguguugggacugaggcuaauggacggcacgugggucgcaaugcaaacuacagaugaaaccaaauggugucccccugaccagcucguuaaccugcacgacuuccggagcgaugagaucgagcaucuugugguagaggaacuggugaagaaacgcgaagagugcuuggacgcccucgaaaguauuaugacuacaaagucugucuccuuucgaagacugagccacuuaaggaaacuggugccagguuucgggaaggcuuacaccaucuucaauaagacgcucauggaggccgaugcgcauuauaaaucgguucggaccuggaacgagauaauucccucuaagggaugccuucgugugggcggccgcugucacccgcacgucaaugggguguuuuucaacggaaucauucuggguccugacggccauguauugauccccgaaaugcaguccucacuacugcagcaacacauggagcuccuggaaaguagcguuaucccacuuaugcauccucuggcagaucccuccacaguguuuaaagacggggaugaggccgaagacuucgucgaggugcacuugccagauguccauaaacaggugucuggaguugaccucggccugcccaauugggguaaguacguguuacugagcgcugggacucuaauugcccucaugcugauaaucuuucuuaugaccugcuguagaaggguaaaccggccugagucaaugcagcgaaguuugggcgaaacaggacgcaaggucuccgugacuagccagucuggcaagguuauuucaaguugggagagcuauaaauccgggggagaaaccagacuguga

SEQ ID NO: 159849 - RNA, 1575 nt, Artificial Sequence
  derived and/or modified CDS sequence (opt3) from glycoprotein__RABV__KU888637.1
auggugccccaggcccuccuguucgucccucuucugguuuuuagcuugugcuucggcaaguuuccaaucuacaccauuccggacaaauuagggcccugguccccuauagauauccaccaucugucuuguccaaacaaucuagugguagaggacgaaggaugcacaaaccucucagguuucaguuauauggagcugaaggugggcuacauuagcgcuaucaaagucaauggguuuacuuguacgggagugguuaccgaagcagagacauauacuaacuucgugggcuacgucaccacaaccuuuaagagaaaacacuucaggcccacuccugaugccugccgggcggcuuauaauuggaagauggccggugacccacgcuacgaagagucccuucauaaccccuauccugauuaccacuggcugcgaacagugaagaccacgaaagagucuuugguaauuaucucgccaucaguugcagaccucgauccguacgacaagagccugcauagucguguguuucccuccgggaaauguucuggaauaacugucagcuccaccuauugcucaacaaaucacgauuacacuaucuggaugccugaaaacccaagacugggcaccaguugugacauuuucgccaauagcaggggcaagcgggcuucuaaaggguccaagacaugcggauuuguggaugagcgcggucucuauaagucauuaaaaggcgcauguaagcugaaacuuugcgggguguugggacugagacuaauggacggcaccugggucgccaugcaaacgagcgaugaaacuaaguggugucccccugaccagcucguuaaccugcacgacuucaggagugaugagaucgagcaucuugugguagaggaacuggugaaaaagcgggaagagugcuuggacgcucucgaaucuauuaugacaaccaaauccgucagcuuucgccgacugucgcacuuaagaaagcuggugccagguuucgggaaggccuacacuaucuucaauaaaacacucauggaggcggaugcacauuauaagucuguuaggaccuggaacgagauaauucccuccaaaggaugccuucgggugggcggccguugucacccgcacgucaaugggguguuuuucaacggaaucauucuggguccugacggccauguauugauccccgaaaugcagucaagucuacugcagcaacacauggagcuccuggaaagcuccguuaucccacuuaugcauccucuggccgaucccucuacgguguuuaaggacggggaugaggcugaagacuucgucgaggugcacuugccagauguccauaaacaggugagcggaguugaccucggccugcccgguugggggaaguacguguuacugucagccggcgcacuaauugcucucaugcugauaaucuuucuuaugaccugcugucgcagaguaaauaggccugagaguacacagcgguccuugggaggcacugggcgaaaggucagcauuaccucucagucaggaaaagugaucaguagcugggaauccuauaagucugguggcgagacacgccuguga

SEQ ID NO: 159850 - RNA, 1575 nt, Artificial Sequence; identical to SEQ ID NO: 159386
  derived and/or modified CDS sequence (opt3) from glycoprotein__RABV__KU888639.1

SEQ ID NO: 159851 - RNA, 1575 nt, Artificial Sequence
  derived and/or modified CDS sequence (opt3) from glycoprotein__RABV__KU888640.1
auggugccccaggcccuccuguucgucccucuucugggcuuuagcuugugcuucgggaaguuuccaaucuacaccauuccggacaaauuaggacccugguccccuauagauauccaccaucugucuuguccaaacaaucuaguuguggaggacgaagguugcacaaaccucucaggcuucaguuauauggagcugaagguaggguacauuagcgcuaucaaagugaauggauuuacuuguacgggcgucgugaccgaagcagagacauauacuaacuucguugguuacgugaccacaaccuuuaagagaaaacacuucaggcccacuccugaugccugccgggcggcuuauaauuggaagauggccggggacccacgcuacgaagagucccuucauaaccccuauccugauuaccacuggcugcgaacagucaagaccacgaaagagucuuuggugauuaucucgccaucaguagcagaccucgauccguacgacaagagccugcauagucguguuuuucccuccggaaaauguucuggcauaacugugagcuccaccuauugcccuacaaaucacgauuacacuaucuggaugccagaaaaccccagacugggcaccucaugugacauuuucacaaguagcaaggggaaaagggccucuaagggauccaagaccugcgguuuugucgaugagcggggccucuauaaaucauuaaagggggcuuguaaacugaaacuuugcggaguguugggccugcgccuaauggacgguacguggguggcaaugcaaacuagcgaugaaacaaaaugguguccuccagaccagcucgucaaucugcacgacuucagaagugaugagaucgagcaucuuguuguggaggaacugguaaagaaaagggaagagugcuuggacgcccucgaaucuauuaugaccacuaaguccgugagcuuucggcgccugucgcacuuacgaaagcugguccccggguucggaaaggcuuacacaaucuucaacaagacccucauggaggccgaugcgcauuauaaaucugugagaacguggaaugagauaauuccguccaagggcugccuuaggaucggcgggcggugucacccucacguuaacggaguguuuuucaaugguauuauccugggccccgacgggcaugucuugaucccagaaaugcagucaagucuacugcagcaacacauggagcuccuggaaagcuccgugauuccucuuaugcauccccuggcagauccaucuaccguauugaaagacggagaugaggccgaagacuuuguugaggugcaccuccccgauguccauaagcagauaagcggcguggaccuggguuuaccuaacugggggaaguacguccugcuaucagcuggcgcccucaucgcacugaugcuuauuaucuucuugaugacaugcugucgucgcgugaauagacaggagaguacucagaggucccugggaggcaccgggcggaaaguuagcauaacaucucaaucaggaaaggugauuaguagcugggaauccuauaaaucugguggcgagacucgacucuga

SEQ ID NO: 159852 - RNA, 1575 nt, Artificial Sequence
  derived and/or modified CDS sequence (opt3) from glycoprotein__RABV__KU888641.1
auggugccccaggcccugcucgucaucccucuucugggcuucagcuugugcuuugggaaguucccaauuuacaccauaccggacaaauuaggacccugguccccuaucgauauucaccaucugucuuguccaaacaaucuaaucguugaggacgaagguugcacaaaccucucaggcuuuaguuauauggagcugaaggugggguacauuagcgcuaucaaaguaaauggauucacuuguacgggcguggucaccgaagcagagacauauacuaacuuuguggguuacguuaccacaaccuucaagagaaaacacuuuaggcccacuccugaugaaugccgggccgcguauaauuggaagauggcuggggacccacgcuacgaggagucccuucauaaccccuauccugauuaccacuggcugcgaacagugaagaccacgaaagaaucuuuggucauaaucucgccaucaguggccgaccucgauccguacgacaagagccugcauagucguguauuccccuccggaaaauguucuggcauuacuguuagcuccaccuauugcucaacaaaucacgauuacacuaucuggaugccugagaacccaagacugggcaccaguugugacauuuuuacaaauagcagggggaagcgggcaucuaaaggauccaagaccugcgguuucguggaugaacgcggccucuauaagucauuaaaaggggccuguaagcugaaacuuugcggagucuugggccugaagcuaauggacgguacguggguggcuaugcaagcaagcgaugagacuaaauggugucccccugaccagcucgugaaccugcacgaccuuagaagugaugagaucgaacaucuggucguugaggaauuggugaagaaaagggaggaaugccucgacgcccuggagucuauaaugacaaccaaguccgugagcuuucggcgcuuaucgcaucugcgaaagcucguaccaggguucggaaaggcuuacacuauuuuuaauaaaacacuuauggaggccgaugcgcacuauaaaucugucagaaccuggaacgaaaucauucccuccaagggcugccugaaagugggcgggaggugucacccgcacguuaauggaguguucuucaacggugucaucuugggcccugacgggcaugugcuaauccccgagaugcagucaagucugcuccagcaacacauggaacugcuugagagcuccguaauuccacugaugcauccuuuggcagaucccucuacgguuuuuaaggacggagaagaggccgaggauuucguggaaguccaccucccagacgugcauaagcaggucagcggcguggaucuggguuuacccaauugggggaaauacguuucacugggcgcuggagcccuaauagcacucaugcugaccauccuuuugauuacaugcugucggcgugugaaccgcccugagccaacuagaaggagucuggaaggcaaggagcggaaaguauccgucaccagccagucugggaaggugaucucaaguugggaaagcuauaaauccggaggugagacacgacucuga

SEQ ID NO: 159853 - RNA, 1575 nt, Artificial Sequence
  derived and/or modified CDS sequence (opt3) from glycoprotein__RABV__KU888642.1
auggugccccaggcccuccuguucgucccucuucugggcuuuagcuugugcuucgggaaguuuccaaucuacaccauuccggacaaauuaggacccugguccccuauagauauccaccaucugucuuguccaaacaaucuaguuguggaggacgaagguugcacaaaccucucaggcuucaguuauauggagcugaagguaggguacauuagcgcuaucaaagugaauggauuuacuuguacgggcgucgugaccgaagcagagacauauacuaacuucguugguuacgugaccacaaccuuuaagagaaaacacuucaggcccacuccugaugccugccgggcggcuuauaauuggaagauggccggggacccacgcuacgaagagucccuucauaaccccuauccugauuaccacuggcugcgaacagucaagaccacgaaagagucuuuggugauuaucucgccaucaguagcagaccucgauccguacgacaagagccugcauagucguguuuuucccuccggaaaauguucuggcauaacugugagcuccaccuauugcucaacaaaucacgauuacacuaucuggaugccugaaaacccaagacugggcaccaguugugacauuuucacaaauagcaaggggaaaagggccucuaagggauccaagaccugcgguuuugucgaugagcggggccucuauaaaucauuaaagggggcuuguaaacugaaacuuugcggaguguugggccugcgccuaauggacgguacguggguggcaaugcaaacuagcgaugaaacaaaauggugucccccugaccagcucgucaaccugcacgacuucagaagugaugagaucgagcaucuuguuguggaggaacugguaaagaaaagggaagagugcuuggacgcccucgaaucuauuaugaccacuaaguccgugagcuuucggcgccugucgcacuuacgaaagcuggucccaggguucggaaaggcuuacacaaucuucaauaagacccucauggaggccgaugcgcauuauaaaucugugagaacguggaacgagauaauucccuccaagggcugccuuaggguuggcgggcggugucacccgcacgugaauggagucuuuuucaacgguaucauucugggcccugacgggcauguguugauccccgaaaugcagucaagucuacugcagcaacacauggagcuccuggaaagcuccguaaucccacuuaugcauccucuggcagaucccucuaccguuuugaaagacagcgaugaggccgaagacuuuguggagguccaccucccagaugugcauaagcagauuucaggagucgaccugggcuuacccaauugggguaaguacgugcugcuaagugcuggggcccucauagcacugaugcuuaucauuuucuugaugacaugcugucgucgcguuaacagacaggaguccacucagaggagccugggcggaaccggccggaaagugucuaucacaucacaaagugggaagguaauaagcuccugggaaucuuauaaaucgggaggugagacucgacucuga

SEQ ID NO: 159854 - RNA, 1575 nt, Artificial Sequence; identical to SEQ ID NO: 158893
  derived and/or modified CDS sequence (opt3) from glycoprotein__RABV__KU888643.1

SEQ ID NO: 159855 - RNA, 1575 nt, Artificial Sequence
  derived and/or modified CDS sequence (opt3) from glycoprotein__RABV__KU946961.1
augaucccccaggcccuccuguucgugccucuucuggucuuuccauugugcuucggcaaguuuccgauuuacaccauacccgacaaauuagggccuuggagcccaaucgauauucaccaucuguccugucccaacaaucuaguuguggaggacgaaggaugcacaaaccucucugguuucucauauauggagcugaagguaggcuacaucagugcuauuaaagugaauggguuuacuuguacgggagucgugaccgaagcagagacauauacuaacuucguuggcuacgugaccacaaccuuuaagagaaaacacuucaggccuacuccagaugccugccggagcgcguauaauuggaagauggcuggugacccccgcuacgaagagucccuucauaacccuuauccagauuaccacuggcugcgaacagucaagaccacgaaagagucugugguaaucauaucgccgucaguugccgacuuggaucccuacgacaagagccuccauagucguguguuuccuagagggaaauguuccggaaucacugucucuagcgcauauugcuccaccaaucacgauuacacaauuuggaugccagaaaaccccaggcugggcacuucaugugacaucuucaccaauagucggggcaagcgcgccagcaaagggucuaagacaugcggauuuguggaugagagaggucuguauaagucccucaaaggcgcuuguaaguuaaaacugugcggggugcuuggauugaggcugauggacggcaccugggucgcaauucaaacgucaaacgaaacuaagugguguccuccagaucagcuaguuaaucuccacgacuuccauagcgacgagaucgagcaccuggugguagaagagguggucaaaaagcgggaagagugccuugaugcccuggaaaguauaaugacaaccaaaucuguguccuuucgccgauugagccaucucagaaagcugguucccgguuucgggaaggcuuacacuauuuucaacaaaacauuaauggaggccgacgcgcacuauaagucggugcagaccugggaugagaucauuccgucuaaaggaugccugagggucggcggccggugucacccucaugugaaugggguauuuuucaacggaaucauccucggucccgacggccacguucuuauuccagaaaugcaguccucacuguugcaacagcauauggagcuacugaagaguagcgugauaccucucaugcacccccuggcagauccauccacggucuuuaaagacggggaugaaguggaggacuucgucgaagugcaucuucccgauguucacaaacaggugucuggaguagaccugggcuugccuaauugggguaaggauguccucaugggggccggcgugcugaccgcuuuaaugcugaugaucuuucuaaugacaugcugucgucgcacuaacagagccgagagcauucagcacucacucggagagaccggcaggaagguuagugugacaucccaaagcgggcgggucaucucuucaugggaaaguuacaagagcggaggugagacuaaacuguga

SEQ ID NO: 159856 - RNA, 1575 nt, Artificial Sequence; identical to SEQ ID NO: 159522
  derived and/or modified CDS sequence (opt3) from glycoprotein__RABV__KX036361.1

SEQ ID NO: 159857 - RNA, 1575 nt, Artificial Sequence
  derived and/or modified CDS sequence (opt3) from glycoprotein__RABV__KX036363.1
auggugccccaggcccuccuguucgucccucuucuggcuuuuccaaugugcuucggcaaguuuccgaucuacaccauucccgacaaauuggggccuuggagcccaauagauauccaccauuuauccugucccaacaaucugguuguggaggacgaaggaugcacaaaccuaucugguuucucauauauggagcucaagguaggcuacauuagugcaaucaaagugaauggguuuacuuguacgggagucgugaccgaagccgagacauauacuaacuucguuggcuacgugaccacaaccuuuaagagaaaacacuucaggccuacuccagaugcgugccgggcugccuauaauuggaagauggccggugacccccgcuacgaagagagccugcauaacccuuauccagauuaccacuggcuucgaacagucaagaccacgaaagagucccugauuaucauaucuccgucgguggcagacuuggaucccuacgacaagucacuccauagccguguauuuccuagugggaaaugucugggaaucacuauuuccucuaccuauugcagcacaaaucacgauuacacuaucuggaugccagaaaacguuagacugggcaccuccugugacauuuucacaaauucaaggggcaagcgggcuaguaaagggagcaagaccugcggauuuguggaugagcgcggucucuauaagucuuuaaaaggcgcauguaagcugaaacuuugcggggucuugggacugagacuaauggacggcacguggguggccaugcccacuuccgaugaaacaaagugguguccuccagaccaacucgugaaccugcacgacuucaggucagaugagaucgagcaucuugucguugaggaacuggugcggaaacgcgaagagugcuuggacgcucucgaaagcauaaugaccacuaagaguguaucuuuucgaagacugucccacuuaaggaaacuggugcccgguuucgggaaggccuacacaauuuucaauaagacccucauggaggcggaugcacauuauaaaagcguccggacguggaacgagaucauuccgucgaagggaugccuucgugugggcggccgcugucacccucacguuaaugggguguuuuucaacggaaucauccugggucccgacggccaugucuugauuccagaaaugcagucuucccuacugcagcagcacauggagcuccuggaaucaagugugauaccucuuaugcauccccuggccgauccaagcaccguauuuaaagacggggaugaggcugaagacuucguugaggugcacuugcccgauguccauaagcaaaucuccggaguggaccucggccugccuaauugggguaaauacgucuuaauuaucgccggggugcugauagcaaugauucuaacaaucuuucucaugacuugcuguggcagaggaaacaggccaaagucuaagcagcacagccugggcgggaucggacggaaaguuucaaguaccucccagagcgguaaggugauuucuucaugggagaguuauaaaagcggcggggaaacacgacuuuga

SEQ ID NO: 159858 - RNA, 1575 nt, Artificial Sequence; identical to SEQ ID NO: 159857
  derived and/or modified CDS sequence (opt3) from glycoprotein__RABV__KX036364.1

SEQ ID NO: 159859 - RNA, 1575 nt, Artificial Sequence; identical to SEQ ID NO: 159857
  derived and/or modified CDS sequence (opt3) from glycoprotein__RABV__KX036365.1

SEQ ID NO: 159860 - RNA, 1575 nt, Artificial Sequence
  derived and/or modified CDS sequence (opt3) from glycoprotein__RABV__KX036366.1
auggugccccaggcccuacucuucgucccucuuauggcuuuuccaaugugcuucggcaaguuuccgaucuacaccauucccgacaaacuggggccuuggagcccaauagauauccaccauuuguccugucccaacaauuuaguuguggaggacgaaggaugcacaaaccugucugguuucucauauauggagcuaaagguaggcuacauuagugcaaucaaagugaauggguuuacuuguacgggagucgugaccgaagccgagacauauacuaacuucguuggcuacgugaccacaaccuuuaagagaaaacacuucaggccuacuccagaugcgugccgggcugccuauaauuggaagauggccggugacccccgcuacgaagagagccuccauaacccuuauccagauuaccacuggcugcgaacagucaagaccacgaaagagucccuuauuaucauaucuccgucgguggcagaccuggaucccuacgacaagucauugcauagccguguauuuccuagugggaaaugucucggaaucacuauuuccucuaccuauugcagcacaaaucacgauuacacuaucuggaugccagacaacguuagacugggcaccuccugugauauuuucacaaauucaaggggcaagcgggcuaguaaagggagcaagaccugcggauuuguggacgaacgcggucuguauaagucucucaaaggcgcauguaaguuaaaacugugcgggguccuuggauugagacugauggauggcacguggguggccaugcccacuuccgacgagacaaagugguguccuccagaccaacuggugaaccuccacgauuucaggcuggacgaaaucgagcaucuugucguugaggaacuggugcggaaacgcgaggaaugcuuggaugcucucgagucaauaguaaccacuaagagcgugaguuuucgaagacugucucacuuaaggaaacugguccccgguuucgggaaggccuacacaauuuucaauaagacccucauggaagcggacgcacauuauaaauccgugcggacguggaacgagaucauuccgagcaagggaugccuucguguuggcggccgcugucacccucacgugaauggggucuuuuucaacggaaucauccugggucccgauggccauguguugauuccagagaugcagucgucucuacugcagcagcacauggaacuccuggaguccucaguaauaccucuuaugcauccccuggccgacccaaguaccguuuuuaaagauggggacgaagcugaggauuucguggaaguccacuugcccgacgugcauaagcaaaucagcggagucgaucucggccugccuaauugggguaaauacguguuaauuaucgccgggguucugauagcaaugauucuaacaaucuuucucaugacuugcuguggcagaggaaacaggccaaaguccacccagcacucucugggcgggaucggacggaaggugagcucaacaagucaguccgguaaaguaauuagcucuugggagucauauaagaguggcggggagacucgacuuuga

SEQ ID NO: 159861 - RNA, 1575 nt, Artificial Sequence
  derived and/or modified CDS sequence (opt3) from glycoprotein__RABV__KX036367.1
auggugccccaggcccuccuguucgucccucuucuggcuuuuccaaugugcuucggcaaguuuccgaucuacaccauucccgacaaauuggggccuuggagcccaauagauauccaccauuuauccugucccaacaaucugguuguggaggacgaaggaugcacaaaccuaucugguuucucauauauggagcucaagguaggcuacauuagugcaaucaaagugaauggguuuacuuguacgggagucgugaccgaagccgagacauauacuaacuucguuggcuacgugaccacaaccuuuaagagaaaacacuucaggccuacuccagaugcgugccgggcugccuauaauuggaagauggccggugacccccgcuacgaagagagccugcauaacccuuauccagauuaccacuggcuucgaacagucaagaccacgaaagagucccugauuaucauaucuccgucgguggcagacuuggaucccuacgacaagucacuccauagccguguauuuccuagugggaaaugucugggaaucacuauuuccucuaccuauugcagcacaaaucacgauuacacuaucuggaugccagaaaacguuagacugggcaccuccugugacauuuucacaaauucaaggggcaagcgggcuaguaaagggagcaagaccugcggauuuguggaugagcgcggucucuauaagucuuuaaaaggcgcauguaagcugaaacuuugcggggucuugggacugagacuaauggacggcacguggguggccaugcccacuuccgaugaaacaaagugguguccuccagaccaacucgugaaccugcacgacuucaggucagaugagaucgagcaucuugucguugaggaacuggugcggaaacgcgaagagugcuuggacgcucucgaaagcauaaugaccacuaagaguguaucuuuucgaagacugucccacuuaaggaaacuggugcccgguuucgggaaggccuacacaauuuucaauaagacccucauggaggcggaugcacauuauaaaagcguccggacguggaacgagaucauuccgucgaagggaugccuucgugugggcggccgcugucacccucacguuaaugggguguuuuucaacggaaucauccugggucccgacggccaugucuugauuccagaaaugcagucuucccuacugcagcagcacauggagcuccuggaaucaagugugauaccucuuaugcauccccuggccgauccaagcaccguauuuaaagacggggaugaggcugaagacuucguugaggugcacuugcccgauguccauaagcaaaucuccggaguggaccucggccugccuaauugggguaaauacgucuuaauuaucgccggggugcugauagcaaugauucuaacaaucuuucucaugacuugcuguggcagaggaaacaggccaaugucuaagcagcacagccugggcgggaucggacggaagguuucaaguaccucccagagcgguaaagugauuucuucaugggagaguuauaagagcggcggggaaacacgacuuuga

SEQ ID NO: 159862 - RNA, 1575 nt, Artificial Sequence
  derived and/or modified CDS sequence (opt3) from glycoprotein__RABV__L40426.1
auggugccccagguccuucucuucguucuucuguugggcuuuagcuuaugcuucgggaaguuuccuaucuacaccauuccagacaaacugggaccguggucccccauagauauccaccaucuaagauguccuaacaaucucgugguagaggacgaagguugcacaaaccugucuggcuucucauauauggagcuuaaggugggguacauuagugccaucaaagucaauggauuuacuuguacgggcgugguuaccgaagcugagacauauacuaacuucguggguuacgucaccacaaccuuuaagaggaaacacuuccggccaacucccgaugcaugccgcgccgcguauaauuggaagauggcuggggacccucgauacgaagagagccugcaaaacccauaucccgauuaccauugguugcguacagugagaaccacgaaggagucccucauuaucauaucuccuucgguaacugaccuggauccauacgacaaaucacugcacagcaggguuuuuccgggaggcaaguguaguggcaucaccguguccucuacauauugcagcacuaaucaugauuacaccauuuggaugcccgaaaacccucggccagggacacccugugacaucuucaccaauucccgcggaaaaagagccucaaacgguaauaagacgugcggcuuugucgaugagagggggcucuauaaaaguuuaaagggagcaugucggcugaagcugugcggcguguugggucugcgccuaauggacgggacuuggguggccaugcagacaagcgaugaaaccaaaugguguucuccugaccagcucgucaaccugcacgacuuccgauccgaugagauugagcaccuuguuguggaggaacugguaaagaaaagagaagagugcuuggacacucucgaaucaaucaugacaaccaagagcgugaguuuuaggcggcugucucauuuacguaaacuggucccaggauucggcaaggcuuacacgauauucaauaaaacccucauggaggcagaugcccacuauaaguccgugcgcacauggaacgagauuauccccagcaagggcugccuuaaaguugggggaagaugucauccgcacgugaauggugucuuuuucaacggcauuauccuggggccugacgauaggguguugauccccgaaaugcagucgucucuacugcggcaacacauggagcuccuggaauccucaguaauuccacuuaugcauccucuggcugaccccaguacuguuuuuaaggagggagaugaagccgaggacuucguggagguccacuugccagauguguacaaacagauaagcggcgucgaccucggucugcccaacugggggaaguauguguuaaugaccgcgggcgcaaugaucggacugguucuaaucuuuucccucaugacauggugccgacgcgccaauagaccugaaucuaaacagaggagcuucggcgggacuggagguaacgugucaguaaccagucaguccggcaaggucauuccaagcugggagucuuacaagucagggggagaaauacggcuguga

SEQ ID NO: 159863 - RNA, 1575 nt, Artificial Sequence; identical to SEQ ID NO: 158620
  derived and/or modified CDS sequence (opt3) from glycoprotein__RABV__LC009632.1

SEQ ID NO: 159864 - RNA, 1575 nt, Artificial Sequence
  derived and/or modified CDS sequence (opt3) from glycoprotein__RABV__LC009633.1
augaucccccaggcccuccuguucgugccucuucuggucuuuagcuugugcuucggcaaguuuccaauuuacaccauaccggacaaauuagggcccugguccccuaucgauauucaccaucugucuuguccaaacaaucuaguuguggaggacgaaggaugcacaaaccucucagguuucaguuauauggagcugaagguaggcuacaucagcgcuauuaaagugaauggguuuacuuguacgggagucgugaccgaagcagagacauauacuaacuucguuggcuacgugaccacaaccuuuaagagaaaacacuucaggcccacuccugaugccugccgggcggcuuauaauuggaagauggccggugacccacgcuacgaagagucccuucauaaccccuauccugauuaccacuggcugcgaacagucaagaccacgaaagagucuuuggugaucauaucgccaucaguagcagaccucgauccguacgacaagagccugcauagucguguuuuucccuccgggaaauguucuggaaucacugugagcuccaccuauugcucaacaaaucacgauuacacuauuuggaugccugaaaacccaagacugggcaccaguugugacaucuucacaaauagcaggggcaagcgggccucuaaagggaacaagaccugcggauuugucgaugagcgcggucucuauaaguccuuaaaaggcgcuuguaagcugaaacuuugcgggguguugggacugagacuaauggacggcacgugggcagccauucaaacuucagaugaaacaaaguggugucccccugaccagcucgugaaucugcacgacuucaggagcgaugagaucgagcaucuugucguugaggaacuggugaaaaagcgggaagagugcuuggacgcucucgaaaguauaaugaccacuaaaucuguauccuuucgccgacugagccacuuaagaaagcuggugccagguuucgggaaggccuacacaauuuucaacaaaacccucauggaggcggaugcacauuauaagucggucaggacguggaaugagaucauucccucuaaaggaugccuucgggugggcggccguugucacccgcacguuaacgggguguuuuucaauggaaucauccuggguccugacggccaugucuugauucccgaaaugcaguccucacuacugcagcaacacauggagcuccuggaaaguagcgugauaccacuuaugcauccucuggccgaucccuccaccguauuuaaggacgaugacgaggcugaagauuucguugaggugcacuugccagacguccauaaacaggugucuggggucgaucucggacugcccagcuggggcaaguacguguuaaugucagccgguguucugacagcacuaaugcucaugaucuuucugaugacuugcugucgcagagcuaacagggccgagagugcgcagcacucccuuggggaacggggccgaaaggugagcguaaccucucagucaggacgcgucauuaguagcugggaguccuauaaaucuggcggggaaacaaaguuguga

SEQ ID NO: 159865 - RNA, 1575 nt, Artificial Sequence
  derived and/or modified CDS sequence (opt3) from glycoprotein__RABV__LC009635.1
auggugccccagguccuccuguucguucuucuguugggcuuuagcuuaugcuucgggaaguuuccuaucuacaccauuccagacgagcugggaccguggucccccauagauauccaccaucuaucuuguccuaacaaucucgugguagaagacgaggguugcacaaaccugucagaauuuaguuauauggagcuuaaagugggcuacauuagcgccaucaaggucaauggguuuacuuguacgggagugguuaccgaagcugagacauauacuaacuucgugggcuacgucaccacaaccuuuaaaagaaagcacuucaggccaacucccgaugcaugccgggccgcguauaauuggaaaauggcuggugacccucgcuacgaggaaucccugcauaacccauaucccgauuaccacugguugcgaacagugcguaccacgaaggagucucucauuaucauaucgccuucaguaacugaccuggauccauacgacaagagccugcauaguagaguuuuucccgggggaaaauguuccggcaucaccgugucuagcacauauugcuccacuaaucacgauuacaccauuuggaugccggaaaacccuaggccacggacacccugugacaucuucaccaauucacgcggcaagagagccaguaacgggagcaaaacgugcggauuugucgaugagaggggucucuauaagucuuuaaaaggcgcaugucggcugaaacuuugcgggguguugggacugcgccuaauggacggcacuuggguggccaugcaaacauccgaugagaccaagugguguccuccagaccagcucgucaaucugcacgacuuccgaucagaugaaauugagcaucuuguuguggaggaacugguaaagaagagagaagagugcuuggacgcucucgagagcaucaugacuacaaaaagugugucuuuuaggcggcugucccacuuacguaagcugguccccgguuucgggaaagcauacaccauauucaacaagacgcucauggaagccgaugcucauuauaaaagcgugcgcaccuggaaugagauuaucccgucgaagggaugccuuaagguuggcggcagaugucacccucacgugaacggggucuuuuucaauggaauuauccugggucccgacgaucauguguugaucccagaaaugcagucuucccuacugcagcaacacauggagcuccuggaaucaaguguaauuccucuuaugcauccccuggccgacccaagcacaguuuuuaaagagggcgaugaggcggaagacuucguggagguccacuugcccgauguguacaagcagauauccggggucgaccucggacugccuaacuggggcaaauauguguuaaugacugccggugcaaugaucgggcugguucuaauuuucucucucaugaccuggugcaggcgggcuaaccgaccagaaagcaagcagcgcucauucggcggaacaggcgggaaugugaguguaacuucccagagcggaaaagucaucccgucuugggagucauacaagagugguggcgaaauaagacuguga

SEQ ID NO: 159866 - RNA, 1575 nt, Artificial Sequence; identical to SEQ ID NO: 158620
  derived and/or modified CDS sequence (opt3) from glycoprotein__RABV__LC018482.1

SEQ ID NO: 159867 - RNA, 1575 nt, Artificial Sequence; identical to SEQ ID NO: 158619
  derived and/or modified CDS sequence (opt3) from glycoprotein__RABV__LC018483.1

SEQ ID NO: 159868 - RNA, 1575 nt, Artificial Sequence; identical to SEQ ID NO: 158646
  derived and/or modified CDS sequence (opt3) from glycoprotein__RABV__LC018484.1

SEQ ID NO: 159869 - RNA, 1575 nt, Artificial Sequence; identical to SEQ ID NO: 158643
  derived and/or modified CDS sequence (opt3) from glycoprotein__RABV__LC018485.1

SEQ ID NO: 159870 - RNA, 1575 nt, Artificial Sequence; identical to SEQ ID NO: 158620
  derived and/or modified CDS sequence (opt3) from glycoprotein__RABV__LC018486.1

SEQ ID NO: 159871 - RNA, 1575 nt, Artificial Sequence; identical to SEQ ID NO: 158643
  derived and/or modified CDS sequence (opt3) from glycoprotein__RABV__LC018487.1

SEQ ID NO: 159872 - RNA, 1575 nt, Artificial Sequence; identical to SEQ ID NO: 158647
  derived and/or modified CDS sequence (opt3) from glycoprotein__RABV__LC018488.1

SEQ ID NO: 159873 - RNA, 1575 nt, Artificial Sequence; identical to SEQ ID NO: 158643
  derived and/or modified CDS sequence (opt3) from glycoprotein__RABV__LC018489.1

SEQ ID NO: 159874 - RNA, 1575 nt, Artificial Sequence; identical to SEQ ID NO: 158643
  derived and/or modified CDS sequence (opt3) from glycoprotein__RABV__LC018490.1

SEQ ID NO: 159875 - RNA, 1575 nt, Artificial Sequence; identical to SEQ ID NO: 158620
  derived and/or modified CDS sequence (opt3) from glycoprotein__RABV__LC018493.1

SEQ ID NO: 159876 - RNA, 1575 nt, Artificial Sequence; identical to SEQ ID NO: 158643
  derived and/or modified CDS sequence (opt3) from glycoprotein__RABV__LC018494.1

SEQ ID NO: 159877 - RNA, 1575 nt, Artificial Sequence; identical to SEQ ID NO: 158643
  derived and/or modified CDS sequence (opt3) from glycoprotein__RABV__LC018495.1

SEQ ID NO: 159878 - RNA, 1575 nt, Artificial Sequence; identical to SEQ ID NO: 158643
  derived and/or modified CDS sequence (opt3) from glycoprotein__RABV__LC018496.1

SEQ ID NO: 159879 - RNA, 1575 nt, Artificial Sequence
  derived and/or modified CDS sequence (opt3) from glycoprotein__RABV__LC018497.1
augaucccccaggcccuccuguucgugccucuucuggucuuuagcuugugcuucggcaaguuuccaauuuacaccauaccggacaaauuagggcccugguccccuaucgauauucaccaucugucuuguccaaacaaucuaguuguggaggacgaaggaugcacaaaccucucagguuucaguuauauggagcugaagguaggcuacaucagcgcuauuaaagugaauggguuuacuuguacgggagucgugaccgaagcagagacauauacuaacuucguuggcuacgugaccacaaccuuuaagagaaaacacuucaggcccacuccugaugccugccgguccgcguauaauuggaagauggcuggugacccacgcuacgaagagucucuucauaaccccuauccugauuaccacuggcugcgaacagucaagaccacgaaagagucguuggugaucauaucaccaagcguagccgaccucgauccguacgacaagagucugcauucccguguuuuucccucugggaaauguagcggaaucacuguguccucaaccuauugcaguacaaaucacgauuacacuauuuggaugccugaaaacccaagacugggcaccagcugugacaucuucacaaauucuaggggcaagcgggcauccaaagggucaaagaccugcggauuugucgaugagcgcggucucuauaagagcuuaaaaggcgccuguaagcugaaacuuugcgggguguugggacugagacuaauggacggcacgugggcugcaauucaaacaagugaugaaacuaaguggugucccccugaccagcucgugaaccugcacgacuucaggucugaugagaucgagcaucuugucguugaggaacuggugaaaaagcgggaagagugcuuggacgcccucgaauccauaaugaccacuaaaagcguaucguuucgccgacugucucacuuaagaaagcuggugccagguuucgggaaggcuuacacaauuuucaauaaaacccucauggaggccgaugcgcauuauaaguccgucaggacguggaacgagaucauucccucaaaaggaugccuucgggugggcggccguugucacccgcacguuaaugggguguuuuucaacggaaucauccuggguccugacggccaugucuugauucccgaaaugcagaguagccuacugcagcaacacauggagcuccuggaauccucugugauaccacuuaugcauccucuggcagaucccagcaccguauuuaaggacgaugacgaggccgaagauuucguugaggugcacuugccagacguccauaaacaggugucaggggucgaucucggacugcccaguuggggcaaguacguguuaauguccgcugguguucugacagcccuaaugcucaugaucuuucugacucgcugcuguagaagggcaaaucgggcugagagcgcccagcacucucuuggggaacgaggccgcaaggugucaguaaccagucagagcggaagagucauuuccucuugggagucguauaaaagcggcggggaaacaaaguuguga

SEQ ID NO: 159880 - RNA, 1575 nt, Artificial Sequence; identical to SEQ ID NO: 158643
  derived and/or modified CDS sequence (opt3) from glycoprotein__RABV__LC018498.1

SEQ ID NO: 159881 - RNA, 1575 nt, Artificial Sequence
  derived and/or modified CDS sequence (opt3) from glycoprotein__RABV__LC018501.1
augaucccccaggcccuucucuucgugccucuucuggucuuuagcuugugcuucggcaaguuuccaauuuacaccauaccggacaaauuagggcccugguccccuaucgauauucaccaucugucuuguccaaacaaucuaguuguggaggacgaaggaugcacaaaccucucagguuucaguuauauggagcugaagguaggcuacaucagcgcuauuaaagugaauggguuuacuuguacgggagucgugaccgaagcagagacauauacuaacuucguuggcuacgugaccacaaccuuuaagagaaaacacuucaggcccacuccugaugccugccgggcggcuuauaauuggaagauggccggugacccacgcuacgaagagucccuucauaaccccuauccugauuaccacuggcugcgaacagucaagaccacgaaagagucuuuggugaucauaucgccaucaguagcagaccucgauccguacgacaagagccugcauagucguguuuuucccuccgggaaauguucuggaaucacugugagcuccaccuauugcucaacaaaucacgauuacacuauuuggaugccugaaaacccaagacugggcaccaguugugacaucuucacaaauagcaggggcaagcgggccucuaaaggguccaagaccugcggauuugucgaugagcgcggucucuauaagucauuaaaaggcgcuuguaagcugaaacuuugcgggguguugggacugagacuaauggacggcacgugggcagccauucaaacuagcgaugaaacaaaguggugucccccugaccagcucgugaaccugcacgacuucaggagugaugagaucgagcaucuugucguugaggaacuggugaaaaagcgggaagagugcuuggacgcucucgaaucuauaaugaccacuaaauccgugagcuuucgccgacugucgcacuuaagaaagcugguaccagguuucgggaaggccuacacaauuuucaauaaaacccucauggaggcggaugcacauuauaagucugucaggacguggaacgagaucauucccuccaaaggaugccuucgggugggcggccguugucacccgcacguuaaugggguguuuuucaacggaaucauccuggguccugacggccaugucuugauucccgaaaugcagucaagucuacugcagcaacacauggagcuccuggaaagcuccgugauaccacuuaugcauccucuggccgaucccucuaccguauuuaaggacgaugacgaggcugaagauuucguugaggugcacuugccagacguccauaaacaggugagcggggucgaucucggacugcccucauggggcaaguacguguuaaugagugccgguguucugacagcacuaaugcucaugaucuuucugaugacuugcugucgcagaaccaauagggcugaguccgcccagcacagcccuggggaacggggccgaaaggugucuguaacaucacagaguggacgcgucauuagcuccugggagucuuauaaaucgggcggggaaacuaagcuguga

SEQ ID NO: 159882 - RNA, 1575 nt, Artificial Sequence; identical to SEQ ID NO: 158620
  derived and/or modified CDS sequence (opt3) from glycoprotein__RABV__LC018502.1

SEQ ID NO: 159883 - RNA, 1575 nt, Artificial Sequence
  derived and/or modified CDS sequence (opt3) from glycoprotein__RABV__LC018503.1
augaucccccaggcccuucucuucgugccucuucuggucuuuagcuugugcuucggcaaguuuccaauuuacaccauaccggacaaauuagggcccugguccccuaucgauauucaccaucugucuuguccaaacaaucuaguuguggaggacgaaggaugcacaaaccucucagguuucaguuauauggagcugaagguaggcuacaucagcgcuauuaaagugaauggguuuacuuguacgggagucgugaccgaagcagagacauauacuaacuucguuggcuacgugaccacaaccuuuaagagaaaacacuucaggcccacuccugaugccugccgggcggcuuauaauuggaagauggccggugacccacgcuacgaagagucccuucauaaccccuauccugauuaccacuggcugcgaacagucaagaccacgaaagagucuuuggugaucauaucgccaucaguagcagaccucgauccguacgacaagagccugcauagucguguuuuucugaaugggaaauguuccggaaucacugugucuagcaccuauugcuccacaaaccacgauuacacuauuuggaugcccgaaaauccuagacucggcaccucaugugacaucuucacaaacaguaggggcaagcgggccagcaaagggucuaagaccugcggauuugucgaugagcgcgguuuauauaagucccugaaaggcgcuuguaagcugaaauugugcggggugcugggacuaagacucauggacggcacgugggcagccauucaaacuucagaugaaacaaagugguguccacccgaccagcuggugaaucuucacgacuucaggagcgaugagaucgagcaucuggucguugaagaguuggugaaaaagcgggaagagugccucgacgcucuggaaaguauaaugaccacuaaaucuguauccuuucgccgauuaagccaccugagaaagcucgugccugguuucgggaaggccuacacaauuuucaacaaaacccuuauggaggcggaugcacauuauaagucggucaggacguggaaugagaucauuccaucuaaaggaugccugcgggugggcggccguugucacccccacguuaacgggguguuuuucaauggaaucaucuuggguccggacggccauguccuaauuccugaaaugcaguccucacugcuccagcaacacguggagcugcuugaaaguagcguaauaccccugaugcauccauuggccgauccuuccaccguuuuuaaggacgaugacgaggcugaagauuucguggagguccaccuccccgacgugcauaaacaggucucugggguggaucugggauuaccaagcuggggcaaguacguucugaugucagccggugugcuaacagcacucaugcugaugaucuuucuuaugacuugcugucgcagagcuaacagggccgagagugcgcagcacuccuugggggaacggggccgaaagguaagcgucaccucucagucaggacgcgugguuaguagcugggaguccuauaaaucuggcggggaaacaaagcuguga

SEQ ID NO: 159884 - RNA, 1575 nt, Artificial Sequence; identical to SEQ ID NO: 158620
  derived and/or modified CDS sequence (opt3) from glycoprotein__RABV__LC018504.1

SEQ ID NO: 159885 - RNA, 1575 nt, Artificial Sequence
  derived and/or modified CDS sequence (opt3) from glycoprotein__RABV__LC018505.1
augaucccccaggcccuccuguucgugccucuucuggucuuuagcuugugcuucggcaaguuuccaauuuacaccauaccggacaaauuagggcccugguccccuaucgauauucaccaucugucuuguccaaacaaucuaguuguggaggacgaaggaugcacaaaccucucagguuucaguuauauggagcugaagguaggcuacaucagcgcuauuaaagugaauggguuuacuuguacgggagucgugaccgaagcagagacauauacuaacuucguuggcuacgugaccacaaccuuuaagagaaaacacuucaggcccacuccugaugccugccgggcggcuuauaauuggaagauggccggugacccacgcuacgaagagucccuucauaaccccuauccugauuaccacuggcugcgaacagucaagaccacgaaagagucuuuggugaucauaucgccaucaguagcagaccucgauccguacgacaagagccugcauagucguguuuuucccaaugggaaauguuccggaaucacugugucuagcaccuauugcuccacaaaccacgauuacacuauuuggaugccugaaaauccaagacugggcaccucaugugacaucuucacaaacaguaggggcaagcgggccagcaaagggucuaagaccugcggauuugucgaugagcgcggucucuauaaguccuuaaaaggcgcuuguaagcugaaacuuugcgggguguugggacugagacuaauggacggcacgugggcagccauucaaacuucagaugaaacaaaguggugucccccugaccagcucgugaaucugcacgacuucaggagcgaugagaucgagcaucuugucguugaggaacuggugaaaaagcgggaagagugcuuggacgcucucgaaaguauaaugaccacuaaaucuguauccuuucgccgacugagccacuuaagaaagcuggugccagguuucgggaaggccuacacaauuuucaacaaaacccucauggaggcggaugcacauuauaagucggucaggacguggaaugagaucauucccucuaaaggaugccuucgggugggcggccguugucacccgcacguuaacgggguguuuuucaauggaaucauccuggguccugacggccaugucuugauucccgaaaugcaguccucacuacugcagcaacacauggagcuccuggaaaguagcgugauaccacuuaugcauccucuggccgaucccuccaccguauuuaaggacgaugacgaggcugaagauuucguugaggugcacuugccagacguccauaaacaggugucuggggucgaucucggacugcccagcuggggcaaguacguguuaaugucagccgguguucugacagcacuaaugcucaugaucuuucugaugacuugcugucgcagagcuaacagggccgagagugcgcagcacucccuuggggaacggggccgaaaggugagcguaaccucucagucaggacgcgucauuaguagcugggaguccuauaaaucuggcggggaaacaaaguuguga

SEQ ID NO: 159886 - RNA, 1575 nt, Artificial Sequence
  derived and/or modified CDS sequence (opt3) from glycoprotein__RABV__LC018506.1
augaucccccaggcccuccuguucgugccucuucuggucuuuagcuugugcuucggcaaguuuccaauuuacaccauaccggacaaauuagggcccugguccccuaucgauauucaccaucugucuuguccaaacaaucuaguuguggaggacgaaggaugcacaaaccucucagguuucaguuauauggagcugaagguaggcuacaucagcacuauuaaagugaauggguuuacguguaccggagucgugacagaagcugagacuuauaccaacuucguuggcuacgugacaaccacuuuuaagagaaaacacuucaggcccacaccugaugcaugccgggccgcguauaauuggaagauggcuggugacccacgcuacgaagagucccuucauaaccccuauccugauuaccacuggcugcgaaccgucaagacgacuaaagagucuuuggugaucauaucgccaucaguagccgaccucgauccguacgacaagagccugcauagucguguuuuucccaaugggaaauguuccggaaucaccgugucuagcacauauugcuccacuaaccacgauuacaccauuuggaugccugaaaauccaagacugggcacaucaugugacaucuucaccaacaguaggggcaagcgggcaagcaaagggucuaagacgugcggauuugucgaugagcgcggucucuauaaguccuuaaaaggcgccuguaagcugaaacuuugcgggguguugggacugagacuaauggacggcacuugggcugcaauucaaacaucagaugaaaccaaguggugucccccugaccagcucgugaaucugcacgacuucaggagcgaugagaucgagcaucuugucguugaggaacuggugaaaaagcgggaagagugcuuggacgcccucgaaaguauaaugacuacaaaaucuguauccuuucgccgacugagccacuuaagaaagcuggugccagguuucgggaaggcuuacaccauuuucaacaaaacgcucauggaggccgaugcgcauuauaagucggucaggaccuggaaugagaucauucccucuaaaggaugccuucgggugggcggccguugucacccgcacguuaacgggguguuuuucaauggaaucauccuggguccugacggccaugucuugauucccgaaaugcaguccucacuacugcagcaacacauggagcuccuggaaaguagcgugauaccacuuaugcauccucuggcagaucccuccacaguauuuaaggacgaugacgaggccgaagauuucguugaggugcacuugccagacguccauaaacaggugucuggggucgaucucggacugcccagcuggggcaaguacguguuaaugucagcugguguucugacugcccuaaugcucaugaucuuucugaugaccugcugucgcagagcaaacagggcugagagugcccagcacucccuuggggaacggggccgaaaggugagcguaacaucucagucaggacgcgucauuaguagcugggaguccuauaaaucuggcggggaaacuaaguuguga

SEQ ID NO: 159887 - RNA, 1575 nt, Artificial Sequence; identical to SEQ ID NO: 158620
  derived and/or modified CDS sequence (opt3) from glycoprotein__RABV__LC018507.1

SEQ ID NO: 159888 - RNA, 1575 nt, Artificial Sequence; identical to SEQ ID NO: 158643
  derived and/or modified CDS sequence (opt3) from glycoprotein__RABV__LC018508.1

SEQ ID NO: 159889 - RNA, 1575 nt, Artificial Sequence; identical to SEQ ID NO: 158666
  derived and/or modified CDS sequence (opt3) from glycoprotein__RABV__LC018509.1

SEQ ID NO: 159890 - RNA, 1575 nt, Artificial Sequence; identical to SEQ ID NO: 158643
  derived and/or modified CDS sequence (opt3) from glycoprotein__RABV__LC018513.1

SEQ ID NO: 159891 - RNA, 1575 nt, Artificial Sequence; identical to SEQ ID NO: 158643
  derived and/or modified CDS sequence (opt3) from glycoprotein__RABV__LC018514.1

SEQ ID NO: 159892 - RNA, 1575 nt, Artificial Sequence; identical to SEQ ID NO: 158643
  derived and/or modified CDS sequence (opt3) from glycoprotein__RABV__LC018515.1

SEQ ID NO: 159893 - RNA, 1575 nt, Artificial Sequence
  derived and/or modified CDS sequence (opt3) from glycoprotein__RABV__LC018516.1
augaucccccaggcccuucucuucgugccucuucuggucuuuagcuugugcuucggcaaguuuccaauuuacaccauaccggacaaauuagggcccugguccccuaucgauauucaccaucugucuuguccaaacaaucuaguuguggaggacgaaggaugcacaaaccucucagguuucaguuauauggagcugaagguaggcuacaucagcgcuauuaaagugaauggguuuacuuguacgggagucgugaccgaagcagagacauauacuaacuucguuggcuacgugaccacaaccuuuaagagaaaacacuucaggcccacuccugaugccugccgggcggcuuauaauuggaagauggccggugacccacgcuacgaagagucccuucauaaccccuauccugauuaccacuggcugcgaacagucaagaccacgaaagagucuuuggugaucauaucgccaucaguagcagaccucgauccguacgacaagagccugcauagucguguuuuucccuccgggaaauguucuggaaucacugugagcuccaccuauugcucaacaaaucacgauuacacuauuuggaugccugaaaacccaagacugggcaccaguugugacaucuucacaaauagcaggggcaagcgggccucuaaaggguccaagaccugcggauuugucgaugagcgcggucucuauagaucauuaaagggcgcuuguaaacugaagcugugcgggguguugggacugaggcuaauggacggcacgugggcagccauucaaacuagcgaugaaacaaaauggugucccccugaccagcucgugaaccugcacgacuuccggagugaugagaucgagcaucuugucguugaggaacuggugaagaaacgcgaagagugcuuggacgcucucgaaucuauaaugaccacuaaguccgugagcuuucgaagacugucgcacuuaaggaaacuggugccagguuucgggaaggccuacacaauuuucaauaagacccucauggaggcggaugcacauuauaaaucuguccggacguggaacgagaucauucccuccaagggaugccuucgugugggcggccgcugucacccgcacguuaaugggguguuuuucaacggaaucauccuggguccugacggccaugucuugauucccgaaaugcagucaagucuacugcagcaacacauggagcuccuggaaagcuccgugauaccacuuaugcauccucuggccgaucccucuaccguauuuaaagacgaugacgaggcugaagauuucguugaggugcacuugccagacguccauaagcagguaagcggggucgaucucggacugcccucauggggcaaauacguguuaaugagugccgguguucugacagcacuaaugcucaugaucuuucugaugacuugcuguagaaggaccaaucgggcugaguccgcccagcacagccuuggggaacgaggccgcaaggugucuguaacaucacagaguggaagagucauuagcuccugggagucuuauaagucgggcggggaaacuaaauuguga

SEQ ID NO: 159894 - RNA, 1575 nt, Artificial Sequence
  derived and/or modified CDS sequence (opt3) from glycoprotein__RABV__LC018517.1
augaucccccaggcccuucucuucgugccucuucuggucuuuagcuugugcuucggcaaguuuccaauuuacaccauaccggacaaauuagggcccugguccccuaucgauauucaccaucugucuuguccaaacaaucuaguuguggaggacgaaggaugcacaaaccucucagguuucaguuauauggagcugaagguaggcuacaucagcgcuauuaaagugaauggguuuacuuguacgggagucgugaccgaagcagagacauauacuaacuucguuggcuacgugaccacaaccuuuaagagaaaacacuucaggcccacuccugaugccugccgggcggcuuauaauuggaagauggccggugacccacgcuacgaagagucccuucauaaccccuauccugauuaccacuggcugcgaacagucaagaccacgaaagagucuuuggugaucauaucgccaucaguagcagaccucgauccguacgacaagagccugcauagucguguuuuucccaaugggaaauguuccggaaucacugugucuagcaccuauugcuccacaaaccacgauuacacuauuuggaugccugaaaauccaagacugggcaccucaugugacaucuucacaaacaguaggggcaagcgggccagcaaagggucuaagaccugcggauuugucgaugagcgcggucucuauaaguccuuaaaaggcgcuuguaagcugaaacuuugcgggguguugggacugagacuaauggacggcacgugggcagccauucaaacuucagaugaaacaaaguggugucccccugaccagcucgugaaucugcacgacuucaggagcgaugagaucgagcaucuugucguugaggaacuggugaaaaagcgggaagagugcuuggacgcucucgaaaguauaaugaccacuaaaucuguauccuuucgccgacugagccacuuaagaaagcuggugccagguuucgggaaggccuacacaauuuucaacaaaacccucauggaggcggaugcacauuauaagucggucaggacguggaaugagaucauucccucuaaaggaugccuucgggugggcggccguugucacccgcacguuaacgggguguuuuucaauggaaucauccuggguccugacggccaugucuugauucccgaaaugcaguccucacuacugcagcaacacauggagcuccuggaaaguagcgugauaccacuuaugcauccucuggccgaucccuccaccguauuuaaggacgaugacgaggcugaagauuucguugaggugcacuugccagacguccauaaacaggugucuggggucgaucucggacugcccagcuggggcaaguacguguuaaugucagccgguguuaguacagcacugaugcuaaugaucuuucucaugacuugcugucgcagagcuaacagggccgaguccgcgcagcacagccugggggaacggggccgaaaggugucuguaaccucacagaguggacgcgucauuagcuccugggagucuuauaaaucgggcggggaaacaaagcuguga

SEQ ID NO: 159895 - RNA, 1575 nt, Artificial Sequence; identical to SEQ ID NO: 158619
  derived and/or modified CDS sequence (opt3) from glycoprotein__RABV__LC018518.1

SEQ ID NO: 159896 - RNA, 1575 nt, Artificial Sequence; identical to SEQ ID NO: 158619
  derived and/or modified CDS sequence (opt3) from glycoprotein__RABV__LC018519.1

SEQ ID NO: 159897 - RNA, 1575 nt, Artificial Sequence; identical to SEQ ID NO: 158620
  derived and/or modified CDS sequence (opt3) from glycoprotein__RABV__LC018520.1

SEQ ID NO: 159898 - RNA, 1575 nt, Artificial Sequence
  derived and/or modified CDS sequence (opt3) from glycoprotein__RABV__LC018522.1
augaucccccaggcccuucucuucgugccucuucuggucuuuagcuugugcuucggcaaguuuccaauuuacaccauaccggacaaauuagggcccugguccccuaucgauauucaccaucugucuuguccaaacaaucuaguuguggaggacgaaggaugcacaaaccucucagguuucaguuauauggagcugaagguaggcuacaucagcgcuauuaaagugaauggguuuacuuguacgggagucgugaccgaagcagagacauauacuaacuucguuggcuacgugaccacaaccuuuaagagaaaacacuucaggcccacuccugaugccugccgggcggcuuauaauuggaagauggccggugacccacgcuacgaagagucccuucauaaccccuauccugauuaccacuggcugcgaacagucaagaccacgaaagagucuuuggugaucauaucgccaucaguagcagaccucgauccguacgacaagagccugcauagucguguuuuucccaaugggaaauguuccggaaucacugugucuagcaccuauugcuccacaaaccacgauuacacuauuuggaugccugaaaauccaagacugggcaccucaugugacaucuucacaaacaguaggggcaagcgggccagcaaagggucuagaaccugcggauuugucgaugagcgcggucucuauaaguccuuaaagggcgcuuguaaacugaagcugugcgggguguugggacugaggcuaauggacggcacgugggcagccauucaaacuucagaugaaacaaaauggugucccccugaccagcucgugaaucugcacgacuuccggagcgaugagaucgagcaucuugucguugaggaacuggugaagaaacgcgaagagugcuuggacgcucucgaaaguauaaugaccacuaagucuguauccuuucgaagacugagccacuuaaggaaacuggugccagguuucgggaaggccuacacaauuuucaacaagacccucauggaggcggaugcacauuauaaaucgguccggacguggaaugagaucauucccucuaagggaugccuucgugugggcggccgcugucacccgcacguuaacgggguguuuuucaauggaaucauccuggguccugacggccaugucuugauucccgaaaugcaguccucacuacugcagcaacacauggagcuccuggaaaguagcgugauaccacuuaugcauccucuggccgaucccuccaccguauuuaaagacgaugacgaggcugaagauuucguugaggugcacuugccagacguccauaaacaggugucuggggucgaucucggacugcccagcuggggcaaguacguguuaaugucagccgguguucugacagcacuaaugcucaugaucuuucugaugacuugcuguagaagggcuaaccgggccgagagugcgcagcacucccuuggggaacgaggccgcaaggugagcguaaccucucagucaggaagagucauuaguagcugggaguccuauaagucuggcggggaaacaaaauuguga

SEQ ID NO: 159899 - RNA, 1575 nt, Artificial Sequence
  derived and/or modified CDS sequence (opt3) from glycoprotein__RABV__LC018523.1
augaucccccaggcccuccuguucgugccucuucuggucuuuagcuugugcuucggcaaguuuccaauuuacaccauaccggacaaauuagggcccugguccccuaucgauauucaccaucugucuuguccaaacaaucuaguuguggaggacgaaggaugcacaaaccucucagguuucaguuauauggagcugaagguaggcuacaucagcgcuauuaaagugaauggguuuacuuguacgggagucgugaccgaagcagagacauauacuaacuucguuggcuacgugaccacaaccuuuaagagaaaacacuucaggcccacuccugaugccugccgggcggcuuauaauuggaagauggccggugacccacgcuacgaagagucccuucauaaccccuauccugauuaccacuggcugcgaacagucaagaccacgaaagagucuuuggugaucauaucgccaucaguagcagaccucgauccguacgacaagagccugcauagucguguuuuucccuccgggaaauguucuggaaucacugugagcuccaccuauugcucaacaaaucacgauuacacuauuuggaugccugaaaacccaagacugggcaccaguugugacaucuucacaaauagcaggggcaagcgggccucuaaaggguccaagaccugcggauuugucgaugagcgcggucucuauaagucauuaaaaggcgcuuguaagcugaaacuuugcgggguguugggacugagacuaauggacggcacgugggcagccauucaaacuagcgaugaaacaaaguggugucccccugaccagcucgugaaccugcacgacuucaggagugaugagaucgagcaucuugucguugaggaacuggugaaaaagcgggaagagugcuuggacgcucucgaaucuauaaugaccacuaaauccgugagcuuucgccgacugucgcacuuaagaaagcugguaccagguuucgggaaggccuacacaauuuucaauaaaacccucauggaggcggaugcacauuauaagucugucaggacguggaacgagaucauucccuccaaaggaugccuucgggugggcggccguugucacccgcacguuaaugggguguuuuucaacggaaucauccuggguccugacggccaugucuugauucccgaaaugcagucaagucuacugcagcaacacauggagcuccuggaaagcuccgugauaccacuuaugcauccucuggccgaucccucuaccguauuuaaggacgaugacgaggcugaagauuucguugaggugcacuugccagacguccauaaacaggugagcggggucgaucucggacugcccucauggggcaaguacguguuaaugagugccgguauccugacagcacuaaugcucaugauuuuucugaugacuugcugucgcagagcuaauaggguugaguccgcccagcacagccuuggggaacggggccgaaaggugucuguaaccucacagaguggacgcgucaucagcuccugggagucuuauaaaucgggcggggaaacaaaguuguga

SEQ ID NO: 159900 - RNA, 1575 nt, Artificial Sequence; identical to SEQ ID NO: 158619
  derived and/or modified CDS sequence (opt3) from glycoprotein__RABV__LC018524.1

SEQ ID NO: 159901 - RNA, 1575 nt, Artificial Sequence
  derived and/or modified CDS sequence (opt3) from glycoprotein__RABV__LC018525.1
augaucccccaggcccuucucuucgugccucuucuggucuuuagcuugugcuucggcaaguuuccaauuuacaccauaccggacaaauuagggcccugguccccuaucgauauucaccaucugucuuguccaaacaaucuaguuguggaggacgaaggaugcacaaaccucucagguuucaguuauauggagcugaagguaggcuacaucagcgcuauuaaagugaauggguuuacuuguacgggagucgugaccgaagcagagacauauacuaacuucguuggcuacgugaccacaaccuuuaagagaaaacacuucaggcccacuccugaugccugccgggcggcuuauaauuggaagauggccggugacccacgcuacgaagagucccuucauaaccccuauccugauuaccacuggcugcgaacagucaagaccacgaaagagucuuuggugaucauaucgccaucaguagcagaccucgauccguacgacaagagccugcauagucguguuuuucccuccgggaaauguucuggaaucacugugagcuccaccuauugcucaacaaaucacgauuacacuauuuggaugccugaaaacccaagacugggcaccaguugugacaucuucacaaauagcaggggcaagcgggccucuaaaggguccaagaccugcggauuugucgaugagcgcggucucuauaagucauuaaaaggcgcuuguaagcugaaacuuugcgggguguugggacugagacuaauggacggcacgugggcagccauucaaacuagcgaugaaacaaaguggugucccccugaccagcucgugaaccugcacgacuucaggagugaugagaucgagcauuuugucguugaggaacuugugaaaaagcgggaagagugccuggacgcuuuggaaucuauaauuaccacuaaauccgugagcuuccgccgacucucgcaccugagaaaguuaguaccagguuucgggaaggccuacacaaucuuuaauaaaacccugauggaggcggaugcacauuauaagucugucaggacguggaacgagauuauccccuccaaaggaugccuccgggugggcggccguugucacccgcacguuaaugggguguucuuuaacggaaucauucuugguccugacggccauguccugauacccgaaaugcagucaaguuugcuacagcaacacauggagcugcucgaaagcuccgugaucccacugaugcauccucuugccgaucccucuaccguauucaaggacgaugacgaggcugaagauuuuguugaggugcaucugccagacguccacaaacaggugagcggggucgauuugggacuccccucauggggcaaguacgugcugaugagugccgguguuuuaacagcacugaugcuaaugauuuuccucaugacuugcugucgcagagcuaauagggccgaguccgcgcagcacagccugggggaacggggccgaaaggugucuguaaccucacagaguggacgcgucaucagcuccugggagucuuauaaaucgggcggggaaacaaagcuguga

SEQ ID NO: 159902 - RNA, 1575 nt, Artificial Sequence
  derived and/or modified CDS sequence (opt3) from glycoprotein__RABV__LC018526.1
augaucccccaggcccuucucuucgugccucuuauggucuuuagccugugcuucggcaaguuuccaauuuacaccauaccggacaaauuggggcccugguccccuaucgauauucaccauuuaucuuguccaaacaaucugguuguggaggacgaaggaugcacaaaccuaucagguuucaguuauauggagcucaagguaggcuacaucagcgcuauuaaagugaauggguuuacuuguacgggagucgugaccgaagcagagacauauacuaacuucguuggcuacgugaccacaaccuuuaagagaaaacacuucaggcccacuccugaugccugccgggcggcuuauaauuggaagauggccggugacccacgcuacgaagagucccugcauaaccccuauccugauuaccacuggcuucgaacagucaagaccacgaaagagucucuggugaucauaucgccaucaguagcagacuuggauccguacgacaagagccuccauagucguguuuuucccuccgggaaauguucuggaaucacugugagcuccaccuauugcucaacaaaucacgauuacacuauuuggaugccugaaaacccaagacugggcaccaguugugacaucuucacaaauagcaggggcaagcgggccucuaaaggguccaagaccugcggauuugucgaugagcgcggucuguauaagucacucaaaggcgcuuguaaguuaaaacugugcggggugcuuggauugagacugauggacggcacgugggcagccauucaaacuagcgaugaaacaaaguggugucccccugaccagcuagugaaccuccacgacuucaggagugaugagaucgagcaucuggucguugaggaacuugugaaaaagcgggaagagugccuggacgcuuuggaaucuauaaugaccacuaaauccgugagcuuucgccgacucucgcaccugagaaaguuaguaccagguuucgggaaggccuacacaauuuucaauaaaacccugauggaggcggaugcacauuauaagucugucaggacguggaacgagaucauucccuccaaaggaugccuccgggugggcggccguugucacccgcacguuaaugggguguuuuucaacggaaucauccuugguccugacggccauguccugauucccgaaaugcagucaaguuugcuacagcaacacauggagcugcucgaaagcuccgugauaccacugaugcauccucuugccgaucccucuaccguauuuaaggacgaugacgaggcugaagauuucguugaggugcaucugccagacguccacaaacaggugagcggggucgauuugggacuccccucauggggcaaguacgugcugaugagugccgguguuuuaacagcacugaugcuaaugaucuuucucaugacuugcugucgcagaaccaauagggcugaguccgcccagcacagccugggggaacggggccgaaaggugucuguaacaucacagaguggacgcgucauuagcuccugggagucuuauaaaucgggcggggaaacuaagcuguga

SEQ ID NO: 159903 - RNA, 1575 nt, Artificial Sequence
  derived and/or modified CDS sequence (opt3) from glycoprotein__RABV__LC018527.1
augaucccccaggcccugcucuuugugccucuucuggucuuuagcuugugcuucggcaaguuuccaauuuacaccauaccggacaaauuagggcccugguccccuaucgauauucaccaucugucuuguccaaacaaucuaaucguugaggacgaaggaugcacaaaccucucagguuucaguuauauggagcugaaggugggcuacauuagcgcuaucaaaguaaauggguuuacuuguacgggaguggucaccgaagcagagacauauacuaacuucgugggcuacguuaccacaaccuuuaagagaaaacacuucaggcccacuccugaugccugccgggcggcuuauaauuggaagauggccggugacccacgcuacgaagagucccuucauaaccccuauccugauuaccacuggcugcgaacagugaagaccacgaaagagucuuuggucauaaucucgccaucaguggcagaccucgauccguacgacaagagccugcauagucguguauuucccuccgggaaauguucuggaauuacuguuagcuccaccuauugcucaacaaaucacgauuacacuaucuggaugccugaaaacccaagacugggcaccaguugugacauuuucacaaauagcaggggcaagcgggccucuaaaggguccaagaccugcggauuuguggaugagcgcggucucuauaagucauuaaaaggcgcuuguaagcugaaacuuugcggggucuugggacugagacuaauggacggcacgugggcagccauccaaacuagcgaugaaacaaaguggugucccccugaccagcucgugaaccugcacgacuucaggagugaugagauagagcaucuuguggucgaggaacugguuaaaaagcgggaagagugcuuggacgcucucgaaucuauuaugaccacuaaauccgugagcuuucgccgacugucgcacuuaagaaagcugguaccagguuucgggaaggccuacacaaucuucaauaaaacccucauggaggcggaugcacauuauaagucugugaggacguggaacgagauuauccccuccaaaggaugccuucgggucggcggccguugucacccgcacgugaaugggguuuucuucaacggaaucauucuggguccugacggccauguguugauacccgaaaugcagucaagucuacugcagcaacacauggagcuccuggaaagcuccgucaucccacuuaugcauccucuggccgaucccucuaccguguuuaaggacgaugacgaggcugaagauuucguagagguucacuugccagacgugcauaaacaggucagcgggguggaucucggacugcccucauggggcaaguacgucuuaaugagugccggugugcugacagcacuaaugcucaugauuuuucugaugacuugcugucgcagaaccaauagggcugaguccgcccagcacagccuuggggaacggggccgaaagguuucugugacaucacagaguggacgcguaaucagcuccugggagucuuauaaaucgggcggggaaacuaaguuguga

SEQ ID NO: 159904 - RNA, 1575 nt, Artificial Sequence; identical to SEQ ID NO: 158643
  derived and/or modified CDS sequence (opt3) from glycoprotein__RABV__LC018529.1

SEQ ID NO: 159905 - RNA, 1575 nt, Artificial Sequence; identical to SEQ ID NO: 158643
  derived and/or modified CDS sequence (opt3) from glycoprotein__RABV__LC018531.1

SEQ ID NO: 159906 - RNA, 1575 nt, Artificial Sequence; identical to SEQ ID NO: 158619
  derived and/or modified CDS sequence (opt3) from glycoprotein__RABV__LC018532.1

SEQ ID NO: 159907 - RNA, 1575 nt, Artificial Sequence; identical to SEQ ID NO: 158643
  derived and/or modified CDS sequence (opt3) from glycoprotein__RABV__LC018534.1

SEQ ID NO: 159908 - RNA, 1575 nt, Artificial Sequence; identical to SEQ ID NO: 158643
  derived and/or modified CDS sequence (opt3) from glycoprotein__RABV__LC018535.1

SEQ ID NO: 159909 - RNA, 1575 nt, Artificial Sequence; identical to SEQ ID NO: 158619
  derived and/or modified CDS sequence (opt3) from glycoprotein__RABV__LC018536.1

SEQ ID NO: 159910 - RNA, 1575 nt, Artificial Sequence; identical to SEQ ID NO: 158643
  derived and/or modified CDS sequence (opt3) from glycoprotein__RABV__LC018539.1

SEQ ID NO: 159911 - RNA, 1575 nt, Artificial Sequence
  derived and/or modified CDS sequence (opt3) from glycoprotein__RABV__LC018540.1
augaucccccaggcccuucucuucgugccucuucuggucuuuagcuugugcuucggcaaguuuccaauuuacaccauaccggacaaauuagggcccugguccccuaucgauauucaccaucugucuuguccaaacaaucuaguuguggaggacgaaggaugcacaaaccucucagguuucaguuauauggagcugaagguaggcuacaucagcgcuauuaaagugaauggguuuacuuguacgggagucgugaccgaagcagagacauauacuaacuucguuggcuacgugaccacaaccuuuaagagaaaacacuucaggcccacuccugaugccugccgggcggcuuauaauuggaagauggccggugacccacgcuacgaagagucccuucauaaccccuauccugauuaccacuggcugcgaacagucaagaccacgaaagagucuuuggugaucauaucgccaucaguagcagaccucgauccguacgaccguagccugcauaguagaguuuuucccuccgggaaguguucuggaaucacugugagcuccaccuauugcucaacaaaucacgauuacacuauuuggaugccugaaaacccaaggcugggcaccaguugugacaucuucacaaauagccggggcaaacgcgccucuaagggguccaaaaccugcggauuugucgaugagagaggucucuauaagucauuaaagggcgcuuguaaacugaagcugugcgggguguugggacugaggcuaauggacggcacgugggcagccauucaaacuagcgaugaaacaaaauggugucccccugaccagcucgugaaccugcacgacuuccggagugaugagaucgagcaucuugucguugaggaacuggugaagaaacgcgaagagugcuuggacgcucucgaaucuauaaugaccacuaaguccgugagcuuucgaagacugucgcacuuaaggaaacuggugccagguuucgggaaggccuacacaauuuucaauaagacccucauggaggcggaugcacauuauaaaucuguccggacguggaacgagaucauucccuccaagggaugccuucgugugggcggccgcugucacccgcacguuaaugggguguuuuucaacggaaucauccuggguccugacggccaugucuugauucccgaaaugcagucaagucuacugcagcaacacauggagcuccuggaaagcuccgugauaccacuuaugcauccucuggccgaucccucuaccguauuuaaagacgaugacgaggcugaagauuucguugaggugcacuugccagacguccauaagcagguaagcggggucgaucucggacugcccucauggggcaaauacguguuaaugagugccgguguucugacagcacuaaugcucaugaucuuucugaugacuugcuguagaagggcuaaucggguggaguccgcccagcacagccuuggggaacgaggccgcaagguaucugucaccucacagaguggaagagugauuagcuccugggagucuuauaagucgggcggggaaacaaaauuguga

SEQ ID NO: 159912 - RNA, 1575 nt, Artificial Sequence
  derived and/or modified CDS sequence (opt3) from glycoprotein__RABV__LC018542.1
augaucccccaggcccuccuguucgugccucuucuggucuuuagcuugugcuucggcaaguuuccaauuuacaccauaccggacaaauuagggcccugguccccuaucgauauucaccaucugucuuguccaaacaaucuaguuguggaggacgaaggaugcacaaaccucucagguuucaguuauauggagcugaagguaggcuacaucagcgcuauuaaagugaauggguuuacuuguacgggagucgugaccgaagcagagacauauacuaacuucguuggcuacgugaccacaaccuuuaagagaaaacacuucaggcccacuccugaugccugccgggcggcuuauaauuggaagauggccggugacccacgcuacgaagagucccuucauaaccccuauccugauuaccacuggcugcgaacagucaagaccacgaaagagucuuuggugaucauaucgccaucaguagcagaccucgauccguacgacaagagccugcauagucguguuuuucccuccgggaaauguucuggaaucacugugagcuccaccuauugcucaacaaaucacgauuacacuauuuggaugccugaaaacccaagacugggcaccaguugugacaucuucacaagcucuaggggcaagcgggccuccaaagggucaaagaccugcggauuugucgaugagcgcggucucuauaagagcuuaaaaggcgcuuguaagcugaaacuuugcgggguguugggacugagacuaauggacggcacgugggcagccauucaaacaagugaugaaacuaaguggugucccccugaccagcucgugaaucugcacgacuucaggucugaugagaucgagcaucuugucguugaggaacuggugaaaaagcgggaagagugcuuggacgcucucgaauccauaaugaccacuaaaagcguaucguuucgccgacugucucacuuaagaaagcuggugccagguuucgggaaggccuacacaauuuucaacaaaacccucauggaggcggaugcacauuauaaguccgucaggacguggaaugagaucauucccucaaaaggaugccuucgggugggcggccguugucacccgcacguuaacgggguguuuuucaauggaaucauccuggguccugacggccaugucuugauucccgaaaugcagaguagccuacugcagcaacacauggagcuccuggaauccucugugauaccacuuaugcauccucuggccgaucccagcaccguauuuaaggacgaugacgaggcugaagauuucguugaggugcacuugccagacguccauaaacaggugucaggggucgaucucggacugcccaguuggggcaaguacguguuaauguccgccgguguucugacagcacuaaugcucaugaucuuucugaugacuugcugucgcagagcuaacaggguggagagcgcccagcacucucuuggggaacggggccgaaagguaucagucaccagucagagcggacgcgugauuuccucuugggagucguauaaaagcggcggggaaacaaaguuguga

SEQ ID NO: 159913 - RNA, 1575 nt, Artificial Sequence
  derived and/or modified CDS sequence (opt3) from glycoprotein__RABV__LC018544.1
augaucccccaggcccuccuguucgugccucuucuggucuuuagcuugugcuucggcaaguuuccaauuuacaccauaccggacaaauuagggcccugguccccuaucgauauucaccaucugucuuguccaaacaaucuaguuguggaggacgaaggaugcacaaaccucucagguuucaguuauauggagcugaagguaggcuacaucagcgcuauuaaagugaauggguuuacuuguacgggagucgugaccgaagcagagacauauacuaacuucguuggcuacgugaccacaaccuuuaagagaaaacacuucaggcccacuccugaugccugccgggcggcuuauaauuggaagauggccggugacccacgcuacgaagagucccuucauaaccccuauccugauuaccacuggcugcgaacagucaagaccacgaaagagucuuuggugaucauaucgccaucaguagcagaccucgauccguacgacaagagccugcauagucguguuuuucccuccgggaaauguucuggaaucacugugagcuccaccuauugcucaacaaaucacgauuacacuauuuggaugccugaaaacccaagacugggcaccaguugugacaucuucacaaauagcaggggcaagcgggccucuaaaggguccaagaccugcggauuugucgaugagcgcggucucuauaagucauuaaaaggcgcuuguaagcugaaacuuugcgggguguugggacugagacuaauggacggcacgugggcagccauucaaacuagcgaugaaacaaaguggugucccccugaccagcucgugaaccugcacgacuucaggagugaugagaucgagcaucuugucguugaggaacuggugaaaaagcgggaagagugcuuggacgcucucgaaucuauaaugaccacuaaauccgugagcuuucgccgacugucgcacuuaagaaagcugguaccagguuucgggaaggccuacacaauuuucaauaaaacccucauggaggcggaugcacauuauaagucugucaggacguggaacgagaucauucccuccaaaggaugccuucgggugggcggccguugucacccgcacguuaaugggguguuuuucaacggaaucauccuggguccugacggccaugucuugauucccgaaaugcagucaagucuacugcagcaacacauggagcuccuggaaagcuccgugauaccacuuaugcauccucuggccgaucccucuaccguauuuaaggacgaugacgaggcugaagauuucguugaggugcacuugccagacguccauaaacaggugagcggggucgaucucggacugcccucauggggcaaguacguguuaaugagugccgguguucugacagcacuaaugcucaugaucuuucugaugacuugcugucgcagagcuaauauuguggaguccgcccagcacagccuuggggaaaggggccggaagguaucugucaccucacagaguggacgagugaucagcuccugggagucuuauaaaucgggcggggaaacaaaguuguga

SEQ ID NO: 159914 - RNA, 1575 nt, Artificial Sequence
  derived and/or modified CDS sequence (opt3) from glycoprotein__RABV__LC018545.1
augaucccccaggcccuccuguucgugccucuucuggucuuuagcuugugcuucggcaaguuuccaauuuacaccauaccggacaaauuagggcccugguccccuaucgauauucaccaucugucuuguccaaacaaucuaguuguggaggacgaaggaugcacaaaccucucagguuucaguuauauggagcugaagguaggcuacaucagcgcuauuaaagugaauggguuuacuuguacgggagucgugaccgaagcagagacauauacuaacuucguuggcuacgugaccacaaccuuuaagagaaaacacuucaggcccacuccugaugccugccgggcggcuuauaauuggaagauggccggugacccacgcuacgaagagucccuucauaaccccuauccugauuaccacuggcugcgaacagucaagaccacgaaagagucuuuggugaucauaucgccaucaguagcagaccucgauccguacgacaagagccugcauagucguguuuuucccuccgggaaauguucuggaaucacugugagcuccaccuauugcucaacaaaucacgauuacacuauuuggaugccugaaaacccaagacugggcaccaguugugacaucuucacaaauagcaggggcaagcgggccucuaaaggguccaagaccugcggauuugucgaugagcgcggucucuauaagucauuaaaaggcgcuuguaagcugaaacuuugcgggguguugggacugagacuaauggacggcacgugggcagccauucaaacuagcgaugaaacaaaguggugucccccugaccagcucgugaaccugcacgacuucaggagugaugagaucgagcaucuugucguugaggaacuggugaaaaagcgggaagagugcuuggacgcucucgaaucuauaaugaccacuaaauccgugagcuuucgccgacugucgcacuuaagaaagcugguaccagguuucgggaaggccuacacaauuuucaauaaaacccucauggaggcggaugcacauuauaaggccgucaggacguggaacgagaucauucccucuaaaggaugccuucgggugggcggccguugucacccgcacguuaaugggguguuuuucaacggaaucauccuggguccugacggccaugucuugauucccgaaaugcaguccucacuacugcagcaacacauggagcuccuggaaaguagcgugauaccacuuaugcauccucuggcugaucccuccaccguauuuaaggacgaugacgaggccgaagauuucguugaggugcacuugccagacguccauaaacaggugucuggggucgaucucggacugcccagcuggggcaaguacguguuaaugucagcugguguucugacagcacuaaugcucaugaucuuucugaugacuugcugucgcagagccaauagggcggagagugcccagcacucccuuggggaacggggccgaaaggugagcguaaccucucagucaggacgcgucauuaguagcugggaguccuauaaaucuggcggggaaacaaaguuguga

SEQ ID NO: 159915 - RNA, 1575 nt, Artificial Sequence
  derived and/or modified CDS sequence (opt3) from glycoprotein__RABV__LC018546.1
augaucccccaggcccuccuguucgugccucuucuggucagcuccuugugcuuuggcaaguucccaauuuacaccauaccggacaaauuagggcccuggucuccuaucgauauucaccaucugucauguccaaacaaucuaguuguggaggacgaaggaugcacaaaccucagugguuuuagcuauauggagcugaagguaggcuacaucuccgcuauuaaagugaauggguucacuuguacgggagucgugaccgaagcagagacauauacuaacuuuguuggcuacgugaccacaaccuucaagagaaaacacuuuaggcccacuccugaugccugccgggcggcuuauaauuggaagauggccggugacccacgcuacgaagagucucuucauaaccccuauccugauuaccacuggcugcgaacagucaagaccacgaaagagucguuggugaucauaucaccaagcguagcagaccucgauccguacgacaagagucugcauucccguguuuuccccucugggaaauguagcggaaucacuguguccucaaccuauugcaguacaaaucacgauuacacuauuuggaugccugaaaacccaagacugggcaccagcugugacaucuuuacaaauucuaggggcaagcgggccuccaaagggucaaagaccugcggauucgucgaugagcgcggucucuauaagagcuuaaaaggcgcuuguaagcugaaacuuugcgggguguugggacugagacuaauggacggcacgugggcagccauucaaacaagugaugaaacuaaguggugucccccugaccagcucgugaaccugcacgacuuuaggucugaugagaucgagcaucuugucguugaggaacuggugaaaaagcgggaagagugcuuggacgcucucgaauccauaaugaccacuaaaagcguaucguuccgccgacugucucacuuaagaaagcuggugccagguuuugggaaggccuacacaauuuucaauaaaacccucauggaggcggaugcacauuauaaguccgucaggacguggaacgagaucauucccucaaaaggaugccuucgggugggcggccguugucacccgcacguuaaugggguguucuuuaacggaaucauccuggguccugacggccaugucuugauucccgaaaugcagaguagccuacugcagcaacacauggagcuccuggaauccucugugauaccacuuaugcauccucuggccgaucccagcaccguauucaaggacgaugacgaggcugaagauuuuguugaggugcacuugccagacguccauaaacaggugucaggggucgaucucggacugcccaguuggggcaaguacguguuaacauccgccgguguucugacugcacuaaugcucaugaucuuccugaugaccugcugucgcaaggcuaauagagccgagagcgcgcagcacucucuuggggaaaggggccggaaagugucaguaacaagucagagcggacgagucauuuccucuugggagucguauaagagcggcggggaaacuaaauuguga

SEQ ID NO: 159916 - RNA, 1575 nt, Artificial Sequence
  derived and/or modified CDS sequence (opt3) from glycoprotein__RABV__LC018548.1
augaucccccaggcccuucucuucgugccucuucuggucuuuagcuugugcuucggcaaguuuccaauuuacaccauaccggacaaauuagggcccugguccccuaucgauauucaccaucugucuuguccaaacaaucuaguuguggaggacgaaggaugcacaaaccucucagguuucaguuauauggagcugaagguaggcuacaucagcgcuauuaaagugaauggguuuacuuguacgggagucgugaccgaagcagagacauauacuaacuucguuggcuacgugaccacaaccuuuaagagaaaacacuucaggcccacuccugaugccugccgggcggcuuauaauuggaagauggccggugacccacgcuacgaagagucccuucauaaccccuauccugauuaccacuggcugcgaacagucaagaccacgaaagagucuuuggugaucauaucgccaucaguagcagaccucgauccguacgacaagagccugcauagucguguuuuucccuccgggaaauguucuggaaucacugugagcuccaccuauugcucaacaaaucacgauuacacuauuuggaugccugaaaacccaagacugggcaccaguugugacaucuucacaaauagcaggggcaagcgggccucuaaaggguccaagaccugcggauuugucgaugagcgcggucucuauaagucauuaaaaggcgcuuguaagcugaaacuuugcggggugcccggauugagacugauggacggcacgugggcagccauucaaacuagcgaugaaacaaagugguguccuccagaccagcuagugaaccuccacgacuucaggagugaugagaucgagcaucuggucguugaggaacuugugaaaaagcgggaagagugccuggacgcuuuggaaucuauaaugaccacuaaauccgugagcuuucgccgacucucgcaccugagaaaguuaguacccgguuucgggaaggccuacacaauuuucaauaaaacccugauggaggcggaugcacauuauaagucugucaggacguggaacgagaucauuccguccaaaggaugccuccgggugggcggccguugucacccucacguuaaugggguguuuuucaacggaaucauccuuggucccgacggccauguccugauuccagaaaugcagucaaguuugcuacagcaacacauggagcugcucgaaagcuccgugauaccucugaugcauccccuugccgauccaucuaccguauuuaaggacgaugacgaggcugaagauuucguugaggugcaucugcccgacguccacaaacaggugagcggggucgauuugggacucccuucauggggcaaguacgugcugaugagugccgguguuuuaacagcacugaugcuaaugaucuuucucaugacuugcugucgcagagcuaauagggccgaguccgcgcagcacagccugggggaacggggccgaaaggugucuguaaccucacagaguggacgcgucauuagcuccugggagucuuauaaaucgggcggggaaacaaagcuguga

SEQ ID NO: 159917 - RNA, 1575 nt, Artificial Sequence; identical to SEQ ID NO: 158619
  derived and/or modified CDS sequence (opt3) from glycoprotein__RABV__LC018549.1

SEQ ID NO: 159918 - RNA, 1575 nt, Artificial Sequence; identical to SEQ ID NO: 159885
  derived and/or modified CDS sequence (opt3) from glycoprotein__RABV__LC018552.1

SEQ ID NO: 159919 - RNA, 1575 nt, Artificial Sequence; identical to SEQ ID NO: 158620
  derived and/or modified CDS sequence (opt3) from glycoprotein__RABV__LC018553.1

SEQ ID NO: 159920 - RNA, 1575 nt, Artificial Sequence
  derived and/or modified CDS sequence (opt3) from glycoprotein__RABV__LC018554.1
augaucccccaggcccuucucuucgugccucuucuggucuuuagcuugugcuucggcaaguuuccaauuuacaccauaccggacaaauuagggcccugguccccuaucgauauucaccaucugucuuguccaaacaaucuaguuguggaggacgaaggaugcacaaaccucucagguuucaguuauauggagcugaagguaggcuacaucagcgcuauuaaagugaauggguuuacuuguacgggagucgugaccgaagcagagacauauacuaacuucguuggcuacgugaccacaaccuuuaagagaaaacacuucaggcccacuccugaugccugccgggcggcuuauaauuggaagauggccggugacccacgcuacgaagagucccuucauaaccccuauccugauuaccacuggcugcgaacagucaagaccacgaaagagucuuuggugaucauaucgccaucaguagcagaccucgauccguacgacaagagccugcauagucguguuuuucccuccgggaaauguucuggaaucacugugagcuccaccuauugcucaacaaaucacgauuacacuauuuggaugccugaaaacccaagacugggcaccaguugugacaucuucacaaauagcaggggcaagcgggccucuaaaggguccaagaccugcggauuugucgaugagcgcggucucuauaagucauuaaaaggcgcuuguaagcugaaacuuugcgggguguugggacugagacuaauggacggcacgugggcagccauucaaacuagcgaugaaacaaaguggugucccccugaccagcucgugaaccugcacgacuucaggagugaugagaucgagcaucuugucguugaggaacuggugaaaaagcgggaagagugcuuggacgcucucgaaucuauaaugaccacuaaauccgugagcuuucgccgacugucgcacuuaagaaagcugguaccagguuucgggaaggccuacacaauuuucaauaaaacccucauggaggcggaugcacauuauaagucugucaggacguggaacgagaucauucccuccaaaggaugccuucgggugggcggccguugucacccgcacguuaaugggguguuuuucaacggaaucauccuggguccugacggccaugucuugauucccgaaaugcagucaagucuacugcagcaacacauggagcuccuggaaagcuccgugauaccacuuaugcauccucuggccgaucccucuaccguauuuaaggacgaugacgaggcugaagauuucguugaggugcacuugccagacguccauaaacaggugagcggggucgaucucggauuucccucauggggcaaguacgugcugaugagugccgguguuuuaacaucccugaugcuaaugaucuuccucaugacuugcugucgcagagcaaauaggguggagagcgcucagcacucucugggggaacggggccgaaagguaucagucaccagucagagcggacgcgugauuuccucuugggagucguauaaaagcggcggggaaacaaagcuguga

SEQ ID NO: 159921 - RNA, 1575 nt, Artificial Sequence
  derived and/or modified CDS sequence (opt3) from glycoprotein__RABV__LC018555.1
augaucccccaggcccuucucuucgugccucuucuggucuuuagcuugugcuucggcaaguuuccaauuuacaccauaccggacaaauuagggcccugguccccuaucgauauucaccaucugucuuguccaaacaaucuaguuguggaggacgaaggaugcacaaaccucucagguuucaguuauauggagcugaagguaggcuacaucagcgcuauuaaagugaauggguuuacuuguacgggagucgugaccgaagcagagacauauacuaacuucguuggcuacgugaccacaaccuuuaagagaaaacacuucaggcccacuccugaugccugccgggcggcuuauaauuggaagauggccggugacccacgcuacgaagagucccuucauaaccccuauccugauuaccacuggcugcgaacagucaagaccacgaaagagucuuuggugaucauaucgccaucaguagcagaccucgauccguacgacaagagccugcauagucguguuuuucccuccgggagauguucuggaaucacugugagcuccaccuauugcucaacaaaucacgauuacacuauuuggaugccugaaaacccaaggcugggcaccaguugugacaucuucacaaauagccggggcaaacgcgccucuaagggguccaaaaccugcggauuugucgaugagagaggucucuauaagucauuaaagggcgcuuguaaacugaagcugugcgggguguugggacugaggcuaauggacggcacgugggcagccauucaaacuagcgaugaaacaaaauggugucccccugaccagcucgugaaccugcacgacuuccggagugaugagaucgagcaucuugucguugaggaacuggugaagaaacgcgaagagugcuuggacgcucucgaaucuauaaugaccacuaaguccgugagcuuucgaagacugucgcacuuaaggaaacuggugccagguuucgggaaggccuacacaauuuucaauaagacccucauggaggcggaugcacauuauaaaucuguccggacguggaacgagaucauucccuccaagggaugccuucgugugggcggccgcugucacccgcacguuaaugggguguuuuucaacggaaucauccuggguccugacggccaugucuugauucccgaaaugcagucaagucuacugcagcaacacauggagcuccuggaaagcuccgugauaccacuuaugcauccucuggccgaucccucuaccguauuuaaagacgaugacgaggcugaagauuucguugaggugcacuugccagacguccauaagcagguaagcggggucgaucucggacugcccucauggggcaaauacguguuaaugagugccgguguucugacagcacuaaugcucaugaucuuucugaugacuugcuguagaagggcuaaucgggccgaguccgcgcagcacagccuuggggaacgaggccgcaaggugucuguaaccucacagaguggaagagucauuagcuccugggagucuuauaagucgggcggggaaacaaaauuguga

SEQ ID NO: 159922 - RNA, 1575 nt, Artificial Sequence; identical to SEQ ID NO: 158620
  derived and/or modified CDS sequence (opt3) from glycoprotein__RABV__LC018556.1

SEQ ID NO: 159923 - RNA, 1575 nt, Artificial Sequence
  derived and/or modified CDS sequence (opt3) from glycoprotein__RABV__LC018557.1
augaucccccaggcccuccuguucgugccucuucuggucuuuagcuugugcuucggcaaguuuccaauuuacaccauaccggacaaauuagggcccugguccccuaucgauauucaccaucugucuuguccaaacaaucuaguuguggaggacgaaggaugcacaaaccucucagguuucaguuauauggagcugaagguaggcuacaucagcgcuauuaaagugaauggguuuacuuguacgggagucgugaccgaagcagagacauauacuaacuucguuggcuacgugaccacaaccuuuaagagaaaacacuucaggcccacuccugaugccugccgggcggcuuauaauuggaagauggccggugacccacgcuacgaagagucccuucauaaccccuauccugauuaccacuggcugcgaacagucaagaccacgaaagagucuuuggugaucauaucgccaucaguagcagaccucgauccguacgacaagagccugcauagucguguuuuucccuccgggaaauguucuggaaucacugugagcuccaccuauugcucaacaaaucacgauuacacuauuuggaugccugaaaacccaagacugggcaccaguugugacaucuucacaaauagcaggggcaagcgggccucuaaaggguccaagaccugcggauuugucgaugagcgcggucucuauaagucauuaaaaggcgcuuguaagcugaaacuuugcgggguguugggacugagacuaauggacggcacgugggcagccauucaaacuagcgaugaaacaaaguggugucccccugaccagcucgugaaccugcacgacuucaggagugaugagaucgagcaucuugucguugaggaacuggugaaaaagcgggaagagugcuuggacgcucucgaaucuauaaugaccacuaaauccgugagcuuucgccgacugucgcacuuaagaaagcugguaccagguuucgggaaggccuacacaauuuucaauaaaacccucauggaggcggaugcacauuauaagucugucaggacguggaacgagaucauucccuccaaaggaugccuucgggugggcggccguugucacccgcacguuaaugggguguuuuucaacggaaucauccuggguccugacggccaugucuugauucccgaaaugcagucaagucuacugcagcaacacauggagcuccuggaaagcuccgugauaccacuuaugcauccucuggccgaucccucuaccguauuuaaggacgaugacgaggcugaagauuucguugaggugcacuugccagacguccauaaacaggugagcggggucgaucucggacugcccucauggggcaaguacguguuaaugagugccugcguucugacagcacuaaugcucaugaucuuucugaugacuuguugccgcagagcuaauagggccgaguccgcgcagcacagccuuggugaacgggggcgaaaggugucuguaaccucacagaguggccgcgucauuagcuccugggagucuuauaaaucgggaggcgaaacaaaguuguga

SEQ ID NO: 159924 - RNA, 1575 nt, Artificial Sequence; identical to SEQ ID NO: 158643
  derived and/or modified CDS sequence (opt3) from glycoprotein__RABV__LC018558.1

SEQ ID NO: 159925 - RNA, 1575 nt, Artificial Sequence; identical to SEQ ID NO: 158643
  derived and/or modified CDS sequence (opt3) from glycoprotein__RABV__LC018561.1

SEQ ID NO: 159926 - RNA, 1575 nt, Artificial Sequence; identical to SEQ ID NO: 158643
  derived and/or modified CDS sequence (opt3) from glycoprotein__RABV__LC018562.1

SEQ ID NO: 159927 - RNA, 1575 nt, Artificial Sequence; identical to SEQ ID NO: 158643
  derived and/or modified CDS sequence (opt3) from glycoprotein__RABV__LC018564.1

SEQ ID NO: 159928 - RNA, 1575 nt, Artificial Sequence
  derived and/or modified CDS sequence (opt3) from glycoprotein__RABV__LC018565.1
augaucccccaggcccuccuguucgugccucuucuggucuuuagcuugugcuucggcaaguuuccaauuuacaccauaccggacaaauuagggcccugguccccuaucgauauucaccaucugucuuguccaaacaaucuaguuguggaggacgaaggaugcacaaaccucucagguuucaguuauauggagcugaagguaggcuacaucagcgcuauuaaagugaauggguuuacuuguacgggagucgugaccgaagcagagacauauacuaacuucguuggcuacgugaccacaaccuuuaagagaaaacacuucaggcccacuccugaugccugccgggcggcuuauaauuggaagauggccggugacccacgcuacgaagagucccuucauaaccccuauccugauuaccacuggcugcgaacagucaagaccacgaaagagucuuuggugaucauaucgccaucaguagcagaccucgauccguacgacaagagccugcauagucguguuuuucccuccgggaaauguucuggaaucacugugagcuccaccuauugcucaacaaaucacgauuacacuauuuggaugccugaaaacccaagacugggcaccaguugugacaucuucacaaauagcaggggcaagcgggccucuaaaggguccaagaccugcggauuugucgaugagcgcggucucuauaagucauuaaaaggcgcuuguaagcugaaacuuugcgggguguugggacugagacuaauggacggcacgugggcagccauucaaacuagcgaugaaacaaaguggugucccccugaccagcucgugaaccugcacgacuucaggagugaugagaucgagcaucuugucguugaggaacuggugaaaaagcgggaagagugcuuggacgcucucgaaucuauaaugaccacuaaauccgugagcuuucgccgacugucgcacuuaagaaagcugguaccagguuucgggaaggccuacacaauuuucaauaaaacccucauggaggcggaugcacauuauaagucugucaggacguggaacgagaucauucccuccaaaggaugccuucgggugggcggccguugucacccgcacguuaaugggguguuuuucaacggaaucauccuggguccugacggccaugucuugauucccgaaaugcagucaagucuacugcagcaacacauggagcuccuggaaagcuccgugauaccacuuaugcauccucuggccgaucccucuaccguauuuaaggacgaugacgaggcugaagauuucguugaggugcacuugccagacguccauaaacaggugagcggggucgaucucggacugcccucauggggcaauuacguguuaaugagugccgguguucugacagcacuaaugcucaugaucuuucugaugacuugcugucgcagaaccaacagggcugaguccgcccagcacagccuuggggaacggggccgaaaggugucuguaacaucacagaguggacgcgucauuagcuccugggagucuuauaagucgggcggggaaacuaaauuguga

SEQ ID NO: 159929 - RNA, 1575 nt, Artificial Sequence; identical to SEQ ID NO: 158643
  derived and/or modified CDS sequence (opt3) from glycoprotein__RABV__LC018567.1

SEQ ID NO: 159930 - RNA, 1575 nt, Artificial Sequence
  derived and/or modified CDS sequence (opt3) from glycoprotein__RABV__LC018569.1
augaucccccaggcccuccuguucgugccucuucuggucuuuagcuugugcuucggcaaguuuccaauuuacaccauaccggacaaauuagggcccugguccccuaucgauauucaccaucugucuuguccaaacaaucuaguuguggaggacgaaggaugcacaaaccucucagguuucaguuauauggagcugaagguaggcuacaucagcgcuauuaaagugaauggguuuacuuguacgggagucgugaccgaagcagagacauauacuaacuucguuggcuacgugaccacaaccuuuaagagaaaacacuucaggcccacuccugaugccugccgggcggcuuauaauuggaagauggccggugacccacgcuacgaagagucccuucauaaccccuauccugauuaccacuggcugcgaacagucaagaccacgaaagagucuuuggugaucauaucgccaucaguagcagaccucgauccguacgacaagagccugcauagucguguuuuucccuccgggaaauguucuggaaucacugugagcuccaccuauugcucaacaaaucacgauuacacuauuuggaugccugaaaacccaagacugggcaccaguugugacaucuucacaaauagcaggggcaagcgggccucuaaaggguccaagaccugcggauuugucgaugagcgcggucucuauaagucauuaaaaggcgcuuguaagcugaaacuuugcgggguguugggacugagacuaauggacggcacgugggcagccauucaaacuagcgaugaaacaaaguggugucccccugaccagcucgugaaccugcacgacuuccauagugaugagaucgagcaccuugucguugaggaacuggugaaaaagagggaagagugcuuggacgcucucgaaucuauaaugaccacuaaauccgugagcuuucggcgccugucgcauuuacgaaagcugguaccagguuucgggaaggccuacacaauuuucaauaaaacccucauggaggcggaugcacacuauaagucugucagaacguggaacgagaucauucccuccaaaggaugccuuagggugggcggccggugucacccgcauguuaaugggguguuuuucaacggaaucauccuggguccugacggccacgucuugauucccgaaaugcagucaagucuacugcagcaacauauggagcuccuggaaagcuccgugauaccacuuaugcacccucuggccgaucccucuaccguauuuaaggacgaugacgaggcugaagauuucguugaggugcauuugccagacguccacaaacaggugagcggggucgaucucggacugcccucauggggcaaguacguguuaaugagugccgguguucugacagcacuaaugcucaugaucuuucugaugacuugcugucgucgcaccaauagagcugaguccgcccagcacagccuuggggaaaggggccggaaggugucuguaacaucacagaguggacgagucauuagcuccugggagucuuauaaaucgggcggggaaacuaaguuguga

SEQ ID NO: 159931 - RNA, 1575 nt, Artificial Sequence; identical to SEQ ID NO: 158643
  derived and/or modified CDS sequence (opt3) from glycoprotein__RABV__LC018570.1

SEQ ID NO: 159932 - RNA, 1575 nt, Artificial Sequence
  derived and/or modified CDS sequence (opt3) from glycoprotein__RABV__LC018571.1
augaucccccaggcccuccuguucgugccucuucuggucuuuagcuugugcuucggcaaguuuccaauuuacaccauaccggacaaauuagggcccugguccccuaucgauauucaccaucugucuuguccaaacaaucuaguuguggaggacgaaggaugcacaaaccucucagguuucaguuauauggagcugaagguaggcuacaucagcgcuauuaaagugaauggguuuacuuguacgggagucgugaccgaagcagagacauauacuaacuucguuggcuacgugaccacaaccuuuaagagaaaacacuucaggcccacuccugaugccugccgggcggcuuauaauuggaagauggccggugacccacgcuacgaagagucccuucauaaccccuauccugauuaccacuggcugcgaacagucaagaccacgaaagagucuuuggugaucauaucgccaucaguagcagaccucgauccguacgacaagagccugcauagucguguuuuuaguucugggaaauguagcggaaucacuguguccucaaccuauugcaguacaaaucacgauuacacuauuuggaugcccgaaaacccuagacugggcaccagcugugacaucuucacaaauucuaggggcaagcgggccuccaaagggucaaagaccugcggauuugucgaugagcgcggucucuauaagagcuuaaaaggcgcuuguaagcugaaacuuugcgggguguugggacugagacuaauggacggcacgugggcagccauucaaacuuccgaugaaacaaagugguguccacccgaccagcucgugaaccugcacgacuucaggucugaugagaucgagcaucuugucguugaggaacuggugaaaaagcgggaagagugcuuggacgcucucgaauccauaaugaccacuaaaagcguaucguuucgccgacugucucacuuaagaaagcuggugccugguuucgggaaggccuacacaauuuucaauaaaacccucauggaggcggaugcacauuauaaguccgucaggacguggaacgagaucauuccaucaaaaggaugccuucgggugggcggccguugucacccccacguuaaugggguguuuuucaacggaaucauccuggguccggacggccaugucuugauuccugaaaugcagaguagccuacugcagcaacacauggagcuccuggaauccucugugauaccccuuaugcauccacuggccgauccuagcaccguauuuaaggacgaugacgaggcugaagauuucguugaggugcacuugcccgacguccauaaacaggugucaggggucgaucucggacugccaaguuggggcaaguacguguuaauguccgccgguguucugacagcacuaaugcucaugaucuuucugaugacuugcugucgcagaaccaauagggcugagagcgcccagcacucucuuggggaacggggccgaaaggugucaguaacaagucagagcggacgcgucauuuccucuugggagucguauaaaagcggcggggaaacuaaguuguga

SEQ ID NO: 159933 - RNA, 1575 nt, Artificial Sequence; identical to SEQ ID NO: 158643
  derived and/or modified CDS sequence (opt3) from glycoprotein__RABV__LC018572.1

SEQ ID NO: 159934 - RNA, 1575 nt, Artificial Sequence; identical to SEQ ID NO: 158643
  derived and/or modified CDS sequence (opt3) from glycoprotein__RABV__LC018573.1

SEQ ID NO: 159935 - RNA, 1575 nt, Artificial Sequence; identical to SEQ ID NO: 158643
  derived and/or modified CDS sequence (opt3) from glycoprotein__RABV__LC018581.1

SEQ ID NO: 159936 - RNA, 1575 nt, Artificial Sequence
  derived and/or modified CDS sequence (opt3) from glycoprotein__RABV__LC018584.1
augaucccccaggcccuucucuucgugccucuucuggucuuuagcuugugcuucggcaaguuuccaauuuacaccauaccggacaaauuagggcccugguccccuaucgauauucaccaucugucuuguccaaacaaucuaguuguggaggacgaaggaugcacaaaccucucagguuucaguuaucuggagcuuaagguaggcuacaucagcgcuauuaaagugaauggguuuacuuguacgggagucgugaccgaagcagagacauauacuaacuucguuggcuacgugaccacaaccuuuaagagaaaacacuucaggcccaugccugaugccugccgggcggcuuauaauuggaagauggccggugacccacgcuacgaagagucccugcauaaccccuauccugauuaccacugguugcgaacugucaagacaaccaaagagucucucgugaucauaucgccaucaguagcagaccuggauccguacaauaagagccugcauagucguguuuuucccuccgggaaauguucuggaaucacggugagcuccacuuauugcucaaccaaccacgacuacacaauuuggaugccugaaaauccaagacucggcacuagcugugauaucuucaccaacagcaggggcaagcgggccucuaaaggguccaagacaugcggauuugucgacgagcgcgguuuauauaagucacugaaaggcgcuuguaagcugaaauugugcggggugcugggacuaagacucauggauggcaccugggcagccauucaaacgagcgacgaaacuaaguggugucccccugaucagcuggugaaucuucacgacuucaggagugacgagaucgagcaucuggucguugaagaguuggugaaaaagcgggaagagugccucgaugcucuggaaucuauaaugacaaccaaauccguaaguuuucgccgauuaucgcaccugagaaagcucgugccagguuucgggaaggccuacacuauuuucaacaaaacacuuauggaggcggacgcacauuauaagucugucaggaccuggaaugagauccugcccuccaaaggaugcuugcgggugggcggccguugucacccgcacguuaacgggguguuuuucaauggaauuauccuagguccugauggccauguccugauccccgaaaugcagucaagucuccugcagcaacacauggagcuucuggaaagcuccgugauuccauugaugcauccucucgccgaccccucuacgguauuuaaggaugacgaugaggcugaagacuucguugaggugcaucugccagauguccacaaacaggugagcggggucgacuuaggacugcccucauggggcaaguacgugcuaaugagugccgguguucucaccgcacugaugcuuaugauauuuuugaugacaugcugucgcagaccuaacagggcugaguccgcccagcacagccugggggaacgggagaagaaagugucuguaacuucacagaguggccgagucaucagcuccugggaaucuuauaagucgggaggcgagaccaaacucuga

SEQ ID NO: 159937 - RNA, 1575 nt, Artificial Sequence
  derived and/or modified CDS sequence (opt3) from glycoprotein__RABV__LC018585.1
augaucccccaggcccuucucuucgugccucuucuggucuuuagcuugugcuucggcaaguuuccaauuuacaccauaccggacaaauuagggcccugguccccuaucgauauucaccaucugucuuguccaaacaaucuaguuguggaggacgaaggaugcacaaaccucucagguuucaguuaucuggagcuuaagguaggcuacaucagcgcuauuaaagugaauggguuuacuuguacgggagucgugaccgaagcagagacauauacuaacuucguuggcuacgugaccacaaccuuuaagagaaaacacuucaggcccaugccugaugccugccgggcggcuuauaauuggaagauggccggugacccacgcuacgaagagucccugcauaaccccuauccugauuaccacugguugcgaacugucaagacaaccaaagagucucucgugaucauaucgccaucaguagcagaccuggauccguacgacaagagccugcauagucguguuuuucccuccgggaaauguucuggaaucacggugagcuccacuuauugcucaaccaaucacgauuacacaauuuggaugccugaaaacccaagacucggcacuagcugugacaucuucaccaauagcaggggcaagcgggccucuaaaggguccaagacaugcggauuugucgaugagcgcgguuuauauaagucacugaaaggcgcuuguaagcugaaauugugcggggugcugggacuaagacucauggacggcaccugggcagccauucaaacgagcgaugaaacuaaguggugucccccugaccagcuggugaaccuucacgacuucaggagugaugagaucgagcaucuggucguugaagaguuggugaaaaagcgggaagagugccucgacgcucuggaaucuauaaugacaaccaaauccguaaguuuucgccgauuaucgcaccugagaaagcucgugccagguuucgggaaggccuacacuauuuucaauaaaacacuuauggaggcggaugcacauuauaagucugucaggaccuggaacgagaucauucccuccaaaggaugccugcgggugggcggccguugucacccgcacguuaaugggguguuuuucaacggaaucaucuuggguccugacggccauguccuaauucccgaaaugcagucaagucugcuccagcaacacauggagcugcuugaaagcuccgugauaccacugaugcauccuuuggccgaucccucuacgguauuuaaggacgaugacgaggcugaagauuucguugaggugcaccucccagacguccauaaacaggugagcggggucgaucugggauuacccucauggggcaaguacgugcugaugagugccgguguucuaaccgcacucaugcugaugaucuuucuuaugacaugcugucgcagaccuaauagggcugaguccgcccagcacagcuugggggaacgggagaagaaagugucuguaacuucacagaguggccgagucauuagcuccugggaaucuuauaagucgggaggcgagaccaaacuguga

SEQ ID NO: 159938 - RNA, 1575 nt, Artificial Sequence; identical to SEQ ID NO: 158620
  derived and/or modified CDS sequence (opt3) from glycoprotein__RABV__LC018586.1

SEQ ID NO: 159939 - RNA, 1575 nt, Artificial Sequence
  derived and/or modified CDS sequence (opt3) from glycoprotein__RABV__LC018587.1
augaucccccaggcccuccuguucgugccucuucuggucuuuagcuugugcuucggcaaguuuccaauuuacaccauaccggacaaauuagggcccugguccccuaucgauauucaccaucugucuuguccaaacaaucuaguuguggaggacgaaggaugcacaaaccucucagguuucaguuauauggagcugaagguaggcuacaucagcgcuauuaaagugaauggguuuacuuguacgggagucgugaccgaagcagagacauauacuaacuucguuggcuacgugaccacaaccuuuaagagaaaacacuucaggcccacuccugaugccugccgggcggcuuauaauuggaagauggccggugacccacgcuacgaagagucccuucauaaccccuauccugauuaccacuggcugcgaacagucaagaccacgaaagagucuuuggugaucauaucgccaucaguagcagaccucgauccguacgacaagagccugcauagucguguuuuucccuccgggaaauguucuggaaucacugugagcuccaccuauugcucaacaaaucacgauuacacuauuuggaugccugaaaacccaagacugggcaccaguugugacaucuucacaaauagcaggggcaagcgggccucuaaaggguccaagaccugcggauuugucgaugagcgcggucucuauaagucauuaaaaggcgcuuguaagcugaaacuuugcgggguguugggacugagacuaauggacggcacguggguggcaauucaaacuagcgaugaaacaaaguggugucccccugaccagcucgucaaccugcacgacuucaggagugaugagaucgagcaucuuguuguggaggaacugguaaagaaacgggaagagugcuuggacgcccucgaaucuauaaugaccacuaaauccgugagcuuucgccgacugucgcacuuaagaaagcuggucccagguuucgggaaggcuuacacaauuuucaauaaaacccucauggaggccgaugcgcauuauaagucugugaggacguggaacgagaucauucccuccaaaggaugccuucggguuggcggccguugucacccgcacgugaauggggucuuuuucaacggaaucauccuggguccugacggccauguguugauucccgaaaugcagucaagucuacugcagcaacacauggagcuccuggaaagcuccguaauaccacuuaugcauccucuggcagaucccucuaccguuuuuaaggacgaugacgaggccgaagauuucguggagguccacuugccagacgugcauaaacaggucagcgggguggaucucggacugcccucauggggcaaguacguuuuaaugagugcuggugugcugacagcccuaaugcucaugaucuuucugaugacuugcugucgcagagcaaauagggcugaguccgcccagcacagccuuggggaacggggccgaaagguaucugucaccucacagaguggacgcgugauuagcuccugggagucuuauaaaucgggcggggaaacaaaguuguga

SEQ ID NO: 159940 - RNA, 1575 nt, Artificial Sequence; identical to SEQ ID NO: 158620
  derived and/or modified CDS sequence (opt3) from glycoprotein__RABV__LC018588.1

SEQ ID NO: 159941 - RNA, 1575 nt, Artificial Sequence
  derived and/or modified CDS sequence (opt3) from glycoprotein__RABV__LC018589.1
augaucccccaggcccuccuguucgugccucuucuggucuuuagcuugugcuucggcaaguuuccaauuuacaccauaccggacaaauuagggcccugguccccuaucgauauucaccaucugucuuguccaaacaaucuaguuguggaggacgaaggaugcacaaaccucucagguuucaguuauauggagcugaagguaggcuacaucagcgcuauuaaagugaauggguuuacuuguacgggagucgugaccgaagcagagacauauacuaacuucguuggcuacgugaccacaaccuuuaagagaaaacacuucaggcccacuccugaugccugccgggcggcuuauaauuggaagauggccggugacccacgcuacgaagagucccuucauaaccccuauccugauuaccacuggcugcgaacagucaagaccacgaaagagucuuuggugaucauaucgccaucaguagcagaccucgauccguacgacaagagccugcauagucguguuuuucccuccgggaaauguucuggaaucacugugagcuccaccuauugcucaacaaaucacgauuacacuauuuggaugccugaaaacccaagacugggcaccaguugugacaucuucacaaauagcaggggcaagcgggccucuaaaggguccaagaccugcggauuugucgaugagcgcggucucuauaagucauuaaaaggcgcuuguaagcugaaacuuugcgggguguugggacugagacuaauggacggcacgugggcagccauucaaacuagcgaugaaacaaaguggugucccccugaccagcucgugaaccugcacgacuucaggagugaugagaucgagcaucuugucguugaggaacuggugaaaaagcgggaagagugcuuggacgcucucgaaucuauaaugaccacuaaauccgugagcuuucgccgacugucgcacuuaagaaagcugguaccagguuucgggaaggccuacacaauuuucaauaaaacccucauggaggcggaugcacauuauaagucugucaggacguggaacgagaucauucccuccaaaggaugccuucgggugggcggccguugucacccgcacguuaaugggguguuuuucaacggaaucauccuggguccugacggccaugucuugauucccgaaaugcagucaagucuacugcagcaacacauggagcuccuggaaagcuccgugauaccacuuaugcauccucuggccgaucccucuaccguauuuaaggacgaugacgaggcugaagauuucguugaggugcacuugccagacguccauaaacaggugagcggggucgaucucggacugcccucauggggcaaguacguguuaaugagugccgguguucugacagcacuaaugcucaugaucuuucugaugacuugcugucgcagagcuaauagggccgaguccgcgcggcacagccuuggggaacgaggccgcaaggugucuguaaccucacagaguggaagagucauuagcuccugggagucuuauaaaucgggcggggaaacaaaguuguga

SEQ ID NO: 159942 - RNA, 1575 nt, Artificial Sequence
  derived and/or modified CDS sequence (opt3) from glycoprotein__RABV__LC018590.1
augaucccccaggcccuucucuucgugccucuucuggucuuuagcuugugcuucggcaaguuuccaauuuacaccauaccggacaaauuagggcccugguccccuaucgauauucaccaucugucuuguccaaacaaucuaguuguggaggacgaaggaugcacaaaccucucagguuucaguuauauggagcugaagguaggcuacaucagcgcuauuaaagugaauggguuuacuuguacgggagucgugaccgaagcagagacauauacuaacuucguuggcuacgugaccacaaccuuuaagagaaaacacuucaggcccacuccugaugccugccgggcggcuuauaauuggaagauggccggugacccacgcuacgaagagucccuucauaaccccuauccugauuaccacuggcugcgaacagucaagaccacgaaagagucuuuggugaucauaucgccaucaguagcagaccucgauccguacgacaagagccugcauagucguguuuuucccuccgggaaauguucuggaaucacugugagcuccaccuauugcucaacaaaucacgauuacacuauuuggaugccugaaaacccaagacugggcaccaguugugacaucuucauuaauagcaggggcaagcgggccucuaaaggguccaagacaugcggauuugucgaugagcgcggucucuauaagucauuaaaaggcgcuuguaagcugaaacuuugcggggugcccggauugagacugauggacggcaccugggcagccauccaaacgagcgaugaaacuaagugguguccuccagaccagcuagugaaccuccacgacuucaggagugaugagauagagcaucuggucguugaggaacuugugaaaaagcgggaagagugccuggacgcuuuggaaucuauuaugacaaccaaauccgugagcuuucgccgacucucgcaccugagaaaguuaguacccgguuucgggaaggccuacacuaucuucaauaaaacacugauggaggcggaugcacauuauaagucugucaggaccuggaacgagauuaucccguccaaaggaugccuccgggugggcggccguugucacccucacguuaaugggguguuuuucaacggaaucauucuuggucccgacggccauguccugauaccagaaaugcagucaaguuugcuacagcaacacauggagcugcucgaaagcuccgugaucccucugaugcauccccuugccgauccaucuacgguauuuaaggacgaugacgaggcugaagauuucguugaggugcaucugcccgacguccacaaacaggugagcggggucgauuugggacucccuucauggggcaaguacgugcugaugagugccgguguuuuaaccgcacugaugcuaaugauuuuucucaugacaugcugucgcagagcuaauagggccgaguccgcgcagcacagccugggggaacggggccgaaaggugucuguaacuucacagaguggacgcgucaucagcuccugggagucuuauaaaucgggcggggaaaccaagcuguga

SEQ ID NO: 159943 - RNA, 1575 nt, Artificial Sequence
  derived and/or modified CDS sequence (opt3) from glycoprotein__RABV__LC071936.1
augaucccccaggcccugcuccuugugccucuguuggucuucccauuaugcuuuggcaaguucccgauuuacaccauacccgacaaacuggggccuuggagcccaaucgauauucaccaucuauccugucccaacaaucucguuguggaggacgaaggaugcacaaaccugucugguuuuucauauauggagcuuaagguaggcuacaucagugcuauuaaagugaauggguucacuuguacgggagucgugaccgaagcagagacauauacuaacuuuguuggcuacgugaccacaaccuucaagagaaaacacuuuaggccuacuccagaugccugccgggcggcuuauaauuggaagauggccggugacccccgcuacgaagagagccugcauaacccuuauccagauuaccacugguugcgaacagucaaggcaaccaaagagucccucgugaucauaucuccgucgguaucagaccuggaucccuacgacaagagccugcauagucguguuuucccuuccgggaaauguucuggaaucacggugagcuccacuuauugcccaaccucacacgauuacacaauuuggaugcccgaaaauccuagacucggcacuagcugugacaucuuuauuaacagcaggggcaagcgggccucuaaaggguccaagaccugcggauucgucgaugagcgcgguuuauauaagucacugaaaggcgcuuguaaacuuaaguugugcggggugcugggacuaagacucauggacggcacaugggcagccauccaaaccagcgaugaagcuaagugguguccacccgaccagcuggugaauauacacgacuuucauagugaugagauugagcaccuugucguugaggaacuggugaaaaagagggaagagugcuuggacgcccucgaaucuaucaugacgacuaaauccguaaguuuccggcgccugucgcauuuacgaaagcuggugccggguuuugggaaggcguacacaauuuucaacaaaacccucauggaggcagaugcccacuauaagucugucagaacuuggaaugagaucaucccuuccaaaggaugccuuagggugggcggccggugucacccccauguuaacgggguguucuuuaauggaauuauacuggguccagacggccacgucuugaucccugaaaugcagucaagucuacugcagcaacauauggagcuccuggaaagcuccgugauuccccuuaugcacccacuggcugaucccucuacaguauucaaggacggggaugaggccgaagacuuuguugaggugcauuugccugauguccacaaacaggugagcggagucgaccucggccugccaucaugggguaaguacguguuaaugaguguugggacccugaucgcacuaauggugaugauauuccucaugacgugcugucguaaggcuaacggcguagaguccaugcgccacagacugggagaaaccggcaggaaagucagcgugacaucucagucagggcggguuauuaguagcugggaguccuauaagucuggaggugaaacuaaacuuuga

SEQ ID NO: 159944 - RNA, 1575 nt, Artificial Sequence
  derived and/or modified CDS sequence (opt3) from glycoprotein__RABV__LC071937.1
augaucccccaggcccugcuguucgugccucuucuggucuuuagcuugugcuucggcaaguuuccaauuuacaccauaccggacaaauuagggcccugguccccuaucgauauucaccaucugucuuguccaaacaaucuaguuguggaggacgaaggaugcacaaaccucucagguuucaguuauauggagcugaagguaggcuacaucagcgcuauuaaagugaauggguuuacuuguacgggagucgugaccgaagcagagacauauacuaacuucguuggcuacgugaccacaaccuuuaagagaaaacacuucaggcccacuccugaugccugccgggcggcuuauaauuggaagauggccggugacccacgcuacgaagagucccuucauaaccccuauccugauuaccacuggcugcgaacagucaagaccacgaaagagucuuuggugaucauaucgccaucaguaagcgaccucgauccguacgacaagagucugcauucccguguuuuucccucugggaaauguagcggaaucacuguguccucaaccuauugcccuacaaaucacgauuacacuauuuggaugccagaaaaccccagacugggcaccaguugugacaucuucacaaccagcaggggcaagcgggcaucuaaagggggaaagacgugcgguuuugucgaugagcgcggccucuauaaguccuuaaaaggggccuguaagcugaaacuuugcggaguguugggccugagacuaauggacgguacuugggcugcaauucaaacaucagaugaagccaagugguguccuccagaccagcucgugaauauccacgacuucaggagcgaugagauagagcaucuggucguugaggaacuugugaaaaagcgggaagagugccuggacgcuuuggaaaguauuaugaccacuaaaucuguauccuuucgccgacucagccaccugagaaaguuagugcccggguucggaaaggccuacacaaucuucaacaaaacccugauggaggcggaugcacauuauaagucggucaggacguggaaugagauuaucccgucuaaaggcugccuccgggugggcgggcguugucacccucacguuaacggaguguuuuucaaugguaucauucuuggccccgacgggcauguccugauaccagaaaugcaguccucauugcuacagcaacacauggagcugcucgaaaguagcgugaucccucugaugcauccccuugccgauccauccaccguauuuaaggacgaugacgaggcugaagauuucguugaggugcaccuccccgacguccauaaacaggugucuggagucgauuugggccucccuagcugggguaaguacgugcugaugucaguuggggccaugauugcauuaaugcugaugaucuuucuaacaacuugcugucgcaaggcuaacggcgccgagaguaccccacacagacucggagaaacaggcaggaaaguguccguaacuagccagucugggcgggucauaucaaguugggagagcuauaaguccggaggugaaaccaaacuguga

SEQ ID NO: 159945 - RNA, 1575 nt, Artificial Sequence; identical to SEQ ID NO: 159944
  derived and/or modified CDS sequence (opt3) from glycoprotein__RABV__LC071938.1

SEQ ID NO: 159946 - RNA, 1575 nt, Artificial Sequence; identical to SEQ ID NO: 159944
  derived and/or modified CDS sequence (opt3) from glycoprotein__RABV__LC071939.1

SEQ ID NO: 159947 - RNA, 1575 nt, Artificial Sequence
  derived and/or modified CDS sequence (opt3) from glycoprotein__RABV__LC071940.1
augaucccccaggcccugcuguucgugccucuucuggucuuuagcuugugcuucggcaaguuuuccauuuacaccauaccagacaaauuagggccguggucucccaucgauauucaccaucugucauguccuaacaaucuaguuguggaggacgaaggaugcacaaaccucagugguuucagcuauauggagcugaagguaggcuacaucuccgcuauuaaagugaauggguuuacuuguacgggagucgugaccgaagcagagacauauacuaacuucguuggcuacgugaccacaaccuuuaagagaaaacacuucaggccaacucccgaugccugccgggcggcuuauaauuggaagauggccggugacccucgcuacgaagagucucuucauaacccauaucccgauuaccacuggcugcgaacagucaagaccacgaaagagucguuggugaucauaucaccuagcguaagugaccucgauccauacgacaagucccugcauucucguguuuuuccgagcgggaaauguuccggaaucacugugucaaguaccuauugccccacaaaucacgauuacacuauuuggaugccugaaaacccaagacugggcaccagcugugacaucuucacaaccucuaggggcaagcgggcauccaaagggggaaagacgugcgguuuugucgaugagcgcggccucuauaagucauuaaaaggggccuguaagcugaaacuuugcggaguguugggccugagacuaauggacgguacuugggcugcaauucaaacaagcgaugaagccaaguggugucccccugaccagcucgugaauauccacgacuucaggagugaugagauagagcaucuggucguugaggaacuugugaaaaagcgggaagagugccuggacgcuuuggaaucuauuaugaccacuaaauccgugagcuuucgccgacucucgcaccugagaaaguuaguaccaggguucggaaaggccuacacaaucuucaacaaaacccugauggaggcggaugcacauuauaagucugucaggacguggaaugagauuauccccuccaaaggcugccuccgggugggcgggcguugucacccgcacguuaacggaguguuuuucaaugguaucauucuuggcccugacgggcauguccugauacccgaaaugcagucaaguuugcuacagcaacacauggagcugcucgaaagcuccgugaucccacugaugcauccucuugccgaucccucuaccguauuuaaggacgaugacgaggcugaagauuucguugaggugcaccucccagacguccauaaacaggugagcggagucgauuugggccuccccucaugggguaaguacgugcugaugaguguuggggccaugauugcauuaaugcugaugaucuuucuaacaacuugcugucgcaaggcuaacggcgccgaguccacccagcacagacucggagaaacaggcaggaaagugagcguaacuucucagucagggcgggucauaaguagccgagaguccuauaagucuggaggugaaaccaaacuguga

SEQ ID NO: 159948 - RNA, 1575 nt, Artificial Sequence
  derived and/or modified CDS sequence (opt3) from glycoprotein__RABV__LC071941.1
augaucccccaggcccuucucuucgugccucuucuggucuuuagcuugugcuucggcaaguuuccaauuuacaccauaccggacaaauuagggcccugguccccuaucgauauucaccaucugucuuguccaaacaaucuaguuguggaggacgaaggaugcacaaaccucucagguuucaguuauauggagcugaagguaggcuacaucagcgcuauuaaagugaauggguuuacuuguacgggagucgugaccgaagcagagacauauacuaacuucguuggcuacgugaccacaaccuuuaagagaaaacacuucaggcccacuccugaugccugccgggcggcuuauaauuggaagauggccggugacccacgcuacgaagagucccuucauaaccccuauccugauuaccacuggcugcgaacagucaagaccacgaaagagucuuuggugaucauaucgccaucaguaagcgaccucgaucuguacgacaagagucugcauucccguguuuuuccgucugggaaauguagcggaaucacuguguccucaaccuauugccccacaaaucacgauuacacuauuuggaugccugaaaacccaagacucggcaccaguugugacaucuucacaaccagcaggggcaagcgggcaucuaaagggggaaagacgugcgguuuugucgaugagcgcggcuuauauaagucccugaaaggggccuguaagcugaaauugugcggagugcugggccuaagacucauggacgguacuugggcugcaauucaaacaucagaugaagccaaguggugucccccugaccagcuggugaauauccacgacuucaggagcgaugagauagagcaucuugucguugaggaacuggugaaaaagcgggaagagugcuuggacgcucucgaaaguauuaugaccacuaaaucuguauccuuucgccgacugagccacuuaagaaagcuggugccaggguucggaaaggccuacacaaucuucaacaaaacccucauggaggcggaugcacauuauaagucggucaggacguggaaugagauuauccccucuaaaggcugccuucgggugggcgggcguugucacccgcacguuaacggaguguuuuucaaugguaucauucugggcccugacgggcaugucuugauacccgaaaugcaguccucacuacugcagcaacacauggagcuccuggaaaguagcgugaucccacuuaugcauccucuggccgaucccuccaccguauuuaaggacgaugacgaggcugaagauuucguugaggugcacuugccagacguccauaaacaggugucuggagucgaucucggccugcccagcugggguaaguacguguuaaugucaguuggggccaugauugcacugaugcuaaugaucuuucucacaacuugcugucgcaaggcuaacggcgccgagaguacccagcacagacugggagaaacaggcaggaaaguguccguaacuagccagucugggcgggucauaucaaguugggagagcuauaaguccggaggugaaaccaaacuuuga

SEQ ID NO: 159949 - RNA, 1575 nt, Artificial Sequence
  derived and/or modified CDS sequence (opt3) from glycoprotein__RABV__LC071943.1
augaucccccaggcccugcuguucgugccucuucuggucuuuagcuugugcuucggcaaguuuccaauuuacaccauaccggacaaauuagggcccugguccccuaucgauauucaccaucugucuuguccaaacaaucuaguuguggaggacgaaggaugcacaaaccucucagguuucaguuauauggagcugaagguaggcuacaucagcgcuauuaaagugaauggguuuacuuguacgggagucgugaccgaagcagagacauauacuaacuucguuggcuacgugaccacaaccuuuaagagaaaacacuucaggcccacuccugaugccugcggugcggcuuauaauuggaagauggccggggacccacgguacgaagagucccuucauaaccccuauccugauuaccacuggcugcgcacagucaagaccacgaaagagucuuuggugaucauaucgccaucaguaagcgaccucgauccguacgacaagagucugcauucccgaguuuuucccucuggaaaauguagcggcaucacuguguccucaaccuauugcccuacaaaucacgauuacacuauuuggaugccagaaaacccccgucugggcaccaguugugacaucuucacaaccagcagagggaagagggcaucuaaaggagguaagacgugcggcuuugucgaugagcgggggcucuauaaguccuuaaaaggagccuguaagcugaaacuuugcggcguguugggucugcgccuaauggacgggacuugggcugcaauucaaacaucagaugaagccaagugguguccuccagaccagcucgugaauauccacgacuucagaagcgaugagauagagcaucuggucguugaggaacuugugaaaaagagggaagagugccuggacgcuuuggaaaguauuaugaccacuaaaucuguauccuuucggcgccucagccaccuccgaaaguuagugcccggauucggcaaggccuacacaaucuucaacaaaacccugauggaggcggaugcacauuauaagucgguccacacguggaaugagauuaucccgucuaaaggcugccucagaguugggggaaggugucacccucaugugaacgguguguuuuucaauggcaucauucuugggcccgacggacacguccugauaccagaaaugcaguccucauugcuacagcaacauauggagcugcucgaaaguagcgugaucccucugaugcacccccuugccgauccauccaccguauuuaaggacgaugacgaggcugaagauuucguugaggugcaucugcccgacguccacaaacaggugucuggcgucgauuugggucucccuagcugggggaaguacgugcugaugucaguuggcgccaugauugcauuaaugcugaugaucuuucuaacaacuugcugucggaaggcuaacggagccgagaguacccagcaccgucucggcgaaacagggcgcaaaguguccguaacuagccagucuggaagagucauaucaaguugggagagcuauaaguccgguggcgaaaccaaacuguga

SEQ ID NO: 159950 - RNA, 1575 nt, Artificial Sequence
  derived and/or modified CDS sequence (opt3) from glycoprotein__RABV__LC071944.1
augaucccccaggcccugcuguucgugccucuucuggucuuuagcuugugcuucggcaaguuuccaauuuacaccauaccggacaaauuagggcccugguccccuaucgauauucaccaucugucuuguccaaacaaucuaguuguggaggacgaaggaugcacaaaccucucagguuucaguuauauggagcugaagguaggcuacaucagcgcuauuaaagugaauggguuuacuuguacgggagucgugaccgaagcagagacauauacuaacuucguuggcuacgugaccacaaccuuuaagagaaaacacuucaggcccacuccugaugccugccgggcggcuuauaauuggaagauggccggugacccacgcuacgaagucucccuucauaaccccuauccugauuaccacuggcugcgaacagugaagaccacgaaagagucuuugguaaucauaucgccaucaguuagcgaccucgauccguacgacaagagucugcauucccguguguuucccucugggaaauguagcggaaucacugucuccucaaccuauugcccuacaaaucacgauuacacuauuuggaugccagagaaccccagacugggcaccaguugugacaucuucacaaccagcaggggcaagcgggcaucuaaagggggaaagacgugcgguuuuguggaugaacgcggccucuauaaguccuuaaaaggggccuguaagcugaaacuuugcggaguguugggccugagacuaauggacgguacuugggcugcaauucaaacaucagaugaggccaagugguguccuccagaccagcucgucaauauccacgacuucaggagcgaugaaauagagcaucugguuguggaggaacuugugaaaaagcgggaggaaugccuggacgcuuuggagaguauuaugaccacuaaaucuguauccuuucgccgacucagccaccugagaaaguuaguccccggguucggaaaggccuacacaaucuucaacaaaacccugauggaagcggaugcacauuauaagucggugaggacguggaaugagauuaucccgucuaaaggcugccuccggguuggcgggcguugucacccucacgugaacggagucuuuuucaaugguaucauucuuggccccgacgggcaugugcugauaccagagaugcaguccucauugcuacagcaacacauggaacugcucgagaguagcguaaucccucugaugcauccccuugccgauccauccaccguuuuuaaggacgaugacgaagcugaggauuucguggaaguccaccuccccgacgugcauaaacaggucucuggaguggauuugggccucccuagcugggguaaguacguucugaugucagugggggccaugauugcauuaaugcugaugaucuuucuaacaacuugcugucgcaaggcuaacggcgccgagaguacccagcacagacucggagagacaggcaggaaaguauccgucacuagccagucugggcgggugauaucaaguugggaaagcuauaaguccggaggugagaccaaacuguga

SEQ ID NO: 159951 - RNA, 1575 nt, Artificial Sequence
  derived and/or modified CDS sequence (opt3) from glycoprotein__RABV__LC071945.1
augaucccccaggcccuucucuucgugagccuucuggucuuuuccuugugcuucggcaaguuuccuauuuacaccauaccagacaaauuagggccguggucucccaucgauauucaccaucugucauguccuaacaaucuaguuguggaggacgaaggaugcacaaaccucagugguuucagcuauauggagcugaagguaggcuacaucuccgcuauuaaagugaauggguuuacuuguacgggagucgugaccgaagcagagacauauacuaacuucguuggcuacgugaccacaaccuuuaagagaaaacacuucaggccaacucccgaugccugccgggcggcuuauaauuggaagauggccggugacccucgcuacgaagagucucuucauaacccauaucccgauuaccacuggcugcgaacagucaagaccacgaaagagucguuggugaucauaucaccuagcguaagugaccucgauccauacgacaagucccugcauucucguguucugcccgggggaaaauguagcggcaucacuguguccucaaccuauugcccgacaaaucacgauuacacuauuuggaugccugaaaacccaagacucggcaccaguugugacaucuuuacaaccagcagggggaagcgggcaucuaaaggagguaagacgugcggcuucgucgaugagcgcggguuauauaagucccugaaaggagccuguaagcugaaauugugcggcgugcugggucuaagacucauggacgggacuugggcugcaauucaaacaucagaugaagccaaguggugucccccugaccagcuggugaauauccacgacuuuaggagcgaugagauagagcaucuugucguugaggaacuggugaaaaagcgggaagagugcuuggacgcucucgaaaguauuaugaccacuaaaucuguauccuuccgccgacugagccacuuaagaaagcuggugccaggauuuggcaaggccuacacaaucuucaacaaaacccucauggaggcggaugcacauuauaagucggucaggacguggaaugagauuauccccucuaaaggcugccuucggguugggggacguugucacccgcacgugaacgguguguucuuuaauggcaucauucuggggccugacggacaugucuugauacccgaaaugcaguccucacuacugcagcaacacauggagcuccuggaaaguagcgugaucccacuuaugcauccucuggccgaucccuccaccguauucaaggacgaugacgaggcugaagauuuuguugaggugcacuugccagacguccauaaacaggugucuggcgucgaucucggucugcccagcugggggaaguacguguuaaugucaguuggcgccaugauugcacugaugcuaaugaucuuccucacaacuugcugucgcaaggcuaacggagccgagaguacccagcacagacugggcgaaacagggaggaaaguguccguaacuagccagucuggacgggucauaucaaguugggagagcuauaaguccgguggcgaaaccaaacuuuga

SEQ ID NO: 159952 - RNA, 1575 nt, Artificial Sequence
  derived and/or modified CDS sequence (opt3) from glycoprotein__RABV__LC071946.1
augaucccccaggcccugcuguucgugccucuucuggucuuuagcuugugcuucggcaaguuuccaauuuacaccauaccggacaaauuagggcccugguccccuaucgauauucaccaucugucuuguccaaacaaucuaguuguggaggacgaaggaugcacaaaccucucagguuucaguuauauggagcugaagguaggcuacaucagcgcuauuaaagugaauggguuuacuuguacgggagucgugaccgaagcagagacauauacuaacuucguuggcuacgugaccacaaccuuuaagagaaaacacuucaggcccacuccugaugccugccgggcggcuuauaauuggaagauggccggugacccacgcuacgaagagucccuucauaaccccuauccugauuaccacuggcugcgaacagucaagaccacgaaagagucuuuggugaucauaucgccaucaguaagcgaccucgauccguacgacaagagucugcauucccguguuuuucccgggggaaaauguucuggcaucacugugagcuccaccuauugcccuacaaaucacgauuacacuauuuggaugccagaaaaccccagacugggcaccucaugugacaucuucacaaccaguagggggaagcgggcaagcaaaggagguaagacgugcggcuuugucgaugagcgcgggcucuauaagucuuuaaaaggagccuguaagcugaaacuuugcggcguguugggucugagacuaauggacgggacuugggcugcaauucaaacauccgaugaagccaagugguguccuccagaccagcucgugaauauccacgacuucaggucagaugagauagagcaucuggucguugaggaacuugugaaaaagcgggaagagugccuggacgcuuuggaaagcauuaugaccacuaaaaguguaucuuuucgccgacucucccaccugagaaaguuagugcccggauucggcaaggccuacacaaucuucaacaaaacccugauggaggcggaugcacauuauaagagcgucaggacguggaaugagauuaucccgucgaaaggcugccuccggguugggggacguugucacccucacgugaacgguguguuuuucaauggcaucauucuugggcccgacggacauguccugauaccagaaaugcagucuuccuugcuacagcaacacauggagcugcucgaaucaagugugaucccucugaugcauccccuugccgauccaagcaccguauuuaaggacgaugacgaggcugaagauuucguugaggugcaccuccccgacguccauaaacagguguccggcgucgauuugggucucccuucuugggggaagcacgugcugaugagcguuggcgccaugauugcauuaaugcugaugaucuuucuaacaacuugcugucgcaaggcuaacggagccgagucaacccagcacagacucggcgaaacagggaggaaagugaguguaacuucccagagcggacgggucauaucuucaugggagaguuacaagagcgguggcgaaaccaaacuguga

SEQ ID NO: 159953 - RNA, 1575 nt, Artificial Sequence
  derived and/or modified CDS sequence (opt3) from glycoprotein__RABV__LC071947.1
augaucccccaggcccugcuguucgugccucuucuggucuuuagcuugugcuucggcaaguuuccaauuuacaccauaccggacaaauuagggcccugguccccuaucgauauucaccaucugucuuguccaaacaaucuaguuguggaggacgaaggaugcacaaaccucucagguuucaguuauauggagcugaagguaggcuacaucagcgcuauuaaagugaauggguuuacuuguacgggagucgugaccgaagcagagacauauacuaacuucguuggcuacgugaccacaaccuuuaagagaaaacacuucaggcccacuccugaugccugccgggcggcuuauaauuggaagauggccggugacccacgcuacgaagagucccuucauaaccccuauccugauuaccacuggcugcgaacagucaagaccacgaaagagucuuuggugaucauaucgccaucaguaagcgaccucgauccguacgacaagagucugcauucccguguuuuucccucugggaaauguagcggaaucacuguguccucaaccuauugcccuacaaaucacgauuacacuauuuggaugccagaaaaccccagacugggcaccaguugugacaucuucacaaccagcaggggcaagcgggcaucuaaagggggaaagacgugcgguuuugucgaugagcgcggccucuauaaguccuuaaaaggggccuguaagcugaaacuuugcggaguguugggccugagacuaauggacgguacuugggcugcaauucaaacaucagaugaagccaagugguguccuccagaccagcucgugaauauccacgacuucaggagcgaugagauagagcaucuggucguugaggaacuugugaaaaagcgggaagagugccuggacgcuuuggaaaguauuaugaccacuaaaucuguauccuuucgccgacucagccaccugagaaaguuagugcccggguucggaaaggccuacacaaucuucaacaaaacccugauggaggcggaugcacauuauaagucggucaggacguggaaugagauuaucccgucuaaaggcugccuccgggugggcgggcguugucacccucacguuaacggaguguuuuucaaugguaucauucuuggccccgacgggcauguccugauaccagaaaugcaguccucauugcuacagcaacacauggagcugcucgaaaguagcgugaucccucugaugcauccccuugccgauccauccaccguauuuaaggacgaugacgaggcugaagauuucguugaggugcaccuccccgacguccauaaacaggugucuggagucgauuugggccucccuagcugggguaaguacgugcugaugucaguuggggccaugauugcauuaaugcugaugaucuuucuaacaacuugcugucgcaaggcuaacggcgccgagaguacccagcacagacucggagaaacaggcaggaaaguguccguaacuagccagucugggcgggucauaucaaguugggagagcuauaaguccggaggugaaaccaaacuguga

SEQ ID NO: 159954 - RNA, 1575 nt, Artificial Sequence
  derived and/or modified CDS sequence (opt3) from glycoprotein__RABV__LC071948.1
augaucccccaggcccugcuguucgugccucuucuggucuuuagcuugugcuucggcaaguuuccaauuuacaccauaccggacaaauuagggcccugguccccuaucgauauucaccaucugucuuguccaaacaaucuaguuguggaggacgaaggaugcacaaaccucucagguuucaguuauauggagcugaagguaggcuacaucagcgcuauuaaagugaauggguuuacuuguacgggagucgugaccgaagcagagacauauacuaacuucguuggcuacgugaccacaaccuuuaagagaaaacacuucaggcccacuccugaugccugccgggcggcuuauaauuggaagauggccggugacccacgcuacgaagagucccuucauaaccccuauccugauuaccacuggcugcgaacagucaagaccacgaaagagucuuuggugaucauaucgccaucaguaagcgaccucgauccguacgacaagagucugcauucccguguuuuucccucugggaaauguagcggaaucacuguguccucaaccuauugcccuacaaaucacgauuacacuauuuggaugccagaaaaccccagacugggcaccaguugugacaucuucacaaccagcaggggcaagcgggcaucuaaagggggaaagacgugcgguuuugucgaugagcgcggccucuauaaguccuuaaaaggggccuguaagcugaaacuuugcggaguguugggccugagacuaauggacgguacuugggcugcaauucaaacaucagaugaagccaagugguguccuccagaccagcucgugaauauccacgacuucaggagcgaugagauagagcaucuggucguugaggaacuugugaaaaagcgggaagagugccuggacgcuuuggaaaguauuaugaccacuaaaucuguauccuuucgccgacucagccaccugagaaaguuagugcccggguucggaaaggccuacacaaucuucaacaaaacccugauggaggcggaugcacauuauaagucggucaggacguggaaugagauuaucccgucuaaaggcugccuccgggugggcgggcguugucacccucacguuaacggaguguuuuucaaugguaucauucuuggccccgacgggcauguccugauaccagaaaugcaguccucauugcuacagcaacacauggagcugcucgaaaguagcgugaucccucugaugcauccccuugccgauccauccaccguauuuaaggacgaugacgaggcugaagauuucguugaggugcaccuccccgacguccauaaacaggugucuggagucgauuugggccucccuagcugggguaaguacgugcugaugucaguuggggccaugauugcauuaaugcugaugaucuuucuaaugacaugcugucgcaaggcuaacggcgccgagaguacucagcacagacucggagaaaccggcaggaaaguguccguaacaagccagucugggcgggucauaucaaguugggagagcuauaaguccggaggugaaacuaaacuguga

SEQ ID NO: 159955 - RNA, 1575 nt, Artificial Sequence; identical to SEQ ID NO: 159953
  derived and/or modified CDS sequence (opt3) from glycoprotein__RABV__LC071949.1

SEQ ID NO: 159956 - RNA, 1575 nt, Artificial Sequence
  derived and/or modified CDS sequence (opt3) from glycoprotein__RABV__LC071950.1
augaucccccaggcccuucucuucgugccucuucuggucuuuagcuugugcuucggcaaguuuccaauuuacaccauaccggacaaauuagggcccugguccccuaucgauauucaccaucugucuuguccaaacaaucuaguuguggaggacgaaggaugcacaucacucagugguuucagcuauauggagcugaagguaggcuacaucuccgcuauuaaagugaacggguuuacuuguacgggagucgugaccgaagcagagacauauacuaauuucguuggcuacgugaccacaaccuuuaagagaaaacacuucaggcccacuccugaugccugccgggcggcuuauaacuggaagauggccggugacccacgcuacgaagagucucuucauaaucccuauccugauuaccacuggcugcgaacagucaagaccacgaaagagucguuggugaucauaucaccaagcguaagugaccucgauccguacgacaagucccugcauucucguguuuuucccagcgggaaauguuccggaaucacugugucaaguaccuauugcccuacaaaccacgauuacacuauuuggaugccagaaaagcccagacugggcaccagcugugacaucuucacaaccucuaggggcaaacgggcauccaaagggggaaagacgugcgguuuugucgaugagcgcggccucuauaagucauuaaagggggccuguaaacugaagcugugcggaguguugggccugagacuaauggacgguacuugggcugcaauucaaacaagcgaugaagccaaaugguguccuccagaccagcucgugaauauccacgacuucaggagugaugagauagagcaucuggucguugaggaacuugugaagaaacgggaagagugccuggacgcuuuggaaucuauuaugaccacuaaguccgugagcuuucgccgacucucgcaccugagaaaguuagugcccggguucggaaaagccuacacaaucuucaacaagacccugauggaggcggaugcacauuauaaaucugucaggacguggaaugagauuaucccguccaagggcugccuccgggugggcgggcguugucacccucacguuaacggaguguuuuucaaugguaucauucuuggccccgacgggcauguccugauaccagaaaugcagucaaguuugcuacagcaacacauggagcugcucgaaagcuccgugaucccucugaugcauccccuugccgauccaucuaccguauuuaaagacgaugacgaggcugaagauuucguugaggugcaucugcccgacguccacaagcagguaagcggagucgauuugggccucccuucaugggguaaguacgugcugaugaguguuggggccaugauugcauuaaugcugaugaucuuucuaacaacuugcugucgcaaagcuaacggcgccgaguccacccagcacagacucggagaaacaggcaggaaggugagcguaacuucucagucagggcgggucauaaguagcugggaguccuauaaaucuggaggugaaaccaagcuguga

SEQ ID NO: 159957 - RNA, 1575 nt, Artificial Sequence
  derived and/or modified CDS sequence (opt3) from glycoprotein__RABV__LC071951.1
augaucccccaggcccugcuguucgugccucuucuggucuuuagcuugugcuucggcaaguuuccaauuuacaccauaccggacaaauuagggcccugguccccuaucgauauucaccaucugucuuguccaaacaaucuaguuguggaggacgaaggaugcacaaaccucucagguuucaguuauauggagcugaagguaggcuacaucagcgcuauuaaagugaauggguuuacuuguacgggagucgugaccgaagcagagacauauacuaacuucguuggcuacgugaccacaaccuuuaagagaaaacacuucaggcccacuccugaugccugccgggcggcuuauaauuggaagauggccggugacccacgcuacgaagagucccuucauaaccccuauccugauuaccacuggcugcgaacagucaagaccacgaaagagucuuuggugaucauaucgccaucaguaagcgaccucgauccguacgacaagagucugcauucccguguuuuucccucugggaaauguagcggaaucacuguguccucaaccuauugcccuacaaaucacgauuacacuauuuggaugccagaaaaccccagacugggcaccaguugugacaucuucacaaccagcaggggcaagcgggcaucuaaagggggaaagacgugcgguuuugucgaugagcgcggccucuauaaguccuuaaaaggggccuguaagcugaaacuuugcggaguguugggccugagacuaauggacgguacuugggcugcaauucaaacaucagaugaagccaagugguguccuccagaccagcucgugaauauccacgacuucaggagcgaugagauagagcaucuggucguugaggaacuugugaaaaagcgggaagagugccuggacgcuuuggaaaguauuaugaccacuaaaucuguauccuuucgccgacucagccaccugagaagguuagugcccggguucggaaaggccuacacaaucuucaacaagacccugauggaggcggaugcacauuauaaaucgguccggacguggaaugagauuaucccgucuaagggcugccuccgugugggcgggcgcugucacccucacguuaacggaguguuuuucaaugguaucauucuuggccccgacgggcauguccugauaccagaaaugcaguccucauugcuacagcaacacauggagcugcucgaaaguagcgugaucccucugaugcauccccuugccgauccauccaccguauuuaaagacgaugacgaggcugaagauuucguugaggugcaccuccccgacguccauaaacaggugucuggagucgauuugggccucccuagcugggguaaguacgugcugaugucaguuggggccaugauugcauuaaugcugaugaucuuucuaacaacuugcuguagaaaggcuaacggcgccgagaguacccagcacaggcucggagaaacaggccggaagguguccguaacuagccagucugggcgagucauaucaaguugggagagcuauaaauccggaggugaaaccaagcuguga

SEQ ID NO: 159958 - RNA, 1575 nt, Artificial Sequence; identical to SEQ ID NO: 159953
  derived and/or modified CDS sequence (opt3) from glycoprotein__RABV__LC071952.1

SEQ ID NO: 159959 - RNA, 1575 nt, Artificial Sequence
  derived and/or modified CDS sequence (opt3) from glycoprotein__RABV__LC071953.1
augaucccccaggcccugcuguucgugccucuucuggucuuuagcuugugcuucggcaaguuuccaauuuacaccauaccggacaaauuagggcccugguccccuaucgauauucaccaucugucuuguccaaacaaucuaguuguggaggacgaaggaugcacaaaccucucagguuucaguuauauggagcugaagguaggcuacaucagcgcuauuaaagugaauggguuuacuuguacgggagucgugaccgaagcagagacauauacuaacuucguuggcuacgugaccacaaccuuuaagagaaaacacuucaggcccacuccugaugccugccgggcggcuuauaauuggaagauggccggugacccacgcuacgaagagucccuucauaaccccuauccugauuaccacuggcugcgaacagucaagaccacgaaagagucuuuggugaucauaucgccaucaguaagcgaccucgauccguacgacaagagucugcauucccguguuuuucccucugggaaauguagcggaaucacuguguccucaaccuauugcccuacaaaucacgauuacacuauuuggaugccagaaaaccccagacugggcaccaguugugacaucuucacaaccagcaggggcaagcgggcaucuaaagggggaaagacgugcgguuuugucgaugagcgcggccucuauaaguccuuaaaaggggccuguaagcugaaacuuugcggaguguugggccugagacuaauggacgguacuugggcugcaauucaaacaucagaugaagccaagugguguccuccagaccagcucgugaauauccacgacuucaggagcgaugagauagagcaucuggucguugaggaacuugugaaaaagcgggaagagugccuggacgcuuuggaaaguauuaugaccacuaaaucuguauccuuucgccgacucagccaccugagaaaguuagugcccggguucggaaaggccuacacaaucuucaacaaaacccugauggaggcggaugcacauuauaagucggucaggacguggaaugagauuaucccgucuaaaggcugccuccgggugggcgggcguugucacccucacguuaacggaguguuuuucaaugguaucauucuuggccccgacgggcauguccugauaccagaaaugcaguccucauugcuacagcaacacauggagcugcucgaaaguagcgugaucccucugaugcauccccuugccgauccauccaccguauuuaaggacgaugacgaggcugaagauuucguugaggugcaccuccccgacguccauaaacaggugucuggagucgauuugggccucccuagcugggguaaguacgugcugaugucaguuggggccaugauugcauuaacacugaugaucuuucuaacuaccugcugucgcaaggcuaacggcgccgagaguacacagcacagacucggagaaacuggcaggaaaguguccguaaccagccagucugggcgggucauaucaaguugggagagcuauaaguccggaggugaaacaaaacuguga

SEQ ID NO: 159960 - RNA, 1575 nt, Artificial Sequence
  derived and/or modified CDS sequence (opt3) from glycoprotein__RABV__LC071954.1
augaucccccaggcccuccuguucgugccucuucuggucuuuagcuugugcuucggcaaguuuccaauuuacaccauaccggacaaauuagggcccugguccccuaucgauauucaccaucugucuuguccaaacaaucuaguuguggaggacgaaggaugcacaaaccucucagguuucaguuauauggagcugaagguaggcuacaucagcgcuauuaaagugaauggguuuacuuguacgggagucguggcagaagccgagaccuauacaaacuucguuggcuacgugacuaccacauuuaagagaaaacacuucaggcccaccccugaugcgugccgggcugccuauaauuggaagauggccggugacccacgcuacgaagagucccuucauaaccccuauccugauuaccacuggcugcgaacugucaagacaaccaaagagucuuuggugaucauaucgccaucaguaagcgaccucgauccguacgacaagagucugcauucccguguuuuucccucugggaaauguagcggaaucacgguguccucaacuuauugcccuaccaaucacgauuacacaauuuggaugccagaaaaccccagacugggcaccaguugugacaucuucacuacaagcaggggcaagcgggcaucuaaagggggaaagaccugcgguuuugucgaugagcgcggccucuauaaguccuuaaaaggggcuuguaagcugaaacuuugcggaguguugggccugagacuaauggacgguacgugggcagccauucaaacuucagaugaagcuaagugguguccuccagaccagcucgugaauauccacgacuucaggagcgaugagauagagcaucuggucguugaggaacuugugaaaaagcgggaagagugccuggacgccuuggaaaguauuaugacaaccaaaucuguauccuuucgccgacucagccaccugagaaaguucgugcccggguucggaaaggcguacacuaucuuuaacaaaacauuaauggaggcagaugcccauuauaagucggucaggaccuggaaugagauuaucccgucuaaaggcugccugcgggugggcgggcguugucacccucacguuaacggaguguucuuuaaugguaucauucucggccccgacgggcauguccuuauaccagaaaugcaguccucacuguugcagcaacacauggagcuacuggaaaguagcgugaucccucucaugcauccccuggcugauccauccacgguauucaaggacgaugacgaggccgaagauuuuguugaggugcaccuucccgacguccauaaacaggugucuggagucgaucugggcuugccuagcugggguaaguacgugcucaugucaguuggggcaaugauugcucugauguuaaugaucuuccugaccacaugcugucgcaaggccaacggcgcggagaguacucagcacagacuaggagaaaccggcaggaaaguguccguaacaagccagucugggcgggucauaucaaguugggagagcuauaaguccggaggugaaacuaaacucuga

SEQ ID NO: 159961 - RNA, 1575 nt, Artificial Sequence
  derived and/or modified CDS sequence (opt3) from glycoprotein__RABV__LC071955.1
augaucccccaggcccugcuguucgugccucuucuggucuuuagcuugugcuucggcaaguuuccaauuuacaccauaccggacaaauuagggcccugguccccuaucgauauucaccaucugucuuguccaaacaaucuaguuguggaggacgaaggaugcacaaaccucucagguuucaguuauauggagcugaagguaggcuacaucagcgcuauuaaagugaauggguuuacuuguacgggagucgugaccgaagcagagacauauacuaacuucguuggcuacgugaccacaaccuuuaagagaaaacacuucaggcccacuccugaugccugccgggcggcuuauaauuggaagauggccggugacccacgcuacgaagagucccuucauaaccccuauccugauuaccacuggcugcgaacagucaagaccacgaaagagucuuuggugaucauaucgccaucaguaagcgaccucgauccguacgacaagagucugcauucccguguuuuucccucugggaaauguagcggaaucacuguguccucaaccuauugcccuacaaaucacgauuacacuauuuggaugccagaaaaccccagacugggcaccaguugugacaucuucacaaccagcaggggcaagcgggcaucuaaagggggaaagacgugcgguuuugucgaugagcgcggccucuauaaguccuuaaaaggggccuguaagcugaaacuuugcggaguguugggccugagacuaauggacgguacuugggcugcaauucaaacaucagaugaagccaagugguguccuccagaccagcucgugaauauccacgacuucaggagcgaugagauagagcaucuggucguugaggaacuugugaaaaagcgggaagagugccuggacgcuuuggaacccauuaugaccacuaaaaguguaucuuuucgccgacucucccaccugagaaaguuagugccgggguucggaaaggccuacacaaucuucaacaaaacccugauggaggcggaugcacauuauaagagcgucaggacguggaaugagauuaucccuucgaaaggcugccuccgggugggcgggcguugucacccccacguuaacggaguguuuuucaaugguaucauucuuggcccagacgggcauguccugauaccugaaaugcagucuuccuugcuacagcaacacauggagcugcucgaaucaagugugaucccccugaugcauccacuugccgaucccagcaccguauuuaaggacgaugacgaggcugaagauuucguugaggugcaccucccugacguccauaaacagguguccggagucgauuugggccucccaucuugggguaaguacgugcugaugagcguuggggccaugauugcauuaaugcugaugaucuuucuaacaacuugcugucgcaaggcuaacggcgccgagucaacccagcacagacucggagaaacaggcaggaaagugaguguaacuucccagagcgggcgggucauaucuucaugggagaguuauaagagcggaggugaaaccaaacuguga

SEQ ID NO: 159962 - RNA, 1575 nt, Artificial Sequence
  derived and/or modified CDS sequence (opt3) from glycoprotein__RABV__LC071956.1
augaucccccaggcccugcuguucgugccucuucuggucuuuagcuugugcuucggcaaguuuccaauuuacaccauaccggacaaauuagggcccugguccccuaucgauauucaccaucugucuuguccaaacaaucuaguuguggaggacgaaggaugcacaaaccucucagguuucaguuauauggagcugaagguaggcuacaucagcgcuauuaaagugaauggguuuacuuguacgggagucgugaccgaagcagagacauauacuaacuucguuggcuacgugaccacaaccuuuaagagaaaacacuucaggcccacuccugaugccugccgggcggcuuauaauuggaagauggccggugacccacgcuacgaagagucccuucauaaccccuauccugauuaccacuggcugcgaacagucaagaccacgaaagagucuuuggugaucauaucgccaucaguaagcgaccucgauccguacgacaagagucugcauuccaaaguuuuucccucugggaaguguagcggaaucacuguguccucaaccuauugcccuacaaaucacgauuacacuauuuggaugccagaaaacccccgucugggcaccaguugugacaucuucacaaccagcagaggcaaaagggcaucuaaagggggaaagacgugcgguuuugucgaugagcggggccucuauaaguccuuaaagggggccuguaaacugaugcuuugcggaguguugggccugcgccuaauggacgguacuugggcugcaauucaaacaucagaugaagccaagugguguccuccagaccagcucgugaauauccacgacuucagaagcgaugagauagagcaucuggucguugaggaacuugugaaaaagagggaagagugccuggacgcuuuggaaaguauuaugaccacuaaaucuguauccuuucggcgccucagccaccuccgaaaguuagugcccggguucggaaaggccuacacaaucuucaacaaaacccugauggaggcggaugcacauuauaagucggucagaacguggaaugagauuaucccgucuaaaggcugccucagggugggcgggcggugucacccucacguuaacggaguguuuuucaaugguaucauucuuggccccgacgggcauguccugauaccagaaaugcaguccucauugcuacagcaacacauggagcugcucgaaaguagcgugaucccucugaugcauccccuugccgauccauccaccguauuuaaggacgaugacgaggcugaagauuucguugaggugcaucugcccgacguccacaaacaggugucuggagucgauuugggccucccuagcugggguaaguacgugcugaugucaguuggggccaugauugcauuaaugcugaugaucuuucuaacaacuugcugucguaaggcuaacggcgccgagaguacccagcaccgccucggagaaacaggcagaaaaguguccguaacuagccagucugggagggucauaucaaguugggagagcuauaaguccggaggugaaaccaaacuguga

SEQ ID NO: 159963 - RNA, 1575 nt, Artificial Sequence; identical to SEQ ID NO: 159962
  derived and/or modified CDS sequence (opt3) from glycoprotein__RABV__LC071957.1

SEQ ID NO: 159964 - RNA, 1575 nt, Artificial Sequence
  derived and/or modified CDS sequence (opt3) from glycoprotein__RABV__LC071958.1
augaucccccaggcccuccuguucgugccucuucuggucuuuagcuccugcuucggcaaguuuccaauuuacaccauaccggacaaauuggggcccuggucuccuaucgauauucaccauuuaucauguccaaacaaucugguugugggagacgaggguugcacaaaccuaaguggcuucagcuauauggaacucaagguaggguacaucuccgcuauuaaagugaauggauuuacuuguacgggcgucgugaccgaggcagaaacauauacuaacuucguugguuacgugaccacaaccuuuaagagaaaacacuucaggcccacuccugaugccugccgggcggcuuauaauuggaagauggccggggacccacgcuacgaggaaucucugcauaaccccuauccugauuaccacuggcuucgaacagucaagaccacgaaagagucgcuggugaucauaucaccaagcguaagugacuuggauccguacgacaagucccuccauucucguguuuuucccagcggaaaauguuccggcaucacugugucaaguaccuauugcccuacaaaucacgauuacacuauuuggaugccagagaaccccagacugggcaccagcugugacaucuucacaaccucuagggggaagcgggcauccaaaggagguaagacgugcggcuuugucgaugaacgcgggcuguauaagucacucaaaggagccuguaaguuaaugcugugcggcgugcuugguuugagacugacugacgggacaugggcugcaauucaaaccagcgaugaggccaaaugguguccuccagaccagcuagugaauauccacgacuucaggagugaugaaauagagcaucucgucguugaggaacuggugaagaaacgggaggaaugccuugacgcucuggagucuauuaugacuacaaaguccgugagcuuucgccgauugucgcaccucagaaaacuggugcccggauucggcaaggccuacaccaucuucaacaagacguuaauggaagcggaugcacauuauaaaucugucaggaccuggaaugagauuaucccguccaagggcugccugcggguagggggacguugucacccucacguuaacgguguguuuuucaauggcaucauucucgggcccgacggacauguccuuauaccagagauccagucaagucuguugcagcaacacauggaacuacuggagagcuccgugauuccucucaugcauccccuggccgauccaucuacaguauuuaaagacgaugacgaagcugaggauuucguugaagugcaccuucccgacguccauaaacaggugagcggcgucgaucuggguuugccuucaugggggaaguacgugcucaugaguguuggcgccaugaucgcacugauguuaaugauauuucugacuaccugcugucgcaaggcuaacggagccgaguccacacagcacagacuaggcgagacugggaggaaggugagcguaaccucucagucaggacgggucauuaguagcugggaauccuauaaaucugguggcgagacaaagcucuga

SEQ ID NO: 159965 - RNA, 1575 nt, Artificial Sequence; identical to SEQ ID NO: 159953
  derived and/or modified CDS sequence (opt3) from glycoprotein__RABV__LC071959.1

SEQ ID NO: 159966 - RNA, 1575 nt, Artificial Sequence
  derived and/or modified CDS sequence (opt3) from glycoprotein__RABV__LC071960.1
augaucccccaggcccugcuguucgugccucuucuggucuuuagcuugugcuucggcaaguuuccaauuuacaccauaccggacaaauuagggcccugguccccuaucgauauucaccaucugucuuguccaaacaaucuaguuguggaggacgaaggaugcacaaaccucucagguuucaguuauauggagcugaagguaggcuacaucagcgcuauuaaagugaauggguuuacuuguacgggagucgugaccgaagcagagacauauacuaacuucguuggcuacgugaccacaaccuuuaagagaaaacacuucaggcccacuccugaugccugccgggcggcuuauaauuggaagauggccggugacccacgcuacgaagagucccuucauaaccccuauccugauuaccacuggcugcgaacagucaagaccacgaaagagucuuuggugaucauaucgccaucaguaagcgaccucgauccguacgacaagagucugcauucccguguuuuucccucugggaaauguagcggaaucacuguguccucaaccuauugcccuacaaaucacgauuacacuauuuggaugccagaaaaccccagacugggcaccaguugugacaucuucacaaccagcaggggcaagcgggcaucuaaagggggaaagacgugcgguuuugucgaugagcgcggccucuauaaguccuuaaaaggggccuguaagcugaaacuuugcggaguguugggccugagacuaauggacgguacuuggggagcuauucaaacaucagaugaagcaaagugguguccuccagaccagcucgugaauauccacgacuucaggagcgaugagauagagcaucuggucguugaggaacuugugaaaaagcgggaagagugccuggacgccuuggaaaguauuaugaccacuaaaucuguauccuuucgccgacucagccaccugagaaaguuagugcccggguucggcaaggcuuacacaaucuucaacaaaacccugauggaggccgaugcgcauuauaagucggucaggacguggaaugagauuaucccgucuaaaggcugccuccggguugggggacguugucacccucacgugaacgguguguuuuucaauggcaucauucuugggcccgacggacauguccugauaccagaaaugcaguccucauugcuacagcaacacauggagcugcucgaaaguagcgugaucccucugaugcauccccuugcagauccauccaccguauuuaaggacgaugacgaggccgaagauuucgcugagguucaccuccccgacgugcauaaacaggucucuggcguggauuugggucucccuagcugggggaaguacguccugaugucagugggcgccaugauugcauuaaugcugaugaucuuucuaacaacuugcugucgcaaggcuaacggagccgagaguacccagcacagacucggcgaaacagggaggaaaguuuccgugacuagccagucuggacggguaauaucaaguugggagagcuauaaguccgguggcgaaaccaaacuguga

SEQ ID NO: 159967 - RNA, 1575 nt, Artificial Sequence
  derived and/or modified CDS sequence (opt3) from glycoprotein__RABV__LC071961.1
augaucccccaggcccugcucuuugugccucuucuggucuuuagcuugugcuucggcaaguuuccaauuuacaccauaccggacaaauuagggcccugguccccuaucgauauucaccaucugucuuguccaaacaaucuaguuguggaggacgaaggaugcacaaaccucucagguuucaguuauauggagcugaagguaggcuacaucagcgcuauuaaagugaauggguuuacuuguacgggagucgugaccgaagcagagacauauacuaacuucguuggcuacgugaccacaaccuuuaagagaaaacacuucaggcccacuccugaugccugccgggcggcuuauaauuggaagauggccggugacccacgcuacgaagagucccuucauaaccccuauccugauuaccacuggcugcgaacagucaagaccacgaaagagucuuuggacaucauaucgccaucagugagcgaucucgacccguacgauaagagucugcauucccguguauuucccucugggaaauguagcggaaucacuguuuccucaaccuauugcccuacaaaucacgacuacacuauuuggaugccagaaaaccccagacugggcaccaguugugauaucuucacaaccagcaggggcaagcgggcaucuaaagggggaaagacgugcgguuuuguggacgagcgcggccucuauaaguccuuaaaaggggccuguaagcugaaacuuugcggagucuugggccugagacuaauggaugguacuugggcugcaauucaaacaucagacgaagccaagugguguccuccagaccagcucgugaauauccacgauuucaggagcgacgagauagagcaucugguggucgaggaacuuguuaaaaagcgggaagagugccuggaugcuuuggaaaguauuaugaccacuaaaucuguguccuuucgccgacucagccaccugagaaaguuaguacccggguucggaaaggccuacacaaucuucaacaaaacccugauggaggcggacgcacauuauaagucggugaggacguggaaugagauuaucccgucuaaaggcugccuccgggucggcgggcguugucacccucacgugaacggaguuuucuucaaugguaucauucuuggccccgaugggcaugugcugauaccagaaaugcaguccucauugcuacagcaacacauggagcugcucgaaaguagcgucaucccucugaugcauccccuugccgacccauccaccguguuuaaggaugacgaugaggcugaagacuucguagagguucaucugcccgaugugcacaaacaggucucuggaguggacuugggccucccuagcugggguaaguacguccugaugucagugggggccaugauugcauuaaugcugaugaucuuucuaacaacuugcugucgcaaggcuaacggcgccgagaguacccagcacagacucggagaaacaggcaggaaaguuuccgugacuagccagucugggcggguaauaucaaguugggagagcuauaaguccggaggugaaaccaaacuguga

SEQ ID NO: 159968 - RNA, 1575 nt, Artificial Sequence; identical to SEQ ID NO: 159953
  derived and/or modified CDS sequence (opt3) from glycoprotein__RABV__LC071962.1

SEQ ID NO: 159969 - RNA, 1575 nt, Artificial Sequence; identical to SEQ ID NO: 159953
  derived and/or modified CDS sequence (opt3) from glycoprotein__RABV__LC071963.1

SEQ ID NO: 159970 - RNA, 1575 nt, Artificial Sequence
  derived and/or modified CDS sequence (opt3) from glycoprotein__RABV__LC071965.1
augaucccccaggcccugcuguucgugccucuucuggucuuuagcuugugcuucggcaaguuuccaauuuacaccauaccggacaaauuagggcccugguccccuaucgauauucaccaucugucuuguccaaacaaucuaguuguggaggacgaaggaugcacaaaccucucagguuucaguuauauggagcugaagguaggcuacaucagcgcuauuaaagugaauggguuuacuuguacgggagucgugaccgaagcagagacauauacuaacuucguuggcuacgugaccacaaccuuuaagagaaaacacuucaggcccacuccugaugccugccgggcggcuuauaauuggaagauggccggugacccacgcuacgaagagucccuucauaaccccuauccugauuaccacuggcugcgaacagucaagaccacgaaagagucuuuggugaucauaucgccaucaguaagcgaccucgauccguacgacaagagucugcauucccguguuuuucccucugggaaauguagcggaaucacuguguccucaaccuauugcccuacaaaucacgauuacacuauuuggaugccagaaaaccccagacugggcaccaguugugacaucuucacaaccagcaggggcaagcgggcaucuaaagggggaaagacgugcgguuuugucgaugagcgcggccucuauaaguccuuaaaaggggccuguaagcugaaacuuugcggaguguugggccugagacuaauggacgguacuugggcugcaauucaaacaucagaugaagccaagugguguccuccagaccagcucgugaauauccacgacuucaggagcgaugagauagagcaucuggucguugaggaacuugugaaaaagcgggaagagugccuggacgcuuuggaaaguauuaugaccacuaaaucuguauccuuucgccgacucagccaccugagaaaguuagugcccggguucggaaaggccuacacaaucuucaacaaaacccugauggaggcggaugcacauuauaagucggucaggacguggaaugagauuaucccgucuaaaggcugccuccgggugggcgggcguugucacccucacguuaacggaguguuuuucaaugguaucauucuuggccccgacgggcauguccugauaccagaaaugcaguccucauugcuacagcaacacauggagcugcucgaaaguagcgugaucccucugaugcauccccuugccgauccauccaccguauuuaaggacgaugacgaggcugaagauuucguugaggugcaccuccccgacguccauaaacaggugucuggagucgauuugggccucccuagcugggguaaguacgugcugaugucaguuggggccaugauugcauuaaugcugaugaucuuucuaacaaugugcugucgcaaggcuaacggcgccgagaguacucagcacagacucggagaaaccggcaggaaaguguccguaacaagccagucugggcgggucauaucaaguugggagagcuauaaguccggaggugaaacuaaacuguga

SEQ ID NO: 159971 - RNA, 1575 nt, Artificial Sequence
  derived and/or modified CDS sequence (opt3) from glycoprotein__RABV__LC071966.1
augaucccccaggcccugcucuuugugccucuucuggucuuuagcuugugcuucggcaaguuuccaauuuacaccauaccggacaaauuagggcccugguccccuaucgauauucaccaucugucuuguccaaacaaucuaguuguggaggacgaaggaugcacaaaccucucagguuucaguuauauggagcugaagguaggcuacaucagcgcuauuaaagugaauggguuuacuuguacgggagucgugaccgaagcagagacauauacuaacuucguuggcuacgugaccacaaccuuuaagagaaaacacuucaggcccacuccugaugccugcuccgcggcuuauaauuggaagauggccggugacccacgguacgaagagucucuucauaaccccuauccugauuaccacuggcugcgcacagucaagaccacgaaagagucguuggugaucauaucaccaagcguaagugaccucgauccguacgacaagucccugcauucucgaguuuuucccagcgggaaauguuccggaaucacugugucaaguaccuauugcccuacaaaucacgauuacacuauuuggaugccagaaaacccccgucugggcaccagcugugacaucuucacaaccucuagaggcaagagggcauccaaagggggaaagacgugcgguuuugccgaugagcggggccucuauaagucauuaaaaggggcuuguaagcugaaacuuugcggagucuugggccugcgccuaauggacgguacuugggcagccauucaaacaagcgaugaagcuaagugguguccuccagaccagcucgugaauauccacgacuucagaagugaugagauagagcaucugguggucgaggaacuuguuaaaaagagggaagagugccuggacgccuuggaaucuauuaugaccacuaaauccgugagcuuucggcgccucucgcaucugcgaaaguuaguacccggguucggaaaggcguacacaaucuucaacaaaacccugauggaggcagaugcccacuauaagucugugagaacguggaaugagauuaucccguccaaaggcugccucagggucggcgggcggugucacccucacgugaacggaguuuucuucaaugguaucauucuuggccccgacgggcaugugcugauaccagaaaugcagucaaguuugcuacagcaacacauggagcugcucgaaagcuccgucaucccucugaugcauccccuugcugauccaucuaccguguuuaaggacgaugacgaggccgaagauuucguagagguucaucugcccgacgugcacaaacaggucagcggaguggauuugggccucccuucaugggguaaguacguccugaugagugugggggcaaugauugcuuuaaugcugaugaucuuucuaacaaugugcugucguaaggccaacggcgcggaguccacucagcaccgccucggagaaaccggcagaaaaguuagcgugacaucucagucagggaggguaauaaguagcugggaguccuauaagucuggaggugaaacuaaacuguga

SEQ ID NO: 159972 - RNA, 1575 nt, Artificial Sequence
  derived and/or modified CDS sequence (opt3) from glycoprotein__RABV__LC071967.1
augaucccccaggcccuccuguucgugccucuucuggucuuuagcuugugcuucggcaaguuuccaauuuacaccauaccggacaaauuagggcccugguccccuaucgauauucaccaucugucuuguccaaacaaucuaguuguggaggacgaaggaugcacaaaccucucagguuucaguuauauggagcugaagguaggcuacaucagcgcuauuaaagugaauggguuuacuuguacgggagucgugaccgaagcagagacauauacuaacuucguuggcuacgugaccacaaccuuuaagagaaaacacuucaggcccacuccugaugccugccgggcggcuuauaauuggaagauggccggugacccacgcuacgaagagucccuucauaaccccuauccugauuaccacuggcugcgaacagucaagaccacgaaagagucuuuggugaucauaucgccaucaguaagcgaccucgauccguacgacaagagucugcauucccguguuuuucccucugggaaauguagcggaaucacuguguccucaaccuauugcccuacaaaucacgauuacacuauuuggaugccagaaaaccccagacugggcaccaguugugacaucuucacaaccagcaggggcaagcgggcaucuaaagggggaaagacgugcgguuuugucgaugagcgcggccucuauaaguccuuaaaaggggccuguaagcugaaacuuugcggaguguugggccugagacuaauggacgguacuugggcugcaauucaaacaucagaugaagccaagugguguccuccagaccagcucgugaauauccacgacuucaggagcgaugagauagagcaucuggucguugaggaacuugugaaaaagcgggaagagugccuggacgcuuuggaaaguauuaugaccacuaaaucuguauccuuucgccgauucagccaccucagaaagcuggugcccggguucggaaaggccuacacaaucuuuaacaaaaccuuaauggaggcggaugcacauuauaagucggucaggacguggaaugagauuaucccgucuaaaggcugccugcgggugggcgggcguugucacccucacguuaacggaguguucuuuaaugguaucauucucggccccgacgggcauguccuuauaccagaaaugcaguccucacuguugcagcaacacauggagcuacuggaaaguagcgugaucccucucaugcauccccuggccgauccauccaccguauucaaggacgaugacgaggcugaagauuuuguugaggugcaccuucccgacguccauaaacaggugucuggagucgaucugggcuugccuagcugggguaaguacgugcucaugucaguuggggccaugauugcacugauguuaaugaucuuccugacaaugugcugucgcaaggcuaacggcgccgagaguacucagcacagacuaggagaaaccggcaggaaaguguccguaacaagccagucugggcgggucauaucaaguugggagagcuauaaguccggaggugaaacuaaacucuga

SEQ ID NO: 159973 - RNA, 1575 nt, Artificial Sequence; identical to SEQ ID NO: 159970
  derived and/or modified CDS sequence (opt3) from glycoprotein__RABV__LC071968.1

SEQ ID NO: 159974 - RNA, 1575 nt, Artificial Sequence
  derived and/or modified CDS sequence (opt3) from glycoprotein__RABV__LC071969.1
augaucccccaggcccuccuguucgugccucuucuggucuuuagcuccugcuucggcaaguuuccaauuuguaccauaccggacaaauuggggcccuggucuccuaucgauauucaccauuuaucaugcccaaacaaucugguuguggaggacgaaggauguacaaaccuaagugguuucagcuacauggagcucaagguaggcuauaucuccgcuauuaaagugaauggguuuacuugcacgggagucgugaccgaagcagagacauacacuaacuucguuggcuaugugaccacaaccuuuaagagaaaacacuucaggcccacuccugaugccugucgggcggcuuacaauuggaagauggccggugacccacgcuaugaagagucucugcauaaccccuacccugauuaucacuggcuucgaacagucaagaccacgaaagagucgcuggugaucauaucaccaagcguaagugacuuggauccguacgacaagucccuccauucucguguuuuucccagcgggaaaugcuccggaaucacugugucaaguaccuacuguccuacaaaucacgauuauacugucuggaugccagaaaaccccagacugggcaccagcugcgacauuuucacaaauucuaggggcaagcgggcauccaaagggggaaagaccugugguuuuguggaugagcgcggccuguacaagucacucaaaggggccugcaaguuaaaacuguguggagugcuuggcuugagacugauggacgguacgugggucgcuauccaaacuagcgaugaagcaaaguggugcccuccagaccagcuaguuaacauucacgacuucaggagugaugagaucgagcaucucgugguagaggaacuggugaaaaagcgggaagagugccuugacgcccuggaaucuauaaugacaaccaaauccgucagcuuucgccgauugucgcaccucagaaagcuggugcccggguucggaaaggcuuauacuauuuucaauaaaacauuaauggaggccgaugcgcauuacaagucuguuaggaccuggaacgagaucauuccguccaaaggcugucugcgggugggcgggcguugccacccucacgucaauggaguguuuuucaacgguaucauccucggccccgacgggcauguacuuauuccagaaaugcagucaagucuguugcagcaacacauggagcuacuggaaagcuccguuauaccucucaugcauccccuggcagauccaucuacgguguuuaaggacggagaugaggccgaagacuucgucgaggugcaccuucccgauguccauaaacaggugagcggcguugaccuggguuugccuucaugggggaaguaugugcucaugaguguaggcgcuaugaucgcccugauguuaaugauuuuucugaugaccuguugccgcaaggcaaauggagcugagacaauccagcacagacuaggcgaaacugggaggaaagucuccgugaccagccagucuggacggguuauaucaaguugggagagcuacaaguccgguggcgaaacaaaacucuga

SEQ ID NO: 159975 - RNA, 1575 nt, Artificial Sequence
  derived and/or modified CDS sequence (opt3) from glycoprotein__RABV__LC071970.1
augaucccccaggcccugcuguucgugccucuucuggucuuuagcuccugcuucggcaaguuuccaauuuacaccauaccggacaaauuggggcccuggucuccuaucgauauucaccauuuaucauguccaaacaaucugguuguggaggacgaaggaugcacaaaccuaagugguuucagcuauauggagcucaagguaggcuacaucuccgcuauuaaagugaauggguuuacuuguacgggagucgugaccgaagcagagacauauacuaacuucguuggcuacgugaccacaaccuuuaagagaaaacacuucaggcccacuccugaugccugccgggcggcuuauaauuggaagauggccggugacccacgcuacgaagagucucugcauaaccccuauccugauuaccacuggcuucgaacagucaagaccacgaaagagucgcuggugaucauaucaccaagcguaagugacuuggauccguacgacaaguccuuucauucucguguuuuccccagcgggaaauguuccggaaucacugugucaaguaccuauugcccuacaaaucacgauuacacuauuuggaugccagaaaaccccagacucggcaccagcugugacaucuuuacaaauucuaggggcaagcgggcauccaaagggggaaagaccugcgguuucgucgaugagcgcggccuguauaagucacugaaaggggccuguaagcucaaauuaugcggagugcugggccuuagauugauggacgguacguggguggcuauucaaacuagcgaugaagcaaagugguguccuccagaccagcuggucaacauccacgacuuuaggagugaugagauagagcaucuaguuguggaggaacucguaaagaaacgggaagagugccuggacgcccuugaaucuauuaugacaaccaaauccgugagcuuccgccgacugucgcacuugagaaagcucguccccggguucggaaaggcuuacacuaucuuuaauaaaacacugauggaggccgaugcgcauuauaagucugugaggaccuggaacgagauuaucccguccaaaggcugcuuacggguuggcgggcguugucacccucacgugaauggagucuucuuuaacgguaucauucugggccccgacgggcaugugcucauaccagaaaugcagucaagucuucugcagcaacacauggaguugcuagaaagcuccguaaucccucugaugcauccccucgcagauccaucuacgguuuucaaggacggagaugaggccgaagacuuuguggagguccaccuccccgaugugcauaaacaggucagcggcguggaccuuggucugccuucaugggggaaguacguuuugaugagugugggcgcuaugauugcccucaugcugaugaucuucuuaaugaccugcugucgcaaggcaaauggagcugagacaauacagcacagacugggcgaaacugggaggaaaguauccgucaccagccagucuggacgggugauuucaaguugggagagcuauaaguccgguggcgaaacaaaacuauga

SEQ ID NO: 159976 - RNA, 1575 nt, Artificial Sequence
  derived and/or modified CDS sequence (opt3) from glycoprotein__RABV__LC071971.1
augaucccccaggcccuccuguucgugccucuucuggucuuuagcuccugcuucggcaaguuuccaauuuacaccauaccggacaaauuggggcccuggucuccuaucgauauucaccauuuaucauguccaaacaaucugguuguggaggacgaaggaugcacaaaccuaagugguuucagcuauauggagcucaagguaggcuacaucuccgcuauuaaagugaauggguuuacuuguacgggagucgugaccgaagcagagacauauacuaacuucguuggcuacgugaccacaaccuuuaagagaaaacacuucaggcccacuccugaugccugccgggcggcuuauaauuggaagauggccggugacccacgcuacgaagagucucugcauaaccccuauccugauuaccacuggcuucgaacagucaagaccacgaaagagucgcuggugaucauaucaccaagcguaagugacuuggauccguacgacaagucccuccauucucguguuuuucccagcgggaaauguuccggaaucacugugucaaguaccuauugcccuacaaauagagauuacacuauuuggaugccagaaaaccccaggcugggcaccagcugugacaucuucacaaauucucggggcaagcgcgcauccaaagggggaaagaccugcgguuuugucgaugagagaggccuguauaagucacucaaaggggccuguaaguuaaaacugugcggagugcuuggcuugaggcugauggacgguacguggguggcuauucaaacuagcgaugaagcaaagugguguccuccagaccagcuagucaacauccacgacuuccggagugaugagauagagcaccucguuguggaggaacugguaaagaaacgcgaagagugccuugacgcccuggaaucuauuaugacaaccaaauccgugagcuuucgaagauugucgcaucucaggaagcugguccccggguucggaaaggcuuacacuaucuucaauaaaacauuaauggaggccgaugcgcacuauaagucugugcggaccuggaacgagauuaucccguccaaaggcugccugcguguuggcgggcgcugucauccucacgugaauggagucuuuuucaacgguaucauucucggccccgacgggcacgugcuuauaccagaaaugcagucaagucuguugcagcaacauauggagcuacuggaaagcuccguaaucccucucaugcacccccuggcagauccaucuacgguuuuuaaggacggagaugaggccgaagacuucguggagguccaucuucccgaugugcacaaacaggucagcggcguggaccuggguuugccuucaugggggaaguacguucucaugagugugggcgcuaugauugcccugauguuaaugaucuuucugaugaccugcuguagaaaggcaaauggagcugagacaauacagcauaggcuaggcgaaacugggcggaaaguauccgucaccagccagucuggacgagugauuucaaguugggagagcuauaaguccgguggcgaaacaaaacucuga

SEQ ID NO: 159977 - RNA, 1575 nt, Artificial Sequence; identical to SEQ ID NO: 159076
  derived and/or modified CDS sequence (opt3) from glycoprotein__RABV__LC071972.1

SEQ ID NO: 159978 - RNA, 1575 nt, Artificial Sequence
  derived and/or modified CDS sequence (opt3) from glycoprotein__RABV__LC071973.1
augaucccccaggcccuccuguucgugccucuucuggucuuuagcuccugcuucggcaaguuuccaauuuacaccauaccggacaaauuggggcccuggucuccuaucgauauucaccauuuaucauguccaaacaaucugguuguggaggacgaaggaugcacaaaccuaagugguuucagcuauauggagcucaagguaggcuacaucuccgcuauuaaagugaauggguuuacuuguacgggagucgugaccgaagcagagacauauacuaacuucguuggcuacgugaccacaaccuuuaagagaaaacacuucaggcccacuccugaugccugccgggcggcuuauaauuggaagauggccggugacccacgcuacgaagagucucugcauaaccccuauccugauuaccacuggcuucgaacagucaagaccacgaaagagucgcuggugaucauaucaccaagcguaagugacuuggauccguacgacaagucccuccauucucguguuuuucccagcgggaaauguuccggaaucacugugucaaguaccuauugcccuacaaaucacgauuacacuauuuggaugccagaaaaccccagacugggcaccagcugugacaucuucacaaauucuaggggcaagcgggcauccaaagggggaaagaccugcgguuuugucgaugagcgcggccuguauaagucacucaaaggggccuguaaguuaaaacugugcggagugcuuggcuugagacugauggacgguacguggguggcuauucaaacuagcgaugaagcaaagugguguccuccagaccagcuagucaacauccacgacuucaggagugaugagauagagcaucucguuguggaggaacugguaaagaaacgggaagagugccuugacgcccuggaaucuauuaugacaaccaaauccgugagcuuucgccgauugucgcaccucagaaagcugguccccggguucggaaaggcuuacacuaucuucaauaaaacauuaauggaggccgaugcgcauuauaagucugugaggaccuggaacgagauuaucccguccaaaggcugccugcggguuggcgggcguugucacccucacgugaauggagucuuuuucaacgguaucauucucggccccgacgggcaugugcuuauaccagaaaugcagucaagucuguugcagcaacacaugggacuacuggagagcuccguaaucccucucaugcauccccuggcagauccaucuacgguuuuuaaggacggcgaugaagccgaggacuucguggaaguccaccuucccgaugugcauaaacaggucagcgguguggaccugggguugccuucauggggcaaguacguucucaugagugugggagcuaugauugcccugauguuaaugaucuuucugaugaccugcugucgcaaggcaaauggcgcugagacaauacagcacagacuaggggagacuggaaggaaaguauccgucaccagccagucuggucgggugauuucaaguugggaaagcuauaaguccggcggggagacaaaacucuga

SEQ ID NO: 159979 - RNA, 1575 nt, Artificial Sequence
  derived and/or modified CDS sequence (opt3) from glycoprotein__RABV__LC071974.1
augaucccccaggcccuccuguucgugccucuucuggucuuuagcuccugcuucggcaaguuuccaauuuacaccauaccggacaaauuggggcccuggucuccuaucgauauucaccauuuaucauguccaaacaaucugguuguggaggacgaaggaugcacaaaccuaagugguuucagcuauauggagcucaagguaggcuacaucuccgcuauuaaagugaauggguuuacuuguacgggagucgugaccgaagcagagacauauacuaacuucguuggcuacgugaccacaaccuuuaagagaaaacacuucaggcccacuccugaugccugccgggcggcuuauaauuggaagauggccggugacccacgcuacgaagagucucugcauaaccccuauccugauuaccacuggcuucgaacagucaagaccacgaaagagucgcuggugaucauaucaccaagcguaagugacuuggauccguacgacaagucccuccauucucguguuuuucccagcgggaaauguuccggaaucacugugucaaguaccuauugcccuacaaaucacgauuacacuauuuggaugccagaaaaccccagacugggcaccagcugugacaucuucacaaauucuaggggcaagcgggcauccaaagggggaaagaccugcgguuuugucgaugagcgcggccuguauaagucacucaaaggggccuguaaguuaaaacugugcggagugcuuggcuugagacugauggacgguacguggguggcuauucaaacuagcgaugaagcaaagugguguccuccagaccagcuagucaacauccacgacuucaggagugaugagauagagcaucucguuguggaggaacugguaaagaaacgggaagagugccuugacgcccuggaaucuauuaugacaaccaaauccgugagcuuugggcgcuugucgcaccuccgaaagcugguccccggauucggcaaggcuuacacuaucuucaauaaaacauuaauggaggccgaugcgcauuauaagucugugagaaccuggaacgagauuaucccguccaaaggcugccugaggguugggggacggugucacccucacgugaauggugucuuuuucaacggcaucauucucgggcccgacggacaugugcuuauaccagaaguacagucaagucuguugcagcaacacauggagcuacuggaaagcuccguuaucccucucaugcauccccuggcagauccaucuacgguguuuaaggacggcgaugaggccgaagacuucgucgaggugcaccuucccgauguccauaaacaggugagcgguguugaccugggguugccuucauggggcaaguacgugcucaugaguguaggagcuaugauugcccugauguuaaugaucuuucugaugaccugcugucguaaggcaaauggcgcugagacaauacagcaccgccuaggggaaacuggaagaaaagucuccgugaccagccagucugguaggguuauuucaaguugggagagcuauaaguccggcggggaaacaaaacucuga

SEQ ID NO: 159980 - RNA, 1575 nt, Artificial Sequence
  derived and/or modified CDS sequence (opt3) from glycoprotein__RABV__LC071975.1
augaucccccaggcccuccuguucgugccucuucuggucuuuagcuccugcuucggcaaguuuccaauuuacaccauaccggacaaauuggggcccuggucuccuaucgauauucaccauuuaucauguccaaacaaucugguuguggaggacgaaggaugcacaaaccuaagugguuucagcuauauggagcucaagguaggcuacaucuccgcuauuaaagugaauggguuuacuuguacgggagucgugaccgaagcagagacauauacuaacuucguuggcuacgugaccacaaccuuuaagagaaaacacuucaggcccacuccugaugccugccgggcggcuuauaauuggaagauggccggugacccacgcuacgaagagucucugcauaaccccuauccugauuaccacuggcuucgaacagucaagaccacgaaagagucgcuggugaucauaucaccaagcguaagugacuuggauccguacgacaagucccuccauucucguguuuuucccagcgggaaauguuccggaaucacugugucaaguaccuauugcccuacaaaucacgauuacacuauuuggaugccagaaaaccccagacugggcaccagcugugacaucuucacaaauucuaggggcaagcgggcauccaaagggggaaagaccugcgguuuugucgaugagcgcggccuguauaagucacucaaaggggccuguaaguuaaaacugugcggagugcuuggcuugagacugauggacgguacguggguggcuauucaaacuagcgaugaagcaaagugguguccuccagaccagcuagucaacauccacgacuucaggagugaugagauagagcaucucguuguggaggaacuggugaaaaagcgggaagagugccuugacgcccuggaaucuguaaugacaaccaaauccgucagcuuucgccgauugucgcaccucagaaagcuggugcccggguucggaaaggcuuacacuauuuucaauaaaacauuaauggaggccgaugcgcauuauaagucuguuaggaccuggaacgagaucauuccguccaaaggcugccugcgggugggcgggcguugucacccucacgucaauggaguguuuuucaacgguaucauccucggccccgacgggcauguacuuauuccagaaaugcagucaagucuguugcagcaacacauggagcuacuggaaagcuccguuauaccucucaugcauccccuggcagauccaucuacgguguuuaaggacggagaugaggccgaagacuucgucgaggugcaccuucccgauguccauaaacaggugagcggcguugaccuggguuugccuucaugggggaaguacgugcucaugaguguaggcgcuaugaucgcccugauguuaaugauuuuucugaugaccugcugucgcaaggcaaauggagcugagacaauccagcacagacuaggcgaaacugggaggaaagucuccgugaccagccagucuggacggguuauaucaaguugggagagcuauaaguccgguggcgaaacaaaacucuga

SEQ ID NO: 159981 - RNA, 1575 nt, Artificial Sequence; identical to SEQ ID NO: 159076
  derived and/or modified CDS sequence (opt3) from glycoprotein__RABV__LC071976.1

SEQ ID NO: 159982 - RNA, 1575 nt, Artificial Sequence
  derived and/or modified CDS sequence (opt3) from glycoprotein__RABV__LC071977.1
augaucccccaggcccuccuguucgugccucuucuggucuuuagcuccugcuucggcaaguuuccaauuuacaccauaccggacaaauuggggcccuggucuccuaucgauauucaccauuuaucauguccaaacaaucugguuguggaggacgaaggaugcacaaaccuaagugguuucagcuauauggagcucaagguaggcuacaucuccgcuauuaaagugaauggguuuacuuguacgggagucgugaccgaagcagagacauauacuaacuucguuggcuacgugaccacaaccuuuaagagaaaacacuucaggcccacuccugaugccugccgggcggcuuauaauuggaagauggccggugacccacgcuacgaagagucucugcauaaccccuauccugauuaccacuggcuucgagcagucaagacaaccaaagagucgcuggugaucauaucaccaagcguaagugacuuggauccguacgacaagucccuccauucucguguuuuucccagcgggaaauguuccggaaucacggugucaaguacuuauugcccuaccaaucacgauuacacaauuuggaugccagaaaaccccagacugggcacuagcugugacaucuucaccaauucuaggggcaagcgggccuccaaagggggaaagacaugcgguuuugucgaugagcgcggccuguauaagucacucaaaggggcuuguaaguuaaaacugugcggagugcuuggcuugagacugauggacgguaccuggguggcaauucaaacgagcgaugaagccaagugguguccuccagaccagcuagucaacauccacgacuucaggagugaugagauagagcaucucguuguggaggaacugguaaagaaacgggaagagugccuugacgcucuggaaucuauuaugacuacaaaauccgugagcuuucgccgauugucgcaccucagaaagcugguccccggguucggaaaggccuacaccaucuucaauaaaacuuuaauggaggcggaugcacauuauaagucugugaggacauggaacgagauuaucccguccaaaggcugccugcggguuggcgggcguugucacccucacgugaauggagucuuuuucaacgguaucauucucggccccgacgggcaugugcuuauaccagaaaugcagucaagucuguugcagcaacacauggagcuacuggaaagcuccguaaucccucucaugcauccccuggccgauccaucuaccguuuuuaaggacggagaugaggcugaagacuucguggagguccaccuucccgaugugcauaaacaggucagcggcguggaccuggguuugccuucaugggggaaguacguucucaugagugugggcgccaugauugcacugauguuaaugaucuuucugaugacgugcugucgcaaggcuaauggagccgagaccauacagcacagacuaggcgaaacagggaggaaaguauccgucacuagccagucuggacgggugauuucaaguugggagagcuauaaguccgguggcgaaaccaaacucuga

SEQ ID NO: 159983 - RNA, 1575 nt, Artificial Sequence; identical to SEQ ID NO: 159076
  derived and/or modified CDS sequence (opt3) from glycoprotein__RABV__LC071978.1

SEQ ID NO: 159984 - RNA, 1575 nt, Artificial Sequence
  derived and/or modified CDS sequence (opt3) from glycoprotein__RABV__LC071979.1
augaucccccaggcccuccuguucgugccucuucuggucuuuagcuccugcuucggcaaguuuccaauuuacaccauaccggacaaauuggggcccuggucuccuaucgauauucaccauuuaucauguccaaacaaucugguuguggaggacgaaggaugcacaaaccuaagugguuucagcuauauggagcucaagguaggcuacaucuccgcuauuaaagugaauggguuuacuuguacgggagucgugaccgaagcagagacauauacuaacuucguuggcuacgugaccacaaccuuuaagagaaaacacuucaggcccacuccugaugccugccgggcggcuuauaauuggaagauggccggugacccacgcuacgaagagucucugcauaaccccuauccugauuaccacuggcuucgaacagucaagaccacgaaagagucgcuggugaucauaucaccaagcguaagugacuuggauccguacgacaagucccuccauucucguguuuuucccagcgggaaauguuccggaaucacugugucaaguaccuauugcccuacaaaucacgauuacacuauuuggaugccagaaaaccccagacugggcaccagcugugacaucuucacaaauucuaggggcaagcgggcauccaaagggggaaagaccugcgguuuugucgaugagcgcggccuguauaagucacucaaaggggccuguaaguuaaaacugugcggagugcuuggcuugagacugauggacgguacguggguggcuauucaaacuagcgaugaagcaaagugguguccuccagaccagcuagucaacauccacgacuucaggagugaugagauagagcaucucguuguggaggaacugguaaagaaacgggaagagugccuugacgcccuggaaucuauuaugacaaccaaauccgugagcuuucgccgauugucgcaccucagaaagcugguccccggguucggagaggcuuacacuaucuucaauaagacauuaauggaggccgaugcgcauuauaaaucugugaggaccuggaacgaaauuaucccguccaagggcugccugcggguuggcgggcguugucacccucacgugaauggagucuuuuucaacgguaucauucucggccccgacgggcaugugcuuauaccagagaugcagucaagucuguugcagcaacacauggaacuacuggagagcuccguaaucccucucaugcauccccuggcagauccaucuacgguuuuuaaagacggagaugaagccgaggacuucguggagguccaccuucccgaugugcauaagcaggucagcggcguggaccuggguuugccuucaugggggaaauacguucucaugagugugggcgcuaugauugcccugauguuaaugaucuuucugaugaccugcugucgcaaggcaaauggagcugaaacaauacagcacagacuaggcgagacugggaggaagguauccgucaccagccagucuggacgggugauuucaaguugggaaagcuauaaauccgguggcgagacaaagcucuga

SEQ ID NO: 159985 - RNA, 1575 nt, Artificial Sequence; identical to SEQ ID NO: 159076
  derived and/or modified CDS sequence (opt3) from glycoprotein__RABV__LC071980.1

SEQ ID NO: 159986 - RNA, 1575 nt, Artificial Sequence
  derived and/or modified CDS sequence (opt3) from glycoprotein__RABV__LC071981.1
augaucccccaggcccuccuguucgugccucuucuggucuuuagcuccugcuucggcaaguuuccaauuuacaccauaccggacaaauuggggcccuggucuccuaucgauauucaccauuuaucauguccaaacaaucugguuguggaggacgaaggaugcacaaaccuaagugguuucagcuauauggagcucaagguaggcuacaucuccgcuauuaaagugaauggguuuacuuguacgggagucgugaccgaagcagagacauauacuaacuucguuggcuacgugaccacaaccuuuaagagaaaacacuucaggcccacuccugaugccugccgggcggcuuauaauuggaagauggccggugacccacgcuacgaagagucucugcauaaccccuauccugauuaccacuggcuucgaacagucaagaccacgaaagagucgcuggugaucauaucaccaagcguaagugacuuggauccguacgacaagucccuccauucucguguuuuucccagcgggaaaagauccggaaucacugugucaaguaccuauuguccuacaaaucacgauuacacuauuuggaugccagaaaaccccaggcugggcaccagcugcgacaucuucacaaauucucggggcaagcgcgcauccaaagggggaaagaccugugguuuugucgaugagagaggccuguauaagucacucaaaggggccugcaaguuaaaacuguguggagugcuuggcuugaggcugauggacgguacguggguggcuauucaaacuagcgaugaagcaaaguggugcccuccagaccagcuagucaacauccacgacuuccggagugaugagauagagcaucucguuguggaggaacugguaaagaaacgcgaagagugucuugacgcccuggaaucuauuaugacaaccaaauccgugagcuuucgaagauugucgcaccucaggaagcugguccccggguucggaaaggcuuacacuaucuucaauaaaacauuaauggaggccgaugcgcauuauaagucugugcggaccuggaacgagauuaucccguccaaaggcugccugcguguuggcgggcgcugccacccucacgugaauggagucuuuuucaacgguaucgugcucggccccgacgggcauguacuuauuccagaaaugcagucaagucuguugcagcaacacauggagcuacuggaaagcuccguuauaccucucaugcauccccuggcagauccaucuacgguguuuaaggacggagaugaggccgaagacuucgucgaggugcaccuucccgauguccauaaacaggugagcggcguugaccuggguuugccuucaugggggaaguacgcucucaugagugugggcgccaugaucgcacugauguuaaugauuuuucugaugaccuguugcagaaaggcuaauggagccgagacaaaacagcacaggcuaggcgaaacugggcggaagguauccgucaccagccagucuggacgagugaucucaaguugggagagcuauaaauccgguggcgaaacaaagcucuga

SEQ ID NO: 159987 - RNA, 1575 nt, Artificial Sequence
  derived and/or modified CDS sequence (opt3) from glycoprotein__RABV__LC071983.1
augaucccccaggcccuccuguucauuccucuuagcguguuuucccugugcuucggcaaguuuccaauauacaccaucccggacaaauuggggcccuggucuccuauugauauccaccauuuaucauguccaaacaaucuggucguugaggacgaaggaugcacaaaccuaagugguuucagcuauauggagcucaaggugggcuacauuuccgcuaucaaaguaaauggguuuacuuguacgggaguggucaccgaagcagagacauauacuaacuucgugggcuacguuaccacaaccuuuaagagaaaacacuucaggcccacuccugaugccugccgggcggcuuauaauuggaagauggccggugacccacgcuacgaagagucucugcauaaccccuauccugauuaccacuggcuucgaacagugaagaccacgaaagagucgcuggucauaaucucaccaagcgugagugacuuggauccguacgacaagucccuccauucucguguauuucccagcgggaaauguuccggaauuacuguuucaaguaccuauugcccuacaaaucacgauuacacuaucuggaugccagaaagccccagacugggcaccucuugugacauuuucacaaacuccaggggcaagcgggcaucaaaagggagcaagaccugcggauuuguggaugagcgcggucuguauaagagucucaaaggcgccuguaaguuaaaacugugcgggguccuuggauugagacugauggacggcacgugggcugcaauccaaacuccugaugaagugaagugguguccacccgaccagcuagugaauauacacgacuucaggucugaugagauugagcaucucgucguugaggaacuggugaaaaagcgggaagagugccuugacgcccuggaauccaucaugacaaccaaaagcguaucguuucgccgauugucucaccucagaaagcuggugccggguuucgggaaggcuuacacuauuuucaacaaaacauuaauggaggccgaugcgcauuauaaguccgucaggaccuggaaugagaucaucccuucaaaaggaugccugcgggugggcggccguugucacccccacguuaacgggguguuuuucaauggaauuauacucgguccagacggccauguccuuaucccugaaaugcagaguagccuguugcagcaacacauggagcuacuggaauccucugugauuccccucaugcauccacuggcagaucccagcacgguauuuaaggacggggaugaggccgaagacuucguugaggugcaccuuccugauguccauaaacaggugucaggagucgaccugggcuugccaaguugggguaaguacgugcucauguccguuggggcuaugaucgcccugauguuaaugauauuucugaccacaugcugucgcaaggcaaacggcgcugagagcauucagcacagaaggggagaaacuggccggaaagugucuguaaccucacagagugggcgagucaucagcuccugggagucuuauaagucgggaggugaaacaaaacuauga

SEQ ID NO: 159988 - RNA, 1575 nt, Artificial Sequence
  derived and/or modified CDS sequence (opt3) from glycoprotein__RABV__LM645015.1
auggugccccaggcccuccuguucgucccucuucuggcuuuuccaaugugcuucggcaaguuuccgaucuacaccauucccgacaaauuggggccuuggagcccaauagauauccaccauuuauccugucccaacaaucugguuguggaggacgaaggaugcacaaaccuaucugguuucucauauauggagcucaagguaggcuacauuagugcaaucaaagugaauggguuuacuuguacgggagucgugaccgaagccgagacauauacuaacuucguuggcuacgugaccacaaccuuuaagagaaaacacuucaggccuacuccagaugcgugccgggcugccuauaauuggaagauggccggugacccccgcuacgaagagagccugcauaacccuuauccagauuaccacuggcuucgaacagucaagaccacgaaagagucccugauuaucauaucuccgucgguggcagacuuggaucccuacgacaagucacuccauagccguguauuuccuagugggaaaugucugggaaucacuauuuccucuaccuauugcagcacaaaucacgauuacacuaucuggaugccagaaaacguuagacugggcaccuccugugacauuuucacaaauucaaggggcaagcgggcuaguaaagggagcaagaccugcggauuuguggaugagcgcggucucuauaagucuuuaaaaggcgcauguaagcugaaacuuugcggggucuugggacugagacuaauggacggcacguggguggccaugcccacuuccgaugaaacaaagugguguccuccagaccaacucgugaaccugcacgacuucaggucagaugagaucgagcaucuugucguugaggaacuggugcggaaacgcgaagagugcuuggacgcucucgaaagcauaaugaccacuaagaguguaucuuuucgaagacugucccacuuaaggaaacuggugcccgguuucgggaaggccuacacaauuuucaauaagacccucauggaggcggaugcacauuauaaaagcguccggacguggaacgagaucauuccgucgaagggaugccuucgugugggcggccgcugucacccucacguuaaugggguguuuuucaacggaaucauccugggucccgacggccaugucuugauuccagaaaugcagucuucccuacugcagcagcacauggagcuccuggaaucaagugugauaccucuuaugcauccccuggccgauccaagcaccguauuuaaagacggggaugaggcugaagacuucguugaggugcacuugcccgauguccauaagcaaguguccggagucgaccucggccugccuaauugggguaaauacguguuaaucauugccgggguucugaucgcaaugauacuaacaauuuuucucaugacuugcuguggcagaggaaacaggccaaagucuacccagcacagccugggcgggaucggacggaaggugucaaguacaucccagagcgguaaaguaaucucuucaugggagaguuauaagagcggcggggaaacucgacuuuga

SEQ ID NO: 159989 - RNA, 1575 nt, Artificial Sequence
  derived and/or modified CDS sequence (opt3) from glycoprotein__RABV__LM645016.1
auggugccccaggcccuucucuucgucccucuucuggcuuuuccaaugugcuucggcaaguuuccgaucuacaccauucccgacaaauuggggccuuggagcccaauagauauccaccauuuauccugucccaacaaucugguuguggaggacgaaggaugcacaaaccuaucugguuucucauauauggagcucaagguaggcuacauuagugcaaucaaagugaauggguuuacuuguacgggagucgugaccgaagccgagacauauacuaacuucguuggcuacgugaccacaaccuuuaagagaaaacacuucaggccuacuccagaugcgugccgggcugccuauaauuggaagauggccggugacccccgcuacgaagagagccugcauaacccuuauccagauuaccacuggcuucgaacagucaagaccacgaaagagucccugauuaucauaucuccgucgguggcagacuuggaucccuacgacaagucacuccauagccguguauuuccuagugggaaaugucugggaaucacuauuuccucuaccuauugcagcacaaaucacgauuacacuaucuggaugccagaaaacguuagacugggcaccuccugugacauuuucacaaauucaaggggcaagcgggcuaguaaagggagcaagaccugcggauuuguggaugagcgcggucucuauaagucuuuaagaggcgcauguaaacugaagcugugcggggucuugggacugaggcuaauggacggcacguggguggccaugcccacuuccgaugaaacaaaaugguguccuccagaccaacucgugaaccugcacgacuuccggucagaugagaucgagcaucuugucguugaggaacuggugcgcaagcgagaagagugcuuggacgcucucgaaagcauaaugaccacuaaaaguguaucuuuuagaaggcugucccacuuacggaagcuggugcccgguuucgggaaagccuacacaauuuucaauaagacccucauggaggcggaugcacauuauaagagcguccguacguggaacgagaucauuccgucgaaaggaugccuucgcgugggcggcagaugucacccucacguuaaugggguguuuuucaacggaaucauccugggucccgacggccaugucuugauuccagaaaugcagucuucccuacugcagcagcacauggagcuccuggaaucaagugugauaccucuuaugcauccccuggccgauccaagcaccguauuuaaggacggggaugaggcugaagacuucguugaggugcacuugcccgauguccauaaacaaaucuccggaguggaccucggccugccuaauugggguaaguacgucuuaauuaucgccggggugcugauagcaaugauucuaacaaucuuucucaugacuugcuguggcaggggaaaccggccaaaaucuacccagcacagccugggcgggaucggacgaaagguuucaaguacaucccagagcgguaaggugauuucuucaugggagaguuauaaaagcggcggggaaacucgccuuuga

SEQ ID NO: 159990 - RNA, 1575 nt, Artificial Sequence
  derived and/or modified CDS sequence (opt3) from glycoprotein__RABV__LM645018.1
auggugccccaggcccuccuguucgucccucuucuggcuuuuccaaugugcuucggcaaguuuccgaucuacaccauucccgacaaauuggggccuuggagcccaauagauauccaccauuuauccugucccaacaaucugguuguggaggacgaaggaugcacaaaccuaucugguuucucauauauggagcucaagguaggcuacauuagugcaaucaaagugaauggguuuacuuguacgggagucgugaccgaagccgagacauauacuaacuucguuggcuacgugaccacaaccuuuaagagaaaacacuucaggccuacuccagaugcgugccgggcugccuauaauuggaagauggccggugacccccgcuacgaagagagccugcauaacccuuauccagauuaccacuggcuucgaacagucaagaccacgaaagagucccugauuaucauaucuccgucgguggcagacuuggaucccuacgacaagucacuccauagccguguauuuccuagugggaaaugucugggaaucacuauuuccucuaccuauugcagcacaaaucacgauuacacuaucuggaugccagaaaacguuagacugggcaccuccugugacauuuucacaaauucaaggggcaagcgggcuaguaaagggagcaagaccugcggauuuguggaugagcgcggucucuauaagucuuuaaaaggcgcauguaagcugaaacuuugcggggucuugggacugagacuaauggacggcacguggguggccaugcccacuuccgaugaaacaaagugguguccuccagaccaacucgugaaccugcacgacuucaggucagaugagaucgagcaucuugucguugaggaacuggugcggaaacgcgaagagugcuuggacgcucucgaaagcauaaugaccacuaagaguguaucuuuucgaagacugucccacuuaaggaaacuggugcccgguuucgggaaggccuacacaauuuucaauaagacccucauggaggcggaugcacauuauaaaagcguccggacguggaacgagaucauuccgucgaagggaugccuucgugugggcggccgcugucacccucacguuaaugggguguuuuucaacggaaucauccugggucccgacggccaugucuugauuccagaaaugcagucuucccuacugcagcagcacauggagcuccuggaaucaagugugauaccucuuaugcauccccuggccgauccaagcaccguauuuaaagacggggaugaggcugaagacuucguugaggugcacuugcccgauguccauaagcaaaucuccggaguggaccucggccugccuaauugggguaaauacgucuuaauuaucacaggggugcugauagccaugauucuaacuaucuuucucaugaccugcuguggcagaggaaacaggccaaagucuaagcagcacagccugggcgggaucggacggaaaguuucaaguacaucccagagcgguaaggugauuucuucaugggagaguuauaaaagcggcggggaaacucgacuuuga

SEQ ID NO: 159991 - RNA, 1575 nt, Artificial Sequence; identical to SEQ ID NO: 159857
  derived and/or modified CDS sequence (opt3) from glycoprotein__RABV__LM645019.1

SEQ ID NO: 159992 - RNA, 1575 nt, Artificial Sequence
  derived and/or modified CDS sequence (opt3) from glycoprotein__RABV__LM645021.1
auggugccccaggcccuccuguucgucccucuucuggcuuuuccaaugugcuucggcaaguuuccgaucuacaccauucccgacaaauuggggccuuggagcccaauagauauccaccauuuauccugucccaacaaucugguuguggaggacgaaggaugcacaaaccuaucugguuucucauauauggagcucaagguaggcuacauuagugcaaucaaagugaauggguuuacuuguacgggagucgugaccgaagccgagacauauacuaacuucguuggcuacgugaccacaaccuuuaagagaaaacacuucaggccuacuccagaugcgugccgggcugccuauaauuggaagauggccggugacccccgcuacgaagagagccugcauaacccuuauccagauuaccacuggcuucgaacagucaagaccacgaaagagucccugauuaucauaucuccgucgguggcagacuuggaucccuacgacaagucacuccauagccguguauuuccuagugggaaaugucugggaaucacuauuuccucuaccuauugcagcacaaaucacgauuacacuaucuggaugccagaaaacguuagacugggcaccuccugugacauuuucacaaauucaaggggcaagcgggcuaguaaagggagcaagaccugcggauuuguggaugagcgcggucucuauaagucuuuaaaaggcgcauguaagcugaaacuuugcggggucuugggacugagacuaauggacggcacguggguggccaugcccacuuccgaugaaacaaagugguguucaccugaccaacucgugaaccugcacgacuucaggagcgaugagaucgagcaucuugucguugaggaacuggugcggaaacgcgaagagugcuuggacgcucucgaaaguauaaugaccacuaagucuguauccuuucgaagacugagccacuuaaggaaacuggugccagguuucgggaaggccuacacaauuuucaauaagacccucauggaggcggaugcacauuauaaaucgguccggacguggaacgagaucauucccucuaagggaugccuucgugugggcggccgcugucacccgcacguuaaugggguguuuuucaacggaaucauccuggguccugacggccaugucuugauucccgaaaugcaguccucacuacugcagcagcacauggagcuccuggaaaguagcgugauaccacuuaugcauccucuggccgaucccuccaccguauuuaaagacggggaugaggcugaagacuucguugaggugcacuugccagauguccauaagcaaaucucuggaguggaccucggccugcccaauugggguaaauacgucuuaauuaucgccggggugcugauagcaaugauucuaacaaucuuucucaugacuugcuguggcagaggaaacaggccuaagagcaagcagcacucacugggcgggaucggacggaaaguuaguuccaccagccagucugguaaggugauuucaaguugggagagcuauaaauccggcggggaaacacgacuuuga

SEQ ID NO: 159993 - RNA, 1575 nt, Artificial Sequence
  derived and/or modified CDS sequence (opt3) from glycoprotein__RABV__LM645022.1
auggugccccaggcccuccuguucgucccucuucuggcuuuuccaaugugcuucggcaaguuuccgaucuacaccauucccgacaaauuggggccuuggagcccaauagauauccaccauuuauccugucccaacaaucugguuguggaggacgaaggaugcacaaaccuaucugguuucucauauauggagcucaagguaggcuacauuagugcaaucaaagugaauggguuuacuuguacgggagucgugaccgaagccgagacauauacuaacuucguuggcuacgugaccacaaccuuuaagagaaaacacuucaggccuacuccagaugcgugccgggcugccuauaauuggaagauggccggugacccccgcuacgaagagagccugcauaacccuuauccagauuaccacuggcuucgaacagucaagaccacgaaagagucccugauuaucauaucuccgucgguggcagacuuggaucccuacgacaagucacuccauagccguguauuuccuagugggaaaugucugggaaucacuauuuccucuaccuauugcagcacaaaucacgauuacacuaucuggaugccagaaaacguuagacugaggaccuccugugacauuuucacaaauucacggggcaagcgcgcuaguaaaggcagcaagaccugcggguuuguggaugagagaggacucuauaagucuuuaaaaggugcauguaagcugaaacuuugcggcgucuuggggcugaggcuaauggacggaacguggguggccaugcccacuuccgaugaaacaaagugguguccuccagaccaacucgugaaccugcacgacuuccggucagaugagaucgagcaucuugucguugaggaacuggugcgcaaacgagaagagugcuuggacgcucucgaaagcauaaugaccacuaagaguguaucuuuuagaaggcugucccacuuacggaaacuggugcccggcuucgguaaggccuacacaauuuucaauaagacccucauggaggcggaugcacauuauaaaagcguccguacguggaacgagaucauuccgucgaaggggugccuucgcgugggaggcagaugucacccucacguuaauggcguguuuuucaacgggaucauccugggacccgacggucaugucuugauuccagaaaugcagucuucccuacugcagcagcacauggagcuccuggaaucaagugugauaccucuuaugcauccccuggccgauccaagcaccguauuuaaagacggcgaugaggcugaagacuucguugaggugcacuugcccgauguccauaagcaaaucuccgggguggaccucggacugccuaauuggggcaaauacgucuuaauuaucgccggugugcugauagcaaugauucuaacaaucuuucucaugacuugcugugggaggggcaaccggccaaagucuaagcagcacagccugggaggcaucgggcgaaaaguuucaaguaccucccagagcggaaaggugauuucuucaugggagaguuauaaaagcgguggcgaaacacgccuuuga

SEQ ID NO: 159994 - RNA, 1575 nt, Artificial Sequence; identical to SEQ ID NO: 159857
  derived and/or modified CDS sequence (opt3) from glycoprotein__RABV__LM645024.1

SEQ ID NO: 159995 - RNA, 1575 nt, Artificial Sequence; identical to SEQ ID NO: 159857
  derived and/or modified CDS sequence (opt3) from glycoprotein__RABV__LM645026.1

SEQ ID NO: 159996 - RNA, 1575 nt, Artificial Sequence
  derived and/or modified CDS sequence (opt3) from glycoprotein__RABV__LM645027.1
auggugccccaggcccuccuguucgucccucuucuggcuuuuccaaugugcuucggcaaguuuccgaucuacaccauucccgacaaauuggggccuuggagcccaauagauauccaccauuuauccugucccaacaaucugguuguggaggacgaaggaugcacaaaccuaucugguuucucauauauggagcucaagguaggcuacauuagugcaaucaaagugaauggguuuacuuguacgggagucgugaccgaagccgagacauauacuaacuucguuggcuacgugaccacaaccuuuaagagaaaacacuucaggccuacuccagaugcgugccgggcugccuauaauuggaagauggccggugacccccgcuacgaagagagccugcauaacccuuauccagauuaccacuggcuucgaacagucaagaccacgaaagagucccugauuaucauaucuccgucgguggcagacuuggaucccuacgacaagucacuccauagccguguauuuccuagugggaaaugucugggaaucacuauuuccucuaccuauugcagcacaaaucacgauuacacuaucuggaugccagaaaacguuagacugggcaccuccugugacauuuucacaaauucaaggggcaagcgggcuaguaaagggagcaagaccugcggauuuguggaugagcgcggucucuauaagucuuuaaaaggcgcauguaagcugaaacuuugcggggucuugggacugagacuaauggacggcacguggguggccaugcccacuuccgaugaaacaaagugguguccuccagaccaacucgugaaccugcacgacuucaggucagaugagaucgagcaucuugucguugaggaacuggugcggaaacgcgaagagugcuuggacgcucucgaaagcauaaugaccacuaagaguguaucuuuucgaagacugucccacuuaaggaaacuggugcccgguuucgggaaggccuacacaauuuucaauaagacccucauggaggcggaugcacauuauaaaagcguccggacguggaacgagaucauuccgucgaagggaugccuucgugugggcggccgcugucacccucacguuaaugggguguuuuucaacggaaucauccugggucccgacggccaugucuugauuccagaaaugcagucuucccuacugcagcagcacauggagcuccuggaaucaagugugauaccucuuaugcauccccuggccgauccaagcaccguauuuaaagacggggaugaggcugaagacuucguugaggugcacuugcccgauguccauaagcaaaucuccggaguggaccucggccugccuaauugggguaaauacgucuuaauuaucgccgggcugcuaauagcaaugauucucacaaucuuucugaugacuugcuguggcagaggaaacaggccaaagucuacccagcacagccuuggcgggaucggacggaaggugucaaguacaucccagagcgguaaaguuauuucuucaugggagaguuauaagagcggcggggaaacucgauuguga

SEQ ID NO: 159997 - RNA, 1575 nt, Artificial Sequence
  derived and/or modified CDS sequence (opt3) from glycoprotein__RABV__LM645029.1
auggugccccaggcccuccuguucgucccucuucuggcuuuuccaaugugcuucggcaaguuuccgaucuacaccauucccgacaaauuggggccuuggagcccaauagauauccaccauuuauccugucccaacaaucugguuguggaggacgaaggaugcacaaaccuaucugguuucucauauauggagcucaagguaggcuacauuagugcaaucaaagugaauggguuuacuuguacgggagucgugaccgaagccgagacauauacuaacuucguuggcuacgugaccacaaccuuuaagagaaaacacuucaggccuacuccagaugcgugccgggcugccuauaauuggaagauggccggugacccccgcuacgaagagagccugcauaacccuuauccagauuaccacuggcuucgaacagucaagaccacgaaagagucccugauuaucauaucuccgucgguggcagacuuggaucccuacgacaagucacuccauagccguguauuuccuagugggaaaugucugggaaucacuauuuccucuaccuauugcagcacaaaucacgauuacacuaucuggaugccagaaaacguuagacugggcaccuccugugacauuuucacaaauucaaggggcaagcgggcuaguaaagggagcaagaccugcggauuuguggaugagcgcggucucuauaagucuuuaaaaggcgcauguaagcugaaacuuugcggggucuugggacugagacuaauggacggcacguggguggccaugcccacuuccgaugaaacaaagugguguccuccagaccaacucgugaaccugcacgacuucaggucagaugagaucgagcaucuugucguugaggaacuggugcggaaacgcgaagagugcuuggacgcucucgaaagcauaauuaccacuaagaguguaucuuuucgaagacugucccacuuaaggaaacuggugcccgguuucgggaaggccuacacaaucuucaauaagacccucauggaggcggaugcacauuauaaaagcguccggacguggaacgagauuaucccgucgaagggaugccuucgugugggcggccgcugucacccucacguuaaugggguguuuuucaacggaaucauucugggucccgacggccaugucuugauaccagaaaugcagucuucccuacugcagcagcacauggagcuccuggaaucaagugugaucccucuuaugcauccccuggccgauccaagcaccguauuuaaagacggggaugaggcugaagacuucguugaggugcacuugcccgauguccauaagcaaauuuccggaguggaccucggccugccuaauugggguaaauacgucuuaaucauagccggggugcugauugcaaugauccuaacaaucuuucucaugacuugcuguggcagaggaaacaggccaaagucuaagcagcacagccugggcgggauuggacggaaaguuucaaguaccucccagagcgguaaggugaucucuucaugggagaguuauaaaagcggcggggaaacacgacuuuga

SEQ ID NO: 159998 - RNA, 1575 nt, Artificial Sequence
  derived and/or modified CDS sequence (opt3) from glycoprotein__RABV__LM645031.1
auggugccccaggcccuucucuucgucccucuucuggcuuuuccaaugugcuucggcaaguuuccgaucuacaccauucccgacaaauuggggccuuggagcccaauagauauccaccauuuauccugucccaacaaucugguuguggaggacgaaggaugcacaaaccuaucugguuucucauauauggagcucaagguaggcuacauuagugcaaucaaagugaauggguuuacuuguacgggagucgugaccgaagccgagacauauacuaacuucguuggcuacgugaccacaaccuuuaagagaaaacacuucaggccuacuccagaugcgugccgggcugccuauaauuggaagauggccggugacccccgcuacgaagagagccugcauaacccuuauccagauuaccacuggcuucgaacagucaagaccacgaaagagucccugauuaucauaucuccgucgguggcagacuuggaucccuacgacaagucacuccauagccguguauuuccuagugggaaaugucugggaaucacuauuuccucuaccuauugcagcacaaaucacgauuacacuaucuggaugccagaaaacguuagacugggcaccuccugugacauuuucacaaauucaaggggcaagcgggcuagucgcgggagcaaaaccugcggauuuguggaugagagaggucucuauaagucuuuaaagggcgcauguaaacugaagcugugcggggucuugggacugaggcuaauggacggcacguggguggccaugcccacuuccgaugaaacaaaaugguguccuccagaccaacucgugaaccugcacgacuuccggucagaugagaucgagcaucuugucguugaggaacuggugcgcaagcgagaagagugcuuggacgcucucgaaagcauaaugaccacuaaaaguguaucuuuuagaaggcugucccacuuacggaagcuggugcccgguuucgggaaagccuacacaauuuucaauaagacccucauggaggcggaugcacauuauaagagcguccguacguggaacgagaucauuccgucgaaaggaugccuucgcgugggcggcagaugucacccucacguuaaugggguguuuuucaacggaaucauccugggucccgacggccaugucuugauuccagaaaugcagucuucccuacugcagcagcacauggagcuccuggaaucaagugugauaccucuuaugcauccccuggccgauccaagcaccguauuuaaggacggggaugaggcugaagacuucguugaggugcacuugcccgauguccauaaacaaaucuccggaguggaccucggccugccuaauugggguaaguacgucuuaauuaucgccggggugcugauagcaaugauucuaacaaucuuucucaugacuugcuguggcaggggaaaccggccaaaaucuaagcagcacagccugggcgggaucggacgaaagguuucaaguaccucccagagcgguaaagugauuucuucaugggagaguuauaagagcggcggggaaacacgccuuuga

SEQ ID NO: 159999 - RNA, 1575 nt, Artificial Sequence; identical to SEQ ID NO: 159857
  derived and/or modified CDS sequence (opt3) from glycoprotein__RABV__LM645034.1

SEQ ID NO: 160000 - RNA, 1575 nt, Artificial Sequence; identical to SEQ ID NO: 159857
  derived and/or modified CDS sequence (opt3) from glycoprotein__RABV__LM645035.1

SEQ ID NO: 160001 - RNA, 1575 nt, Artificial Sequence
  derived and/or modified CDS sequence (opt3) from glycoprotein__RABV__LM645036.1
auggugccccaggcccuucucuucgucccucuucuggcuuuuccaaugugcuucggcaaguuuccgaucuacaccauucccgacaaauuggggccuuggagcccaauagauauccaccauuuauccugucccaacaaucugguuguggaggacgaaggaugcacaaaccuaucugguuucucauauauggagcucaagguaggcuacauuagugcaaucaaagugaauggguuuacuuguacgggagucgugaccgaagccgagacauauacuaacuucguuggcuacgugaccacaaccuuuaagagaaaacacuucaggccuacuccagaugcgugccgggcugccuauaauuggaagauggccggugacccccgcuacgaagagagccugcauaacccuuauccagauuaccacuggcuucgaacagucaagaccacgaaagagucccugauuaucauaucuccgucgguggcagacuuggaucccuacgacaagucacuccauagccguguauuuccuagugggaaaugucugggaaucacuauuuccucuaccuauugccugacaaaucacgauuacacuaucuggaugccagaaaacguuagacucggcaccagcugugacauuuucacaaauuccaggggcaagcgggcuucaaaagggaguaagaccugcggauuuguggaugagcgcgguuuauauaagagccugaaaggcgcauguaagcugaaauugugcgggguccugggacuaagacucauggacggcacguggguggccaugcccacuucugaugaaacaaagugguguccuccagaccaacuggugaaccuucacgacuucagguccgaugagaucgagcaucuggucguugaagaguuggugcggaaacgcgaagagugccucgacgcucuggaaucaauaaugaccacuaagagcguaaguuuucgaagauuaucucaccugaggaaacucgugcccgguuucgggaaggccuacacaauuuucaauaagacccuuauggaggcggaugcacauuauaaauccguccggacguggaacgagaucauuccgagcaagggaugccugcgugugggcggccgcugucacccucacguuaaugggguguuuuucaacggaaucaucuugggucccgacggccauguccuaauuccagaaaugcagucgucucugcuccagcagcacauggagcugcuugaauccucagugauaccucugaugcaucccuuggccgauccaaguaccguauuuaaagacggggaugaggcugaagacuucguugaggugcaccuccccgauguccauaagcaaaucagcggaguggaccugggcuuaccuaauugggguaaauacguccugauuaucgccggggugcuaauagcaaugauucucacaaucuuucugaugacuugcuguggcagaggaaacaggccaaaguccaagcagcacucucuuggcgggaucggacggaaaguuagcucaaccccgcagagugguaaggugauuuccagcugggagucuuauaaaucaggcggggaaacacgauuguga

SEQ ID NO: 160002 - RNA, 1575 nt, Artificial Sequence; identical to SEQ ID NO: 159522
  derived and/or modified CDS sequence (opt3) from glycoprotein__RABV__LM645037.1

SEQ ID NO: 160003 - RNA, 1575 nt, Artificial Sequence
  derived and/or modified CDS sequence (opt3) from glycoprotein__RABV__LM645039.1
auggugccccaggcccuucucuucgucccucuucuggcuuuuccaaugugcuucggcaaguuuccgaucuacaccauucccgacaaauuggggccuuggagcccaauagauauccaccauuuauccugucccaacaaucugguuguggaggacgaaggaugcacaaaccuaucugguuucucauauauggagcucaagguaggcuacauuagugcaaucaaagugaauggguuuacuuguacgggagucgugaccgaagccgagacauauacuaacuucguuggcuacgugaccacaaccuuuaagagaaaacacuuccugccuacuccagaugcgugcagggcugccuauaauuggaagauggccggugacccccgguacgaagagagccuucauaacccuuauccagauuaccacuggcugcgcacagucaagaccacgaaagaguccuugauuaucauaucuccgucgguggcagaccucgaucccuacgacaagucacugcauagccgaguauuuccuagugggaaaugucugggaaucacuauuuccucuaccuauugcagcacaaaucacgauuacacuaucuggaugccagaaaacguucgucucggcaccuccugugacauuuucacaaauucaagaggcaagagggcuaguaaagggagcaagaccugcggauuuguggaugagcgggguuuauauaagucucugaaaggcgcauguaagcugaaauugugcgggguccugggacuacgccucauggacggcacguggguggccaugcccacuuccgaugaaacaaagugguguccuccagaccaacuggugaaccuucacgacuucagaucagaugagaucgagcaucuggucguugaagaguuggugaggaaacgggaagagugccucgacgcucuggaaagcauaaugaccacuaagaguguaucuuuucgccgauuaucccaccugagaaaacucgugcccgguuucgggaaggccuacacaauuuucaauaagacccuuauggaggcggaugcacauuauaaaagcgucaggacguggaacgagaucauuccgucgaagggaugccugcgggugggcggccguugucacccucacguuaaugggguguuuuucaacggaaucaucuugggucccgacggccauguccuaauuccagaaaugcagucuucccugcuccagcagcacauggagcugcuugaaucaagugugauaccucugaugcaucccuuggccgauccaagcaccguauuuaaagacggggaugaggcugaagacuucguugaggugcaccuccccgauguccauaagcaaaucuccggaguggaccugggcuuaccuaauugggguaaauacguccugauuaucgccggggugcuaauagcaaugauucucacaaucuuucugaugacuugcuguggccgcggaaacagaccaaagucuacccagcacagccuuggcgggaucggaaggaagguuucaaguacaucccagagcgguaaagugauuucuucaugggagaguuauaagagcggcggggaaacucgguuguga

SEQ ID NO: 160004 - RNA, 1575 nt, Artificial Sequence; identical to SEQ ID NO: 159522
  derived and/or modified CDS sequence (opt3) from glycoprotein__RABV__LM645041.1

SEQ ID NO: 160005 - RNA, 1575 nt, Artificial Sequence
  derived and/or modified CDS sequence (opt3) from glycoprotein__RABV__LM645042.1
auggugccccaggcccuccuguucgucccucuucuggcuuuuccaaugugcuucggcaaguuuccgaucuacaccauucccgacaaauuggggccuuggagcccaauagauauccaccauuuauccugucccaacaaucugguuguggaggacgaaggaugcacaaaccuaucugguuucucauauauggagcucaagguaggcuacauuagugcaaucaaagugaauggguuuacuuguacgggagucgugaccgaagccgagacauauacuaacuucguuggcuacgugaccacaaccuuuaagagaaaacacuuccugccuacuccagaugcgugcagggcugccuauaauuggaagauggccggugacccccgguacgaagagagccuucauaacccuuauccagauuaccacuggcugcgcacagucaagaccacgaaagaguccuugauuaucauaucuccgucgguggcagaccucgaucccuacgacaagucacugcauagccgaguauuuccuagugggaaaugucugggaaucacuauuuccucuaccuauugcagcacaaaucacgauuacacuaucuggaugccagaaaacguucgucucggcaccuccugugacauuuucacaaauucaagaggcaagagggcuaguaaagggagcaagaccugcggauuuguggauaagcgggguuuauauaaaucucugaagggcgcauguaaacuuaaguugugcgggguccugggacuacgccucauggacggcacguggguggccaugcccacuuccgaugagacaaaaugguguccuccagaccaacuggugaaccuucacgacuucagaucagaugaaaucgagcaucuggucguugaggaauuggugaggaagcgggaggaaugccucgacgcucuggagagcauaaugaccacuaaaaguguaucuuuucgccgauuaucccaccugagaaagcucgugcccgguuucgggaaggccuacacaauuuucaauaaaacccuuauggaagcggaugcacauuauaagagcgucaggacguggaacgagaucauuccgucgaaaggaugccugcgggugggcggccguugucacccucacguuaaugggguguuuuucaacggaaucaucuugggucccgacggccauguccuaauuccagagaugcagucuucccugcuccagcagcacauggaacugcuugagucaagugugauaccucugaugcaucccuuggccgauccaagcaccguauuuaaggacggggaugaagcugaggacuucguugaagugcaccuccccgauguccauaaacaaaucuccggaguggaccugggcuuaccuaauugggguaaguacguccugauuaucgccggggugcuaauagcaaugauucucacaaucuuucugaugacuugcuguggccgcggaaacagaccaaagucuacccagcacagccuuggcgggaucggaaggaaaguuucaaguacaucccagagcgguaaggugauuucuucaugggagaguuauaaaagcggcggggagacucgguuguga

SEQ ID NO: 160006 - RNA, 1575 nt, Artificial Sequence; identical to SEQ ID NO: 159522
  derived and/or modified CDS sequence (opt3) from glycoprotein__RABV__LM645043.1

SEQ ID NO: 160007 - RNA, 1575 nt, Artificial Sequence
  derived and/or modified CDS sequence (opt3) from glycoprotein__RABV__LM645045.1
auggugccccaggcccuccuguucgucccucuucuggcuuuuccaaugugcuucggcaaguuuccgaucuacaccauucccgacaaauuggggccuuggagcccaauagauauccaccauuuauccugucccaacaaucugguuguggaggacgaaggaugcacaaaccuaucugguuucucauauauggagcucaagguaggcuacauuagugcaaucaaagugaauggguuuacuuguacgggagucgugaccgaagccgagacauauacuaacuucguuggcuacgugaccacaaccuuuaagagaaaacacuucaggccuacuccagaugcgugccgggcugccuauaauuggaagauggccggugacccccgcuacgaagagagccugcauaacccuuauccagauuaccacuggcuucgaacagucaagaccacgaaagagucccugauuaucauaucuccgucgguggcagacuuggaucccuacgacaagucacuccauagccguguauuuccuagugggaaaugucugggaaucacuauuuccucuaccuauugcagcacaaaucacgauuacacuaucuggaugccagaaaacguuagacugggcaccuccugugacauuuucacaaauucaaggggcaagcgggcuaguaaagggagcaagaccugcggauuuguggaugagcgcggucucuauaagucuuuaaaaggcgcauguaagcugaaacuuugcggggucuugggacugagacuaauggacggcacguggguggccaugcccacuuccgaugaaacaaagugguguccuccagaccaacucgugaaccugcacgacuucaggucagaugagaucgagcaucuugucguugaggaacuggugcggaaacgcgaagagugcuuggacgcucucgaaagcauaaugaccacuaagaguguaucuuuucgaagacugucccacuuaaggaaacuggugcccgguuucgggaaggccuacacaauuuucaauaagacccucauggaggcggaugcacauuauaaaagcguccggacguggaacgagaucauuccgucgaagggaugccuucgugugggcggccgcugucacccucacguuaaugggguguuuuucaacggaaucauccugggucccgacggccaugucuugauuccagaaaugcagucuucccuacugcagcagcacauggagcuccuggaaucaagugugauaccucuuaugcauccccuggccgauccaagcaccguauuuaaagacggggaugaggcugaagacuucguugaggugcacuuucccgauguccauaagcaaaucuccggaguggacuugggccucccuaauugggguaaauacguccugauuaucgccgggguguuaauagcaaugauucugacaaucuuccuaaugacuugcuguggcagaggaaacaggccaaagucuacccagcacagccucggcgggaucggacggaagguuucaaguacaucccagagcgguaaagugauuucuucaugggagaguuauaagagcggcggggaaacucgacuguga

SEQ ID NO: 160008 - RNA, 1575 nt, Artificial Sequence; identical to SEQ ID NO: 160007
  derived and/or modified CDS sequence (opt3) from glycoprotein__RABV__LM645049.1

SEQ ID NO: 160009 - RNA, 1575 nt, Artificial Sequence; identical to SEQ ID NO: 159522
  derived and/or modified CDS sequence (opt3) from glycoprotein__RABV__LM645052.1

SEQ ID NO: 160010 - RNA, 1575 nt, Artificial Sequence; identical to SEQ ID NO: 159522
  derived and/or modified CDS sequence (opt3) from glycoprotein__RABV__LM645053.1

SEQ ID NO: 160011 - RNA, 1575 nt, Artificial Sequence; identical to SEQ ID NO: 159522
  derived and/or modified CDS sequence (opt3) from glycoprotein__RABV__LM645056.1

SEQ ID NO: 160012 - RNA, 1575 nt, Artificial Sequence
  derived and/or modified CDS sequence (opt3) from glycoprotein__RABV__LN713547.1
auggugccccaggcccuucucuucgucccucuucugguuuuuccauugugcuucggcaaguuuccgaucuacaccauucccgacaaauuagggccuuggagcccaauagauauccaccaucuguccugucccaacaaucuagugguagaggacgaaggaugcacaaaccucucugguuucucauauauggagcugaaggugggcaauauucuugcuaucaaaaugaacggguuuacuuguacgggagucgugaccgaagcagagacauacacuaauuucguuggcuaugugaccacaaccuuuaagagaaaacacuucaggccuacuccagaugccugccgggcggcuuacaacuggaagauggccggugacccccgcuaugaagagagucugcauaauccuuacccagauuaucgaugguugcguacagucaagaccacgaaagagagccucgugauuaucuccccgucuguagcagaccuggaucccuacgacagaucgcugcacucaaggguuuuuccuagcgggaaguguaguggaguggccgucuccucuacuuacugcagcaccaaccaugauuauacaauauggaugccagaaucccccaggcucggcaugucaugugacaucuucacuaauagucgcggcaaaagagcuagcaaggggucugagaccugcggauuuguggaugaaagggguuuauacaaaucccugaagggcgcauguaagcugaaauugugcggggugcugggacuacggcucauggacggcacaugggucucaaugcaaaccagcaacgagacgaagugguguccuccagaucagcugguuaaucuucacgacuuccgcagugacgagauugaacaccuggugguagaggaauuggugcgaaaaagagaggaaugccucgaugcccuggagucuaucaugacuacaaaguccgucagcuuuaggcgguuaucgcaucugcguaaacucgugcccgguuucgggaaggcuuauaccauucuuaacaaaacucugauggaggccgacgcgcacuacaagucuguucgcacauggaaugaaaucuugccguccaagggaugccuaagagugggcggccggugucauccucacgucaacgggguguucuuuaauggaauaauucugggucccgauggcaacguacucaucccagagaugcagucaagucugcuucagcaacacauggaacuguuggagagcuccguuauuccucucgugcauccccuggcagacccaucuaccgucuucaaagauggggacgaagccgaggauuuuguggagguccacuuacccgacgugcauaaccagguuagcggaguggaucugggccuaccuaauugggguaaguauguacuccugucagcuggggcccuuacggcauugaugcugaucaucuuccucaugaccugcugucggcgagucaaccgcagugaaccaacacagcacaaucugagaggcacuggaagggagguguccguuaccccgcagagcggcaaaauuauaucuucaugggaaagucauaagagcgggggagagacacggcuuuga

SEQ ID NO: 160013 - RNA, 1575 nt, Artificial Sequence; identical to SEQ ID NO: 160012
  derived and/or modified CDS sequence (opt3) from glycoprotein__RABV__LN713552.1

SEQ ID NO: 160014 - RNA, 1575 nt, Artificial Sequence
  derived and/or modified CDS sequence (opt3) from glycoprotein__RABV__LN713556.1
auggugccccaggcccuccuguucgucccucuucugguuuuuccauugugcuucggcaaguuuccgaucuacaccauucccgacaaauuagggccuuggagcccaauagauauccaccaucuguccugucccaacaaucuagugguagaggacgaaggaugcacaaaccucucugguuucucauauauggagcugaaggugggcaauauucuugcuaucaaaaugaacggguuuacuuguacgggagucgugaccgaagcagagacauacacuaauuucguuggcuaugugaccacaaccuuuaagagaaaacacuucaggccuacuccagaugccugccgggcggcuuacaacuggaagauggccggugacccccgcuaugaagagagucugcauaauccuuacccagauuaucgaugguugcguacagucaagaccacgaaagagagccucgugauuaucuccccgucuguagcagaccuggaucccuacgacagaucgcugcacucaaggguuuuuccuagcgggaaguguaguggaguggccgucuccucuacuuacugcagcaccaaccaugauuauacaauauggaugccagaaaauccccggcucggcauguccugugacaucuucacuaacucacgcggcaaaagagcuaguaaggggagcgagaccugcggauuuguggaugaaagggguuuauacaaaucucugaagggcgcauguaaacuuaaauugugcggggugcugggacuacggcucauggacggcacaugggucuccaugcaaaccucaaaugagacgaagugguguccuccagauaaacugguuaaccuucacgacuuccgcagcgacgagauugaacaccuggugguagaggaauuggugcgaaagagagaggaaugccucgaugcccuggagaguaucaugacuacaaaaucugucuccuuuaggcgguuaagccaucugcguaagcucgugcccgguuucgggaaggcuuauaccauucuuaauaagacucugauggaggccgacgcgcacuacaagucgguucgcacauggaacgaaaucuugccgucuaaaggaugccuaagagugggcgggaggugucauccucacgucaauggcguguucuuuaacggaauaauucugggucccgauggcaacguacucaucccagagaugcaguccucacugcuucagcagcacauggaacuguuggagaguagcguuauuccucucgugcauccccuggcagacccauccaccgucuucaaggauggggacgaagccgaggauuuuguggagguccacuuacccgacgugcauaaucaaguuucuggaguggaucugggccuaccuaacugggguaaauauguacuccugagcgcuggggcccuuacggcauugaugcugaucaucuuccucaugaccugcugucggcgagucaaucgcucagaaccaacacagcacaaccugagaggcacuggaagggaggugaguguuaccccgcaguccggcaagauuauaagcucuugggaaucacauaaaagugggggagagacacggcuuuga

SEQ ID NO: 160015 - RNA, 1575 nt, Artificial Sequence; identical to SEQ ID NO: 160012
  derived and/or modified CDS sequence (opt3) from glycoprotein__RABV__LN713559.1

SEQ ID NO: 160016 - RNA, 1575 nt, Artificial Sequence
  derived and/or modified CDS sequence (opt3) from glycoprotein__RABV__LN713560.1
auggugccccaggcccuucucuucgucccucuucugguuuuuccauugugcuucggcaaguuuccgaucuacaccauucccgacaaauuagggccuuggagcccaauagauauccaccaucuguccugucccaacaaucuagugguagaggacgaaggaugcacaaaccucucugguuucucauauauggagcugaaggugggcaauauucuugcuaucaaagucaacggguuuacuuguacgggagugguuaccgaagcagagacauacacuaauuucgugggcuaugucaccacaaccuuuaagagaaaacacuucaggccuacuccagaugccugccgggcggcuuacaacuggaagauggccggugacccccgcuaugaagagagucugcauaauccuuacccagauuaucgaugguugcguacagugaagaccacgaaagagagccucguaauuaucuccccgucuguugcagaccuggaucccuacgacagaucgcugcacucaaggguguuuccuagcgggaaguguaguggagucgccguguccucuacuuacugcagcaccaaccaugauuauacaauauggaugccagaaucccccaggcucggcaugucaugugacaucuucacuaauagucgcggcaaaagagcuagcaaggggucugagaccugcggauuuguggaugaaagggguuuauacaaaucccugaagggcgcauguaagcugaaauugugcgggguccugggacuacggcucauggacggcacauggguuucaaugcaaaccagcaacgagacgaagugguguccuccagaucagcuggugaaucuucacgacuuccgcagugacgagauugaacaccugguaguggaggaauugguccgaaaaagagaggaaugccucgaugcccuggagucuaucaugacuacaaaguccgugagcuuuaggcgguuaucgcaucugcguaaacucguucccgguuucgggaaggcuuauaccauucuuaacaaaacucugauggaggccgacgcgcacuacaagucugugcgcacauggaaugaaaucuugccguccaagggaugccuaagagucggcggccggugucauccucacgugaacgggguauucuuuaauggaauaauucugggucccgauggcaacguucucaucccagagaugcagucaagucugcuucagcaacacauggaacuguuggagagcuccgugauuccucucguccauccccuggcagacccaucuaccguguucaaagauggggacgaagccgaggauuuugucgaggugcacuuacccgacguucauaaccaggugagcggaguagaucugggccuaccuaauugggguaaguauguccuccugucagcuggggcccuuacggcauugaugcugaucaucuuccucaugaccugcugucggcgagugaaccgcagugaaccaacacagcacaaucugagaggcacuggaagggagguuuccgugaccccgcagagcggcaaaauuauaucuucaugggaaagucauaagagcgggggagagacacggcuuuga

SEQ ID NO: 160017 - RNA, 1575 nt, Artificial Sequence
  derived and/or modified CDS sequence (opt3) from glycoprotein__RABV__LN713572.1
auggugccccaggcccuccuguucgucccucuucugguuuuuccauugugcuucggcaaguuuccgaucuacaccauucccgacaaauuagggccuuggagcccaauagauauccaccaucuguccugucccaacaaucuagugguagaggacgaaggaugcacaaaccucucugguuucucauauauggagcugaaggugggcuacauucuugcuaucaaagucaauggguuuacuuguacgggagugguuaccgaagcagagacauauacuaacuucgugggcuacgucaccacaaccuuuaagagaaaacacuucaggccuacuccagaugccugccgggcggcuuauaauuggaagauggccggugacccccgcuacgaagagagucugcauaacccuuauccagauuaccgaugguugcguacagugaagaccacgaaagagagccucguaauuaucuccccgucuguugcagaccuggaucccuacgacagaucgcugcacucaaggguguuuccuagcgggaaguguaguggagucgccguguccucuacuuauugcagcaccaaucaugauuacacaauauggaugccagaaaacccccggcucggcauguccugugacaucuucacuaauucacgcggcaaaagagcuaguaaggggagcgagaccugcggauuuguggaugaaagggguuuauauaaaucucugaagggcgcauguaaacuuaaauugugcgggguccugggacuacggcucauggacggcacauggguuuccaugcaaaccucaaacgagacgaagugguguccuccagauaaacuggugaaucuucacgacuuccgcagcgacgagauugaacaccugguaguggaggaauugguccgaaagagagaggaaugccucgaugcccuggagaguaucaugacuacaaaaucuguguccuuuaggcgguuaagccaucugcguaagcucguucccgguuucgggaaggcuuacaccauucuuaacaagacucugauggaggccgacgcgcacuauaagucggugcgcacauggaaugaaaucuugccgucuaaaggaugccuaagagucggcgggaggugucauccucacgugaacggcguauucuuuaauggaauaauucugggucccgauggcaacguucucaucccagagaugcaguccucacugcuucagcagcacauggaacuguuggagaguagcgugauuccucucguccauccccuggcagacccauccaccguguucaaggauggggacgaagccgaggauuuugucgaggugcacuuacccgacguucauaaccaagugucuggaguagaucugggccuaccuaauugggguaaauacguccuccugagcgcuggggcccuuacggcauugaugcugaucaucuuccucaugaccugcugucggcgagugaaccgcucagaaccaacacagcacaaucugagaggcacuggaagggagguuagugugaccccgcaguccggcaagauuauaagcucuugggaaucacauaaaagugggggagagacacggcuuuga

SEQ ID NO: 160018 - RNA, 1575 nt, Artificial Sequence
  derived and/or modified CDS sequence (opt3) from glycoprotein__RABV__LN713578.1
auggugccccaggcccugcuguucgucccucuucugguuuuuccauugugcuucggcaaguuuccgaucuacaccauucccgacaaauuagggccuuggagcccaauagauauccaccaucuguccugucccaacaaucuagugguagaggacgaaggaugcacaaaccucucugguuucucauauauggagcugaaggugggcuacauucuugcuaucaaaaugaauggguuuacuuguacgggagucgugaccgaagcagagacauauacuaacuucguuggcuacgugaccacaaccuuuaagagaaaacacuucaggccuacuccagaugccugccgggcggcuuauaauuggaagauggccggugacccccgcuacgaagagagucugcauaacccuuauccagauuaccgaugguugcguacagucaagaccacgaaagagagccucgugauuaucuccccgucuguagcagaccuggaucccuacgacagaucgcugcacucaaggguuuuuccuagcgggaaguguaguggaguggccgucuccucuacuuauugcagcaccaaucaugauuacacaauauggaugccagaaaacccccggcucggcauguccugugacaucuucacuaauucacgcggcaaaagagcuaguaaggggagcgagaccugcggauuuguggaugaaagggguuuauauaaaucucugaagggcgcauguaaacuuaaauugugcggggugcugggacuacggcucauggacggcacaugggucuccaugcaaaccucaaacgagacgaagugguguccuccagauaaacugguuaaucuucacgacuuccgcagcgacgagauugaacaccuggugguagaggaauuggugcgaaagagagaggaaugccucgaugcccuggagaguaucaugacuacaaaaucugucuccuuuaggcgguuaagccaucugcguaagcucgugcccgguuucgggaaggcuuacaccauuuucaacaagacucuuauggaggccgacgcgcacuauaagucgguucgcacauggaaugaaauccugccgucuaaaggaugcuugagagugggcgggaggugucauccucacgucaacggcguguuuuucaauggaauaauucuaggucccgauggcaacguacugaucccagagaugcaguccucacuccugcagcagcacauggaacuucuggagaguagcguuauuccuuuggugcauccccucgcagacccauccaccgucuuuaaggauggggacgaagccgaggauuucguggagguccaccuccccgacgugcauaaccaaguuucuggaguggauuuaggccugccuaauugggguaaauacguacuacucagcgcuggggcccugacggcacuuauguugaucaucuuucugaugaccugcugucggcgagucaaccgcucagaaccaacacagcacaaucucagaggcacuggaagggaggugaguguuaccccgcaguccggcaagauuauaagcucuugggaaucacauaaaagugggggagagacacggcuguga

SEQ ID NO: 160019 - RNA, 1575 nt, Artificial Sequence; identical to SEQ ID NO: 160016
  derived and/or modified CDS sequence (opt3) from glycoprotein__RABV__LN713589.1

SEQ ID NO: 160020 - RNA, 1575 nt, Artificial Sequence; identical to SEQ ID NO: 160012
  derived and/or modified CDS sequence (opt3) from glycoprotein__RABV__LN713600.1

SEQ ID NO: 160021 - RNA, 1575 nt, Artificial Sequence
  derived and/or modified CDS sequence (opt3) from glycoprotein__RABV__LN713602.1
auggugccccaggcccuucucuucgucccucuucugguuuuuccauugugcuucggcaaguuuccgaucuacaccauucccgacaaauuagggccuuggagcccaauagauauccaccaucuguccugucccaacaaucuagugguagaggacgaaggaugcacaaaccucucugguuucucauauauggagcugaaggugggcaauauucuugcuaucaaaaugaacggguuuacuuguacgggagucgugaccgaagcagagacauacacuaauuucguuggcuaugugaccacaaccuuuaagagaaaacacuucaggccuacuccagaugccugccgggcggcuuacaacuggaagauggccggugacccccgcuaugaagagagucugcauaauccuuacccagauuaucgaugguugcguacagucaagaccacgaaagagagccucgugauuaucuccccgucuguagcagaccuggaucccuacgacagaucgcugcacucaaggguuuuuccuagcgggaaguguaguggaguggccgucuccucuacuuacugcagcaccaaccaugauuauacaauauggaugccagaaaauccccggcucggcauguccugugacaucuucacuaacucacgcggcaaaagagcuaguaaggggagcgagaccugcggauuuguggaugaaagggguuuauacaaaucucugaagggcgcauguaagcugaaauugugcggggugcugggacuacggcucauggacggcacaugggucuccaugcaaaccucaaaugagacgaagugguguccuccagaucagcugguuaaccuucacgacuuccgcagcgacgagauugaacaccuggugguagaggaauuggugcgaaaaagagaggaaugccucgaugcccuggagaguaucaugacuacaaagucugucuccuuuaggcgguuaagccaucugcguaaacucgugcccgguuucgggaaggcuuauaccauucuuaauaaaacucugauggaggccgacgcgcacuacaagucgguucgcacauggaacgaaaucuugccgucuaagggaugccuaagagugggcgggaggugucauccucacgucaauggcguguucuuuaacggaauaauucugggucccgauggcaacguacucaucccagagaugcaguccucacugcuucagcaacacauggaacuguuggagaguagcguuauuccucucgugcauccccuggcagacccauccaccgucuucaaagauggggacgaagccgaggauuuuguggagguccacuuacccgacgugcauaaucagguuucuggaguggaucugggccuaccuaacugggguaaguauguacuccugagcgcuggggcccuuacggcauugaugcugaucaucuuccucaugaccugcugucggcgagucaaucgcucagaaccaacacagcacaaccugagaggcacuggaagggaggugaguguuaccccgcaguccggcaaaauuauaagcucuugggaaucacauaagagugggggagagacacggcuuuga

SEQ ID NO: 160022 - RNA, 1575 nt, Artificial Sequence
  derived and/or modified CDS sequence (opt3) from glycoprotein__RABV__LN713608.1
auggugccccaggcccuucucuucgucccucuucugguuuuuccauugugcuucggcaaguuuccgaucuacaccauucccgacaaauuagggccuuggagcccaauagauauccaccaucuguccugucccaacaaucuagugguagaggacgaaggaugcacaaaccucucugguuucucauauauggagcugaaggugggcuacauucuugcuaucaaagucaauggguuuacuuguacgggagugguuaccgaagcagagacauauacuaacuucgugggcuacgucaccacaaccuuuaagagaaaacacuucaggccuacuccagaugccugccgggcggcuuauaauuggaagauggccggugacccccgcuacgaagagagucugcauaacccuuauccagauuaccgaugguugcguacagugaagaccacgaaagagagccucguaauuaucuccccgucuguugcagaccuggaucccuacgacagaucgcugcacucaaggguguuuccuagcgggaaguguaguggagucgccguguccucuacuuauugcagcaccaaucaugauuacacaauauggaugccagaaaacccccggcucggcauguccugugacaucuucacuaauucacgcggcaaaagagcuaguaaggggagcgagaccugcggauuuguggaugaaagggguuuauauaaaucucugaagggcgcauguaagcugaaauugugcgggguccugggacuacggcucauggacggcacauggguuuccaugcaaaccucaaacgagacgaagugguguccuccagaucagcuggugaaucuucacgacuuccgcagcgacgagauugaacaccugguaguggaggaauugguccgaaaaagagaggaaugccucgaugcccuggagaguaucaugacuacaaagucuguguccuuuaggcgguuaagccaucugcguaaacucguucccgguuucgggaaggcuuacaccauuuucaacaaaacucuuauggaggccgacgcgcacuauaagucggugcgcacauggaaugaaauccugccgucuaagggaugcuugagagucggcgggaggugucauccucacgugaacggcguauuuuucaauggaauaauucuaggucccgauggcaacguucugaucccagagaugcaguccucacuccugcagcaacacauggaacuucuggagaguagcgugauuccuuugguccauccccucgcagacccauccaccguguuuaaagauggggacgaagccgaggauuucgucgaggugcaucugcccgacguucacaaccaggugucuggaguagauuuaggccugccuaauugggguaaguacguccuacucagcgcuggggcccugacggcacuuauguugaucaucuuucugaugaccugcugucggcgagugaaccgcucagaaccaacacagcacaaucucagaggcacuggaagggagguuagugugaccccgcaguccggcaaaauuauaagcucuugggaaucacauaagagugggggagagacacggcuguga

SEQ ID NO: 160023 - RNA, 1575 nt, Artificial Sequence
  derived and/or modified CDS sequence (opt3) from glycoprotein__RABV__LN713628.1
auggugccccaggcccuucucuucgucccucuucugguuuuuccauugugcuucggcaaguuuccgaucuacaccauucccgacaaauuagggccuuggagcccaauagauauccaccaucuguccugucccaacaaucuagugguagaggacgaaggaugcacaaaccucucugguuucucauauauggagcugaaggugggcuacauucuugcuaucaaaaugaauggguuuacuuguacgggagucgugaccgaagcagagacauauacuaacuucguuggcuacgugaccacaaccuuuaagagaaaacacuucaggccuacuccagaugccugccgggcggcuuauaauuggaagauggccggugacccccgcuacgaagagagucugcauaacccuuauccagauuaccgaugguugcguacagucaagaccacgaaagagagccucgugauuaucuccccgucuguagcagaccuggaucccuacgacagaucgcugcacucaaggguuuuuccuagcgggaaguguaguggaguggccgucuccucuacuuauugcagcaccaaucaugauuacacaauauggaugccagaaaacccccggcucggcauguccugugacaucuucacuaauucacgcggcaaaagagcuaguaaggggagcgagaccugcggauuuguggaugaaagggguuuauauaaaucucugaagggcgcauguaagcugaaauugugcggggugcugggacuacggcucauggacggcacaugggucuccaugcaaaccucaaacgagacgaagugguguccuccagaucagcugguuaaucuucacgacuuccgcagcgacgagauugaacaccuggugguagaggaauuggugcgaaaaagagaggaaugccucgaugcccuggagaguaucaugacuacaaagucugucuccuuuaggcgguuaagccaucugcguaaacucgugcccgguuucgggaaggcuuacaccauuuucaacaaaacucuuauggaggccgacgcgcacuauaagucgguucgcacauggaaugaaauccugccgucuaagggaugcuugagagugggcgggaggugucauccucacgucaacggcguguuuuucaauggaauaauucuaggucccgauggcaacguacugaucccagagaugcaguccucacuccugcagcaacacauggaacuucuggagaguagcguuauuccuuuggugcauccccucgcagacccauccaccgucuuuaaagauggggacgaagccgaggauuucguggagguccaucugcccgacgugcacaaccagguuucuggaguggauuuaggccugccuaauugggguaaguacguacuacucagcgcuggggcccugacggcacuuauguugaucaucuuucugaugaccugcugucggcgagucaaccgcucagaaccaacacagcacaaucucagaggcacuggaagggaggugaguguuaccccgcaguccggcaaaauuauaagcucuugggaaucacauaagagugggggagagacacggcuguga

SEQ ID NO: 160024 - RNA, 1575 nt, Artificial Sequence
  derived and/or modified CDS sequence (opt3) from glycoprotein__RABV__LN713639.1
auggugccccaggcccuucucuucgucccucuucugguuuuuccauugugcuucggcaaguuuccgaucuacaccauucccgacaaauuagggccuuggagcccaauagauauccaccaucuguccugucccaacaaucuagugguagaggacgaaggaugcacaaaccucucugguuucucauauauggagcugaaggugggcuacauucuugcuaucaaagucaauggguuuacuuguacgggagugguuaccgaagcagagacauauacuaacuucgugggcuacgucaccacaaccuuuaagagaaaacacuucaggccuacuccagaugccugccgggcggcuuauaauuggaagauggccggugacccccgcuacgaagagagucugcauaacccuuauccagauuaccgaugguugcguacagugaagaccacgaaagagagccucguaauuaucuccccgucuguugcagaccuggaucccuacgacagaucgcugcacucaaggguguuuccuagcgggaaguguaguggagucgccguguccucuacuuauugcagcaccaaucaugauuacacaauauggaugccagaaaacccccggcucggcauguccugugacaucuucacuaauucacgcggcaaaagagcuaguaaggggagcgagaccugcggauuuguggaugaaagggguuuauauaaaucucugaagggcgcauguaagcugaaauugugcgggguccugggacuacggcucauggacggcacauggguuuccaugcaaaccucaaacgagacgaagugguguccuccagaucagcuggugaaucuucacgacuuccgcagcgacgagauggaacaccugguaguggaggaauugguccgaaaaagagaggaaugccucgaugcccuggagaguauuaugacuacaaagucuguguccuuuaggcgguuaagccaucugcguaaacucguucccgguuucgggaaggcuuacaccauccuuaacaaaacucugauggaggccgacgcgcacuauaagucggugcgcacauggaaugaaauuuugccgucuaagggaugccuaagagucggcgggaggugucauccucacgugaacggcguauucuuuaauggaaucauacugggucccgauggcaacguucucauuccagagaugcaguccucacugcuucagcaacacauggaacuguuggagaguagcgugaucccucucguccauccccuggcagacccauccaccguguucaaagauggggacgaagccgaggauuuugucgaggugcacuuacccgacguucauaaccaggugucuggaguagaucugggccuaccuaauugggguaaguacguccuccugagcgcuggggcccuuacggcauugaugcugauuaucuuccucaugaccugcugucggcgagugaaccgcucagaaccaacacagcacaaucugagaggcacuggaagggagguuagugugaccccgcaguccggcaaaaucauuagcucuugggaaucacauaagagugggggagagacacggcuuuga

SEQ ID NO: 160025 - RNA, 1575 nt, Artificial Sequence
  derived and/or modified CDS sequence (opt3) from glycoprotein__RABV__LN713660.1
auggugccccaggcccuccuguucgucccucuucugguuuuuccauugugcuucggcaaguuuccgaucuacaccauucccgacaaauuagggccuuggagcccaauagauauccaccaucuguccugucccaacaaucuagugguagaggacgaaggaugcacaaaccucucugguuucucauauauggagcugaaggugggcuacauuagugcuaucaaaaugaauggguuuacuuguacgggagucgugaccgaagcagagacauauacuaacuucguuggcuacgugaccacaaccuuuaagagaaaacacuucaggccuacuccagaugccugccgggcggcuuauaauuggaagauggccggugacccccgcuacgaagagagccuucauaacccuuauccagauuaccgauggcugcguacagucaagaccacgaaagaguccuuggugauuaucucuccgucgguagcagaccucgaucccuacgacagaucacugcacagcaggguuuuuccuagugggaaguguuccggaguggccgucucuagcacuuauugcuccaccaaucaugauuacacaauauggaugccagaaaacccccggcugggcaugucaugugacaucuucacuaauagucgcggcaaaagagcuagcaaggggucugagaccugcggauuuguggaugaaaggggucucuauaaauccuuaaagggcgcauguaagcugaaacuuugcgggguguugggacugcggcuaauggacggcacaugggucgccaugcaaaccucaaacgagacgaagugguguccuccagaucagcucguuaaucugcacgacuuccgcagcgacgagauugaacaccuugugguagaggaacuggugcgaaaaagagaggaaugcuuggaugcucucgagaguaucaugacuacaaagucugucuccuuuaggcggcugagccauuuacguaaacuggugcccgguuucgggaaggccuacaccauuuucaacaaaacucucauggaggcggacgcacacuauaagucgguucgcacauggaaugaaauccuuccgucuaagggaugccugagagugggcgggaggugucauccucacgucaacggcguguuuuucaauggaauaauuuugggucccgauggcaacguacuaaucccagagaugcaguccucacugcuccagcaacacauggaacugcuugagaguagcguuauuccucugaugcaucccuuggccgacccauccaccguguuuaaagauggggacgaagcugaggauuucgucgaggugcaccuccccgacguccaugaacaggugucuggaguugaucugggcuuaccuaacugggguaaguacgugcugcuaagcgccggggcacucacggcucugaugcuuaucaucuuuuugaugaccugcugucggcgaguaaaucgcucagagccaacacagcacaaccugagaggcacuggaagggaagucagugugaccccgcaguccggcaaaauuauaagcucuugggagucauauaagagugggggagaaacacggcucuga

SEQ ID NO: 160026 - RNA, 1575 nt, Artificial Sequence
  derived and/or modified CDS sequence (opt3) from glycoprotein__RABV__LN713663.1
auggugccccaggcccuucucuucgucccucuucugguuuuuccauugugcuucggcaaguuuccgaucuacaccauucccgacaaauuagggccuuggagcccaauagauauccaccaucuguccugucccaacaaucuagugguagaggacgaaggaugcacaaaccucucugguuucucauauauggagcugaaggugggcuacauucuugcuaucaaagucaauggguuuacuuguacgggagugguuaccgaagcagagacauauacuaacuucgugggcuacgucaccacaaccuuuaagagaaaacacuucaggccuacuccagaugccugccgggcggcuuauaauuggaagauggccggugacccccgcuacgaagagagucugcauaacccuuauccagauuaccgaugguugcguacagugaagaccacgaaagagagccucguaauuaucuccccgucuguugcagaccuggaucccuacgacagaucgcugcacucaaggguguuuccuagcgggaaguguaguggagucgccguguccucuacuuauugcagcaccaaucaugauuacacaauauggaugccagaaaacccccggcucggcauguccugugacaucuucacuaauucacgcggcaaaagagcuaguaaggggagcgagaccugcggauuuguggaugaaagggguuuauauaaaucucugaagggcgcauguaagcugacauugugcgggguccugggacuacggcucauggacggcaccuggguuuccaugcaaacgucaaacgagacuaaaugguguccuccagauaagcuggugaaucuucacgacuuccgcagcgacgagauugaacaccugguaguggaggaauugguccgaaaaagagaggaaugccucgaugcccuggagaguaucaugacaaccaagucuguguccuuuaggcgguuaagccaucugcguaaacucguucccgguuucgggaaggcuuacacuauuuucaacaaaacacuuauggaggccgacgcgcacuauaagucgguggaaaccuggaaugagauccugccgucuaagggaugcuugcgcgucggcggcagaugucauccucacgugaacgggguauuuuucaauggaauaauucuaggucccgauggcaacguucugaucccagaaaugcaguccucacuccugcagcagcacauggagcuucuggaaaguagcgugauuccuuugguccauccccucgcagacccauccacgguguuuaaagauggggacgaggccgaggauuucgucgaagugcaucugcccgacguucacaaccaagugucuggaguagauuuaggccugccuaauugggguaaguacguccuacucagcgcuggggcccugaccgcacuuauguugaucaucuuucugaugacaugcuguaggcgggugaaccgaucagagccaacucagcacaaucuccgcggcaccggaagagaaguuagugugacaccgcaguccggcaaaauuauaagcucuugggagucacauaagagugggggagaaacuauccuguga

SEQ ID NO: 160027 - RNA, 1575 nt, Artificial Sequence
  derived and/or modified CDS sequence (opt3) from glycoprotein__RABV__LN713666.1
auggugccccaggcccuucucuucgucccucuucugguuuuuccauugugcuucggcaaguuuccgaucuacaccauucccgacaaauuagggccuuggagcccaauagauauccaccaucuguccugucccaacaaucuagugguagaggacgaaggaugcacaaaccucucugguuucucauauauggagcugaaggugggcuacauucuugcuaucaaagucaauggguuuacuuguacgggagugguuaccgaagcagagacauauacuaacuucgugggcuacgucaccacaaccuuuaagagaaaacacuucaggccuacuccagaugccugccgggcggcuuauaauuggaagauggccggugacccccgcuacgaagagagucugcauaacccuuauccagauuaccgaugguugcguacagugaagaccacgaaagagagccucguaauuaucuccccgucuguugcagaccuggaucccuacgacagaucgcugcacucaaggguguuuccuagcgggaaguguaguggagucgccguguccucuacuuauugcagcaccaaucaugauuacacaauauggaugccagaaaacccccggcucggcauguccugugacaucuucacuaauucacgcggcaaaagagcuaguaaggggagcgagaccugcggauuuguggaugaaagggguuuauauaaaucucugaagggcgcauguaagcugauguugugcgggguccugggacuacggcucauggacggcacauggguuuccaugcaaaccucaaacgagacgaaaugguguccuccagauaagcuggugaaucuucacgacuuccgcagcgacgagauugaacaccugguaguggaggaauugguccgaaaaagagaggaaugccucgaugcccuggagaguaucaugacuacaaagucuguguccuuuaggcgguuaagccaucugcguaaacucguucccgguuucgggaaggcuuacaccauuuucaacaaaacucuuauggaggccgacgcgcacuauaagucgguggaaacauggaaugagauccugccgucuaagggaugcuugcgcgucggcggcagaugucauccucacgugaacgggguauuuuucaauggaauaauucuaggucccgauggcaacguucugaucccagaaaugcaguccucacuccugcagcagcacauggagcuucuggaaaguagcgugauuccuuugguccauccccucgcagacccauccaccguguuuaaagauggggacgaggccgaggauuucgucgaagugcaucugcccgacguucacaaccaagugucuggaguagauuuaggccugccuaauugggguaaguacguccuacucagcgcuggggcccugacggcacuuauguugaucaucuuucugaugaccugcuguaggcgggugaaccgaucagagccaacacagcacaaucuccgcggcacuggaagagaaguuagugugaccccgcaguccggcaaaauuauaagcucuugggagucacauaagagugggggagaaacaauccuguga

SEQ ID NO: 160028 - RNA, 1575 nt, Artificial Sequence
  derived and/or modified CDS sequence (opt3) from glycoprotein__RABV__LN879481.2
auggugccccaggcccuucucuucgucccucuucugggcuuuagcuugugcguugggaaguucccaaucuacaccauuccggacaaauuaggacccugguccccuauagauauccaccaucugucuuguccaaacaaucuagugguagaggacgaagguugcacaaaccucucaggcuuuaguuauauggagcugaaggugggguacauuagcgcuaucaaagucaauggauucacuuguacgggcgugguuaccgaagcagagacauauacuaacuuuguggguuacgucaccacaaccuucaagagaaaacacuuuaggcccacuccugaugccugccgggcggcuuauaauuggaagauggccggggacccacgcuacgaagagucccuucauaaccccuauccugauuaccacuggcugcgaacagugaagaccacgaaagagucuuugguaauuaucucgccaucaguugcagaccucgauccguacgacaagagccugcauagucguguguuccccggaggcaaauguuccggcauaacugucucuagcaccuauugcuccacaaaucacgauuacacuaucuggcugccugaaaacccaagacucgggaccucaugugacauuuuuacaaauaguaggggaaagcgggccagcaaagguucuaagaccugcggcuucguggaugagcgcggguuauauaagucccugaaaggagcuuguaagcugaaauugugcggcgugcugggucuaagacucaucgacgggacgugggucgcaaugcaaacuucaaacgaaacaaaguggugucccccugaucagcugguuaaucuucacgacuuuaggagcgacgagauugagcaucuggugguagaagaguuggugaaaaagcgggaagagugccucgaugcccuggaaaguaucaugaccacuaaaucugucuccuuccgccgauuaagccaccugagaaagcucgugccaggauuuggcaaggcuuacacaauauucaacaaaacccuuauggaggccgacgcgcauuauaagucgguuaggacguggaaugagauuauccccucuaaaggcugccugcgggucgggggacguugucaccaccaugugaacgguguguucuuuaauggcauuaucuuggggccggauggacacguacuaaucccugaaaugcaguccucacugcuccagcaacauauggagcugcuugaaaguagcguuauuccccugaugcacccauuggcagacccuuccaccguguucaaggauggcgacgaggccgaagauuuugucgaggugcaucuccccgacguccacaaacaggugucugguguugaucugggguuaccaaacuggggcaaguacgugcugcuaagcgcuggagcccucauagcacugaugcuuaucauuuucuugaugacaugcugucgcagaguaaacaggcccgagucaacucagccuaguuuucggggcaccgaacgaaaggucuccaucacaccacagagcgggaaagugauaucuucaugggagaguuauaagagcggaggugaaacucgccuguga

SEQ ID NO: 160029 - RNA, 1575 nt, Artificial Sequence; identical to SEQ ID NO: 159522
  derived and/or modified CDS sequence (opt3) from glycoprotein__RABV__LT598537.1

SEQ ID NO: 160030 - RNA, 1575 nt, Artificial Sequence; identical to SEQ ID NO: 159829
  derived and/or modified CDS sequence (opt3) from glycoprotein__RABV__LT598538.1

SEQ ID NO: 160031 - RNA, 1575 nt, Artificial Sequence
  derived and/or modified CDS sequence (opt3) from glycoprotein__RABV__LT598540.1
auggugccccaggcccuccuguucgucccucuucuggcuuuuccaaugugcuucggcaaguuuccgaucuacaccauucccgacaaauuggggccuuggagcccaauagauauccaccauuuauccugucccaacaaucugguuguggaggacgaaggaugcacaaaccuaucugguuucucauauauggagcucaagguaggcuacauuagugcaaucaaagugaauggguuuacuuguacgggagucgugaccgaagccgagacauauacuaacuucguuggcuacgugaccacaaccuuuaagagaaaacacuucaggccuacuccagaugcgugccgggcugccuauaauuggaagauggccggugacccccgcuacgaagagagccugcauaacccuuauccagauuaccacuggcuucgaacagucaagaccacgaaagagucccugauuaucauaucuccgucgguggcagacuuggaucccuacgacaagucacuccauagccguguauuuccuagugggaaaugucugggaaucacuauuuccucuaccuauugcagcacaaaucacgauuacacuaucuggaugccagaaaacguuagacugggcaccuccugugacauuuucacaaauucaaggggcaagcgggcuaguaaagggagcaagaccugcggauuuguggaugagcgcggucucuauaagucuuuaaaaggcgcauguaagcugaaacuuugcggggucuugggacugagacuaauggacggcacguggguggccaugcccacuuccgaugaaacaaagugguguccuccagaccaacucgugaaccugcacgacuucaggucagaugagaucgagcaucuugucguugaggaacuggugcggaaacgcgaagagugcuuggacgcucucgaaagcauaaugaccacuaagaguguaucuuuucgaagacugucccacuuaaggaaacuggugcccgguuucgggaaggccuacacaauuuucaauaagacccucauggaggcggaugcacauuauaaaagcguccggacguggaacgagaucauuccgucgaagggaugccuucgugugggcggccgcugucacccucacguuaaugggguguuuuucaacggaaucauccugggucccgacggccaugucuugauuccagaaaugcagucuucccuacugcagcagcacauggagcuccuggaaucaagugugauaccucuuaugcauccccuggccgauccaagcaccguauuuaaagacggggaugaggcugaagacuucguugaggugcacuugcccgauguccauaagcaaaucuccggaguggaccucggccugccuaauugggguaaauacgucuuaaugauugccggggugcugaucgcaaugauacuaacaauuuuucucaugacuugcuguggcagaggaaacaggcugaagucuacccagcacagccuuggcgggaucggacggaagguuucaaguacaucccagagcgguaaagugaucucuucaugggagaguuauaagagcggcggggaaacucgauuguga

SEQ ID NO: 160032 - RNA, 1575 nt, Artificial Sequence
  derived and/or modified CDS sequence (opt3) from glycoprotein__RABV__LT598541.1
auggugccccaggcccuccuguucgucccucuucuggcuuuuccaaugugcuucggcaaguuuccgaucuacaccauucccgacaaauuggggccuuggagcccaauagauauccaccauuuauccugucccaacaaucugguuguggaggacgaaggaugcacaaaccuaucugguuucucauauauggagcucaagguaggcuacauuagugcaaucaaagugaauggguuuacuuguacgggagucgugaccgaagccgagacauauacuaacuucguuggcuacgugaccacaaccuuuaagagaaaacacuucaggccuacuccagaugcgugccgggcugccuauaauuggaagauggccggugacccccgcuacgaagagagccugcauaacccuuauccagauuaccacuggcuucgaacagucaagaccacgaaagagucccugauuaucauaucuccgucgguggcagacuuggaucccuacgacaagucacuccauagccguguauuuccuagugggaaaugucugggaaucacuauuuccucuaccuauugcagcacaaaucacgauuacacuaucuggaugccagaaaacguuagacugggcaccuccugugacauuuucacaaauucaaggggcaagcgggcuaguaaagggagcaagaccugcggauuuguggaugagcgcggucucuauaagucuuuaaaaggcgcauguaagcugaaacuuugcggggucuugggacugagacuaauggacggcacguggguguccaugcccacuucagaugaaacaaagugguguccuccagaccaacucgugaaccugcacgacuucaggagcgaugagaucgagcaucuugucguugaggaacuggugcggaaacgcgaagagugcuuggacgcccucgaaaguauaaugaccacuaagucuguauccuuucgaagacugagccacuuaaggaaacuggugcccgguuucgggaaggcuuacacaauuuucaauaagacccucauggaggccgaugcgcauuauaaaucgguccggacguggaacgagaucauuccgucuaagggaugccuucgugugggcggccgcugucacccucacguuaaugggguguuuuucaacggaaucauccugggucccgacggccaugucuugauuccagaaaugcaguccucacuacugcagcagcacauggagcuccuggaaaguagcgugauaccucuuaugcauccccuggcagauccauccaccguauuuaaagacggggaugaggccgaagacuucguugaggugcacuugcccgauguccauaagcaaaucucuggaguggaccucggccugccuaauugggguaaauacgucuuaauuaucgcuggggugcugauagccaugauucuaacaaucuuucucacuaccugcuguggcagaggaaacaggccaaagagcacacagcacucacugggcgggaucggacggaagguuaguuccacuagccagucugguaaagugauuucaaguugggagagcuauaaguccggcggggaaacccgacuuuga

SEQ ID NO: 160033 - RNA, 1575 nt, Artificial Sequence; identical to SEQ ID NO: 159857
  derived and/or modified CDS sequence (opt3) from glycoprotein__RABV__LT598543.1

SEQ ID NO: 160034 - RNA, 1575 nt, Artificial Sequence; identical to SEQ ID NO: 159479
  derived and/or modified CDS sequence (opt3) from glycoprotein__RABV__M13215.1

SEQ ID NO: 160035 - RNA, 1575 nt, Artificial Sequence
  derived and/or modified CDS sequence (opt3) from glycoprotein__RABV__M32751.1
auggugccccagguccuccuguucgccccucuucugguuuuuccauugugcuucggcaaguuuccgaucuacaccauucccgacaaauuagggccuuggagcccaauagaucugcaccaucuauccugucccaacaaucucgugguagaggacgaaggaugcacaaaccugucugguuucucauauauggagcuuaaggugggcuacaucagugcuauuaaagucaauggguuuacuuguacgggagugguuaccgaagcagagacauauacuaacuucgugggcuacgucaccacaaccuuuaagagaaaacacuucaggccuacuccagaugccugccgggcggcuuauaauuggaagauggccggugacccccgcuacgaagagagccugcauaacccuuauccagauuaccacugguugcgaacagugaagaccacgaaagagucccucguaaucauuucuccgucgguuacugaccuggaucccuacgacaagucacugcauagccguguguuuccugggggaaauuguaguggcaucaccgucuccucuacauauugcagcacuaaccacgauuacaccauauggaugccagaaaaucucagauuaggcacauccugugacaucuucacccacucaagggggaaacgggcaaguaagggagauaaaacgugcgguuuuguggacgagcgcggccuguauaagagccuuaagggggccuguaaauugaagcugugcggagugcuaggccucagacugauggaugguacuugggucgcuaugcaaacaucugacgaaaccaaauggugucccccugggcagcuuguuaaccugcaugacuucagguccgaugagauugagcacuugguggaagaggaacucguaaagaaacgggaggaaugccuggacgcauuagagucaaucaugacuacaaagagcgugaguuuucgccgacugucucaucucagaaaacuugucccaggauucggcaaggccuacaccauuuucaauaagacgcugauggaggcugaugcccacuauaaauccgugcagaccuggaacgaaaucauacccagcaagggcugcuugaggguuggggagcggugucacccgcaugugaauggagucuuuuucaacgguauuauccuaggcucggacgggcacgugcugauuccugaaaugcagucuucccuccugcaacagcauauggagcuucuggaaucaaguguaauccccuugaugcacccacucgcggauccuagcacaguuuuuaaagacggagaugagguggaggacuucgucgaagugcaucugcccgauguccacaaacagguguccggcguugacuuaggucugccaaagugggggaaguacgugcuaaugaucgcaggcgcccucauugcucugaugcuuauaaucuuuuugaugacuugcugucgucgcguaaauagacccgagucuacccagagcaaccugggaggcacagggaggaacgucucagugccuagucaauccggaaagguuauuagcucuugggaaucauauaaaagugguggcgagacucggcucuga

SEQ ID NO: 160036 - RNA, 1575 nt, Artificial Sequence
  derived and/or modified CDS sequence (opt3) from glycoprotein__RABV__M81058.1
auggugccccaggcccuucucuucgucccucuucugguuuuuccauugugcuucggcaaguuuccgaucuacaccauucccgacaaauuagggccuuggagcccaauagauauccaccaucugagaugucccaacaaucuagugguagaggacgaaggaugcacaaaccucuccgguuucucuuauauggagcugaaggugggcuacauuucagcuaucaaagucaauggguuuacuuguacgggagugguuaccgaagcagagacauauacuaacuucgugggcuacgucaccacaaccuuuaagaggaaacacuuccggccuacuccagaugccugccgcgcggcuuauaauuggaagauggccggugacccccgauacgaagagagucuucauaacccuuauccagauuaccacuggcugcguacagugaagaccacgaaagagagcuugguaauuaucuccccgucuguugcagaccucgaucccuacgacaagucgcugcauucaagaguguuuccuagcgggaauuguaguggaauaacugucuccucuaccuauugcagcacaaaccacgauuacacuaucuggaugccagaaaaucccaggcuggagaccuccugugacauuuucacaaacucacggggcaaacgcgccaguaagggcagcaaaaccugcggguuuguggaugaaagaggacucuauaagucuuuaaagggugcuuguaaacugaagcugugcggcguguuggggcugaggcuaauggacggaacgugggucgcaaugcaaacuuccgaugagacaaaaugguguccuccagaccagcucguuaaucugcacgacuuccggucagaugagaucgaacaucuugugguagaggaacuggugaagaaacgcgaggaaugcuuggacgcccucgagagcauuaugaccacuaagagugucucuuuucgaagacugucccacuuaaggaaacuggugcccggcuucgguaaggcuuacacaaucuucaacaagacccucauggaggccgaugcgcauuauaaaagcguucggacguggaaugaaauaauuccgucgaaggggugccuucgugugggaggccgcugucacccucacgucaacggcguguuuuucaaugggaucauucugggacccgacggucauguauugaucccagagaugcagucuucccuacugcagcaacacauggaacuccuggagucaaguguuaucccucuuaugcauccccuggcagauccaagcaccguguuuaaagacggcgaugaagccgaggacuucgucgaggugcacuugcccgauguccauaaacagguguccgggguugaccucggacugccuaacuggggcaaguacguguuacugucugcugguacacuaauugcccucaugcugauaaucuuucuuaugacuugcuguagaaggguaaaccggccaaagagcaccgaacgaucauugggggagacaggccgcaaggucagugugacuucccagagcggaaaaguuauuucuucaugggaaaguuauaagagcggcggggagaccagaagguga

SEQ ID NO: 160037 - RNA, 1575 nt, Artificial Sequence
  derived and/or modified CDS sequence (opt3) from glycoprotein__RABV__M81059.1
auggugccccaggcccuucucuucgucccucuucugguuuuuccauugugcuucggcaaguuuccgaucuacaccauucccgacaaauuagggccuuggagcccaauagauauccaccaucugagaugucccaacaaucuagugguagaggacgaaggaugcacaaaccucuccgguuucucuuauauggagcugaaggugggcuacauuucagcuaucaaagucaauggguuuacuuguacgggagugguuaccgaagcagagacauauacuaacuucgugggcuacgucaccacaaccuuuaagaggaaacacuuccggccuacuccagaugccugccgcgcggcuuauaauuggaagauggccggugacccccgauacgaagagagucuucauaacccuuauccagauuaccacuggcugcguacagugaagaccacgaaagagagcuugguaauuaucuccccgucuguugcagaccucgaucccuacgacaagucgcugcauucaagaguguuuccuagcgggaauuguaguggaauaacugucuccucuaccuauugcagcacaaaccacgauuacacuaucuggaugccagaaaaucccaggcuggagaccuccugugacauuuucacaaacucacggggcaaacgcgccaguaagggcagcaaaaccugcggguuuguggaugaaagaggacucuauaagucuuuaaagggugcuuguaaacugaagcugugcggcguguuggggcugaggcuaauggacggaacgugggucgcaaugcaaacuuccgaugagacaaaaugguguccuccagaccagcucguuaaucugcacgacuuccggucagaugagaucgaacaucuugugguagaggaacuggugaagaaacgcgaggaaugcuuggacgcccucgagagcauuaugaccacuaagagugucucucugcgaagauuaucccaccugaggaaacucgugcccggcuuugguaaggcuuacacaaucuucaacaagacccuuauggaggccgaagcgcauuauaaaagcguucagacguggaaugagauaauuccgucgaaggggugccugcgggugggaggccguugucacccucacgucaacggcguguucuuuaaugggaucauuuugggacccgauggucauguacuaaucccagaaaugcagucuucccugcuccaacagcacauggagcugcuugaaucaaguguuaucccucugaugcaucccuuggcagacccaagcaccguguucaaagauggcgacgaggccgaggauuuugucgaagugcaccuccccgacguccauaaacagguguccgggguugaucugggauuaccuaacuggggcaaguacgugcugcuaucugcugguacacucauugcccugaugcuuauaaucuucuugaugacuugcugucgcagaguaaacaggccaaagagcaccgagcggucacugggggaaacaggccgaaaggucagugugacuucccagagcggaaaaguuauuucuucaugggagaguuauaagagcggcggggaaacccgcagauga

SEQ ID NO: 160038 - RNA, 1575 nt, Artificial Sequence
  derived and/or modified CDS sequence (opt3) from glycoprotein__RABV__M81060.1
auggugccccaggcccuucucuucgucccucuucugguuuuuagcuugugcuucggcaaguuuccaaucuacaccauuccggacaaauuagggcccugguccccuauagauauccaccaucugucuuguccaaacaaucuagugguagaggacgaaggaugcacaaaccucucagguuucaguuauauggagcugaaggugggcuacauuagcgcuaucaaagucaauggguuuacuuguacgggagugguuaccgaagcagagacauauacuaacuucgugggcuacgucaccacaaccuuuaagagaaaacacuucaggcccacuccugaugccugccgggcggcuuauaauuggaagauggccggugacccacgcuacgaagagucccuucauaaccccuauccugauuaccacuggcugcgaacagugaagaccacgaaagagucuuugguaauuaucucgccaucaguugcagaccucgauccguacgacaagagccugcauagucguguguuucccuccgggaauuguucuggaauaacugucagcuccaccuauugcucaacaaaccacgauuacacuaucuggaugccugaaaauccaagacuggagaccaguugugacauuuucacaaacagcaggggcaaacgggccucuaagggcuccaaaaccugcggguuuguggaugaacgcggacucuauaagucauuaaagggugcuuguaaacugaagcugugcggcguguuggggcugagacuaauggacggaacgugggucgcaaugcaaacuagcgaugagacaaaauggugucccccugaccagcucguuaaucugcacgacuucaggagugaugagaucgaacaucuugugguagaggaacuggugaagaaacgggaggaaugcuuggacgcccucgagucuauuaugaccacuaaguccgucagcuuucgccgacugucgcacuuaagaaaacuggugccaggcuucgguaaggcuuacacaaucuucaacaagacccucauggaggccgaugcgcauuauaaaucuguuaggacguggaaugaaauaauucccuccaaggggugccuucgggugggaggccguugucacccgcacgucaacggcguguuuuucaaugggaucauucugggaccugacggucauguauugauccccgagaugcagucaagucuacugcagcaacacauggaacuccuggagagcuccguuaucccacuuaugcauccucuggcagaucccucuaccguguuuaaagacggcgaugaaggggaggacuucgucgaggugcacuugccagauguccauaaacaggugagcggaguugaccucggccugcccaacugggguaaguacguguuacugucagccgggacacuaauugcucucaugcugauaaucuuucuuaugacuugcugucgcagaguaaacaggccuaagaguaccgaacgguccuugggcgagacaggacgagaagucagcgugacuucucagucaggcaagauuaucaguagcugggaguccuauaaaucugggggagaaacccgcagauga

SEQ ID NO: 160039 - RNA, 1575 nt, Artificial Sequence
  derived and/or modified CDS sequence (opt3) from glycoprotein__RABV__S72465.1
auggugccccaggcccugcuccuugucccuauccugggcuucagcuccugcuuugggaaguucccaauuuacaccauaccggacacauugggacccuggucuccuaucgauauucaccauuuaucauguccaaacaaucugguuguggaggacgaagguugcacuaaccuaaguggcuuuagcuauauggagcucaaaguagggcacaucuccgcuauuaaggugaauggauucacguguaccggcgucgugacagaagcagagacuuacaccaacuuuguugguuaugugacaaccacuuucaaaagaaagcauuuuaggcccacaccugaugccugccgggcggcuuacaauuggaaaauggccggggacccacgcuaugaagagucucugcacucgcccuacccugauuaucauuggcuucgaaccgucaagacgacuaaggagucacuggugaucauaagcccaaguguagcagacuuggauccguacgacaacucccuccacucucguguuuuccccagcggaaaauguuccggcaucaccgugucaagugucuacugcagcacaaaucacgauuauacuguguggaugccugaaucucugagacugggcaccuccugugacauuuuuacaaacucaagggggaagcgggugagcaaaggaaguaagaccugcgguuucgucgaugagcgcggccucuacaaaucuuuaaagggggccuguaagcugaaacuuugcggaguuagaggcuugaggcugauggacgguacguggguggcuaugcaaacuuccaaugaaacaaagugguguccacccgaucagcuaguaaaccuccaugaccugcggagcgacgagaucgagcaccuugugauugaggaacuggucaaaaagcgcgaagagugcuuggaugcacucgaaucgaucauaaccacuaaaucuguguccuuucgaagacugucauauuuaaggaagcugguuccuggguucggaaaagccuacacaauuuuuaauaagacccucauggaggcugaggcccauuauaagagugugcggacguggaacgaaaucauuccaagcaaaggcugccuucgugucggcgggcgcugucacccccacgugaauggaguauucuucaacgguaucauccugggcccggacgggcauguuuugauuccugagaugcaguccucucuacugcagcaacacauagaacuccuggagagcucagugaucccccuuaugcauccacuggcggauccuuuuaccgucuucaaggacggagaugaaacagaggacuuuauugaggugcacuugcccgauguccaugaacaggugaguggcguugaccucggucugccaaauuggggcgaguacguguuacuguccgcagggacucuaaucgcccucaugcugauaauuuuccuuaugaccugcuguagaaaaguagauaggcccgaaagcacacagcggucuuugcgaggaacuggccgcaacgucucagugaccagucagagcgggaaguuuaucccuuccugggagucuuauaaaucgggaggugaaacaggccuguga

SEQ ID NO: 160040 - RNA, 1575 nt, Artificial Sequence
  derived and/or modified CDS sequence (opt3) from glycoprotein__RABV__U03764.1
auggugccccaggcccuucucuucgucccucuucuggcuuuuccaaugugcuucggcaaguuuccgaucuacaccauucccgacaaauuggggccuuggagcccaauagauauccaccauuuauccugucccaacaaucugguuguggaggacgaaggaugcacaaaccuaucugguuucucauauauggagcucaagguaggcuacauuagugcaaucaaagugaauggguuuacuuguacgggagucgugaccgaagccgagacauauacuaacuucguuggcuacgugaccacaaccuuuaagagaaaacacuucaggccuacuccagaugcgugccgggcugccuauaauuggaagauggccggugacccccgcuacgaagagagccugcauaacccuuauccagauuaccacuggcuucgaacagucaagaccacgaaagagucccugauuaucauaucuccgucgguggcagacuuggaucccuacgacaagucacuccauagccguguauuuccuagugggaaaugucugggaaucacuauuuccucuaccuauugcagcacaaaucacgauuacacuaucuggaugccagaaaaccugagacucggcaccuccugugacauuuucacaaauucaaggggcaagcgggcuaguaaagggagcaagaccugcggauuuguugaugagcgcgguuuauauaagucucugaaaggcgcauguaagcugaaauugugcggggugcugggacuaagacucauggacggcacgugggucgccaugcaaacuuccgaugaaacaaaguggugucccccugaccagcuggugaaccuucacgacuucaggucagaugagaucgagcaucugguggucgaagaguugguuaaaaagcgggaagagugccucgacgcucuggaaagcauaaugaccacuaaaagugugucuuuucgccgauuaucccaccugagaaagcucguaccagguuucgggaaggccuacacaauuuucaauaaaacccuuauggaggcggaugcacauuauaagagcgugaggacguggaacgagaucauucccucgaaaggaugccugcgggucggcggccguugucacccgcacgugaaugggguuguguuuaacggaaucaucuuggguccugacggccauguccuaauucccgaaaugcagucuucccugcuccagcaacacauggagcugcuugaaucaagugugauaccacugaugcauccuuuggccgaucccagcaccguauucaaggacggggaugaggcugaagacuuuguugaggugcaccucccagauguccauaaacagaucuccggaguggaccugggcuuacccaauugggguaaguacguccugauuaucgccggggugcuaauagcaaugauucucacaaucuuccugaugacuugcuguggccgcggaaacagaccuaagucuacccagcacagccuuggcgggaucggaaggaaaguuucagcuacaagucaguccgguaaggugauuagcucuugggagucauauaaaaguggcggggaaacucgguuguga

SEQ ID NO: 160041 - RNA, 1575 nt, Artificial Sequence
  derived and/or modified CDS sequence (opt3) from glycoprotein__RABV__U03765.1
auggugccccaggcccuccuguucgucccucuucuggcuuuuccaaugugcuucggcaaguuuccgaucuacaccauucccgacaaauuggggccuuggagcccaauagauauccaccauuuauccugucccaacaaucugguuguggaggacgaaggaugcacaaaccuaucugguuucucauauauggagcucaagguaggcuacauuagugcaaucaaagugaauggguuuacuuguacgggagucgugaccgaagccgagacauauacuaacuucguuggcuacgugaccacaaccuuuaagagaaaacacuucaggccuacuccagaugcgugccgggcugccuauaauuggaagauggccggugacccccgcuacgaagagagccugcauaacccuuauccagauuaccacuggcuucgaacagucaagaccacgaaagagucccugauuaucauaucuccgucgguggcagacuuggaucccuacgacaagucacuccauagccguguauuuccuagugggaaaugucugggaaucacuauuuccucuaccuauugcagcacaaaucacgauuacacuaucuggaugccagaaaacguuagacugggcaccuccugugacauuuucacaaauucaaggggcaagcgggcuaguaaagggagcaagaccugcggauuuguggaugagcgcggucucuauaagucuuuaaaaggcgcauguaagcugaaacuuugcggggucuugggacugagacuaauggacggcacguggguggccaugcccacuuccgaugaaacaaagugguguccuccagaccaacucgugaaccugcacgacuucaggucagaugagaucgagcaucuugucguugaggaacuggugcggaaacgcgaagagugcuuggacgcucucgaaagcauaaugaccacuaagaguguaucuuuucgaagacugucccacuuaaggaaacuggugcccgguuucgggaaggccuacacaauuuucaauaagacccucauggaggcggaugcacauuauaaaagcguccggacguggaacgagaucauuccgucgaagggaugccuucgugugggcggccgcugucacccucacguuaaugggguggucuuuaacggaaucauccugggucccgacggccauguguugauuccagaaaugcagucuucccuacugcagcagcacauggagcuccuggaaucaaguguaauaccucuuaugcauccccuggccgauccaagcaccguuuucaaagacggggaugaggcugaagacuuuguggagguccacuugcccgaugugcauaagcaaaucuccggagucgaccucggccugccuaauugggguaaauacguguuaacaauugccgggguucugaucgcaaugauacuaacuauuuuccucaugaccugcuguggcagaggaaacaggccaaagucuacacagcacagccugggcgggaucggacggaaggugucaaguacuucccagagcgguaaaguaaucucuucaugggagaguuauaagagcggcggggaaacccgacuuuga

SEQ ID NO: 160042 - RNA, 1575 nt, Artificial Sequence
  derived and/or modified CDS sequence (opt3) from glycoprotein__RABV__U03766.1
auggugccccaggcccuccuguucgucccucuucuggcuuuuccaaugugcuucggcaaguuuccgaucuacaccauucccgacaaauuggggccuuggagcccaauagauauccaccauuuauccugucccaacaaucugguuguggaggacgaaggaugcacaaaccuaucugguuucucauauauggagcucaagguaggcuacauuagugcaaucaaagugaauggguuuacuuguacgggagucgugaccgaagccgagacauauacuaacuucguuggcuacgugaccacaaccuuuaagagaaaacacuucaggccuacuccagaugcgugccgggcugccuauaauuggaagauggccggugacccccgcuacgaagagagccugcauaacccuuauccagauuaccacuggcuucgaacagucaagaccacgaaagagucccugauuaucauaucuccgucgguggcagacuuggaucccuacgacaagucacuccauagccguguauuuccuagugggaaaugucugggaaucacuauuuccucuaccuauugcagcacaaaucacgauuacacuaucuggaugccagaaaacguuagacugggcaccuccugugacauuuucacaaauucaaggggcaagcgggcuaguaaagggagcaagaccugcggauuuguggaugagcgcggucucuauaagucuuuaaaaggcgcauguaagcugaaacuuugcggggucuugggacugagacuaauggacggcacguggguggccaugcccacuuccgaugaaacaaagugguguccuccagaccaacucgugaaccugcacgacuucaggucagaugagaucgagcaucuugucguugaggaacuggugcggaaacgcgaagagugcuuggacgcucucgaaagcauaaugaccacuaagaguguaucuuuucgaagacugucccacuuaaggaaacuggugcccgguuucgggaaggccuacacaauuuucaauaagacccucauggaggcggaugcacauuauaaaagcguccggacguggaacgagaucauuccgucgaagggaugccuucgugugggcggccgcugucacccucacguuaaugggguggucuuuaacggaaucauccugggucccgacggccauguguugauuccagaaaugcagucuucccuacugcagcagcacauggagcuccuggaaucaaguguaauaccucuuaugcauccccuggccgauccaagcaccguuuucaaagacggggaugaggcugaagacuuuguggagguccacuugcccgaugugcauaagcaaaucuccggagucgaccucggccugccuaauugggguaaauacguguuaauuaucgccgggguucugauagcaaugauucuaacaaucuuccucaugacuugcuguggcagaggaaacaggccaaagucuacccagcacagccugggcgggaucggacggaaggugucaaguacaucccagagcgguaaaguaauuucuucaugggagaguuauaagagcggcggggaaacucgacuuuga

SEQ ID NO: 160043 - RNA, 1575 nt, Artificial Sequence
  derived and/or modified CDS sequence (opt3) from glycoprotein__RABV__U03767.1
auggugccccaggcccugcuguucgucccucuucuggcuuuuccaaugugcuucggcaaguuuccgaucuacaccauucccgacaaauuggggccuuggagcccaauagauauccaccauuuauccugucccaacaaucugguuguggaggacgaaggaugcacaaaccuaucugguuucucauauauggagcucaagguaggcuacauuagugcaaucaaagugaauggguuuacuuguacgggagucgugaccgaagccgagacauauacuaacuucguuggcuacgugaccacaaccuuuaagagaaaacacuucaggccuacuccagaugcgugccgggcugccuauaauuggaagauggccggugacccccgcuacgaagagagccugcauaacccuuauccagauuaccacuggcuucgaacagucaagaccacgaaagagucccugauuaucauaucuccgucgguggcagacuuggaucccuacgacaagucacuccauagccguguauuuccuagugggaaaugucugggaaucacuauuuccucuaccuauugcagcacaaaucacgauuacacuaucuggaugccagacaacguuagacugggcaccuccugugauauuuucacaaauucaaggggcaagcgggcuaguaaagggagcaagaccugcggauuuguggacgaacgcggucucuauaagucuuuaaaaggcgcauguaagcugaaacuuugcggggucuugggacugagacuaauggauggcacguggguggccaugcccacuuccgacgagacaaagugguguccuccaggucaacucgugaaccugcacgacuucaggucagaugaaaucgagcaucuugucguugaggaacuggugcggaaacgcgaggaaugcuuggacgcucucgagagcauaaugaccacuaagaguguaucuuuucgaagacugucccacuuaaggaaacuggugcccggguucggaaaggccuacacaauuuucaauaagacccucauggaagcggaugcacauuauaaaagcguccggacguggaacgagaucauuccgucgaagggcugccuucgugugggcgggcgcugucacccucacguuaauggaguggucuuuaacgguaucauccugggccccgacgggcauguguugauuccagagaugcagucuucccuacugcagcagcacauggaacuccuggagucaaguguaauaccucuuaugcauccccuggccgauccaagcaccguuuucaaagacggagaugaagcugaggacuuuguggaaguccacuugcccgaugugcauaagcaaaucuccggcgucgaccucggucugccuaauugggggaaauacguguuaauuaucgccggcguucugauagcaaugauucuaacaaucuuccucaugacuugcuguggaagaggcaacaggccaaagucuacccagcacagccucgggggaaucggucggaaggugucaaguacaucccagagcggcaaaguaauuucuucaugggagaguuauaagagcgggggagagacucgacuuuga

SEQ ID NO: 160044 - RNA, 1575 nt, Artificial Sequence
  derived and/or modified CDS sequence (opt3) from glycoprotein__RABV__U11736.2
auggugccccaggcccugcuccuugucccucuguuggcuuucccaaugugcuuuggcaaguucccgaucuacaccauucccgacaaauuagggccuuggagcccaauagauauccaccaucuguccugucccaacaaucuaguuguggaggacgaaggaugcacaaaccucucugguuuuucauauauggagcugaagguaggcuacauuagugcaaucaaagugaauggguucacuuguacgggagucgugaccgaagccgagacauauacuaacuuuguuggcuacgugaccacaaccuucaagagaaaacacuuuaggccuacuccagaugcgugccgggcugccuauaauuggaagauggccggugacccccgcuacgaagagagccuucauaacccuuauccagauuaccacuggcugcgaacagucaagaccaugaaagaguccuugauuaucauaucuccgucgguggcagaccucgaucccuacgacaagucacugcauagccguguauucccuagugggaaaugucugggaaucacgauuuccucuacuuauugcagcaccaaucacgauuacacaaucuggaugccagaaaaccucagauuaggcacuuccugugacauuuuuaccaauucaaggggcaagcgggcuaguaaagggagcaagacaugcggauucguugaugagcgcggucuguauaagucucuuaaaggcgcauguaaguugaaacugugcggggugcuaggacucagacugauggacggcaccugggucgccaugcaaacguccgaugaaacuaaguggugucccccugaccagcuugugaaccugcacgacuuuaggucagaugagaucgagcauuugguggucgaggaacucguuaaaaagcgggaagagugccuggacgcuuuagaaagcauaaugacaaccaaaagugugucuuuccgccgacugucccaccucagaaagcugguaccagguuuugggaaggccuacacuauuuucaauaaaacacugauggaggcggaugcacauuauaagagcgugaggaccuggaacgagaucauucccucgaaaggaugcuugcgggucggcggccguugucacccgcacgugaaugggguuguguucaacggaaucauccuagguccugacggccauguccugauucccgaaaugcagucuucccuccugcagcaacacauggagcuucuggaaucaagugugauaccauugaugcauccucucgccgaucccagcacgguauuuaaggacggggaugaggcugaagacuucguugaggugcaccuuccagauguccauaaacagaucuccggaguggacuuaggccugcccaauugggguaaguacguccuaauuaucgccggggugcucauagcaaugauucugaccaucuuucuuaugacaugcuguggccgcggaaacagaucuaagagcacucagcacucauugggcgggaucggaaggaaaguuagugcuaccucccagagcgguaaggugauuucuucaugggagaguuauaaaagcggcuccgaaacacggcuguga

SEQ ID NO: 160045 - RNA, 1575 nt, Artificial Sequence
  derived and/or modified CDS sequence (opt3) from glycoprotein__RABV__U11743.2
auggugccccaggcccuucucuucgucccucuucuggcuuuuccaaugugcuucggcaaguuuccgaucuacaccauucccgacaaauuggggccuuggagcccaauagauauccaccauuuauccugucccaacaaucugguuguggaggacgaaggaugcacaaaccuaucugguuucucauauauggagcucaagguaggcuacauuagugcaaucaaagugaauggguuuacuuguacgggagucgugaccgaagccgagacauauacuaacuucguuggcuacgugaccacaaccuuuaagagaaaacacuucaggccuacuccagaugcgugccgggcugccuauaauuggaagauggccggugacccccgcuacgaagagagccugcauaacccuuauccagauuaccacuggcuucgaacagucaagaccacgaaagagucccugauuaucauaucuccgucgguggcagacuuggaucccuacgacaagucacuccauagccguguauuuccuagugggaaaugucugggaaucacuauuuccucuaccuauugcagcacaaaucacgauuacacuaucuggaugccagaaaaccugagacucggcaccuccugugacauuuucacaaauucaaggggcaagcgggcuaguaaagggagcaagaccugcggauuuguugaugagcgcgguuuauauaagucucugaaaggcgcauguaagcugaaauugugcggggugcugggacuaagacucauggacggcacgugggucgccaugcaaacuuccgaugaaacaaaguggugucccccugaccagcuggugaaccuucacgacuucaggucagaugagaucgagcaucugguggucgaagaguugguuaaaaagcgggaagagugccucgacgcucuggaaagcauaaugaccacuaaaagugugucuuuucgccgauuaucccaccugagaaagcucguaccagguuucgggaaggccuacacaauuuucaauaaaacccuuauggaggcggaugcacauuauaagagcgugaggacguggaacgagaucauucccucgaaaggaugccugcgggucggcggccguugucacccgcacgugaaugggguuguguuuaacggaaucaucuuggguccugacggccauguccuaauucccgaaaugcagucuucccugcuccagcaacacauggagcugcuugaaucaagugugauaccacugaugcauccuuuggccgaucccagcaccguauucaaggacggggaugaggcugaagacuuuguugaggugcaccucccagauguccauaaacagaucuccggaguggaccugggcuuacccaauugggguaaguacguccugauuaucgccggggugcuaauagcaaugauucucacaaucuuccugaugacuugcuguggccgcggaaacagaccuaagucuacccagcacagccuuggcgggaucggaaggaaaguuucagcuacaagucagucccggaaggugauuagcucuugggagucauauaaaagugguggcgaaacucgauuguga

SEQ ID NO: 160046 - RNA, 1575 nt, Artificial Sequence; identical to SEQ ID NO: 160045
  derived and/or modified CDS sequence (opt3) from glycoprotein__RABV__U11747.2

SEQ ID NO: 160047 - RNA, 1575 nt, Artificial Sequence; identical to SEQ ID NO: 160040
  derived and/or modified CDS sequence (opt3) from glycoprotein__RABV__U11748.2

SEQ ID NO: 160048 - RNA, 1575 nt, Artificial Sequence
  derived and/or modified CDS sequence (opt3) from glycoprotein__RABV__U11750.2
auggugccccaggcccuucucuucgucccucuucuggcuuuuccaaugugcuucggcaaguuuccgaucuacaccauucccgacaaauuggggccuuggagcccaauagauauccaccauuuauccugucccaacaaucugguuguggaggacgaaggaugcacaaaccuaucugguuucucauauauggagcucaagguaggcuacauuagugcaaucaaagugaauggguuuacuuguacgggagucgugaccgaagccgagacauauacuaacuucguuggcuacgugaccacaaccuuuaagagaaaacacuucaggccuacuccagaugcgugccgggcugccuauaauuggaagauggccggugacccccgcuacgaagagagccugcauaacccuuauccagauuaccacuggcuucgaacagucaagaccacgaaagagucccugauuaucauaucuccgucgguggcagacuuggaucccuacgacaagucacuccauagccguguauuuccuagugggaaaugucugggaaucacuauuuccucuaccuauugcagcacaaaucacgauuacacuaucuggaugccagaaaaccugagacucggcaccuccugugacauuuucacaaauucaaggggcaagcgggcuaguaaagggagcaagaccugcggauuuguugaugagcgcgguuuauauaagucucugaaaggcgcauguaagcugaaauugugcggggugcugggacuaagacucauggacggcacgugggucgccaugcaaacuuccgaagagacaaaguggugucccccugaucagcuggugaaccuucacgacuucaggucagacgagaucgaacaucugguggucgaggaauugguuaaaaagcgggaggaaugccucgaugcucuggagagcauaaugaccacuaaaagugugucuuuucgccgauuaucccaccugagaaagcucguaccagguuucgggaaggccuacacaauuuucaauaaaacccuuauggaggcggacgcacauuauaagagcgugaggacguggaacgaaaucauucccucgaaaggaugccugcgggucggcggccguugucacccgcacgugaaugggguuguguuuaacggaaucaucuuggguccugauggccgcguccuaauucccgagaugcagucuucccugcuccagcaacauauggaacugcuugagucaagugugauaccacugaugcacccuuuggccgaccccagcaccguauucaaggauggggacgaagcugaggauuuuguugaggugcaucucccagacguccacaaacagaucuccggaguggaucugggcuuacccaauugggguaaguacguccugauuaucgccggggugcuaauagcaacaauucucacuaucuuccugauggcuugcuguggcagaggaaacaggccuaagucuacccagcauagccuuggcgggaucggacggaaaguuucagccacaagucaguccgguaaggugauuagcucuugggaaucauauaaaaguggcggggagacucgauuguga

SEQ ID NO: 160049 - RNA, 1575 nt, Artificial Sequence
  derived and/or modified CDS sequence (opt3) from glycoprotein__RABV__U11752.2
auggugccccaggcccuucucuucgucccucuucuggcuuuuccaaugugcuucggcaaguuuccgaucuacaccauucccgacaaauuggggccuuggagcccaauagauauccaccauuuauccugucccaacaaucugguuguggaggacgaaggaugcacaaaccuaucugguuucucauauauggagcucaagguaggcuacauuagugcaaucaaagugaauggguuuacuuguacgggagucgugaccgaagccgagacauauacuaacuucguuggcuacgugaccacaaccuuuaagagaaaacacuucaggccuacuccagaugcgugccgggcugccuauaauuggaagauggccggugacccccgcuacgaagagagccugcauaacccuuauccagauuaccacuggcuucgaacagucaagaccacgaaagagucccugauuaucauaucuccgucgguggcagacuuggaucccuacgacaagucacuccauagccguguauuuccuagugggaaaugucugggaaucacuauuuccucuaccuauugcagcacaaaucacgauuacacuaucuggaugccagaaaaccugagacucggcaccuccugugacauuuucacaaauucaaggggcaagcgggcuaguaaagggagcaagaccugcggauuuguugaugagcgcgguuuauauaagucucugaaaggcgcauguaagcugaaauugugcggggugcugggacuaagacucauggacggcacgugggucgccaugcaaacuuccgaugaaacaaaguggugucccccugaccagcuggugaaccuucacgacuucaggucagaugagaucgagcaucugguggucgaagaguugguuaaaaagcgggaagagugccucgacgcucuggaaagcauaaugaccacuaaaagugugucuuuucgccgauuaucccaccugagaaagcucguaccagguuucgggaaggccuacacaauuuucaauaaaacccuuauggaggcggaugcacauuauaagagcgugaggacguggaacgagaucauucccucgaaaggaugccugcgggucggcggccguugucacccgcacgugaaugggguuguguuuaacggaaucaucuuggguccugacggccauguccuaauucccgaaaugcagucuucccugcuccagcaacacauggagcugcuugaaucaagugugauaccacugaugcauccuuuggccgaucccagcaccguauucaaggacggggaugaggcugaagacuuuguugaggugcaccucccagauguccauaaacagaucuccggaguggaccugggcuuacccaauugggguaaguacguccugauuaucgccggggugcuaauaguuaugauucucacaaucuuccugaugacuugcuguggccgcggaaacagaccuaagucuacccagcacagccuuggcgggaucggaaggaaagugucagcaacaagucaguccgguaagguaauuagcucuugggagucauauaaaaguggcggggaaacucgguuguga

SEQ ID NO: 160050 - RNA, 1575 nt, Artificial Sequence
  derived and/or modified CDS sequence (opt3) from glycoprotein__RABV__U11753.1
auggugccccaggcccuucucuucgucccucuucuggcuuuuccaaugugcuucggcaaguuuccgaucuacaccauucccgacaaauuggggccuuggagcccaauagauauccaccauuuauccugucccaacaaucugguuguggaggacgaaggaugcacaaaccuaucugguuucucauauauggagcucaagguaggcuacauuagugcaaucaaagugaauggguuuacuuguacgggagucgugaccgaagccgagacauauacuaacuucguuggcuacgugaccacaaccuuuaagagaaaacacuucaggccuacuccagaugcgugccgggcugccuauaauuggaagauggccggugacccccgcuacgaagagagccugcauaacccuuauccagauuaccacuggcuucgaacagucaagaccacgaaagagucccugauuaucauaucuccgucgguggcagacuuggaucccuacgacaagucacuccauagccguguauuuccuagugggaaaugucugggaaucacuauuuccucuaccuauugcagcacaaaucacgauuacacuaucuggaugccagaaaaccugagacucggcaccuccugugacauuuucacaaauucaaggggcaagcgggcuaguaaagggagcaagaccugcggauuuguugaugagcgcgguuuauauaagucucugaaaggcgcauguaagcugaaauugugcggggugcugggacuaagacucauggacggcacgugggucgccaugcaaacuuccgaugaaacaaaguggugucccccugaccagcuggugaaccuucacgacuucaggucagaugagaucgagcaucugguggucgaagaguugguuaaaaagcgggaagagugccucgacgcucuggaaagcauaaugaccacuaaaagugugucuuuucgccgauuaucccaccugagaaagcucguaccagguuucgggaaggccuacacaauuuucaauaaaacccuuauggaggcggaugcacauuauaagagcgugaggacguggaacgagaucauucccucgaaaggaugccugcgggucggcggcaagugucacccgcacgugaaugggguguuuuucaacggaaucaucuuggguccugacggccauguucuaauucccgaaaugcagucuucccugcuccagcaacacauggagcugcuugaaucaagugucauaccacugaugcauccuuuggccgaucccagcaccguguuuaaagacggggaugaggcugaagacuucguagagguucaccucccagaugugcauaagcagaucuccggagucgaccugggcuuacccaauugggguaaguacgugcugauuaucgccgggguccuaauagcaaugauucucacaaucuuucugaugacuugcuguggccguggaaaccgcccuaaaucuacccagcacagccuuggcgggaucggaagaaaggugucagcuacaagucaguccgguaaaguuauuagcucuugggagucauauaagaguggcggggaaacuagguuguga

SEQ ID NO: 160051 - RNA, 1575 nt, Artificial Sequence
  derived and/or modified CDS sequence (opt3) from glycoprotein__RABV__U11754.1
auggugccccaggcccuucucuucgucccucuucuggcuuuuccaaugugcuucggcaaguuuccgaucuacaccauucccgacaaauuggggccuuggagcccaauagauauccaccauuuauccugucccaacaaucugguuguggaggacgaaggaugcacaaaccuaucugguuucucauaucucgagcugaagguaggcuacauuagugcaaucaaagugaauggguuuacuuguacgggagucgugaccgaagccgagacauauacuaacuucguuggcuacgugaccacaaccuuuaagagaaaacacuucaggccuacuccagaugcgugccgggcugccuauaauuggaagauggccggugacccccgcuacgaagagagccuucauaacccuuauccagauuaccacuggcugcgaacagucaagaccacgaaagaguccccgauuaucauaucucccucgguggcagacuuggauccuuacgacaagucacuccauagccguguauuuccaagugggaaaugucugggaaucacuauuuccucuaccuauugcagcacaaaucacgauuacacuaucuggaugcccgaaaaccugagacucggcaccuccugugacauuuucacaaauucaaggggcaagcgggcuaguaaagggagcaaggcaugcggauuuguugaugagcgcgguuuauauaagucucugaaaggcgccuguaagcugaaauugugcggggugcugggacuaagacucauggacggcaccugggucgcuaugcaaacguccgaugaaacuaagugguguccuccagaccagcuggugaaccuucacgacuucaggucagaugagaucgagcaucugguggucgaagaguugguuaaaaagcgggaagagugccucgacgcccuggaaagcauaaugacaaccaaaagugugucuuuucgccgauuaucccaccugagaaagcucguacccgguuucgggaaggcguacacuauuuucaauaaaacacuuauggaggcagaugcccauuauaagagcgugaggaccuggaacgagaucauuccgucgaaaggaugccugcgggucggcggccguugucacccucacgugaaugggguguuuuucaacggaaucaucuugggucccgacggccauguucuaauuccagaaaugcagucuucccugcuccagcaacacauggagcugcuugaaucaagugucauaccucugaugcaucccuuggcugauccaagcacgguguuuaaggacggggaugaggccgaagacuucguagagguucaccuccccgaugugcauaaacagaucuccggagucgaccugggcuuaccuaauugggguaaguacgugcugauuaucgcagggguccuaauagcuaugcuccugaccguguuucuuaugacaugcuguggcaagggaaaccgcccaaaaucuauucagcacagcuugggcgggaucggaagaaagguuucagccaccagucaguccgguaaagugaucagcucuugggagucauauaagaguggcggggaaacuaggcuguga

SEQ ID NO: 160052 - RNA, 1575 nt, Artificial Sequence
  derived and/or modified CDS sequence (opt3) from glycoprotein__RABV__U11755.1
auggugccccaggcccugcuccuugucccucuguuggcuuucccaaugugcuuuggcaaguucccgaucuacaccauucccgacaaauuagggccuuggagcccaauagauauccaccaucuguccugucccaacaaucuaguuguggaggacgaaggaugcacaaaccucucugguuuuucauauauggagcugaagguaggcuacauuagugcaaucaaagugaauggguucacuuguacgggagucgugaccgaagccgagacauauacuaacuuuguuggcuacgugaccacaaccuucaagagaaaacacuuuaggccuacuccagaugcgugccgggcugccuauaauuggaagauggccggugacccccgcuacgaagagagccuucauaacccuuauccagauuaccacuggcugcgaacagucaagaccacgaaagaguccuugauuaucauaucuccgucgguggcagaccucgaucccuacgacaagucacugcauagccguguauucccuagugggaaaugucugggaaucacuauuuccucuaccuauugcagcacaaaucacgauuacacuaucuggaugccagaaaaccucagauuaggcaccuccugugacauuuuuacaaauucaaggggcaagcgggcuaguaaagggagcaagaccugcggauucguugaugagcgcggucuguauaagucucuuaaaggcgcauguaaguugaaacugugcggggugcuaggacucagacugauggacggcacgugggucgccaugcaaacuuccgaugaaacaaaguggugucccccugaccagcuugugaaccugcacgacuuuaggucagaugagaucgagcauuugguggucgaggaacucguuaaaaagcgggaagagugccuggacgcuuuagaaagcauaaugaccacuaaaagugugucuuuccgccgacugucccaccucagaaagcugguaccagguuuugggaaggccuacacaauuuucaauaaaacccugauggaggcggaugcacauuauaagagcgugaggacguggaacgagaucauucccucgaaaggaugcuugcgggucggcggccguugucacccgcacgugaaugggguuguguucaacggaaucauccuagguccugacggccauguccugauucccgaaaugcagucuucccuccugcagcaacacauggagcuucuggaaucaagugugauaccauugaugcauccucucgccgaucccagcaccguauuuaaggacggggaugaggcugaagacuucguugaggugcaccuuccagauguccauaaacagaucuccggaguggacuuaggccugcccaauugggguaaguacguccuaauuaucgccggggugcucauagcaaugauucugacaaucuuucuuaugacuugcuguggccgcggaaacagaccuaagucuacccagcacagcuugggcgggaucggaaggaaaguuucagcuacaagucaguccgguaaggugauuagcucuugggagucauauaaaaguggcagcgaaacucggcuguga

SEQ ID NO: 160053 - RNA, 1575 nt, Artificial Sequence
  derived and/or modified CDS sequence (opt3) from glycoprotein__RABV__U11756.1
auggugccccaggcccuucucuucgucccucuucuggcuuuuccaaugugcuucggcaaguuuccgaucuacaccauucccgacaaauuggggccuuggagcccaauagauauccaccauuuauccugucccaacaaucugguuguggaggacgaaggaugcacaaaccuaucugguuucucauauauggagcucaagguaggcuacauuagugcaaucaaagugaauggguuuacuuguacgggagucgugaccgaagccgagacauauacuaacuucguuggcuacgugaccacaaccuuuaagagaaaacacuucaggccuacuccagaugcgugccgggucgcuuauaauuggaagauggccggugacccccgcuacgaagagagccugcauaacccuuauccagauuaccacuggcuucgaacagugaagaccacgaaagagucccugauuaucauaucuccgucgguagcagacuuggaucccuacgacaagucacuccauagccguguuuuuccuagugggaaaugucugggaaucacuauuuccucuaccuauugcagcacaaaucacgauuacacuaucuggaugccagaaaaccugagacucggcaccuccugugacauuuucacaaauucaaggggcaagcgggccaguaaagggagcaagaccugcggauuuguggaugagcgcgguuuauauaagucucugaaaggcgcuuguaagcugaaauugugcgggguccugggacuaagacucauggacggcacguggguggcaaugcaaacuuccgaugaaacaaaguggugucccccugaccagcuggugaaccuucacgacuucaggucagaugagaucgagcaucuggucguugaagaguuggugaaaaagcgggaagagugccucgacgcccuggaaagcauaaugaccacuaaaaguguaucuuuucgccgauuaucccaccugagaaagcucgugccagguuucgggaaggcuuacacaauuuucaauaaaacccuuauggaggccgaugcgcauuauaagagcgucaggacguggaacgagaucauucccucgaaaggaugccugcgggugggcggcaagugucacccgcacguuaaugggguggucuuuaacggaaucaucuuggguccugacggccaugugcuaauucccgaaaugcagucuucccugcuccagcaacacauggagcugcuugaaucaaguguaauaccacugaugcauccuuuggcagaucccagcaccguuuucaaagacggggaugaggccgaagacuuuguggagguccaccucccagaugugcauaagcagaucuccggagucgaccugggcuuacccaauugggguaaguacgugcugauuaucgcugggguucuaauagccaugauucucacaaucuuccugaugacuugcuguggccguggaaaccgcccuaaaucuacccagcacagccuuggcgggaucggaagaaaggugucagcaacaagucaguccgguaaaguaauuagcucuugggagucauauaagaguggcggggaaacuagguuguga

SEQ ID NO: 160054 - RNA, 1575 nt, Artificial Sequence
  derived and/or modified CDS sequence (opt3) from glycoprotein__RABV__U11757.1
auggugccccaggcccuucucuucgucccucuucuggcuuuuccaaugugcuucggcaaguuuccgaucuacaccauucccgacaaauuggggccuuggagcccaauagauauccaccauuuauccugucccaacaaucugguuguggaggacgaaggaugcacaaaccuaucugguuucucauauauggagcucaagguaggcuacauuagugcaaucaaagugaauggguuuacuuguacgggagucgugaccgaagccgagacauauacuaacuucguuggcuacgugaccacaaccuuuaagagaaaacacuucaggccuacuccagaugcgugccgggcugccuauaauuggaagauggccggugacccccgcuacgaagagagccugcauaacccuuauccagauuaccacuggcuucgaacagucaagaccacgaaagagucccugauuaucauaucuccgucgguggcagacuuggaucccuacgacaagucacuccauagccguguauuuccuagugggaaaugucugggaaucacuauuuccucuaccuauugcagcacaaaucacgauuacacuaucuggaugccagaaaaccugagacucggcaccuccugugacauuuucacaaauucaaggggcaagcgggcuaguaaagggagcaagaccugcggauuuguugaugagcgcgguuuauauaagucucugaaaggcgcauguaagcugaaauugugcggggugcugggacuaagacucauggacggcacgugggucgccaugcaaacuuccgaugaaacaaaguggugucccccugaccagcuggugaaccuucacgacuucaggucagaugagaucgagcaucugguggucgaagaguugguuaaaaagcgggaagagugccucgacgcucuggaaagcauaaugaccacuaaaagugugucuuuucgccgauuaucccaccugagaaagcucguaccagguuucgggaaggccuacacaauuuucaauaaaacccuuauggaggcggaugcacauuauaagagcgugaggacguggaacgagaucauucccucgaaaggaugccugcgggucggcggccguugucacccgcacgugaaugggguuguguuuaacggaaucaucuuggguccugacggccauguccuaauucccgaaaugcagucuucccugcuccagcaacacauggagcugcuugaaucaagugugauaccacugaugcauccuuuggccgaucccagcaccguauucaaggacggggaugaggcugaagacuuuguugaggugcaccucccagauguccauaaacagaucuccggaguggaccugggcuuacccaauugggguaaguacguccugauuaucgccggggugcuaauagcaaugauucucacaguuuuccugaugacuugcuguggccgcggaaacagaccuaagucuauccagcacagccuuggcgggaucggaaggaaagugucagcuaccagucaguccgguaagguaauuagcucuugggagucauauaaaaguggcggggaaacacgguuguga

SEQ ID NO: 160055 - RNA, 1575 nt, Artificial Sequence; identical to SEQ ID NO: 160040
  derived and/or modified CDS sequence (opt3) from glycoprotein__RABV__U11758.1

SEQ ID NO: 160056 - RNA, 1575 nt, Artificial Sequence
  derived and/or modified CDS sequence (opt3) from glycoprotein__RABV__U27214.1
auggugcccugggcccuccuguucgucccuuuucuuaucagcucccugugcuucggcaaguuuccaauuuacaccauaccggacaaauuggggcccuggucuccuaucgauauucaccauuuaucauguccaaacaaucugguuguggaggacgaaggaugcaacagucuaagcgguuucuccuauauggagcucaagguaggcuacaucucugcuauuaaagugaauggguuuacauguacuggagucgugacggaagcagagaccuauacaaacuucguuggcuacgugacuaccacauuuaagagaaaacacuucugccccaugccugaugccuguaggucggcguauaauuggaagauggcuggugacccacgguacgaagagucacugcauaaccccuauccugauuaccacuggcuucgcaccgucaagacuacaaaagagagccuggugaucauaaguccauccguagccgacuuggauccguacgacaagucucuccauagccgaaucuuucccgggggaaaaugcaccggccugacgguuuccucaacuuauuguaguaccaaucacgauuacacaauuuggaugccugaaaaggcaggccuggggacuagcugcgacaucuucaccaacucuaaaggaaagcgugccuccaaggguggcaaaacauguggguuuguggaugagagaggacucuauaagucauuaaaaggcgcuugcaagcugaaacuuuguggugucagcggguugaggcugauggacggaaccuggguggcaauucagacgcuagaugaaacuaaguggugcaguccagaccaacucgugaaucugcacgacuuccauucugaugagcuugagcaccuggucguugaagaguuggugcggaaacgcgaagagugccucgacgcccuggaauccaucaugacaaccaagagcguaucguuuagaagguuaucucaucugcggaagcucgugcccggcuucggcaaggcuuacacuauauucaacaaaacacuuauggaggccgaugcgcacuauaaauccguccgcaccuggucagagauuaucccuaguaaggggugucugcgagugggagguagaugccacccacauguuaauggcguguuuuucaacgggauuaucuugggacccgacggccacguccuaaucccggaaaugcagagcucccugcuccagcagcauguggagcugcuugaaucuagcguaauuccucugaugcaccccuuggcagauccaucagccguuuuuaaagacggugaugaggcugaagacuucguggagguccaucucccugaugugcacaagcaaauaaguggggucgaccugggcuuacccuccuggggaaaguacaugcugaugaucgccggcgcacuaacgacccucaugcuguuuauuuuccuuaugacauguugcaaaagggugaaucggacuaagagcauccgucaggggccacgcgagauagaaagaaaaguuucuuuuacaccccagaacaagaaagugguaucaaguugggagagcuauaaguccggaggugaaaccaaguuguga

SEQ ID NO: 160057 - RNA, 1575 nt, Artificial Sequence
  derived and/or modified CDS sequence (opt3) from glycoprotein__RABV__U27215.1
auggugcccugggcccugcucuuugucccuuuucuuaucagcucccugugcuucggcaaguuuccaauuuacaccauaccggacaaauuggggcccuggucuccuaucgauauucaccauuuaucauguccaaacaaucugguuguggaggacgaaggaugcaacagucuaagcgguuucuccuauauggagcucaagguaggcuacaucucugcuauuaaagugaauggguuuacauguacuggagucgugacggaagcagagaccuauacaaacuucguuggcuacgugacuaccacauuuaagagaaaacacuucugccccaugccugaugccuguaggucggcguauaauuggaagauggcuggugacccacgguacgaagagucacugcauaaccccuauccugauuaccacuggcuucgcaccgucaagacuacaaaagagagccugaucauaaucaguccauccguggccgacuuggauccguacgacaagucucuccauagccgaauuuuucccgggggaaaaugcaccggccugacgguauccucaacuuauuguaguaccaaucacgauuacacaaucuggaugccugaaaaggcaggccuggggacuagcugcgacauuuucaccaacucuaaaggaaagcgugccuccaaggguggcaaaacauguggguuuguugaugagagaggacucuauaagucauuaaaaggcgcuugcaagcugaaacuuuguggugugagcggguugaggcugauggacggaaccugggucgcaauccagacgcuagaugaaacuaaguggugcaguccagaccaacucgugaaucugcacgacuuccauucugaugagcuugagcaccugguggucgaagaguugguucggaaacgcgaagagugccucgacgcccuggaauccauaaugacaaccaagagcgugucguuuagaagguuaucucaucugcggaagcucguacccggcuucggcaaggcuuacacuauuuucaacaaaacacuuauggaggccgaugcgcacuauaaauccgugcgcaccuggucagagaucauuccuaguaaggggugucugcgagucggagguagaugccacccacaugugaauggcguuuucuucaacgggaucaucuugggacccgacggccacgugcuaauuccggaaaugcagagcucccugcuccagcagcaugucgagcugcuugaaucuagcgugauaccucugaugcaccccuuggcagauccaucagccguauuuaaagacggugaugaggcugaagacuucguugaggugcaucucccugauguccacaagcaaaucagugggguggaccugggcuuacccuccuggggaaaguacaugcugaugauugccggcgcacuaacgacccucaugcuguuuaucuuccuuaugacauguugcaaaagggucaaucggacuaagagcauacgucaggggccacgcgagauugaaagaaaagugucuuuuacaccccagaacaagaaaguugugucaaguugggagagcuauaaguccggaggugaaaccaaguuguga

SEQ ID NO: 160058 - RNA, 1575 nt, Artificial Sequence
  derived and/or modified CDS sequence (opt3) from glycoprotein__RABV__U27216.1
auggugcccugggcccuucucuucgucccuuuucuuaucagcucccugugcuucggcaaguuuccaauuuacaccauaccggacaaauuggggcccuggucuccuaucgauauucaccauuuaucauguccaaacaaucugguuguggaggacgaaggaugcaacagucuaagcgguuucuccuauauggagcucaagguaggcuacaucucugcuauuaaagugaauggguuuacauguacuggagucgugacggaagcagagaccuauacaaacuucguuggcuacgugacuaccacauuuaagagaaaacacuucugccccaugccugaugccuguaggucggcguauaauuggaagauggcuggugacccacgguacgaagagucacugcauaaccccuauccugauuaccacuggcuucgcaccgucaagacuacaaaagagagccugaucauaaucaguccauccguggccgacuuggauccguacgaccgaucucuccauagccguauuuuucccgggggaaagugcaccggccugacgguauccucaacuuauuguaguaccaaucacgauuacacaaucuggaugccugaaaaagcaggccuggggacuagcugcgacauuuucaccaacucuaagggaaaaagagccuccaaggguggcaagacauguggguuuguugaugagaggggacucuauaaaucauuaaagggcgcuugcaaacugaagcuguguggugugagcggguugcggcugauggacggaaccugggucgcaauccagacgcuagaugaaacuaaauggugcaguccagaccaacucgugaaucugcacgacuuccauucugaugagcuugagcaccugguggucgaagaguugguucgcaagagagaagagugccucgacgcccuggaauccauaaugacaaccaaaagcgugucguuuaggcgguuaucucaucugcgcaagcucguacccggcuucggcaaggcuuacacuauuuucaacaaaacacuuauggaggccgaugcgcacuauaaguccgugcgaaccuggucagagaucauuccuaguaaagggugucugagagucggagguaggugccacccacaugugaauggcguguuuuucaacgggaucaucuugggacccgacggccacguucuaauuccggaaaugcagagcucccugcuccagcagcaugucgagcugcuugaaucuagcgugauaccucugaugcaccccuuggcagauccaucagccguauuuaaggacggugaugaggcugaagacuucguugaggugcaucucccugauguccacaaacaaaucagugggguggaccugggcuuacccuccuggggaaaguacaugcugaugauugccggcgcacuaacgacccucaugcuguuuaucuuccuuaugacauguugcaagcgggucaaucguacugagagcauacgccaggggccaagagaauuggagucuaaagugucaguuacaccccagaacaagaaagugauuaguagcugggaauccuauaagucuggaggugagaccaaacuguga

SEQ ID NO: 160059 - RNA, 1575 nt, Artificial Sequence
  derived and/or modified CDS sequence (opt3) from glycoprotein__RABV__U27217.1
auggugcccugggcccugcucuuugucccuuuucuuaucagcucccugugcuucggcaaguuuccaauuuacaccauaccggacaaauuggggcccuggucuccuaucgauauucaccauuuaucauguccaaacaaucugguuguggaggacgaaggaugcaacagucuaagcgguuucuccuauauggagcucaagguaggcuacaucucugcuauuaaagugaauggguuuacauguacuggagucgugacggaagcagagaccuauacaaacuucguuggcuacgugacuaccacauuuaagagaaaacacuucugccccaugccugaugccuguaggucggcguauaauuggaagauggcuggugacccacgguacgaagagucacugcauaaccccuauccugauuaccacuggcuucgcaccgucaagacuacaaaagagagccugaucauaaucaguccauccguggccgaauuggacccguacgauaagucucuccauagccgaauuuuucccgggggaaaaugcaccggccugacgguauccucaacuuauuguaguaccaaucacgacuacacaaucuggaugccugagaaggcaggccuggggacuagcugcgauauuuucaccaacucuaaaggaaagcgugccuccaaggguggcaaaacauguggguuuguugacgaaagaggacucuauaagucauuaaaaggcgcuugcaagcugaaacuuuguggugugagcggguugaggcugauggauggaaccugggucgcaauccagacgcuagacgagacuaaguggugcaguccagaucaacucgugaaucugcacgacuuccauucugacgagcuugaacaccugguggucgaggaauugguucggaaacgcgaggaaugccucgaugcccuggaguccauaaugacaaccaagagcgugucguuuagaagguuaucucaucugcggaagcucguacccggcuucggcaaggcuuacacuauuuucaacaaaacacuuauggaggccgacgcgcacuauaaauccgugcgcaccuggucagaaaucauuccuaguaaggggugucugcgagucggagguagaugccacccacaugugaauggcguuuucuucaacgggaucaucuugggacccgauggccacgugcuaauuccggagaugcagagcucccugcuccagcagcaugucgaacugcuugagucuagcgugauaccucugaugcaccccuuggcagacccaucagccguauuuaaagauggugacgaagcugaggauuucguugaggugcaucucccugacguccacaagcaaaucagugggguggaucugggcuuacccuccuggggaaaguacaugcugaugauugccggcgcacuaacgacccucaugcuguuuaucuuccuuaugacauguugcaaaagggucaaucggacuaagagcauacgucaggggccacgcgaaauugagagaaaagugucuuuuacaccccagaacaagaaaguugugucaaguugggaaagcuauaaguccggaggugagaccaaguuguga

SEQ ID NO: 160060 - RNA, 1575 nt, Artificial Sequence
  derived and/or modified CDS sequence (opt3) from glycoprotein__RABV__X71879.1
auggugccccaggcccuucucuucgucccucuucugguuuuuccauugugcuucggcaaguuuccgaucuacaccauucccgacaaauuagggccuuggagcccaauagauauccaccaucuguccugucccaacaaucuagugguagaggacgaaggaugcacaaaccucucugguuucucauauauggagcugaaggugggcuacauucuugcuaucaaaaugaauggguuuacuuguacgggagucgugaccgaagcagagaacuauacaaauuucguuggcuacgugacuaccacauuuaagagaaaacaccugaggccuaccccagaugccugccgggcggcuuauaacuggaagauggccggugacccccgcuacgaagagaguuugcauaauccuuauccagauuacagcuggcuccgaacugucaagacaaccaaagagucccuggugauuaucucuccgucgguagcagaccuggaucccuacgaccguucacuccacagcagaguuuucccuagugggaaguguuccggaguggccgucucuagcacguauugcuccacuaaccaugauuacaccauauggaugccagaaaaucccagguuaggcaaaucaugugacaucuuuacaaacagucggggcaagcgcgcuagcaaagggucugagacuugcggauucguggaugaaagaggucuguauaagucccuuaagggcgcauguaaauugaagcugugcggggugcuaggacucaggcugauggacggcaccugggucgccaugcaaacaucaaaugagaccaaaugguguccuccagaucagcuuguuaaccugcacgacuuucggagcgacgagauugaacacuuggugguagaggaacucgugcgcaagcgagaggaaugccuggaugcuuuagagaguaucaugacgacuaaaucugucuccuucagaaggcugagccaucuccggaagcuggugcccgguuuugggaaagccuacacaauuuucaauaagacccugauggaggcggacgcacacuauaagucgguucguacuuggaacgaaaucuugccgucuaaaggaugccuacgcgugggcggcagaugucauccucacgucaaugggguguucuuuaacggaauaauucugggucccgauggcaacguacucaucccagagaugcaguccucacugcuucagcaacacauggaacuguuggagaguagcguuauuccucucgugcauccccuggccgacccauccacagucuucaaggauggggacgaagcugaggauuuuguggagguccacuuacccgacgugcauaaucagguuucuggaguggaucugggccuaccuaacugggguaaauacguacuccugagcgccggggcacuuaccgcuuugaugcugaucaucuuccucaugacgugcuguaggcgggucaaucgaucagaaccaacccagcacaaccugcgcggcacaggaagagaggugaguguuacuccgcagaccuggaagauuauauccagcugggaaucucauaaaucaggcggggagacaaggcuuuga

SEQ ID NO: 160061 - RNA, 1701 nt, Artificial Sequence
  derived and/or modified CDS sequence (opt4) from hemagglutinin__InfluenzaA__AAA16879
auggaggccaagcuguucgugcuguucugcaccuucaccgugcugaaggccgacaccaucugcgugggcuaccacgccaacaacagcaccgacaccguggacaccgugcuggagaagaacgugaccgugacccacagcgugaaccugcuggaggacagccacaacggcaagcugugcagccugaacggcaucgccccccugcagcugggcaagugcaacguggccggcuggcugcugggcaaccccgagugcgaccugcugcugaccgccaacagcuggagcuacaucaucgagaccagcaacagcgagaacggcaccugcuaccccggcgaguucaucgacuacgaggagcugagagagcagcugagcagcgugagcagcuucgagaaguucgagaucuuccccaaggccagcagcuggcccaaccacgagaccaccaagggcgugaccgccgccugcagcuacagcggcgccagcagcuucuacagaaaccugcuguggaucaccaagaagggcaccagcuaccccaagcugagcaagagcuacaccaacaacaagggcaaggaggugcuggugcuguggggcgugcaccacccccccaccaccagcgagcagcagagccuguaccagaacgccgacgccuacgugagcgugggcagcagcaaguacaacagaagauucacccccgagaucgccgccagacccaaggugagaggccaggccggcagaaugaacuacuacuggacccugcuggaccagggcgacaccaucaccuucgaggccaccggcaaccugaucgcccccugguacgccuucgcccugaacaagggcagcgacagcggcaucaucaccagcgacgcccccgugcacaacugcgacaccagaugccagaccccccacggcgcccugaacagcagccugcccuuccagaacgugcaccccaucaccaucggcgagugccccaaguacaucaagagcaccaagcugagaauggccaccggccugagaaacgugcccagcauccagagcagaggccuguucggcgccaucgccggcuucaucgagggcggcuggaccggcaugaucgacggcugguacggcuaccaccaccagaacgagcagggcagcggcuacgccgccgaccagaagagcacccagaacgccaucgacggcaucaccaacaaggugaacagcgugaucgagaagaugaacacccaguucaccgccgugggcaaggaguucaacaaccuggagagaagaaucgagaaccugaacaagaagguggacgacggcuuccuggacguguggaccuacaacgccgagcugcuggugcugcuggagaacgagagaacccuggacuuccacgacagcaacgugagaaaccuguacgagaaggugaagagccagcugagaaacaacgccaaggagcugggcaacggcugcuucgaguucuaccacaagugcgacgacgagugcauggagagagagaagaacggcaccuacgacuaccccaaguacagcgaggagagcaagcugaacagagaggagaucgacggcgugaagcuggagagcaugggcguguaccagauccuggccaucuacagcaccguggccagcagccuggugcugcuggugagccugggcgccaucagcuucuggaugugcagcaacggcagccugcagugcagaaucugcaucuga

SEQ ID NO: 160062 - RNA, 1701 nt, Artificial Sequence
  derived and/or modified CDS sequence (opt4) from hemagglutinin__InfluenzaA__AAA16880
auggaggccaagcuguucgugcuguucugcaccuucaccgugcugaaggccgacaccaucugcgugggcuaccacgccaacaacagcaccgacaccguggacaccgugcuggagaagaacgugaccgugacccacagcgugaaccugcuggaggacagccacaacggcaagcugugcagccugaacggcaucgccccccugcagcugggcaagugcaacguggccggcuggcugcugggcaaccccgagugcgaccugcugcugaccgccaacagcuggagcuacaucaucgagaccagcaacagcgagaacggcaccugcuaccccggcgaguucaucgacuacgaggagcugagagagcagcugagcagcgugagcagcuucgagaaguucgagaucuuccccaaggccagcagcuggcccaaccacgagaccaccaagggcgugaccgccgccugcagcuacagcggcgccagcagcuucuacagaaaccugcuguggaucaccaagaagggcaccagcuaccccacccugagcaagagcuacaccaacaacaagggcaaggaggugcuggugcuguggggcgugcaccacccccccaccgugaacgagcagcagagccuguaccagaacgccgacgccuacgugagcgugggcagcagcaaguacaacagaagauucacccccgagaucgccgccagacccaaggugagaggccaggccggcagaaugaacuaccacuggacccugcuggaccagggcgacaccaucaccuucgaggccaccggcaaccugaucgcccccugguacgccuucgcccugaacaagggcagcgacagcggcaucaucaccagcgacgcccccgugcacaacugcgacaccagaugccagaccccccacggcgcccugaacagcagccugcccuuccagaacgugcaccccaucaccaucggcgagugccccaaguacgugaagagcaccaagcugagaauggccaccggccugagaaacgugcccagcauccagagcagaggccuguucggcgccaucgccggcuucaucgagggcggcuggaccggcaugaucgacggcugguacggcuaccaccaccagaacgagcagggcagcggcuacgccgccgaccagaagagcacccagaacgccaucgacggcaucaccaacaaggugaacagcgugaucgagaagaugaacaccaaguucaccgccgugggcaaggaguucaacaaccuggagagaagaaucgagaaccugaacaagaagguggacgacggcuuccuggacguguggaccuacaacgccgagcugcuggugcugcuggagaacgagagaacccuggacuuccacgacagcaacgugagaaaccuguacgagaaggugaagagccagcugagaaacaacgccaaggagcugggcaacggcugcuucgaguucuaccacaagugcgacgacgagugcaucgagagcgugaagaacggcaccuacgacuaccccaaguacagcgaggagagcaagcugaacagagaggagaucgacggcgugaagcuggagagcaugggcguguaccagauccuggccaucuacagcaccguggccagcagccuggugcugcuggugagccugggcgccaucagcuucuggaugugcagcaacggcagccugcagugcagaaucugcaucuga

SEQ ID NO: 160063 - RNA, 1689 nt, Artificial Sequence
  derived and/or modified CDS sequence (opt4) from hemagglutinin__InfluenzaA__AAA64362
auggccaucaucuaccugauccugcuguucaccgccgugagaggcgaccagaucugcaucggcuaccacgccaacaacagcaccgagaagguggacaccauccuggagagaaacgugaccgugacccacgccaaggacauccuggagaagacccacaacggcaagcugugcaagcugaacggcauccccccccuggagcugggcgacugcagcaucgccggcuggcugcugggcaaccccgagugcgacagacugcugagcgugcccgaguggagcuacaucauggagaaggagaaccccagagacggccugugcuaccccggcagcuucaacgacuacgaggagcugaaguaccugcugagcagcgugaagcacuucgagaaggugaagauccugcccaaggacagauggacccagcacaccaccaccggcggcagcagagccugcgccgugagcggcaaccccagcuucuucagaaacaugguguggcugaccaagaagggcagcgacuaccccguggccaagggcagcuacaacaacaccagcggcgagcagaugcugaucaucuggggcgugcaccaccccaacgacgagaccgagcagagaacccuguaccagaacgugggcaccuacgugagcgugggcaccagcacccugaacaagagaagcacccccgagaucgccaccagacccaaggugaacggccugggcagcagaauggaguucagcuggacccugcuggacaugugggacaccaucaacuucgagagcaccggcaaccugaucgcccccgaguacggcuucaagaucagcaagagaggcagcagcggcaucaugaagaccgagggcacccuggagaacugcgagaccaagugccagaccccccugggcgccaucaacaccacccugcccuuccacaacgugcacccccugaccaucggcgagugccccagauacgugaagagcgagaagcuggugcuggccaccggccugagaaacgugccccagaucgagagcagaggccuguucggcgccaucgccggcuucaucgagggcggcuggcagggcaugguggacggcugguacggcuaccaccacagcaacgaccagggcagcggcuacgccgccgacaaggagagcacccagaaggccuucgacggcaucaccaacaaggugaacagcgugaucgagaagaugaacacccaguucgaggccgugggcaaggaguucagcaaccuggagagaagacuggagaaccugaacaagaagauggaggacggcuuccuggacguguggaccuacaacgccgagcugcuggugcugauggagaacgagagaacccuggacuuccacgacagcaacgugaagaaccuguacgacaaggugagaaugcagcugagagacaacgugaaggagcugggcaacggcugcuucgaguucuaccacaagugcgacgacgagugcaugaacagcgugaagaacggcaccuacgacuaccccaaguacgaggaggagagcaagcugaacagaaacgagaucaagggcgugaagcugagcagcaugggcguguaccagauccuggccaucuacgccaccguggccggcagccugagccuggccaucaugauggccggcaucagcuucuggaugugcagcaacggcagccugcagugcagaaucugcaucuga

SEQ ID NO: 160064 - RNA, 1689 nt, Artificial Sequence
  derived and/or modified CDS sequence (opt4) from hemagglutinin__InfluenzaA__AAA64363
auggccaucaucuaccugauccugcuguucaccgccgugagaggcgaccagaucugcaucggcuaccacgccaacaacagcaccgagaagguggacaccauccuggagagaaacgugaccgugacccacgccaaggacauccuggagaagacccacaacggcaagcugugcaagcugaacggcauccccccccuggagcugggcgacugcagcaucgccggcuggcugcugggcaaccccgagugcgacagacugcugagcgugcccgaguggagcuacaucauggagaaggagaaccccagagacggccugugcuaccccggcagcuucaacgacuacgaggagcugaagcaccugcugagcagcgugaagcacuucgagaaggugaagauccugcccaaggacagauggacccagcacaccaccaccggcggcagcagagccugcgccgugagcggcaaccccagcuucuucagaaacaugguguggcugaccaagaagggcagcaacuaccccguggccaagggcagcuacaacaacaccagcggcgagcagaugcugaucaucuggggcgugcaccaccccaacgacgagaccgagcagagaacccuguaccagaacgugggcaccuacgugagcgugggcaccagcacccugaacaagagaagcacccccgacaucgccaccagacccaaggugaacggccagggcggcagaauggaguucagcuggacccugcuggacaugugggacaccaucaacuucgagagcaccggcaaccugaucgcccccgaguacggcuucaagaucagcaagagaggcagcagcggcaucaugaagaccgagggcacccugggcaacugcgagaccaagugccagaccccccugggcgccaucaacaccacccugcccuuccacaacgugcacccccugaccaucggcgagugccccaaguacgugaagagcgagaagcuggugcuggccaccggccugagaaacgugccccagaucgagagcagaggccuguucggcgccaucgccggcuucaucgagggcggcuggcagggcaugguggacggcugguacggcuaccaccacagcaacgaccagggcagcggcuacgccgccgacaaggagagcacccagaaggccuucgacggcaucaccaacaaggugaacagcgugaucgagaagaucaacacccaguucgaggccguggagaaggaguucagcaaccuggagagaagacuggagaaccugaacaagaagauggaggacggcuuccuggacguguggaccuacaacgccgagcugcuggugcugauggagaacgagagaacccuggacuuccacgacagcagcgugaagaaccuguacgacaaggugagaaugcagcugagagacaacgugaaggagcugggcaacggcugcuucgaguucuaccacaagugcgacgacgagugcaugaacagcgugaagaacggcaccuacgacuaccccaaguacgaggaggagagcaagcugaacagaaacgagaucaagggcgugaagcugagcagcaugggcaucuaccagauccuggccaucuacgccaccguggccggcagccugagccuggccaucaugauggccggcaucagcuucuggaugugcagcaacggcagccugcagugcagaaucugcaucuga

SEQ ID NO: 160065 - RNA, 1689 nt, Artificial Sequence
  derived and/or modified CDS sequence (opt4) from hemagglutinin__InfluenzaA__AAA64365
auggccaucaucuaccugauccugcuguucaccgccgugagaggcgaccagaucugcaucggcuaccacgccaacaacagcaccgagaagguggacaccauccuggagagaaacgugaccgugacccacgccaaggacauccuggagaagacccacaacggcaagcugugcaagcugaacggcauccccccccuggagcugggcgacugcagcaucgccggcuggcugcugggcaaccccgagugcgacagacugcugagcgugcccgaguggagcuacaucauggagaaggagaaccccagagacggccugugcuaccccggcagcuucaacgacuacgaggagcugaagcaccugcugagcagcgugaagcacuucgagaaggugaagauccugcccaaggacagauggacccagcacaccaccaccggcggcagcagagccugcgccgugagcggcaaccccagcuucuucagaaacaugguguggcugaccaagaagggcagcaacuaccccguggccaagggcagcuacaacaacaccagcggcgagcagaugcugaucaucuggggcgugcaccaccccaacgacgagaccgagcagagaacccuguaccagaacgugggcaccuacgugagcgugggcaccagcacccugaacaagagaagcacccccgacaucgccaccagacccaagguggacggccugggcagcagaauggaguucagcuggacccugcuggacaugugggacaccaucaacuucgagagcaccggcaaccugaucgcccccgaguacggcuucaagaucagcaagagaggcagcagcggcaucaugaagaccgagggcacccugggcaacugcgagaccaagugccagaccccccugggcgccaucaacaccacccugcccuuccacaacgugcacccccugaccaucggcgagugccccaaguacgugaagagcgagaagcuggugcuggccaccggccugagaaacgugccccagaucgagagcagaggccuguucggcgccaucgccggcuucaucgagggcggcuggcagggcaugguggacggcugguacggcuaccaccacagcaacgaccagggcagcggcuacgccgccgacaaggagagcacccagaaggccuucgacggcaucaccaacaaggugaacagcgugaucgagaagaugaacacccaguucgaggccguggagaaggaguucagcaaccuggagagaagacuggagaaccugaacaagaagauggaggacggcuuccuggacguguggaccuacaacgccgagcugcuggugcugauggagaacgagagaacccuggacuuccacgacagcaacgugaagaaccuguacaacaaggugagaaugcagcugagagacaacgugaaggagcugggcaacggcugcuucgaguucuaccacaagugcgacgacgagugcaugaacagcgugaagaacggcaccuacgacuaccccaaguacgaggaggagagcaagcugaacagaaacgagaucaagggcgugaagcugagcagcaugggcaucuaccagauccuggccaucuacgccaccguggccggcagccugagccuggccaucaugauggccggcaucagcuucuggaugugcagcaacggcagccugcagugcagaaucugcaucuga

SEQ ID NO: 160066 - RNA, 1689 nt, Artificial Sequence
  derived and/or modified CDS sequence (opt4) from hemagglutinin__InfluenzaA__AAA64366
auggccaucaucuaccugauccugcuguucaccgccgugagaggcgaccagaucugcaucggcuaccacgccaacaacagcaccgagaagguggacaccauccuggagagaaacgugaccgugacccacgccaaggacauccuggagaagacccacaacggcaagcugugcaagcugaacggcauccccccccuggagcugggcgacugcagcaucgccggcuggcugcugggcaaccccgagugcgacagacugcugagcgugcccgaguggagcuacaucauggagaaggagaaccccagagacggccugugcuaccccggcagcuucaacgacuacgaggagcugaagcaccugcugagcagcgugaagcacuucgagaaggugaagauccugcccaaggacagauggacccagcacaccaccaccggcggcagcagagccugcgccgugagcggcaaccccagcuucuucagaaacaugguguggcugaccaagaaggagagcaacuaccccguggccaagggcagcuacaacaacaccagcggcgagcagaugcugaucaucuggggcgugcaccaccccaacgacgagaccgagcagagaacccuguaccagaacgugggcaccuacgugagcgugggcaccagcacccugaacaagagaagcacccccgacaucgccaccagacccaaggugaacggccugggcagcagaauggaguucagcuggacccugcuggacaugugggacaccaucaacuucgagagcaccggcaaccugaucgcccccgaguacggcuucaagaucagcaagagaggcagcagcggcaucaugaagaccgagggcacccuggagaacugcgagaccaagugccagaccccccugggcgccaucaacaccacccugcccuuccacaacgugcacccccugaccaucggcgagugccccaaguacgugaagagcgagaagcuggugcuggccaccggccugagaaacgugccccagaucgagagcagaggccuguucggcgccaucgccggcuucaucgagggcggcuggcagggcaugguggacggcugguacggcuaccaccacagcaacgaccagggcagcggcuacgccgccgacaaggagagcacccagaaggccuucgacggcaucaccaacaaggugaacagcgugaucgagaagaugaacacccaguucgaggccgugggcaaggaguucagcaaccuggagagaagacuggagaaccugaacaagaagauggaggacggcuuccuggacguguggaccuacaacgccgagcugcuggugcugauggagaacgagagaacccuggacuuccacgacagcaacgugaagaaccuguacgacaaggugagaaugcagcugagagacaacgugaaggagcugggcaacggcugcuucgaguucuaccacaagugcgacgacgagugcaugaacagcgugaagaacggcaccuacgacuaccccaaguacgaggaggagagcaagcugaacagaaacgagaucaagggcgugaagcugagcagcaugggcguguaccagauccuggccaucuacgccaccguggccggcagccugagccuggccaucaugauggccggcaucagcuucuggaugugcagcaacggcagccugcagugcagaaucugcaucuga

SEQ ID NO: 160067 - RNA, 1701 nt, Artificial Sequence
  derived and/or modified CDS sequence (opt4) from hemagglutinin__InfluenzaA__AAA85781
augaagaccaucaucgcccugagcuacaucuucugccugguguucgcccaggaccugcccggcaacgacaacagcaccgccacccugugccugggccaccacgccgugcccaacggcacccuggugaagaccaucaccaacgaccagaucgaggugaccaacgccaccgagcuggugcagagcagcagcaccggcaagaucugcgacaacccccacagaauccuggacggcaucaacugcacccugaucgacgcccugcugggcgacccccacugcgacggcuuccagaacgagaagugggaccuguucguggagagaagcaaggccuucagcaacugcuaccccuacgacgugcccgacuacgccagccugagaagccugguggccagcagcggcacccuggaguucaucaacgagggcuucaacuggaccggcgugacccagaacggcggcagcagcgccugcaagagaggccccgacaacggcuucuucagcagacugaacuggcuguacaagagcggcagcaccuaccccgugcagaacgugaccaugcccaacaacgacaacagcgacaagcuguacaucuggggcgugcaccaccccagcaccgacaaggagcagaccaaccuguacgugcaggccagcggcaaggugaccgugagcaccaagagaagccagcagaccgugauccccaacgugggcagcagacccugggugagaggccugagcagcagagugagcaucuacuggaccaucgugaagcccggcgacauccuggugaucaacagcaacggcaaccugaucgcccccagaggcuacuacaagaugagaaccggcaagagcagcaucaugagaagcgacgcccccaucggcaccugcagcagcgagugcaucacccccaacggcagcauccccaacgacaagcccuuccagaacgugaacaagaucaccuacggcgccugccccaaguacgugaagcagaacacccugaagcuggccaccggcaugagaaacgugcccgagaagcagaucagaggcaucuucggcgccaucgccggcuucaucgagaacggcugggagggcaugaucgacggcugguacggcuucagacaccagaacagcgagggcaccggccaggccgccgaccugaagagcacccaggccgccaucgaccagaucaacggcaagcugaacagagugaucgagaagaccaacgagaaguuccaccagaucgagaaggaguucagcgagguggagggcagaauccaggaccuggagaaguacguggaggacaccaagaucgaccuguggagcuacaacgccgagcugcugguggcccuggagaaccagcacaccaucgaccugaccgacagcgagaugaacaagcuguucgagaagaccagaagacagcugagagagaacgccgaggacaugggcaacggcugcuucaagaucuaccacaagugcgacaaccccugcaucggcagcaucagaaacggcaccuacgaccacgacguguacagagacgaggcccugaacaacagauuccagaucaagggcguggagcugaagagcggcuacaaggacuggauccuguggaucagcuucgccaucagcugcuuccugcugugcguggugcugcugggcuucaucaugugggccugccagaagggcaacaucagaugcaacaucugcaucuga

SEQ ID NO: 160068 - RNA, 1707 nt, Artificial Sequence
  derived and/or modified CDS sequence (opt4) from hemagglutinin__InfluenzaA__AAC14418
auggagagaaucgugcugcugcuggccaccgugagccuggugaagagcgaccagaucugcaucggcuaccacgccaacaacagcaccgagcagguggacaccaucauggagaagaacgugaccgugacccacgcccaggacauccuggagagaacccacaacggcaagcugugcgaccugaacggcgugaagccccugauccugagagacugcagcguggccggcuggcugcugggcaaccccaugugcgacgaguucaucaacgugcccgaguggagcuacaucguggagaaggccagccccgccaacgaccugugcuaccccggcaacuucaacgacuacgaggagcugaagcaccugcugagcagaaucaaccacuucgagaagauccagaucauccccaagagcagcuggagcaaccacgacgccagcagcggcgugagcagcgccugccccuaccugggcagaagcagcuucuucagaaacgugguguggcugaucaagaagaacagcaccuaccccaccaucaagagaagcuacaacaacaccaaccaggaggaccugcuggugcuguggggcauccaccaccccaacgacgccgccgagcagaccaagcuguaccagaaccccaccaccuacaucagcgugggcaccagcacccugaaccagagacuggugcccgagaucgccaccagacccaaggugaacggccagagcggcagaauggaguucuucuggaccauccugaagcccaacgacgccaucaacuucgagagcaacggcaacuucaucgcccccgaguacgccuacaagaucgugaagaagggcgacagcaccaucaugaagagcgagcuggaguacggcaacugcaacaccaagugccagacccccaugggcgccaucaacagcagcaugcccuuccacaacauccacccccugaccaucggcgagugccccaaguacgugaagagcaacagacuggugcuggccaccggccugagaaacgccccccagagagagagaagaagaaagaagagaggccuguucggcgccaucgccggcuucaucgagggcggcuggcagggcaugguggacggcugguacggcuaccaccacagcaacgagcagggcagcggcuacgccgccgaccaggagagcacccagaaggccaucgacggcgugaccaacaaggugaacagcaucaucaacaagaugaacacccaguucgaggccgugggcagagaguucaacaaccuggagagaagaaucgagaaccugaacaagaagauggaggacggcuuccuggacguguggaccuacaacgccgagcugcuggugcugauggagaacgagagaacccuggacuuccacgacagcaacgugaagaaccuguacgacaaggugagacugcagcugagagacaacgccaaggagcugggcaacggcugcuucgaguucuaccacaagugcgacaacgagugcauggagagcgugaagaacggcaccuacgacuacccccaguacagcgaggaggccagacugaacagagaggagaucagcggcgugaagcuggagagcaugggcaccuaccagauccugagcaucuacagcaccguggccagcagccuggcccuggccaucaugguggccggccugagccuguggaugugcagcaacggcagccugcagugcagaaucugcaucuga

SEQ ID NO: 160069 - RNA, 1707 nt, Artificial Sequence
  derived and/or modified CDS sequence (opt4) from hemagglutinin__InfluenzaA__AAC40508
auggagagaaccgugcugcugcuggccaccgugagccuggugaagagcgaccagaucugcaucggcuaccacgccaacaacagcaccgagcagguggacaccaucauggagaagaacgugaccgugacccacgcccaggacauccuggagagaacccacaacggcaagcugugcgaccugaacggcgugaagccccugauccugagagacugcagcguggccggcuggcugcugggcaaccccaugugcgacgaguucaucaacgugcccgaguggagcuacaucguggagaaggccagccccgccaacgaccugugcuaccccggcaacuucaacgacuacgaggagcugaagcaccugcugagcagaaucaaccacuucgagaagauccagaucauccccaagagcagcuggagcaaccacgacgccagcagcggcgugagcagcgccugccccuaccugggcagaagcagcuucuucagaaacgugguguggcugaucaagaagaacagcgccuaccccaccaucaagagaagcuacaacaacaccaaccaggaggaccugcuggugcuguggggcgugcaccaccccaacgacgccgccgagcagaccaagcuguaccagaaccccaccaccuacaucagcgugggcaccagcacccugaaccagagacuggugcccgagaucgccaccagacccaaggugaacggccagagcggcagaauggaguucuucuggaccauccugaagcccaacgacgccaucaacuucgagagcaacggcaacuucaucgcccccgaguacgccuacaagaucgugaagaagggcgacagcaccaucaugaagagcgagcuggaguacggcaacugcaacaccaagugccagacccccaugggcgccaucaacagcagcaugcccuuccacaacauccacccccugaccaucggcgagugccccaaguacgugaagagcaacagacuggugcuggccaccggccugagaaacaccccccagagagagagaagaagaaagaagagaggccuguucggcgccaucgccggcuucaucgagggcggcuggcagggcaugguggacggcugguacggcuaccaccacagcaacgagcagggcagcugcuacagcgccgacaaggagagcacccagaaggccaucgacggcgugaccaacaaggugaacagcaucaucaacaagaugaacacccaguucgaggccgugggcagagaguucaacaaccuggagagaagaaucgagaaccugaacaagaagauggaggacggcuuccuggacguguggaccuacaacgccgagcugcuggugcugauggagaacgagagaacccuggacuuccacgacagcaacgugaagaaccuguacgacaaggugagacugcagcugagagacaacgccaaggagcugggcaacggcugcuucgaguucuaccacaagugcgacaacgagugcauggagagcgugaagaacggcaccuacgacuacccccaguacagcgaggaggccagacugaacagagaggagaucagcggcgugaagcuggagagcaugggcaccuaccagauccugagcaucuacagcaccguggccagcagccuggcccuggccaucaugguggccggccugagccuguggaugugcagcaacggcagccugcagugcagaaucugcaucuga

SEQ ID NO: 160070 - RNA, 1701 nt, Artificial Sequence
  derived and/or modified CDS sequence (opt4) from hemagglutinin__InfluenzaA__AAF87274
augaaggccauccugguggugcugcuguacaccuucaccaccgccaacgccgacacccugugcaucggcuaccacgccaacaacagcaccgacaccguggacaccgugcuggagaagaacgugaccgugacccacagcgugaaccugcuggagaacagacacaacggcaagcugugcaagcugaagggcguggccccccugcaccugggcaagugcaacaucgccggcuggcugcugggcaaccccgagugcgagcugcuguucaccgccagcagcuggagcuacaucguggagaccagcaacagcgacaacggcaccugcuaccccggcgacuucaucaacuacgaggagcugagagagcagcugagcagcgugagcagcuucgagagauucgagaucuuccccaaggccaacagcuggcccaaccacgagaccaacagaggcgugaccagcgccugccccuacgccggcgccaacagcuucuacagaaaccugaucuggcuggugaagaagggcaacagcuaccccaagcugagcaagagcuacaucaacaacaagggcaaggaggugcuggugcuguggggcauccaccacccccccaccagcaacgaccagcagagccuguaccagaacgccgacgccuacguguucgugggcagcagcaaguacaacaagaaguucaugcccgagaucgccaccagacccaaggugagaggccaggccggcagaaugaacuacuacuggacccugaucgagcccggcgacaccaucaccuucgaggccaccggcaaccugguggcccccagauacgccuucgccauggagagaggcagcggcagcggcaucaucaucagcgacacccccgugcacgacugcaacgccaccugccagacccccaagggcgccaucaacaccaaccugcccuuccagaacauccaccccgugaccaucggcgagugccccaaguacgugaagagcaccagacugagaauggccaccggccugagaaacauccccagcauccagagcagaggccuguucggcgccaucgccggcuucaucgagggcggcuggaccggcaugaucgacggcugguacggcuaccaccaccagaacgagcagggcagcggcuacgccgccgacagaaagagcacccagaacgccaucgacggcaucaccaacaaggugaacagcgugaucgagaagaugaacacccaguucaccgccgugggcaaggaguucaaccaccuggagaagagaaucaagaaccugaacaagaagguggacgacggcuuccuggacguguggaccuacaacgccgagcugcuggugcugcuggagaacgagagaacccuggacuaccacgacagcaacgugaagaaccuguacgagaaggugagaagccagcugagaaacaacgccaaggagaucggcaacggcugcuucgaguucuaccacaagugcgacgacaccugcauggagagcaucaagaacggcaccuacgacuaccccaaguacagcgaggaggccaagcugaccagagaggagaucgacggcgugaagcuggagagcaccagaaucuaccagauccuggccaucuacagcaccaucgccagcagccuggugcugcuggugagccugggcgccaucagcuucuggaugugcagcaacggcagccugcagugcagaaucugcaucuga

SEQ ID NO: 160071 - RNA, 1701 nt, Artificial Sequence
  derived and/or modified CDS sequence (opt4) from hemagglutinin__InfluenzaA__AAF87275
augaaggccauccugguggugcugcuguacaccuucaccaccgccaacgccgacacccugugcaucggcuaccacgccaacaacagcaccgacaccguggacaccgugcuggagaagaacgugaccgugacccacagcgugaaccugcuggagaacagacacaacggcaagcugugcaagcugaagggcguggccccccugcaccugggcaagugcaacaucgccggcuggcugcugggcaaccccgagugcgagcugcuguucaccgccagcagcuggagcuacaucguggagaccagcaacagcgacaacggcaccugcuaccccggcgacuucaucaacuacgaggagcugagagagcagcugagcagcgugagcagcuucgagagauucgagaucuuccccaaggccaacagcuggcccaaccacgagaccaacagaggcgugaccagcgccugccccuacgccggcgccaacagcuucuacagaaaccugaucuggcuggugaagaagggcaacagcuaccccaagcugagcaagagcuacaucaacaacaagggcaaggaggugcuggugcuguggggcauccaccacccccccaccagcaacgaccagcagagccuguaccagaacgccgacgccuacguguucgugggcagcagcaaguacaacaagaaguucaugcccgagaucgccaccagacccaaggugagaggccaggccggcagaaugaacuacuacuggacccugaucgagcccggcgacaccaucaccuucgaggccaccggcaaccugguggcccccagauacgccuucgccauggagagaggcagcggcagcggcaucaucaucagcgacacccccgugcacgacugcaacgccaccugccagacccccaagggcgccaucaacaccaaccugcccuuccagaacauccaccccgugaccaucggcgagugccccaaguacgugaagagcaccagacugagaauggccaccggccugagaaacauccccagcauccagagcagaggccuguucggcgccaucgccggcuucaucgagggcggcuggaccggcaugaucgacggcugguacggcuaccaccaccagaacgagcagggcagcggcuacgccgccgacagaaagagcacccagaacgccaucgacggcaucaccaacaaggugaacagcgugaucgagaagaugaacacccaguucaccgccgugggcaaggaguucaaccaccuggagaagagaaucgagaaccugaacaagaagguggacgacggcuuccuggacguguggaccuacaacgccgagcugcuggugcugcuggagaacgagagaacccuggacuaccacgacagcaacgugaagaaccuguacgagaaggugagaagccagcugagaaacaacgccaaggagaucggcaacggcugcuucgaguucuaccacaagugcgacgacaccugcauggagagcaucaagaacggcaccuacgacuaccccaaguacagcgaggaggccaagcugaccagagaggagaucgacggcgugaagcuggagagcaccagaaucuaccagauccuggccaucuacagcaccaucgccagcagccuggugcugcuggugagccugggcgccaucagcuucuggaugugcagcaacggcagccugcagugcagaaucugcaucuga

SEQ ID NO: 160072 - RNA, 1701 nt, Artificial Sequence
  derived and/or modified CDS sequence (opt4) from hemagglutinin__InfluenzaA__AAF87277
augaaggccauccugcuggugcugcuguacaccuucaccgccgccaacgccgacacccugugcaucggcuaccacgccaacaacagcaccgacaccguggacaccgugcuggagaagaacgugaccgugacccacagcgugaaccugcuggaggacagacacaacggcaagcugugcaagcugagaggcaucgccccccugcaccugggcaagugcaacaucgccggcuggcugcugggcaaccccgagugcgagcugcuguucaccgccagcagcuggagcuacaucguggagaccagcaacagcgacaacggcaccugcuaccccggcgacuucaucaacuacgaggagcugagagagcagcugagcagcgugagcagcuucgagagauucgagaucuuccccaaggccagcagcuggcccgaccacgagaccaacagaggcgugaccgccgccugccccuacgccggcgccaacagcuucuacagaaaccugaucuggcuggugaagaagggcaacagcuaccccaagcugagcaagagcuacaucaacaacaaggagaaggaggugcuggugcuguggggcauccaccacccccccaccagcaccgaccagcagagccuguaccagaacgccgacgccuacguguucgugggcagcagcaaguacaacaagaaguucaagcccgagaucgccagcagacccaaggugagaggccaggccggcagaauggacuacuacuggacccugguggagcccggcgacaccaucaccuucgaggccaccggcaaccugguggugcccagauacgccuucgccaugaagagaggcagcggcagcggcaucaucaucagcgacacccccgugcacgacugcaacaccaccugccagacccccaagggcgccaucaacaccagccugcccuuccagaacauccaccccgugaccaucggcgagugccccaaguacgugaagagcaccaagcugagaauggccaccggccugagaaacauccccagcauccagagcagaggccuguucggcgccaucgccggcuucaucgagggcggcuggaccggcaugaucgacggcugguacggcuaccaccaccagaacgagcagggcagcggcuacgccgccgacagaaagagcacccagaacgccaucgacggcgugaccaacaaggugaacagcgugaucgagaagaugaacacccaguucaccgccgugggcaaggaguucaaccaccuggagaagagaaucgagaaccugaacaagaagguggacgacggcuuccuggacguguggaccuacaacgccgagcugcuggugcugcuggagaacgagagaacccuggacuaccacgacagcaacgugaagaaccuguacgagaaggugagaagccagcugaagaacaacgccaaggagaucggcaacggcugcuucgaguucuaccacaagugcgacgacaccugcauggagagcgugaagaacggcaccuacgacuaccccaaguacagcgaggagagcaagcugaacagagaggagaucgacggcgugaagcuggagagcaccagaaucuaccagauccuggccaucuacagcaccguggccagcagccugauccugcuggugagccugggcgccaucagcuucuggaugugcagcaacggcagccugcagugcagaaucugcaucuga

SEQ ID NO: 160073 - RNA, 1701 nt, Artificial Sequence
  derived and/or modified CDS sequence (opt4) from hemagglutinin__InfluenzaA__AAF87278
augaaggccauccugcuggugcugcuguacaccuucaccgccgccaacgccgacacccugugcaucggcuaccacgccaacaacagcaccgacaccguggacaccgugcuggagaagaacgugaccgugacccacagcgugaaccugcuggaggacagacacaacggcaagcugugcaagcugagaggcaucgccccccugcaccugggcaagugcaacaucgccggcuggcugcugggcaaccccgagugcgagcugcuguucaccgccagcagcuggagcuacaucguggagaccagcaacagcgacaacggcaccugcuaccccggcgacuucaucaacuacgaggagcugagagagcagcugagcagcgugagcagcuucgagagauucgagaucuuccccaaggccagcagcuggcccaaccacgagaccaacagaggcgugaccgccgccugccccuacgccggcgccaacagcuucuacagaaaccugaucuggcuggugaagaagggcaacagcuaccccaagcugagcaagagcuacaucaacaacaaggagaaggaggugcuggugcuguggggcauccaccacccccccaccagcaccgaccagcagagccuguaccagaacgccgacgccuacguguucgugggcagcagcaaguacaacaagaaguucaagcccgagaucgccagcagacccaaggugagaggccaggccggcagaauggacuacuacuggacccugguggagcccggcgacaccaucaccuucgaggccaccggcaaccugguggugcccagauacgccuucgccaugaagagaggcagcggcagcggcaucaucaucagcgacacccccgugcacgacugcaacaccaccugccagacccccaagggcgccaucaacaccagccugcccuuccagaacauccaccccgugaccaucggcgagugccccaaguacgugaagagcaccaagcugagaauggccaccggccugagaaacauccccagcauccagagcagaggccuguucggcgccaucgccggcuucaucgagggcggcuggaccggcaugaucgacggcugguacggcuaccaccaccagaacgagcagggcagcggcuacgccgccgacagaaagagcacccagaacgccaucgacggcgugaccaacaaggugaacagcgugaucgagaagaugaacacccaguucaccgccgugggcaaggaguucaaccaccuggagaagagaaucgagaaccugaacaagaagguggacgacggcuuccuggacguguggaccuacaacgccgagcugcuggugcugcuggagaacgagagagcccuggacuaccacgacagcaacgugaagaaccuguacgagaaggugagaagccagcugaagaacaacgccaaggagaucggcaacggcugcuucgaguucuaccacaagugcgacgacaccugcauggagagcgugaagaacggcaccuacgacuaccccaaguacagcgaggagagcaagcugaacagagaggagaucgacggcgugaagcuggagagcaccagaaucuaccagauccuggccaucuacagcaccguggccagcagccugauccugcuggugagccugggcgccaucagcuucuggaugugcagcaacggcagccugcagugcagaaucugcaucuga

SEQ ID NO: 160074 - RNA, 1701 nt, Artificial Sequence
  derived and/or modified CDS sequence (opt4) from hemagglutinin__InfluenzaA__AAF87279
augaaggccauccugcuggugcugcuguacaccuucaccgccgccaacgccgacacccugugcaucggcuaccacgccaacaacagcaccgacaccguggacaccgugcuggagaagaacgugaccgugacccacagcgugaaccugcuggaggacagacacaacggcaagcugugcaagcugagaggcaucgccccccugcaccugggcaagugcaacaucgccggcuggcugcugggcaaccccgagugcgagcugcuguucaccgccagcagcuggagcuacaucguggagaccagcaacagcgacaacggcaccugcuaccccggcgacuucaucaacuacgaggagcugagagagcagcugagcagcgugagcagcuucgagagauucgagaucuuccccaaggccagcagcuggcccaaccacgagaccaacagaggcgugaccgccgccugccccuacgccggcgccaacagcuucuacagaaaccugaucuggcuggugaagaagggcaacagcuaccccaagcugagcaagagcuacaucaacaacaaggagaaggaggugcuggugcuguggggcauccaccacccccccaccagcaccgaccagcagagccuguaccagaacgccgacgccuacguguucgugggcagcagcaaguacaacaagaaguucaagcccgagaucgccagcagacccaaggugagaggccaggccggcagaauggacuacuacuggacccugguggagcccggcgacaccaucaccuucgaggccaccggcaaccugguggugcccagauacgccuucgccaugaagagaggcagcggcagcggcaucaucaucagcgacacccccgugcacgacugcaacaccaccugccagacccccaagggcgccaucaacaccagccugcccuuccagaacauccaccccgugaccaucggcgagugccccaaguacgugaagagcaccaagcugagaauggccaccggccugagaaacauccccagcauccagagcagaggccuguucggcgccaucgccggcuucaucgagggcggcuggaccggcaugaucgacggcugguacggcuaccaccaccagaacgagcagggcagcggcuacgccgccgacagaaagagcacccagaacgccaucgacggcgugaccaacaaggugaacagcgugaucgagaagaugaacacccaguucaccgccgugggcaaggaguucaaccaccuggagaagagaaucgagaaccugaacaagaagguggacgacggcuuccuggacguguggaccuacaacgccgagcugcuggugcugcuggagaacgagagaacccuggacuaccacgacagcaacgugaagaaccuguacgagaaggugagaagccagcugaagaacaacgccaaggagaucggcaacggcugcuucgaguucuaccacaagugcgacgacaccugcauggagagcgugaagaacggcaccuacgacuaccccaaguacagcgaggagagcaagcugaacagagaggagaucgacggcgugaagcuggagagcaccagaaucuaccagauccuggccaucuacagcaccguggccagcagccugauccugcuggugagccugggcgccaucagcuucuggaugugcagcaacggcagccugcagugcagaaucugcaucuga

SEQ ID NO: 160075 - RNA, 1701 nt, Artificial Sequence
  derived and/or modified CDS sequence (opt4) from hemagglutinin__InfluenzaA__AAF87281
augaaggccauccugguggugcugcuguacaccuucaccaccgccaacgccgacacccugugcaucggcuaccacgccaacaacagcaccgacaccguggacaccgugcuggagaagaacgugaccgugacccacagcgugaaccugcuggaggacagacacaacggcaagcugugcaagcugaagggcaucgccccccugcaccugggcaagugcaacaucgccggcuggcugcugggcaaccccgagugcgagcugcuguucaccgccagcagcuggagcuacaucguggagaccagcaacagcgacaacggcaccugcuaccccggcgacuucaucaacuacgaggagcugagagagcagcugagcagcgugagcagcuucgagagauucgagaucuuccccaaggccagcagcuggcccaaccacgagaccaacagaggcgugaccagcgccugccccuacgccggcgccaacagcuucuacagaaaccugaucuggcuggugaagaagggcaacagcuaccccaagcugagcaagagcuacaucaacaacaagggcaagaaggugcuggugcuguggggcauccaccacccccccaccagcaccgaccagcagagccuguaccagaacgccgacgccuacguguucgugggcagcagcaaguacaacaagaaguucaugcccgagaucgccaccagacccaaggugagaggccaggccggcagaaugaacuacuacuggacccugaucgagcccggcgacaccaucaccuucgaggccaccggcaaccugguggugcccagauacgccuucgccauggagagaggcuacggcagcggcaucaucaucagcgacacccccgugcacgacugcaacaccaccugccagacccccaagggcgccaucaacaccagccugcccuuccagaacauccaccccgugaccaucggcgagugccccaaguacgugaagagcaccaagcugagaauggccaccggccugagaaacauccccagcauccagagcagaggccuguucggcgccaucgccggcuucaucgagggcggcuggaccggcaugaucgacggcugguacggcuaccaccaccagaacgagcagggcagcggcuacgccgccgacagaaagagcacccagaacgccaucgacggcaucaccaacaaggugaacagcgugaucgagaagaugaacacccaguucaccgccgugggcaaggaguucaaccaccuggagaagagaaucgagaaccugaacaagaagguggacgacggcuuccuggacguguggaccuacaacgccgagcugcuggugcugcuggagaacgagagaacccuggacuaccacgacagcaacgugaagaaccuguacgagaaggugaagagccagcugaagaacaacgccaaggagaucggcaacggcugcuucgaguucuaccacaagugcgacgacaccugcauggagagcgugaagaacggcaccuacgacuaccccaaguacagcgaggaggccaagcugaacagagaggagaucgacggcgugaagcuggagagcaccagaaucuaccagauccuggccaucuacagcaccaucgccagcagccuggugcugcuggugagccugggcgccaucagcuucuggaugugcagcaacggcagccugcagugcagaaucugcaucuga

SEQ ID NO: 160076 - RNA, 1701 nt, Artificial Sequence; identical to SEQ ID NO: 160074
  derived and/or modified CDS sequence (opt4) from hemagglutinin__InfluenzaA__AAF87282

SEQ ID NO: 160077 - RNA, 1701 nt, Artificial Sequence
  derived and/or modified CDS sequence (opt4) from hemagglutinin__InfluenzaA__AAF87283
augaaggccauccugguggugcugcuguacgccuucaccaccgccaacgccgacacccugugcaucggcuaccacgccaacaacagcaccgacaccguggacaccgugcuggagaagaacgugaccgugacccacagcgugaaccugcuggaggacagacacaacggcaagcugugcaagcugaagggcguggccccccugcaccugggcaagugcaacaucgccggcuggcugcugggcaaccccgagugcgagcugcuguucaccgccagcagcuggagcuacaucguggagaccagcaacagcgacaacggcaccugcuaccccggcgacuucaucaacuacgaggagcugagagagcagcugagcagcgugagcagcuucgagagauucgagaucuuccccaaggccagcagcuggcccaaccacgagaccaacagaggcgugaccagcgccugccccuacagcggcgccaacagcuucuacagaaaccugaucuggcuggugaagaagggcaacagcuaccccaagcugagcaagagcuacaucaacaacaagggcaaggaggugcuggugcuguggggcauccaccacccccccaccagcaccgaccagcagagccuguaccagaacgccgacgccuacguguucgugggcagcagcaaguacaacaagaaguucaugcccgagaucgccaccagacccaaggugagaggccaggccggcagaaugaacuacuacuggacccugaucgagcccggcgacaccaucaccuucgaggccaccggcaaccugguggcccccagauacgccuucgccauggagagaggcagcggcagcggcaucaucaucagcgacacccccguguacgacugcaacaccgccugccagacccccaagggcgccaucaacaccagccugcccuuccagaacauccaccccgugaccaucggcgagugccccaaguacgugaagagcaccaagcugagaauggccaccggccugagaaacauccccagcauccagagcagaggccuguucggcgccaucgccggcuucaucgagggcggcuggaccggcaugaucgacggcugguacggcuaccaccaccagaacgagcagggcagcggcuacgcccccgacagaaagagcacccagaacgccaucgacggcaucaccaacaaggugaacagcgugaucgagaagaugaacacccaguucaccgccgugggcaaggaguucaaccaccuggagaagagaaucgagaaccugaacaagaagguggacgacggcuuccugaacguguggaccuacaacgccgagcugcuggugcugcuggagaacgagagaacccuggacuaccacgacagcaacgugaagaaccuguacgagaaggugagaagccagcugaagaacaacgccaaggagaucggcaacggcugcuucgaguucuaccacaagugcgacgacaccugcauggagagcgugaagaacggcaccuacgacuaccccaaguacagcgaggaggccagacugaacagagaggagaucgacggcgugaagcuggagagcaccagaaucuaccagauccuggccaucuacagcaccaucgccagcagccuggugcugcuggugagccugggcgccaucagcuucuggaugugcagcaacggcagccugcagugcagaaucugcaucuga

SEQ ID NO: 160078 - RNA, 1701 nt, Artificial Sequence
  derived and/or modified CDS sequence (opt4) from hemagglutinin__InfluenzaA__AAF87284
augaaggccauccugguggugcugcuguacgccuucaccaccgccaacgccgacacccugugcaucggcuaccacgccaacaacagcaccgacaccguggacaccgugcuggagaagaacgugaccgugacccacagcgugaaccugcuggaggacagacacaacggcaagcugugcaagcugaagggcguggccccccugcaccugggcaagugcaacaucgccggcuggcugcugggcaaccccgagugcgagcugcuguucaccgccagcagcuggagcuacaucguggagaccagcaacagcgacaacggcaccugcuaccccggcgacuucaucaacuacgaggagcugagagagcagcugagcagcgugagcagcuucgagagauucgagaucuuccccaaggccagcagcuggcccaaccacgagaccaacagaggcgugaccagcgccugccugcuguucuggagcaagcagcugcugcagaagcugaacauggccggcaagaagggcaacagcuaccccaagcugagcaagagcuacaucaacaacaagggcaaggaggugcuggugcuguggggcauccaccacccccccaccagcaccgaccagcagagccuguaccagaacgccgacgccuacguguucgugggcagcagcaaguacaacaagaaguucaugcccgagaucgccaccagacccaaggugagaggccaggccggcagaaugaacuacuacuggacccugaucgagcccggcgacaccaucaccuucgaggccaccggcaaccugguggcccccagauacgccuucgccauggagagaggcagcggcagcggcaucaucaucagcgacacccccguguacgacugcaacaccgccugccagacccccaagggcgccaucaacaccagccugcccuuccagaacauccaccccgugaccaucggcgagugccccaaguacgugaagagcaccaagcugagaauggccaccggccugagaaacauccccagcauccagagcagaggccuguucggcgccaucgccggcuucaucgagggcggcuggaccggcaugaucgacggcugguacggcuaccaccaccagaacgagcagggcagcggcuacgccgccgacagaaagagcacccagaacgccaucgacggcaucaccaacaaggugaacagcgugaucgagaagaugaacacccaguucaccgccgugggcaaggaguucaaccaccuggagaagagaaucgagaaccugaacaagaagguggacgacggcuuccugaacguguggaccuacaacgccgagcugcuggugcugcuggagaacgagagaacccuggacuaccacgacagcaacgugaagaaccuguacgagaaggugagaagccagcugaagaacaacgccaaggagaucggcaacggcugcuucgaguucuaccacaagugcgacgacaccugcauggagagcgugaagaacggcaccuacgacuaccccaaguacagcgaggaggccagacugaacagagaggagaucgacggcgugaagcuggagagcaccagaaucuaccagauccuggccaucuacagcaccaucgccagcagccuggugcugcuggugagccugggcgccaucagcuucuggaugugcagcaacggcagccugcagugcagaaucugcaucuga

SEQ ID NO: 160079 - RNA, 1701 nt, Artificial Sequence
  derived and/or modified CDS sequence (opt4) from hemagglutinin__InfluenzaA__AAG01749
augagcaccaucaucgcccugagcuacauccugugccugguguucgcccagaagcugcccggcaacgacaacagcaccgccacccugugccugggccaccacgccgugcccaacggcacccuggugaagaccaucaccaacgaccagaucgaggugaccaacgccaccgagcuggugcagagcagcagcaccggcagaaucugcgacagcccccacagaauccuggacggcaagaacugcacccugaucgacgcccugcugggcgacccccacugcgacggcuuccagaacaaggagugggaccuguucguggagagaagcaaggccuacagcaacugcuaccccuacgacgugcccgacuacgccagccugagaagccugguggccagcagcggcacccuggaguucaccaacgagggcuucaacuggaccggcguggcccaggacggcaccagcuacgccugcaagagaggcagcgugaagagcuucuucagcagacugaacuggcugcacaagcuggaguacaaguaccccgcccugaacgugaccaugcccaacaacgacaaguucgacaagcuguacaucuggggcgugcaccaccccagcaccgacagcgaccagaccagccuguacgugcaggccagcggcagagugaccgugagcaccaagagaagccagcagaccgugauccccaacaucggcagcagacccugggugagaggcaucagcagcagaaucagcaucuacuggaccaucgugaagcccggcgacauccugcugaucaacagcaccggcaaccugaucgcccccagaggcuacuucaagaucagaagcggcaagagcagcaucaugagaagcgacgcccccaucgacaacugcaacagcgagugcaucacccccaacggcagcauccccaacgagaagcccuuccagaacgugaacagaaucaccuacggcgccugccccagauacgugaagcagaacacccugaagcuggccaccggcaugagaaacgugcccgagaagcagaccagaggcaucuucggcgccaucgccggcuucaucgagaacggcugggagggcaugguggacggcugguacggcuucagacaccagaacagcgagggcaccggccaggccgccgaccugaagagcacccaggccgccaucaaccagaucaacggcaagcugaacagacugaucgagaagaccaacgagaaguuccaccagaucgagaaggaguucagcgagguggagggcagaauccaggaccuggagaaguacguggaggacaccaagaucgaccuguggagcuacaacgccgagcugcugguggcccuggagaaccagcacaccaucgaccugaccgacagcgagaugaacaagcuguucgagagaaccagaaagcagcugagagagaacgccgaggacaugggcaacggcugcuucaagaucuaccacaagugcgacaacgccugcaucggcagcaucagaaacggcaccuacgaccacgacguguacagagacgaggcccugaacaacagauuccagaucaagggcguggagcugaagagcggcuacaaggacuggauccuguggaucagcuucgccaucagcugcuuccugcugugcguggugcugcugggcuucaucaugugggccugccagaagggcaacaucagaugcaacaucugcaucuga

SEQ ID NO: 160080 - RNA, 1701 nt, Artificial Sequence
  derived and/or modified CDS sequence (opt4) from hemagglutinin__InfluenzaA__AAG01767
augaacaccaucaucgcccugagcuacauccugugccugguguucgcccagaagcugcccggcaacgacaacagcaccgccacccugugccugggccaccacgccgugcccaacggcacccuggugaagaccaucaccaacgaccagaucgaggugaccaacgccaccgagcuggugcagagcagcagcaccggcagaaucugcgacagcccccacagaauccuggacggcaagaacugcacccugaucgacgcccugcugggcgacccccacugcgacggcuuccagaacaaggagugggaccuguucaucgagagaagcaaggccuacagcaacugcuaccccuacgacgugcccgacuacagcagccugagaagccugguggccagcagcggcacccuggaguucaccaacgaggacuucaacuggaccggcguggcccaggacggcggcagcuacagcugcaagagagagagcgugaagagcuucuucagcagacugaacuggcugcacaagcuggaguacaaguaccccgcccugaacgugaccaugcccaacaacgacaaguucgacaagcuguacaucuggggcgugcaccaccccagcaccgacagcgagcagaccagccuguacgugcaggccaucggcagagugaccgugagcaccaagagcagccagcagaccgugauccccaacaucggcagcagacccugggugagaggcaucagcagcagaaucagcaucuacuggaccaucgugaagcccggcgacauccugcugaucagcagcaccggcaaccugaucgcccccagaggcuacuucaagaucagaaacggcaagagcagcaucaugagaagcgacgcccccaucgacaacugcuacagcgagugcaucacccccaacggcagcauccccaacgacaagcccuuccagaacgugaacagaaucaccuacggcgccugccccaaguacgugaagcagaagacccugaagcuggccaccggcaugagaaacgugcccgagaagcagaccagaggcaucuucggcgccaucgccggcuucaucgagaacggcugggagggcaugguggacggcugguacggcuucagacaccagaacagcgagggcaccggccaggccgccgaccugaagagcacccaggccgccaucgaccaggugaacggcaagcugaacagacugaucgagaagaccaacgagaaguuccaccagaucgagaaggaguucagcgagguggagggcagaauccaggaccuggagaaguacguggaggacaccaagaucgaccuguggagcuacaacgccgagcugcugguggcccuggagaaccagcacaccaucgaccugaccgacagcgagaugaacaagcuguucgagaagaccagaaagcagcugagagagaacgccgaggacaugggcaacggcugcuucaagaucuaccacaagugcgacaacgccugcaucggcagcaucagaaacggcaccuacgaccacgacguguacagagacgaggcccugaacaacagauuccagaucaagggcguggagcugaagagcggcuacaaggacuggauccuguggaucagcuucgccaucagcugcuuccugcugugcguggugcugcugggcuucaucaugugggccugccagaagggcaacaucagaugcaacaucugcaucuga

SEQ ID NO: 160081 - RNA, 1701 nt, Artificial Sequence
  derived and/or modified CDS sequence (opt4) from hemagglutinin__InfluenzaA__AAG01776
augaacaccaucaucgcccugagcuacauccugugccugguguucgcccagaagcugcccggcaacgacaacagcaccgccacccugugccugggccaccacgccgugcccaacggcacccuggugaagaccaucaccaacgaccagaucgaggugaccaacgccaccgagcuggugcagagcagcagcaccggcagaaucugcgacagcccccacagaauccuggacggcaagaacugcacccugaucgacgcccugcugggcgacccccacugcgacggcuuccagaacaaggagugggaccuguucaucgagagaagcaaggccuacagcaacugcuaccccuacgacgugcccgacuacagcagccugagaagccugguggccagcagcggcacccuggaguucaccaacgaggacuucaacuggaccggcguggcccaggacggcggcagcuacagcugcaagagagagagcgugaagagcuucuucagcagacugaacuggcugcacaagcuggaguacaaguaccccgcccugaacgugaccaugcccaacaacgacaaguucgacaagcuguacaucuggggcgugcaccaccccagcaccgacagcgagcagaccagccuguacgugcaggccaucggcagagugaccgugagcaccaagagcagccagcagaccgugauccccaacaucggcagcagacccugggugagaggcaucagcagcagaaucagcaucuacuggaccaucgugaagcccggcgacauccugcugaucagcagcaccggcaaccugaucgcccccagaggcuacuucaagaucagaaacggcaagagcagcaucaugagaagcgacgcccccaucgacaacugcuacagcgagugcaucacccccaacggcagcauccccaacgacaagcccuuccagaacgugaacagaaucaccuacggcgccugccccaaguacgugaagcagaagacccugaagcuggccaccggcaugagaaacgugcccgagaagcagaccagaggcaucuucggcgccaucgccggcuucaucgagaacggcugggagggcaugguggacggcugguacggcuucagacaccagaacagcgagggcaccggccaggccgccgaccugaagagcacccaggccgccaucgaccaggugaacggcaagcugaacuggcugaucgagaagaccaacgagaaguuccaccagaucgagaaggaguucagcgagguggagggcagaauccaggaccuggagaaguacguggaggacaccaagaucgaccuguggagcuacaacgccgagcugcugguggcccuggagaaccagcacaccaucgaccugaccgacagcgagaugaacaagcuguucgagaagaccagaaagcagcugagagagaacgccgaggacaugggcaacggcugcuucaagaucuaccacaagugcgacaacgccugcaucggcagcaucagaaacggcaccuacgaccacgacguguacagagacgaggcccugaacaacagauuccagaucaagggcguggagcugaagagcggcuacaaggacuggauccuguggaucagcuucgccaucagcugcuuccugcugugcguggugcugcugggcuucaucaugugggccugccagaagggcaacaucagaugcaacaucugcaucuga

SEQ ID NO: 160082 - RNA, 1701 nt, Artificial Sequence
  derived and/or modified CDS sequence (opt4) from hemagglutinin__InfluenzaA__AAG01785
augaagaccaucaucgcccugagcuacauccugugccugguguucgcccagaagcugcccggcaacgacaacagcaccgccacccugugccugggccaccacgccgugcccaacggcacccuggugaagaccaucaccaacgaccagaucgaggugaccaacgccaccgagcuggugcagagcagcagcaccggcagaaucugcgacagcccccacagaauccuggacggcaagaacugcacccugaucgacgcccugcugggcgacccccacugcgacggcuuccagaacaaggagugggaccuguucaucgagagaagcaaggccuacagcaacugcuaccccuacgacgugcccgacuacagcagccugagaagccugguggccagcagcggcacccuggaguucaccaacgaggacuucaacuggaccggcguggcccaggacggcggcagcuacagcugcaagagagagagcgugaagagcuucuucagcagacugaacuggcugcacaagcuggaguacaaguaccccgcccugaacgugaccaugcccaacaacgacaaguucgacaagcuguacaucuggggcgugcaccaccccagcaccgacagcgagcagaccagccuguacgugcaggccaucggcagagugaccgugagcaccaagagcagccagcagaccgugauccccaacaucggcagcagacccugggugagaggcaucagcagcagaaucagcaucuacuggaccaucgugaagcccggcgacauccugcugaucagcagcaccggcaaccugaucgcccccagaggcuacuucaagaucagaaacggcaagagcagcaucaugagaagcgacgcccccaucgacaacugcuacagcgagugcaucacccccaacggcagcauccccaacgacaagcccuuccagaacgugaacagaaucaccuacggcgccugccccaaguacgugaagcagaagacccugaagcuggccaccggcaugagaaacgugcccgagaagcagaccagaggcaucuucggcgccaucgccggcuucaucgagaacggcugggagggcaugguggacggcugguacggcuucagacaccagaacagcgagggcaccggccaggccgccgaccugaagagcacccaggccgccaucgaccaggugaacggcaagcugaacagacugaucgagaagaccaacgagaaguuccaccagaucgagaaggaguucagcgagguggagggcagaauccaggaccuggagaaguacguggaggacaccaagaucgaccuguggagcuacaacgccgagcugcugguggcccuggagaaccagcacaccaucgaccugaccgacagcgagaugaacaagcuguucgagaagaccagaaagcagcugagagagaacgccgaggacaugggcaacggcugcuucaagaucuaccacaagugcgacaacgccugcaucggcagcaucagaaacggcaccuacgaccacgacguguacagagacgaggcccugaacaacagauuccagaucaagggcguggagcugaagagcggcuacaaggacuggauccuguggaucagcuucgccaucagcugcuuccugcugugcguggugcugcugggcuucaucaugugggccugccagaagggcaacaucagaugcaacaucugcaucuga

SEQ ID NO: 160083 - RNA, 1701 nt, Artificial Sequence
  derived and/or modified CDS sequence (opt4) from hemagglutinin__InfluenzaA__AAK52911
augaagaccaucaucgcccugagcuacauccugugccugguguucgcccagaagcugcccggcaacgacaacagcaccgccacccugugccugggccaccacgccgugcccaacggcacccuggugaagaccaucaccaacgaccagaucgaggugaccaacgccaccgagcuggugcagagcagcagcaccggcagaaucugcgacagcccccaccagauccuggacggcaagaacugcacccugaucgacgcccugcugggcgacccccacugcgacggcuuccagaacaaggagugggaccuguucguggagagaagcaccgccuacagcaacugcuaccccuacgacgugcccgacuacgccagccugagaagccugguggccagcagcggcacccuggaguucaccaaggagggcuucaacuggaccggcguggcccaggacggcaccagcuacgccugcaagagaggcagcgugaagagcuucuucagcagacugaacuggcugcacaagcuggaguacaaguaccccgcccugaacgugaccaugcccaacaacgacaaguucgacaagcuguacaucuggggcgugcaccaccccagcaccgacagcgaccagaccagccuguacgugcaggccagcggcagagugaccgugagcaccaagagaagccagcagaccgugauccccaacaucggcagcagacccugggugagaggcgugagcagcagaaucagcaucuacuggaccaucgugaagcccggcgacauccugcugaucaacagcaccggcaaccugaucgcccccagaggcuacuucaagaucagaagcggcaagagcagcaucaugagaagcgacgcccccaucgacaacugcaacagcgagugcaucacccccaacggcagcauccccaacgacaagcccuuccagaacgugaacagaaucaccuacggcgccugccccagauacgugaagcagaacacccugaagcuggccaccggcaugagaaacgugcccgagaagcagaccagaggcaucuucggcgccaucgccggcuucaucgagaacggcugggagggcaugguggacggcugguacggcuucagacaccagaacagcgagggcaccggccaggccgccgaccugaagagcacccaggccgccaucaaccagaucaacggcaagcugaacagacugaucgagaagaccaacgagaaguuccaccagaucgagaaggaguucagcgagguggagggcagaauccaggaccuggagaaguacguggaggacaccaagaucgaccuguggagcuacaacgccgagcugcugguggcccuggagaaccagcacaccaucgaccugaccgacagcgagaugaacaagcuguucgagagaaccagaaagcagcugagagagaacgccgaggacaugggcaacggcugcuucaagaucuaccacaagugcgacaacgccugcaucggcagcaucagaaacggcaccuacgaccacgacguguacagagacgaggcccugaacaacagauuccagaucaagggcguggagcugaagagcggcuacaaggacuggauccuguggaucagcuucgccaucagcugcuuccugcugugcguggugcugcugggcuucaucaugugggccugccagaagggcaacaucagaugcaacaucugcaucuga

SEQ ID NO: 160084 - RNA, 1701 nt, Artificial Sequence
  derived and/or modified CDS sequence (opt4) from hemagglutinin__InfluenzaA__AAK52912
augaagaccaucaucgcccugagcuacauccugugccugguguucgcccagaagcugcccggcaacgacaacagcaccgccacccugugccugggccaccacgccgugcccaacggcacccuggugaagaccaucaccaacgaccagaucgaggugaccaacgccaccgagcuggugcagagcagcagcaccggcagaaucugcgacagcccccacagaauccuggacggcaagaacugcacccugaucgacgcccugcugggcgacccccacugcgacggcuuccagaacaaggagugggaccuguucguggagagaaccaaggccuacagcaacugcuaccccuacgacgugcccgacuacgccagccugagaagccugguggccagcagcggcacccuggaguucaccaacgagggcuucaacuggaccggcguggcccagaacggcaccagcuacgccugcaagagaggcagcgugaagagcuucuucagcagacugaacuggcugcacaagcuggaguacaaguaccccgcccugaacgugaccaugcccaacaacgacaaguucgacaagcuguacaucuggggcgugcaccaccccagcaccgacagcgaccagaccagccuguacgugcaggccagcggcagagugaccgugagcaccaagagaagccagcagaccgugauccccaacaucggcagcagacccugggugagaggcgugagcagcagaaucagcaucuacuggaccaucgugaagcccggcgacauccugcugaucaacagcaccggcaaccugaucgcccccagaggcuacuucaagaucagaagcggcaagagcagcaucaugagaagcgacgcccccaucggcaacugcaacagcgagugcaucacccccaacggcagcauccccaacgacaagcccuuccagaacgugaacagaaucaccuacggcgccugccccagauacgugaagcagaacacccugaagcuggccaccggcaugagaaacgugcccgagaagcagaccagaggcaucuucggcgccaucgccggcuucaucgagaacggcugggagggcaugguggacggcugguacggcuucagacaccagaacagcgagggcaccggccaggccgccgaccugaagagcacccaggccgccaucaaccagaucaacggcaagcugaacagacugaucgagaagaccaacgagaaguuccaccagaucgagaaggaguucagcgagguggagggcagaauccaggaccuggagaaguacguggaggacaccaagaucgaccuguggagcuacaacgccgagcugcugguggcccuggagaaccagcacaccaucgaccugaccgacagcgagaugaacaagcuguucgagagaaccagaaagcagcugagagagaacgccgaggacaugggcaacggcugcuucaagaucuaccacaagugcgacaacgccugcaucggcagcaucagaaacggcaccuacgaccacgacguguacagagacgaggcccugaacaacagauuccagaucaagggcguggagcugaagagcggcuacaaggacuggauccuguggaucagcuucgccaucagcugcuuccugcugugcguggugcugcugggcuucaucaugugggccugccagaagggcaacaucagaugcaacaucugcaucuga

SEQ ID NO: 160085 - RNA, 1701 nt, Artificial Sequence
  derived and/or modified CDS sequence (opt4) from hemagglutinin__InfluenzaA__AAK71687
augaaggccauccugguggugcugcuguacaccuucaccaccgccaacgccgacacccugugcaucggcuaccacgccaacaacagcaccgacaccguggacaccgugcuggagaagaacgugaccgugacccacagcgugaaccugcuggaggacagacacaacggcaagcugugcaagcugagaggcguggccccccugcaccugggcaagugcaacaucgccggcuggcugcugggcaaccccgagugcgagagccuguucaccgccagcagcuggagcuacaucguggagaccagcaacagcgacaacggcaccugcuaccccggcgacuucaucaacuacgaggagcugagagagcagcugagcagcgugagcagcuucgagagauucgagaucuuccccgagaccagcagcuggcccaaccacgacaccaacagaggcgugaccgccgccugcccccacgccggcgccaacagcuucuacagaaaccugaucuggcuggccaagaagggcgacagcuaccccaagcugagcaagagcuacaucaacaacaagggcaaggaggugcuggugcuguggggcauccaccacccccccaccagcgccgaccagcagagccuguaccagaacgccgacgccuacguguucgugggcagcagcagauacagcaagaaguucaagcccgagaucgccaccagacccaaggugagaggccaggccggcagaaugaacuacuacuggacccugguggagcccggcgacaagaucaccuucgaggccaccggcaaccugguggugcccagauacgccuucgccaugaagagaaacagcgagagcggcaucaucaucagcgacaucagcgugcacgacugcaacaccaccugccagacccccaagggcgccaucaacaccagccugcccuuccagaacauccaccccgugaccaucggcgagugccccaaguacgugaagagcaccaagcugagaauggccaccggccugagaaacgugcccagcauccagagcagaggccuguucggcgccaucgccggcuucaucgagggcggcuggaccggcaugaucgacggcugguacggcuaccaccaccagaacgagcagggcagcggcuacgccgccgaccugaagagcacccagaacgccaucgacggcaucaccaacaaggugaacagcgugaucgagaagaugaacacccaguucaccguggugggcaaggaguucaaccaccuggagaagagaaucgagaaccugaacaagaagguggacgacggcuuccuggacaucuggaccuacaacgccgagcugcuggugcugcuggagaacgagagaacccuggacuaccacgacagcaacgugaagaaccuguacgagaaggugagaagccagcugaagaacaacgccaaggagaucggcaacggcugcuucgaguucuaccacaagugcgacgacaccugcauggagagcgugaagaacggcaccuacgacuaccccaaguacagcgaggaggccaagcugaacagagaggagaucgacggcgugaagcuggagagcaccagaaucuaccagauccuggccaucuacagcaccguggccagcagccuggugcugguggugagccugggcaccaucagcuucuggaugugcagcaacggcagccugcagugcagaaucugcaucuga

SEQ ID NO: 160086 - RNA, 1707 nt, Artificial Sequence
  derived and/or modified CDS sequence (opt4) from hemagglutinin__InfluenzaA__AAS65618
auggagaagaucgugcugcuguucgccaucgugagccuggugaagagcgaccagaucugcaucggcuaccacgccaacaacagcaccgagcagguggacaccaucauggagaagaacgugaccgugacccacgcccaggacauccuggagaagacccacaacggcaagcugugcgaccuggacggcgugaagccccugauccugagagacugcagcguggccggcuggcugcugggcaaccccaugugcgacgaguucaucaacgugcccgaguggagcuacaucguggagaaggccaaccccgugaacgaccugugcuaccccggcgacuucaacgacuacgaggagcugaagcaccugcugagcagaaucaaccacuucgagaagauccagaucauccccaagagcagcuggagcagccacgaggugagccugggcgugagcagcgccugccccuaccagggcaagagcagcuucuucagaaacgugguguggcugaucaagaagaacagcaccuaccccaccaucaagagaagcuacaacaacaccaaccaggaggaccugcuggugcuguggggcauccaccaccccaacgacgccgccgagcagaccaagcuguaccagaaccccaccaccuacaucagcgugggcaccagcacccugaaccagagacuggugcccagaaucgccaccagaagcaaggugaacggccagagcggcagaauggaguucuucuggaccauccugaagcccaacgacgccaucaacuucgagagcaacggcaacuucaucgcccccgaguacgccuacaagaucgugaagaagggcgacagcaccaucaugaagagcgagcuggaguacggcaacugcaacaccaagugccagacccccaugggcgccaucaacagcagcaugcccuuccacaacauccacccccugaccaucggcgagugccccaaguacgugaagagcaacagacuggugcuggccaccggccugagaaacagcccccagagagagagaagaagaaagaagagaggccuguucggcgccaucgccggcuucaucgagggcggcuggcagggcaugguggacggcugguacggcuaccaccacagcaacgagcagggcagcggcuacgccgccgccaaggagagcacccagaaggccaucgacggcgugaccaacaaggugaacagcaucaucgacaagaugaacacccaguucgaggccgugggcagagaguucaacaaccuggagagaagaaucgagaaccugaacaagaagauggaggacggcuuccuggacguguggaccuacaacgccgagcugcuggugcugauggagaacgagagaacccuggacuuccacgacagcaacgugaagaaccuguacgacaaggugagacugcagcugaaggacaacgccaaggagcugggcaacggcugcuucgaguucuaccacaagugcgacaacgagugcauggagagcgugagaaacggcaccuacgacuacccccaguacagcgaggaggccagacugaagagagaggagaucagcggcgugaagcuggagagcaucggcaucuaccagauccugagcaucuacagcaccguggccagcagccuggcccuggccaucaugguggccggccugagccuguggaugugcagcaacggcagccugcagugcagaaucugcaucuga

SEQ ID NO: 160087 - RNA, 1704 nt, Artificial Sequence
  derived and/or modified CDS sequence (opt4) from hemagglutinin__InfluenzaA__AAT38819
augaacacccagauccuggccuucaucgccugcaugcugaucggcaccaagggcgacaagaucugccugggccaccacgccguggccaacggcaccaaggugaacacccugaccgagagaggcaucgagguggugaacgccaccgagaccguggagaccgugaacaucaagaagaucugcacccagggcaagagacccaccgaccugggccagugcggccugcugggcacccugaucggccccccccagugcgaccaguuccuggaguucgacgccaaccugaucaucgagagaagagagggcaccgacgugugcuaccccggcaaguucaccaacgaggagagccugagacagauccugagaggcagcggcggcaucgacaaggagagcaugggcuucaccuacagcggcaucagaaccaacggcgccaccagcgccugcagaagaagcggcagcagcuucuacgccgagaugaaguggcugcugagcaacagcgacaacgccgccuucccccagaugaccaagagcuacagaaaccccagaaacaagcccgcccugaucaucuggggcgugcaccacagcggcagcgccaccgagcagaccaagcuguacggcagcggcaacaagcugaucaccgugggcagcagcaaguaccagcagagcuucacccccagccccggcgccagaccccaggugaacggccagagcggcagaaucgacuuccacuggcugcugcuggaccccaacgacaccgugaccuucaccuucaacggcgccuucaucgcccccgacagagccagcuucuucagaggcgagagccugggcgugcagagcgacgugccccuggacagcggcugcgagggcgacugcuuccacagcggcggcaccaucgugagcagccugcccuuccagaacaucaaccccagaaccgugggcaagugccccagauacgugaagcagaccagccugcugcuggccaccggcaugagaaacgugcccgagaaccccaagcaggccuaccagaagcagaugaccagaggccuguucggcgccaucgccggcuucaucgagaacggcugggagggccugaucgacggcugguacggcuucagacaccagaacgcccagggcgagggcaccgccgccgacuacaagagcacccagagcgccaucgaccagaucaccggcaagcugaacagacugaucgacaagaccaaccagcaguucgagcugaucgacaacgaguucagcgagaucgagcagcagaucggcaacgugaucaacuggaccagagacagcaugaccgagguguggagcuacaacgccgagcugcugguggccauggagaaccagcacaccaucgaccuggccgacagcgagaugaacaagcuguacgagagagugagaaagcagcugagagagaacgccgaggaggacggcaccggcugcuucgagaucuuccacaagugcgacgaccagugcauggagagcaucagaaacaacaccuacgaccacacccaguacagaaccgagagccugcagaacagaauccagaucgaccccgugaagcugagcagcggcuacaaggacaucauccugugguucagcuucggcgccagcugcuuccugcugcuggccaucgccaugggccugguguucaucugcaucaagaacggcaacaugagaugcaccaucugcaucuga

SEQ ID NO: 160088 - RNA, 1707 nt, Artificial Sequence
  derived and/or modified CDS sequence (opt4) from hemagglutinin__InfluenzaA__AAV32636
auggagaagaucgugcugcuguucgccaucgugagccuggugaagagcgaccagaucugcaucggcuaccacgccaacaacagcaccgagcagguggacaccaucauggagaagaacgugaccgugacccacgcccaggacauccuggagaagacccacaacggcaagcugugcgaccuggacggcgugaagccccugauccugagagacugcagcguggccggcuggcugcugggcaaccccaugugcgacgaguucaucaacgugcccgaguggagcuacaucguggagaaggccaaccccgugaacgaccugugcuaccccggcgacuucaacgacuacgaggagcugaagcaccugcugagcagaaucaaccacuucgagaagauccagaucauccccaagagcagcuggagcagccacgaggccagccugggcgugagcagcgccugccccuaccagggcaagagcagcuucuucagaaacgugguguggcugaucaagaagaacagcaccuaccccaccaucaagagaagcuacaacaacaccaaccaggaggaccugcuggugcuguggggcauccaccaccccaacgacgccgccgagcagaccaagcuguaccagaaccccaccaccuacaucagcgugggcaccagcacccugaaccagagacuggugcccagaaucgccaccagaagcaaggugaacggccagagcggcagaauggaguucuucuggaccauccugaagcccaacgacgccaucaacuucgagagcaacggcaacuucaucgcccccgaguacgccuacaagaucgugaagaagggcgacagcaccaucaugaagagcgagcuggaguacggcaacugcaacaccaagugccagacccccaugggcgccaucaacagcagcaugcccuuccacaacauccacccccugaccaucggcgagugccccaaguacgugaagagcaacagacuggugcuggccaccggccugagaaacagcccccagagagagagaagaagaaagaagagaggccuguucggcgccaucgccggcuucaucgagggcggcuggcagggcaugguggacggcugguacggcuaccaccacagcaacgagcagggcagcggcuacgccgccgacaaggagagcacccagaaggccaucgacggcgugaccaacaaggugaacagcaucaucgacaagaugaacacccaguucgaggccgugggcagagaguucaacaaccuggagagaagaaucgagaaccugaacaagaagauggaggacggcuuccuggacguguggaccuacaacgccgagcugcuggugcugauggagaacgagagaacccuggacuuccacgacagcaacgugaagaaccuguacgacaaggugagacugcagcugagagacaacgccaaggagcugggcaacggcugcuucgaguucuaccacaagugcgacaacgagugcauggagagcgugagaaacggcaccuacgacuacccccaguacagcgaggaggccagacugaagagagaggagaucagcggcgugaagcuggagagcaucggcaucuaccagauccugagcaucuacagcaccguggccagcagccuggcccuggccaucaugguggccggccugagccuguggaugugcagcaacggcagccugcagugcagaaucugcaucuga

SEQ ID NO: 160089 - RNA, 1707 nt, Artificial Sequence; identical to SEQ ID NO: 160088
  derived and/or modified CDS sequence (opt4) from hemagglutinin__InfluenzaA__AAV34704

SEQ ID NO: 160090 - RNA, 1707 nt, Artificial Sequence
  derived and/or modified CDS sequence (opt4) from hemagglutinin__InfluenzaA__AAV65826
auggagaagaucgugcugcuguucgccaucgugagccuggugaagagcgaccagaucugcaucggcuaccacgccaacaacagcaccgagcagguggacaccaucauggagaagaacgugaccgugacccacgcccaggacauccuggagaagacccacaacggcaagcugugcgaccuggacggcgugaagccccugauccugagagacugcagcguggccggcuggcugcugggcaaccccaugugcgacgaguucaucaacgugcccgaguggagcuacaucguggagaaggccaaccccgugaacgaccugugcuaccccggcgacuucaacgacuacgaggagcugaagcaccugcugagcagaaucaaccacuucgagaagauccagaucauccccaagagcagcuggagcagccacgaggccagccugggcgugagcagcgccugccccuaccagggcaagagcagcuucuucagaaacgugguguggcugaucaagaagaacagcaccuaccccaccaucaagagaagcuacaacaacaccaaccaggaggaccugcuggugcugggcggcauccaccaccccaacgacgccgccgagcagaccaagcuguaccagaaccccaccaccuacaucagcgugggcaccagcacccugaaccagagacuggugcccagaaucgccaccagaagcaaggugaacggccagagcggcagaauggaguucuucuggaccauccugaagcccaacgacgccaucaacuucgagagcaacggcaacuucaucgcccccgaguacgccuacaagaucgugaagaagggcgacagcaccaucaugaagagcgagcuggaguacggcaacugcaacaccaagugccagacccccaugggcgccaucaacagcagcaugcccuuccacaacauccacccccugaccaucggcgagugccccaaguacgugaagagcaacagacuggugcuggccaccggccugagaaacagcccccagagagagagaagaagaaagaagagaggccuguucggcgccaucgccggcuucaucgagggcggcuggcagggcaugguggacggcugguacggcuaccaccacagcaacgagcagggcagcggcuacgccgccgacaaggagagcacccagaaggccaucgacggcgugaccaacaaggugaacagcaucaucgacaagaugaacacccaguucgaggccgugggcagagaguucaacaaccuggagagaagaaucgagaaccugaacaagaagauggaggacggcuuccuggacguguggaccuacaacgccgagcugcuggugcugauggagaacgagagaacccuggacuuccacgacagcaacgugaagaaccuguacgacaaggugagacugcagcugagagacaacgccaaggagcugggcaacggcugcuucgaguucuaccacaagugcgacaacgagugcauggagagcgugagaaacggcaccuacgacuacccccaguacagcgaggaggccagacugaagagagaggagaucagcggcgugaagcuggagagcaucggcaucuaccagauccugagcaucuacagcaccguggccagcagccuggcccuggccaucaugguggccggccugagccuguggaugugcagcaacggcagccugcagugcagaaucugcaucuga

SEQ ID NO: 160091 - RNA, 1701 nt, Artificial Sequence
  derived and/or modified CDS sequence (opt4) from hemagglutinin__InfluenzaA__AAX11505
augaagaccaucaucgcccugagcuacauccugugccugguguucgcccagaagcugcccggcaacgacaacagcaccgccacccugugccugggccaccacgccgugcccaacggcaccaucgugaagaccaucaccaacgaccagaucgaggugaccaacgccaccgagcuggugcagagcagcagcaccggcggcaucugcgacagcccccaccagauccuggacggcgagaacugcacccugaucgacgcccugcugggcgacccccagugcgacggcuuccagaacaagaagugggaccuguucguggagagaagcaaggccuacagcaacugcuaccccuacgacgugcccgacuacgccagccugagaagccugguggccagcagcggcacccuggaguucaacaacgagagcuucaacuggaccggcgugacccagaacggcaccagcagcgccugcgagagaagaagcaacaagagcuucuucagcagacugaacuggcugacccaccugaaguacaaguaccccgcccugaacgugaccaugcccaacaacgagaaguucgacaagcuguacaucuggggcgugcaccaccccggcaccgacagcgaccagaucagccuguacgcccaggccagcggcagaaucaccgugagcaccaagagaagccagcagaccgugauccccaacaucggcagcagacccagagugagagacgugagcagcagaaucagcaucuacuggaccaucgugaagcccggcgacauccugcugaucaacagcaccggcaaccugaucgcccccagaggcuacuucaagaucagaagcggcaagagcagcaucaugagaagcgacgcccccaucggcaagugcaacagcgagugcaucacccccaacggcagcauccccaacgacaagcccuuccagaacgugaacagaaucaccuacggcgccugccccagauacgugaagcagaacacccugaagcuggccaccggcaugagaaacgugcccgagaagcagaccagaggcaucuucggcgccaucgccggcuucaucgagaacggcugggagggcaugguggacggcugguacggcuucagacaccagaacagcgagggcaccggccaggccgccgaccugaagagcacccaggccgccaucaaccagaucaacggcaagcugaacagacugaucggcaagaccaacgagaaguuccaccagaucgagaaggaguucagcgagguggagggcagaauccaggaccuggagaaguacguggaggacaccaagaucgaccuguggagcuacaacgccgagcugcugguggcccuggagaaccagcacaccaucgaccugaccgacagcgagaugaacaagcuguucgagagaaccaagaagcagcugagagagaacgccgaggacaugggcaacggcugcuucaagaucuaccacaagugcgacaacgccugcaucggcagcaucagaaacggcaccuacgaccacgacguguacagagacgaggcccugaacaacagauuccagaucaagggcguggagcugaagagcggcuacaaggacuggauccuguggaucagcuucgccaucagcugcuuccugcugugcguggcccugcugggcuucaucaugugggccugccagaagggcaacaucagaugcgacaucugcaucuga

SEQ ID NO: 160092 - RNA, 1701 nt, Artificial Sequence
  derived and/or modified CDS sequence (opt4) from hemagglutinin__InfluenzaA__AAX11525
augaagaccaucaucgcccugagcuacauccugugccugguguucgcccagaagcugcccggcaacgacaacagcaccgccacccugugccugggccaccacgccgugcccaacggcaccaucgugaagaccaucaccaacgaccagaucgaggugaccaacgccaccgagcuggugcagagcagcagcaccggcggcaucugcgacagcccccaccagauccuggacggcgagaacugcacccugaucgacgcccugcugggcgacccccagugcgacggcuuccagaacaagaagugggaccuguucguggagagaagcaaggccuacagcaacugcuaccccuacgacgugcccgacuacgccagccugagaagccugguggccagcagcggcacccuggaguucaacaacgagagcuucgacuggaccggcgugacccagaacggcaccagcagcgccugcaagagaagaagcaacaagagcuucuucagcagacugaacuggcugacccaccugaaguacaaguaccccgcccugaacgugaccaugcccaacaacgagaaguucgacaagcuguacaucuggggcgugcaccaccccggcaccgacagcgaccagaucagccuguacgcccaggccagcggcagaaucaccgugagcaccaagagaagccagcagaccgugauccccaacaucggcagcagacccagagugagagacgugagcagcagaaucagcaucuacuggaccaucgugaagcccggcgacauccugcugaucaacagcaccggcaaccugaucgcccccagaggcuacuucaagaucagaagcggcaagagcagcaucaugagaagcgacgcccccaucggcaagugcaacagcgagugcaucacccccaacggcagcauccccaacgacaagcccuuccagaacgugaacagaaucaccuacggcgccugccccagauacgugaagcagaacacccugaagcuggccaccggcaugagaaacgugcccgagaagcagaccagaggcaucuucggcgccaucgccggcuucaucgagaacggcugggagggcaugguggacggcugguacggcuucagacaccagaacagcgagggcaccggccaggccgccgaccugaagagcacccaggccgccaucaaccagaucaacggcaagcugaacagacugaucggcaagaccaacgagaaguuccaccagaucgagaaggaguucagcgagguggagggcagaauccaggaccuggagaaguacguggaggacaccaagaucgaccuguggagcuacaacgccgagcugcugguggcccuggagaaccagcacaccaucgaccugaccgacagcgagaugaacaagcuguucgagagaaccaagaagcagcugagagagaacgccgaggacaugggcaacggcugcuucaagaucuaccacaagugcgacaacgccugcaucggcagcaucagaaacggcaccuacgaccacgacguguacagagacgaggcccugaacaacagauuccagaucaagggcguggagcugaagagcggcuacaaggacuggauccuguggaucagcuucgccaucagcugcuuccugcugugcguggcccugcugggcuucaucaugugggccugccagaagggcaacaucagaugcaacaucugcaucuga

SEQ ID NO: 160093 - RNA, 1701 nt, Artificial Sequence; identical to SEQ ID NO: 160092
  derived and/or modified CDS sequence (opt4) from hemagglutinin__InfluenzaA__AAX11535

SEQ ID NO: 160094 - RNA, 1701 nt, Artificial Sequence; identical to SEQ ID NO: 160092
  derived and/or modified CDS sequence (opt4) from hemagglutinin__InfluenzaA__AAX11545

SEQ ID NO: 160095 - RNA, 1701 nt, Artificial Sequence; identical to SEQ ID NO: 160091
  derived and/or modified CDS sequence (opt4) from hemagglutinin__InfluenzaA__AAX11555

SEQ ID NO: 160096 - RNA, 1701 nt, Artificial Sequence; identical to SEQ ID NO: 160092
  derived and/or modified CDS sequence (opt4) from hemagglutinin__InfluenzaA__AAX11565

SEQ ID NO: 160097 - RNA, 1701 nt, Artificial Sequence
  derived and/or modified CDS sequence (opt4) from hemagglutinin__InfluenzaA__AAX11585
augaagaccaucaucgcccugagcuacauccugugccugguguucgcccagaagcugcccggcaacgacaacagcaccgccacccugugccugggccaccacgccgugcccaacggcaccaucgugaagaccaucaccaacgaccagaucgaggugaccaacgccaccgagcuggugcagaucagcagcaccggcggcaucugcgacagcccccaccagauccuggacggcgagaacugcacccugaucgacgcccugcugggcgacccccagugcgacggcuuccagaacaagaagugggaccuguucguggagagaagcaaggccuacagcaacugcuaccccuacgacgugcccgacuacgccagccugagaagccugguggccagcagcggcacccuggaguucaacaacgagagcuucgacuggaccggcgugacccagaacggcaccagcagcgccugcaagagaagaagcaacaagagcuucuucagcagacugaacuggcugacccaccugaaguacaaguaccccgcccugaacgugaccaugcccaacaacgagaaguucgacaagcuguacaucuggggcgugcaccaccccggcaccgacaacgaccagaucagccuguacgcccaggccagcggcagaaucaccgugagcaccaagagaagccagcagaccgugauccccaacaucggcagcagacccagagugagagacgugagcagccagaucagcaucuacuggaccaucgugaagcccggcgacauccugcugaucaacagcaccggcaaccugaucgcccccagaggcuacuucaagaucagaagcggcaagagcagcaucaugagaagcgacgcccccaucggcaagugcaacagcgagugcaucacccccaacggcagcauccccaacgacaagcccuuccagaacgugaacagaaucaccuacggcgccugccccagauacgugaagcagaacacccugaagcuggccaccggcaugagaaacgugcccgagaagcagaccagaggcaucuucggcgccaucgccggcuucaucgagaacggcugggagggcaugguggacggcugguacggcuucagacaccagaacagcgagggcaccggccaggccgccgaccugaagagcacccaggccgccaucaaccagaucaacggcaagcugaacagacugaucggcaagaccaacgagaaguuccaccagaucgagaaggaguucagcgagguggagggcagaauccaggaccuggagaaguacguggaggacaccaagaucgaccuguggagcuacaacgccgagcugcugguggcccuggagaaccagcacaccaucgaccugaccgacagcgagaugaacaagcuguucgagagaaccaagaagcagcugagagagaacgccgaggacaugggcaacggcugcuucaagaucuaccacaagugcgacaacgccugcaucggcagcaucagaaacggcaccuacgaccacgacguguacagagacgaggcccugaacaacagauuccagaucaagggcguggagcugaagagcggcuacaaggacuggauccuguggaucagcuucgccaucagcugcuuccugcugugcguggcccugcugggcuucaucaugugggccugccagaagggcaacaucagaugcaacaucugcaucuga

SEQ ID NO: 160098 - RNA, 1701 nt, Artificial Sequence; identical to SEQ ID NO: 160092
  derived and/or modified CDS sequence (opt4) from hemagglutinin__InfluenzaA__AAX11605

SEQ ID NO: 160099 - RNA, 1701 nt, Artificial Sequence; identical to SEQ ID NO: 160092
  derived and/or modified CDS sequence (opt4) from hemagglutinin__InfluenzaA__AAX11615

SEQ ID NO: 160100 - RNA, 1701 nt, Artificial Sequence
  derived and/or modified CDS sequence (opt4) from hemagglutinin__InfluenzaA__AAX11625
augaagaccaucaucgcccugagcuacauccugugccugguguucgcccagaagcugcccggcaacgacaacagcaccgccacccugugccugggccaccacgccgugcccaacggcacccuggugaagaccaucaccaacgaccagaucgaggugaccaacgccaccgagcuggugcagagcagcagcaccagcagaaucugcgacagcccccaccagauccuggacggcgagaacugcacccugaucgacgcccugcugggcgacccccacugcgacggcuuccagaacaaggagugggaccuguucguggagagaagcaaggccuacagcaacugcuaccccuacgacgugcccgacuacgugagccugagaagccugguggccagcagcggcacccuggaguucaacaacgagagcuucaacuggaccggcguggcccagaacggcaccagcagcgccugcaagagaagaagcgacaagagcuucuucagcagacugaacuggcugcaccagcugaaguacaaguaccccgcccugaacgugaccaugcccaacaacgagaaguucgacaagcuguacaucuggggcgugcaccaccccggcaccgacagcgaccagaucagccuguacgcccaggccagcggcagagugaccgugagcaccaagagaagccagcagaccgugauccccaacaucggcagcggccccugggugagaggcgugagcagcagaaucagcaucuacuggaccaucgugaagcccggcgacauccugcugaucaacagcaccggcaaccugaucgcccccagaggcuacuucaagaucagaagcggcaagagcagcaucaugagaagcgacgcccccaucggcaagugcaacagcgagugcaucacccccaacggcagcauccccaacgacaagcccuuccagaacgugaacagaaucaccuacggcgccugccccagauacgugaagcagaacacccugaagcuggccaccggcaugagaaacgugcccgagaagcaggccagaggcaucuucggcgccaucgccggcuucaucgagaacggcugggagggcaugauggacggcugguacggcuucagacaccagaacagcgagggcaccggccaggccgccgaccugaagagcacccaggccgccaucaaccagaucaacggcaagcugaacagacugaucgagaagaccaacgagaaguuccaccagaucgagaaggaguucagcgagguggagggcagaauccaggaccuggagaaguacguggaggacaccaagaucgaccuguggagcuacaacgccgagcugcugguggcccuggagaaccagcacaccaucgaccugaccgacagcgagaugaacaagcuguucgagagaaccaagaagcagcugagagagaacgccgaggacaugggcaacggcugcuucaagaucuaccacaagugcgacaacgccugcaucggcagcaucagaaacggcaccuacgaccacgacguguacagagacgaggcccugaacaacagauuccagaucaagggcguggagcugaagagcggcuacaaggacuggauccuguggaucagcuucgccaucagcugcuuccugcugugcaucgugcugcugggcuucaucaugugggccugccagaagggcaacaucagaugcaacaucugcaucuga

SEQ ID NO: 160101 - RNA, 1701 nt, Artificial Sequence; identical to SEQ ID NO: 160092
  derived and/or modified CDS sequence (opt4) from hemagglutinin__InfluenzaA__AAX12731

SEQ ID NO: 160102 - RNA, 1701 nt, Artificial Sequence
  derived and/or modified CDS sequence (opt4) from hemagglutinin__InfluenzaA__AAX12741
augaagaccaucaucgcccugagcuacauccugugccugguguucgcccagaagcugcccggcaacgacaacagcaccgccacccugugccugggccaccacgccgugcccaacggcaccaucgugaagaccaucaccaacgaccagaucgaggugaccaacgccaccgagcuggugcagagcagcagcaccggcggcaucugcgacagcccccaccagauccuggacggcgagaacugcacccugaucgacgcccugcugggcgacccccagugcgacggcuuccagaacaagaagugggaccuguucguggagagaagcaaggccuacagcaacugcuaccccuacgacgugcccgacuacgccagccugagaagccugguggccagcagcggcacccuggaguucaacaacgagagcuucgacuggaccggcgugacccagaacggcaccagcagcgccugcaagagaagaagcaacaagagcuucuucagcagacugaacuggcugacccaccugaaguacaaguaccccgcccugaacgugaccaugcccaacaacgagaaguucgacaagcuguacaucuggggcgugcaccaccccggcaccgacagcgaccagaucagccuguacgcccaggccagcggcagaaucaccgugagcaccaagagaagccagcagaccgugauccccaacaucggcagcagacccagagugagagacgugagcagcagaaucagcaucuacuggaccaucgugaagcccggcgacauccugcugaucaacagcaccggcaaccugaucgcccccagaggcuacuucaagaucagaagcggcaagagcagcaucaugagaagcgacgcccccaucggcaagugcaacagcgagugcaucacccccaacggcagcauccccaacgacaagcccuuccagaacgugaacagaaucaccuacggcgccugccccagauacgugaagcagaacacccugaagcuggccaccggcaugagaaacgugcccgagaagcagaccagaggcaucuucggcgccaucgccggcuucaucgagaacggcugggagggcaugguggacggcugguacggcuucagacaccagaacagcgagggcaccggccaggccgccgaccugaagagcacccaggccgccaucaaccagaucaacggcaagcugaacagacugaucggcaagaccaacgagaaguuccaccagaucgagaaggaguucagcgagguggagggcagaauccaggaccuggagaaguacguggaggacaccaagaucgaccuguggagcuacaacgccgagcugcugguggcccuggagaaccagcacaccaucgaccugaccgacagcgagaugaacaagcuguucgagagaaccaagaagcagcugagagagaacgccgaggacaugggcaacggcugcuucaagaucuaccacaagugcgacaacgccugcaucggcagcaucagaaacggcaccuacgaccacgacguguacagagacgaggcccugaacaacagauuccagaucaagggcguggagcugaagagcggcuacaaggacuggauccuguggaucagcuucgccaccagcugcuuccugcugugcguggcccugcugggcuucaucaugugggccugccagaagggcaacaucagaugcaacaucugcaucuga

SEQ ID NO: 160103 - RNA, 1701 nt, Artificial Sequence; identical to SEQ ID NO: 160092
  derived and/or modified CDS sequence (opt4) from hemagglutinin__InfluenzaA__AAX12751

SEQ ID NO: 160104 - RNA, 1701 nt, Artificial Sequence
  derived and/or modified CDS sequence (opt4) from hemagglutinin__InfluenzaA__AAX12761
augaagaccaucaucgcccugagcuacauccugugccugguguucgcccagaagcugcccggcaacgacaacagcaccgccacccugugccugggccaccacgccgugcccaacggcacccuggugaagaccaucaccaacgaccagaucgaggugaccaacgccaccgagcuggugcagagcagcagcaccggcagaaucugcgacagcccccaccagauccuggacggcgagaacugcacccugaucgacgcccugcugggcgacccccacugcgacggcuuccagaacaaggagugggaccuguucguggagagaagcaaggccuacagcaacugcuaccccuacgacgugcccgacuacgugagccugagaagccugguggccagcagcggcacccuggaguucaacaacgagagcuucaacuggaccggcguggcccagaacggcaccagcagcgccugcaagagaagaagcgacaagagcuucuucagcagacugaacuggcugcaccagcugaaguacaaguaccccgcccugaacgugaccaugcccaacaacgagaaguucgacaagcuguacaucuggggcgugcaccaccccggcaccgacagcgaccagaucagccuguacgcccaggccagcggcagagugaccgugagcaccaagagaagccagcagaccgugauccccaacaucggcagcagacccugggugagaggcgugagcagcagaaucagcaucuacuggaccaucgugaagcccggcgacauccugcugaucaacagcaccggcaaccugaucgcccccagaggcuacuucaagaucagaagcggcaagagcagcaucaugagaagcgacgcccccaucggcaagugcaacagcgagugcaucacccccaacggcagcauccccaacgacaagcccuuccagaacgugaacagaaucaccuacggccccugccccagauacgugaagcagaacacccugaagcuggccaccggcaugagaaacgugcccgagaagcagaccagaggcaucuucggcgccaucgccggcuucaucgagaacggcugggagggcaugauggacggcugguacggcuucagacaccagaacagcgagggcaccggccaggccgccgaccugaagagcacccaggccgccaucaaccagaucaacggcaagcugaacagacugaucgagaagaccaacgagaaguuccaccagaucgagaaggaguucagcgagguggagggcagaauccaggaccuggagaaguacguggaggacaccaagaucgaccuguggagcuacaacgccgagcugcugguggcccuggagaaccagcacaccaucgaccugaccgacagcgagaugaacaagcuguucgagagaaccaagaagcagcugagagagaacgccgaggacaugggcaacggcugcuucaagaucuaccacaagugcgacaacgugugcaucggcagcaucagaaacggcaccuacgaccacgacguguacagagacgaggcccugaacaacagauuccagaucaagggcguggagcugaagagcggcuacaaggacuggauccuguggaucagcuucgccaucagcugcuuccugcugugcaucgugcugcugggcuucaucaugugggccugccagaagggcaacaucagaugcaacaucugcaucuga

SEQ ID NO: 160105 - RNA, 1701 nt, Artificial Sequence
  derived and/or modified CDS sequence (opt4) from hemagglutinin__InfluenzaA__AAX12791
augaagaccaucaucgcccugagcuacauccugugccugguguucgcccagaagcugcccggcaacgacaacagcauggccacccugugccugggccaccacgccgugcccaacggcacccuggugaagaccaucaccaacgaccagaucgaggugaccaacgccaccgagcuggugcagagcagcagcaccggcagaaucugcgacagcccccaccagauccuggacggcgagaacugcacccugaucgacgcccugcugggcgacccccacugcgacggcuuccagaacaaggagugggaccuguucguggagagaagcaaggccuacagcaacugcuaccccuacgacgugcccgacuacgugagccugagaagccugguggccagcagcggcacccuggaguucaacaacgagagcuucaacuggaccggcguggcccagaacggcaccagcagcgccugcaagagaagaagcgacaagagcuucuucagcagacugaacuggcugcaccagcugaaguacaaguaccccgcccugaacgugaccaugcccaacaacgagaaguucgacaagcuguacaucuggggcgugcaccaccccggcaccgacagcgaccagaucagccuguacgcccaggccagcggcagagugaccgugagcaccaagagaagccagcagaccgugauccccaacaucggcagcggccccugggugagaggcgugagcagcagaaucagcaucuacuggaccaucgugaagcccggcgacauccugcugaucaacagcaccggcaaccugaucgcccccagaggcuacuucaagaucagaagcggcaagagcagcaucaugagaagcgacgcccccaucgacaagugcaacagcgagugcaucacccccaacggcagcauccccaacgacaagcccuuccagaacgugaacagaaucaccuacggccugugccccagauacgugaagcagaacacccugaagcuggccaccggcaugagaaacgugcccgagaagcagaccagaggcaucuucggcgccaucgccggcuucaucgagaacggcugggagggcaugauggacggcugguacggcuucagacaccagaacagcgagggcaccggccaggccgccgaccugaagagcacccaggccgccaucaaccagaucaacggcaagcugaacagacugaucgagaagaccaacgagaaguuccaccagaucgagaaggaguucagcgagguggagggcagaauccaggaccuggagaaguacguggaggacaccaagaucgaccuguggagcuacaacgccgagcugcugguggcccuggagaaccagcacaccaucgaccugaccgacagcgagaugaacaagcuguucgagagaaccaagaagcagcugagagagaacgccgaggacaugggcaacggcugcuucaagaucuaccacaagugcgacaacgccugcaucggcagcaucagaaacggcaccuacgaccacgacguguacagagacgaggcccugaacaacagauuccagaucaagggcguggagcugaagagcggcuacaaggacuggauccuguggaucagcuucgccaucagcugcuuccugcugugcaucgugcugcugggcuucaucaugugggccugccagaagggcaacaucagaugcaacaucugcaucuga

SEQ ID NO: 160106 - RNA, 1701 nt, Artificial Sequence
  derived and/or modified CDS sequence (opt4) from hemagglutinin__InfluenzaA__AAX12801
augaagaccaucaucgcccugagcuacauccugugccugguguucgcccagaaguuccccggcaacgacaacagcaccgccacccugugccugggccaccacgccgugcccaacggcacccuggugaagaccaucaccaacgaccagaucgaggugaccaacgccaccgagcuggugcagagcagcagcaccgacagaaucugcgacagcccccaccagauccuggacggcgagaacugcacccugaucgacgcccugcugggcgacccccacugcgacggcuuccagaacaaggagugggaccuguucguggagagaagcaaggccuacagcaacugcuaccccuacgacgugcccgacuacgugagccugagaagccugguggccagcagcggcacccuggaguucaacaacgagagcuucaacuggaccggcguggcccagaacggcaccagcagcgccugcaagagaagaagcgacaagagcuucuucagcagacugaacuggcugcaccagcugaaguacaaguaccccgcccugaacgugaccaugcccaacaacgagaaguucgacaagcuguacaucuggggcgugcaccaccccggcaccgacagcgaccagaucagccuguacgcccaggccagcggcagagugaccgugagcaccaagagaagccagcagaccgugauccccaacaucggcagcagacccugggugagaggcgugagcagcagaaucagcaucuacuggaccaucgugaagcccggcgacauccugcugaucaacagcaccggcaaccugaucgcccccagaggcuacuucaagaucagaagcggcaagagcagcaucaugagaagcgacgcccccaucggcaagugcaacagcgagugcaucacccccaacggcagcauccccaacgacaagcccuuccagaacgugaacagaaucaccuacggcgccugccccagauacgugaagcagaacacccugaagcuggccaccggcaugagaaacgugcccgagaagcagaccagaggcaucuucggcgccaucgccggcuucaucgagaacggcugggagggcaugauggacggcugguacggcuucagacaccagaacagcgagggcaccggccaggccgccgaccugaagagcacccaggccgccaucaaccagaucaacggcaagcugaacagacugaucgagaagaccaacgagaaguuccaccagaucgagaaggaguucagcgagguggagggcagaauccaggaccuggagaaguacguggaggacaccaagaucgaccuguggagcuacaacgccgagcugcugguggcccuggagaaccagcacaccaucgaccugaccgacagcgagaugaacaagcuguucgagagaaccaagaagcagcugagagagaacgccgaggacaugggcaacggcugcuucaagaucuaccacaagugcgacaacgccugcaucggcagcaucagaaacggcaccuacgaccacgacguguacagagacgaggcccugaacaacagauuccagaucaagggcguggagcugaagagcggcuacaaggacuggauccuguggaucagcuucgccaucagcugcuuccugcugugcaucgugcugcugggcuucaucaugugggccugccagaagggcaacaucagaugcaacaucugcaucuga

SEQ ID NO: 160107 - RNA, 1701 nt, Artificial Sequence
  derived and/or modified CDS sequence (opt4) from hemagglutinin__InfluenzaA__AAX12811
augaagaccaucaucgcccugagcuacauccugugccugguguucgcccagaagcugcccggcaacgacaacagcaccgccacccugugccugggccaccacgccgugcccaacggcacccuggugaagaccaucaccaacgaccagaucgaggugaccaacgccaccgagcuggugcagagcagcagcaccagcagaaucugcgacagcccccaccagauccuggacggcgagaacugcacccugaucgacgcccugcugggcgacccccacugcgacggcuuccagaacaaggagugggaccuguucguggagagaagcaaggccuacagcaacugcuaccccuacgacgugcccgacuacgugagccugagaagccugguggccagcagcggcacccuggaguucaacaacgagagcuucaacuggaccggcguggcccagaacggcaccagcagcgccugcaagagaagaagcgacaagagcuucuucagcagacugaacuggcugcaccagcugaaguacaaguaccccgcccugaacgugaccaugcccaacaacgagaaguucgacaagcuguacaucuggggcgugcaccaccccggcaccgacagcgaccagaucagccuguacgcccaggccagcggcagagugaccgugagcaccaagagaagccagcagaccgugauccccaacaucggcagcagacccugggugagaggcgugagcagcagaaucagcaucuacuggaccaucgugaagcccggcgacauccugcugaucaacagcaccggcaaccugaucgcccccagaggcuacuucaagaucagaagcggcaagagcagcaucaugagaagcgacgcccccaucggcaagugcaacagcgagugcaucacccccaacggcagcauccccaacgacaagcccuuccagaacgugaacagaaucaccuacggcgccugccccagauacgugaagcagaacacccugaagcuggccaccggcaugagaaacgugcccgagaagcagaccagaggcaucuucggcgccaucgccggcuucaucgagaacggcugggagggcaugauggacggcugguacggcuucagacaccagaacagcgagggcaccggccaggccgccgaccugaagagcacccaggccgccaucaaccagaucaacggcaagcugaacagacugaucgagaagaccaacgagaaguuccaccagaucgagaaggaguucagcgagguggagggcagaauccaggaccuggagaaguacguggaggacaccaagaucgaccuguggagcuacaacgccgagcugcugguggcccuggagaaccagcacaccaucgaccugaccgacagcgagaugaacaagcuguucgagagaaccaagaagcagcugagagagaacgccgaggacaugggcaacggcugcuucaagaucuaccacaagugcgacaacgccugcaucggcagcaucagaaacggcaccuacgaccacgacguguacagagacgaggcccugaacaacagauuccagaucaagggcguggagcugaagagcggcuacaaggacuggauccuguggaucagcuucgccaucagcugcuuccugcugugcaucgugcugcugggcuucaucaugugggccugccagaagggcaacaucagaugcaacaucugcaucuga

SEQ ID NO: 160108 - RNA, 1701 nt, Artificial Sequence
  derived and/or modified CDS sequence (opt4) from hemagglutinin__InfluenzaA__AAX34061
augaagaccaucaucgcccugagcuacauccugugccugguguucgcccagaagcugcccggcaacgacaacagcaccgccacccugugccugggccaccacgccgugcccaacggcaccaucgugaagaccaucaccaacgaccagaucgaggugaccaacgccaccgagcuggugcagagcagcagcaccggcgagaucugcgacagcccccaccagauccuggacggcgagaacugcacccugaucgacgcccugcugggcgacccccagugcgacggcuuccagaacaagaagugggaccuguucguggagagaagcaaggccuacagcaacugcuaccccuacgacgugcccgacuacgccagccugagaagccugguggccagcagcggcacccuggaguucaacaacgagagcuucgacuggaccggcgugacccagaacggcaccagcagcgccugcaagagaagaagcaacaagagcuucuucagcagacugaacuggcugacccaccugaaguacaaguaccccgcccugaacgugaccaugcccaacaacgagaaguucgacaagcuguacaucuggggcgugcaccaccccggcaccgacagcgaccagaucagccuguacgcccaggccagcggcagaaucaccgugagcaccaagagaagccagcagaccgugauccccaacaucggcagcagacccagagugagagacgugagcagcagaaucagcaucuacuggaccaucgugaagcccggcgacauccugcugaucaacagcaccggcaaccugaucgcccccagaggcuacuucaagaucagaagcggcaagagcagcaucaugagaagcgacgcccccaucggcaagugcaacagcgagugcaucacccccaacggcagcauccccaacgacaagcccuuccagaacgugaacagaaucaccuacggcgccugccccagauacaucaagcagaacacccugaagcuggccaccggcaugagaaacgugcccgagaagcagaccagaggcaucuucggcgccaucgccggcuucaucgagaacggcugggagggcaugguggacggcugguacggcuucagacaccagaacagcgagggcaccggccaggccgccgaccugaagagcacccaggccgccaucaaccagaucaacggcaagcugaacagacugaucggcaagaccaacgagaaguuccaccagaucgagaaggaguucagcgagguggagggcagaauccaggaccuggagaaguacguggaggacaccaagaucgaccuguggagcuacaacgccgagcugcugguggcccuggagaaccagcacaccaucgaccugaccgacagcgagaugaacaagcuguucgagagaaccaagaagcagcugagagagaacgccgaggacaugggcaacggcugcuucaagaucuaccacaagugcgacaacgccugcaucggcagcaucagaaacggcaccuacgaccacgacguguacagagacgaggcccugaacaacagauuccagaucaagggcguggagcugaagagcggcuacaaggacuggauccuguggaucagcuucgccaucagcugcuuccugcugugcguggcccugcugggcuucaucaugugggccugccagaagggcaacaucagaugcaacaucugcaucuga

SEQ ID NO: 160109 - RNA, 1701 nt, Artificial Sequence
  derived and/or modified CDS sequence (opt4) from hemagglutinin__InfluenzaA__AAX35821
augaagaccaucaucgcccugagcuacauccugugccugguguucgcccagaagcugcccggcaacgacaacagcaccgccacccugugccugggccaccacgccgugcccaacggcaccaucgugaagaccaucaccaacgaccagaucgaggugaccaacgccaccgagcuggugcagagcagcagcaccggcggcaucugcgacagcccccaccagauccuggacggcgagaacugcacccugaucgacgcccugcugggcgacccccagugcgacggcuuccagaacaagaagugggaccuguucguggagagaagcaaggccuacagcaacugcuaccccuacgacgugcccgacuacgccagccugagaagccugguggccagcagcggcacccuggaguucaacaacgagagcuucaacuggaccggcgugacccagaacggcaccagcagcgccugcaagagaaagagcaacaagagcuucuucagcagacugaacuggcugacccaccugaaguacaaguaccccgcccugaacgugaccaugcccaacaacgagaaguucgacaagcuguacaucuggggcgugcaccaccccggcaccgacaacgaccagaucagccuguacgcccaggccagcggcagaaucaccgugagcaccaagagaagccagcagaccgugauccccaacaucggcagcagacccagagugagagacgugagcagcagaaucagcaucuacuggaccaucgugaagcccggcgacauccugcugaucaacagcaccggcaaccugaucgcccccagaggcuacuucaagaucagaagcggcaagagcagcaucaugagaagcgacgcccccaucggcaagugcaacagcgagugcaucacccccaacggcagcauccccaacgacaagcccuuccagaacgugaacagaaucaccuacggcgccugccccagauacgugaagcagaacacccugaagcuggccaccggcaugagaaacgugcccgagagacagaccagaggcaucuucggcgccaucgccggcuucaucgagaacggcugggagggcaugguggacggcugguacggcuucagacaccagaacagcgagggcaccggccaggccgccgaccugaagagcacccaggccgccaucaaccagaucaacggcaagcugaacagacugaucggcaagaccaacgagaaguuccaccagaucgagaaggaguucagcgagguggagggcagaauccaggaccuggagaaguacguggaggacaccaagaucgaccuguggagcuacaacgccgagcugcugguggcccuggagaaccagcacaccaucgaccugaccgacagcgagaugaacaagcuguucgagagaaccaagaagcagcugagagagaacgccgaggacaugggcaacggcugcuucaagaucuaccacaagugcgacaacgccugcaucggcagcaucagaaacggcaccuacgaccacgacguguacagagacgaggcccugaacaacagauuccagaucaagggcguggagcugaagagcggcuacaaggacuggauccuguggaucagcuucgccaucagcugcuuccugcugugcguggcccugcugggcuucaucaugugggccugccagaagggcaacaucagaugcaacaucugcaucuga

SEQ ID NO: 160110 - RNA, 1701 nt, Artificial Sequence; identical to SEQ ID NO: 160091
  derived and/or modified CDS sequence (opt4) from hemagglutinin__InfluenzaA__AAX35831

SEQ ID NO: 160111 - RNA, 1701 nt, Artificial Sequence
  derived and/or modified CDS sequence (opt4) from hemagglutinin__InfluenzaA__AAX35851
augaagaccaucaucgcccugagcuacauccugugccugguguucgcccagaagcugcccggcaacgacaacagcaccgccacccugugccugggccaccacgccgugcccaacggcacccuggugaagaccaucaccaacgaccagaucgaggugaccaacgccaccgagcuggugcagagcagcagcaccggcagaaucugcgacagcccccaccagauccuggacggcgagaacugcacccugaucgacgcccugcugggcgacccccacugcgacggcuuccagaacaaggagugggaccuguucguggagagaagcaaggccuacagcaacugcuaccccuacgacgugcccgacuacgugagccugagaagccugguggccagcagcggcacccuggaguucaacaacgagagcuucaacuggaccggcguggcccagaacggcaccagcagcgccugcaagagaagaagcgacaagagcuucuucagcagacugaacuggcugcaccagcugaaguacaaguaccccgcccugaacgugaccaugcccaacaacgagaaguucgacaagcuguacaucuggggcgugcaccaccccggcaccgacagcgaccagaucagccuguacgcccaggccagcggcagagugaccgugagcaccaagagaagccagcagaccgugauccccaacaucggcagcagacccugggugagaggcgugagcagcagaaucagcaucuacuggaccaucgugaagcccggcgacauccugcugaucaacagcaccggcaaccugaucgcccccagaggcuacuucaagaucagaagcggcaagagcagcaucaugagaagcgacgcccccaucggcaagugcaacagcgagugcaucacccccaacggcagcauccccaacgacaagcccuuccagaacgugaacagaaucaccuacggccccugccccagauacgugaagcagaacacccugaagcuggccaccggcaugagaaacgugcccgagaagcagaccagaggcaucuucggcgccaucgccggcuucaucgagaacggcugggagggcaugauggacggcugguacggcuucagacaccagaacagcgagggcaccggccaggccgccgaccugaagagcacccaggccgccaucaaccagaucaacggcaagcugaacagacugaucgagaagaccaacgagaaguuccaccagaucgagaaggaguucagcgagguggagggcagaauccaggaccuggagaaguacguggaggacaccaagaucgaccuguggagcuacaacgccgagcugcugguggcccuggagaaccagcacaccaucgaccugaccgacagcgagaugaacaagcuguucgagagaaccaagaagcagcugagagagaacgccgaggacaugggcaacggcugcuucaagaucuaccacaagugcgacaacgccugcaucggcagcaucagaaacggcaccuacgaccacgacguguacagagacgaggcccugaacaacagauuccagaucaagggcguggagcugaagagcggcuacaaggacuggauccuguggaucagcuucgccaucagcugcuuccugcugugcaucgugcugcugggcuucaucaugugggccugccagaagggcaacaucagaugcaacaucugcaucuga

SEQ ID NO: 160112 - RNA, 1701 nt, Artificial Sequence
  derived and/or modified CDS sequence (opt4) from hemagglutinin__InfluenzaA__AAX35861
augaagaccaucaucgcccugagcuacauccugugccugguguucgcccagaagcugcccggcaacgacaacagcaccgccacccugugccugggccaccacgccgugcccaacggcacccuggugaagaccaucaccaacgaccagaucgaggugaccaacgccaccgagcuggugcagagcagcagcaccagcagaaucugcgacagcccccaccagauccuggacggcgagaacugcacccugaucgacgcccugcugggcgacccccacugcgacggcuuccagaacaaggagugggaccuguucguggagagaagcaaggccuacagcaacugcuaccccuacgacgugcccgacuacgugagccugagaagccugguggccagcagcggcacccuggaguucaacaacgagagcuucaacuggaccggcguggcccagaacggcaccagcagcgccugcaagagaagaagcgacaagagcuucuucagcagacugaacuggcugcaccagcugaaguacaaguaccccgcccugaacgugaccaugcccaacaacgagaaguucgacaagcuguacaucuggggcgugcaccaccccggcaccgacagcgaccagaucagccuguacgcccaggccagcggcagaaucaccgugagcaccaagagaagccagcagaccgugauccccaacaucggcagcggccccugggugagaggcgugagcagcagaaucagcaucuacuggaccaucgugaagcccggcgacauccugcugaucaacagcaccggcaaccugaucgcccccagaggcuacuucaagaucagaagcggcaagagcagcaucaugagaagcgacgcccccaucggcaagugcaacagcgagugcaucacccccaacggcagcauccccaacgacaagcccuuccagaacgugaacagaaucaccuacggcgccugccccagauacgugaagcagaacacccugaagcuggccaccggcaugagaaacgugcccgagaagcagaccagaggcaucuucggcgccaucgccggcuucaucgagaacggcugggagggcaugauggacggcugguacggcuucagacaccagaacagcgagggcaccggccaggccgccgaccugaagagcacccaggccgccaucaaccagaucaacggcaagcugaacagacugaucgagaagaccaacgagaaguuccaccagaucgagaaggaguucagcgagguggagggcagaauccaggaccuggagaaguacguggaggacaccaagaucgaccuguggagcuacaacgccgagcugcugguggcccuggagaaccagcacaccaucgaccugaccgacagcgagaugaacaagcuguucgagagaaccaagaagcagcugagagagaacgccgaggacaugggcaacggcugcuucaagaucuaccacaagugcgacaacgccugcaucggcagcaucagaaacggcaccuacgaccacgacguguacagagacgaggcccugaacaacagauuccagaucaagggcguggagcugaagagcggcuacaaggacuggauccuguggaucagcuucgccaucagcugcuuccugcugugcaucgugcugcugggcuucaucaugugggccugccagaagggcaacaucagaugcaacaucugcaucuga

SEQ ID NO: 160113 - RNA, 1701 nt, Artificial Sequence
  derived and/or modified CDS sequence (opt4) from hemagglutinin__InfluenzaA__AAX35871
augaagaccaucaucgcccugagcuacauccugugccugguguucgcccagaagcugcccggcaacgacaacagcaccgccacccugugccugggccaccacgccgugcccaacggcacccuggugaagaccaucaccaacgaccagaucgaggugaccaacgccaccgagcuggugcagagcagcagcgccagcagaaucugcgacagcccccaccagauccuggacggcgagaacugcacccugaucgacgcccugcugggcgacccccacugcgacggcuuccagaacaaggagugggaccuguucguggagagaagcaaggccuacagcaacugcuaccccuacgacgugcccgacuacgugagccugagaagccugguggccagcagcggcacccuggaguucaacaacgagagcuucaacuggaccggcguggcccagaacggcaccagcuucgccugcaagagaagaagcgacaagagcuucuucagcagacugaacuggcugcaccagcugaaguacaaguaccccgcccugaacgugaccaugcccaacaacgagaaguucgacaagcuguacaucuggggcgugcaccaccccggcaccgacagcgaccagaucagccuguacgcccaggccagcggcagagugaccgugagcaccaagagaagccagcagaccgugauccccaacaucggcagcggccccugggugagaggcgugagcagcagaaucagcaucuacuggaccaucgugaagcccggcgacauccugcugaucaacagcaccggcaaccugaucgcccccagaggcuacuucaagaucagaagcggcaagagcagcaucaugagaagcgacgcccccaucggcaagugcaacagcgagugcaucacccccaacggcagcauccccaacgacaagcccuuccagaacgugaacagaaucaccuacggcgccugccccagauacgugaagcagaacacccugaagcuggccaccggcaugagaaacgugcccgagaagcagaccagaggcaucuucggcgccaucgccggcuucaucgagaacggcugggagggcaugauggacggcugguacggcuucagacaccagaacagcgagggcaccggccaggccgccgaccugaagagcacccaggccgccaucaaccagaucaacggcaagcugaacagacugaucgagaagaccaacgagaaguuccaccagaucgagaaggaguucagcgagguggagggcagaauccaggaccuggagaaguacguggaggacaccaagaucgaccuguggagcuacaacgccgagcugcugguggcccuggagaaccagcacaccaucgaccugaccgacagcgagaugaacaagcuguucgagagaaccaagaagcagcugagagagaacgccgaggacaugggcaacggcugcuucaagaucuaccacaagugcgacaacgccugcaucggcagcaucagaaacggcaccuacgaccacgacguguacagagacgaggcccugaacaacagauuccagaucaagggcguggagcugaagagcggcuacaaggacuggauccuguggaucagcuucgccaucagcugcuuccugcugugcaucgugcugcugggcuucaucaugugggccugccagaagggcaacaucagaugcaacaucugcaucuga

SEQ ID NO: 160114 - RNA, 1701 nt, Artificial Sequence; identical to SEQ ID NO: 160107
  derived and/or modified CDS sequence (opt4) from hemagglutinin__InfluenzaA__AAX38237

SEQ ID NO: 160115 - RNA, 1701 nt, Artificial Sequence
  derived and/or modified CDS sequence (opt4) from hemagglutinin__InfluenzaA__AAX47515
augaaggccaucaucgcccugagcuacauccugugccugguguucgcccagaagcugcccggcaacgacaacagcaccgccacccugugccugggccaccacgccgugcccaacggcacccuggugaagaccaucaccaacgaccagaucgaggugaccaacgccaccgagcuggugcagagcagcagcaccggcagaaucugcgacagcccccaccagauccuggacggcgagaacugcacccugaucgacgcccugcugggcgacccccacugcgacggcuuccagaacaaggagugggaccuguucguggagagaagcaaggccuacagcaacugcuaccccuacgacgugcccgacuacgugagccugagaagccugguggccagcagcggcacccuggaguucaacaacgagagcuucaacuggaccggcguggcccagaacggcaccagcagcgccugcaagagaagaagcgacaagagcuucuucagcagacugaacuggcugcaccagcugaaguacaaguaccccgcccugaacgugaccaugcccaacaacgagaaguucgacaagcuguacaucuggggcgugcaccaccccggcaccgacagcgaccagaucagccuguacgcccaggccagcggcagagugaccgugagcaccaagagaagccagcagaccgugauccccaacaucggcagcagacccugggugagaggcgugagcagcagaaucagcaucuacuggaccaucgugaagcccggcgacauccugcugaucaacagcaccggcaaccugaucgcccccagaggcuacuucaagaucagaagcggcaagagcagcaucaugagaagcgacgcccccaucggcaagugcaacagcgagugcaucacccccaacggcagcauccccaacgacaagcccuuccagaacgugaacagaaucaccuacggcgccugccccagauacgugaagcagaacacccugaagcuggccaccggcaugagaaacgugcccgagaagcagaccagaggcaucuucggcgccaucgccggcuucaucgagaacggcugggagggcaugauggacggcugguacggcuucagacaccagaacagcgagggcaccggccaggccgccgaccugaagagcacccaggccgccaucaaccagaucaacggcaagcugaacagacugaucgagaagaccaacgagaaguuccaccagaucgagaaggaguucagcgagguggagggcagaauccaggaccuggagaaguacguggaggacaccaagaucgaccuguggagcuacaacgccgagcugcugguggcccuggagaaccagcacaccaucgaccugaccgacagcgagaugaacaagcuguucgagagaaccaagaagcagcugagagagaacgccgaggacaugggcaacggcugcuucaagaucuaccacaagugcgacaacgccugcaucggcagcaucagaaacggcaccuacgaccacgacguguacagagacgaggcccugaacaacagauuccagaucaagggcguggagcugaagagcggcuacaaggacuggauccuguggaucagcuucgccaucagcugcuuccugcugugcaucgugcugcugggcuucaucaugugggccugccagaagggcaacaucagaugcaacaucugcaucuga

SEQ ID NO: 160116 - RNA, 1701 nt, Artificial Sequence
  derived and/or modified CDS sequence (opt4) from hemagglutinin__InfluenzaA__AAX47525
augaagaccaucaucgcccugagcuacauccugugccugguguucgcccagaagcugcccggcaacgacaacagcaccgccacccugugcaugggccaccacgccgugcccaacggcacccuggugaagaccaucaccaacgaccagaucgaggugaccaacgccaccgagcuggugcagagcagcagcaccggcagaaucugcgacagcccccaccagauccuggacggcgagaacugcacccugaucgacgcccugcugggcgacccccacugcgacggcuuccagaacaaggagugggaccuguucguggagagaagcaaggccuacagcaacugcuaccccuacgacgugcccgacuacgugagccugagaagccugguggccagcagcggcacccuggaguucaacaacgagagcuucaacuggaccggcguggcccagaacggcaccagcagcgccugcaagagaagaagcaacaagagcuucuucagcagacugaacuggcugcaccagcugaaguacaaguaccccgcccugaacgugaccaugcccaacaacgagaaguucgacaagcuguacaucuggggcgugcaccaccccgacaccgacagcaaccagaucagccuguacgcccaggccagcggcagagugaccgugagcaccaagagaagccagcagaccgugauccccaacaucggcagcggccccugggugagaggcgugagcagcagaaucagcaucuacuggaccaucgugaagcccggcgacauccugcugaucaacagcaccggcaaccugaucgcccccagaggcuacuucaagaucagaagcggcaagagcagcaucaugagaagcgacgcccccaucggcaagugcaacagcgagugcaucacccccaacggcagcauccccaacgacaagcccuuccagaacgugaacagaaucaccuacggcgccugccccagauacgugaagcagaacacccugaagcuggccaccggcaugagaaacgugcccgagaagcagaccagaggcaucuucggcgccaucgccggcuucaucgagaacggcugggagggcaugauggacggcugguacggcuucagacaccagaacagcgagggcaccggccaggccgccgaccugaagagcacccaggccgccaucaaccagaucaacggcaagcugaacagacugaucgagaagaccaacgagaaguuccaccagaucgagaaggaguucagcgagguggagggcagaauccaggaccuggagaaguacguggaggacaccaagaucgaccuguggagcuacaacgccgagcugcugguggcccuggagaaccagcacaccaucgaccugaccgacagcgagaugaacaagcuguucgagagaaccaagaagcagcugagagagaacgccgaggacaugggcaacggcugcuucaagaucuaccacaagugcgacaacgccugcaucggcagcaucagaaacggcaccuacgaccacgacguguacagagacgaggcccugaacaacagauuccagaucaagggcguggagcugaagagcggcuacaaggacuggauccuguggaucagcuucgccaucagcugcuuccugcugugcaucgugcugcugggcuucaucaugugggccugccagaagggcaacaucagaugcaacaucugcaucuga

SEQ ID NO: 160117 - RNA, 1701 nt, Artificial Sequence; identical to SEQ ID NO: 160107
  derived and/or modified CDS sequence (opt4) from hemagglutinin__InfluenzaA__AAX47535

SEQ ID NO: 160118 - RNA, 1701 nt, Artificial Sequence; identical to SEQ ID NO: 160091
  derived and/or modified CDS sequence (opt4) from hemagglutinin__InfluenzaA__AAX56380

SEQ ID NO: 160119 - RNA, 1701 nt, Artificial Sequence; identical to SEQ ID NO: 160091
  derived and/or modified CDS sequence (opt4) from hemagglutinin__InfluenzaA__AAX56390

SEQ ID NO: 160120 - RNA, 1701 nt, Artificial Sequence
  derived and/or modified CDS sequence (opt4) from hemagglutinin__InfluenzaA__AAX56400
augaagaccaucaucgcccugagcuacauccugugccugguguucgcccagaagcugcccggcaacgacaacagcaccgccacccugugccugggccaccacgccgugcccaacggcaccaucgugaagaccaucaccaacgaccagaucgaggugaccaacgccaccgagcuggugcagagcagcagcaccggcggcaucugcgacagcccccaccagauccuggacggcgagaacugcacccugaucgacgcccugcugggcgacccccagugcgacggcuuccagaacaagaagugggaccuguucguggagagaagcaaggccuacagcaacugcuaccccuacgacgugcccgacuacgccagccugagaagccugguggccagcagcggcacccuggaguucaacaacgagagcuucaacuggaccggcgugacccagaacggcaccagcagcgccugcgagagaagaagcaacaagagcuucuucagcagacugaacuggcugacccaccugaaguacaaguaccccgcccugaacgugaccaugcccaacaacgagaaguucgacaagcuguacaucuggggcgugcaccaccccggcaccgacagcgaccagaucagccuguacgcccaggccagcggcagaaucaccgugagcaccaagagaagccagcagaccgugauccccaacaucggcagcagacccagagugagagacaucagcagcagaaucagcaucuacuggaccaucgugaagcccggcgacauccugcugaucaacagcaccggcaaccugaucgcccccagaggcuacuucaagaucagaagcggcaagagcagcaucaugagaagcgacgcccccaucggcaagugcaacagcgagugcaucacccccaacggcagcauccccaacgacaagcccuuccagaacgugaacagaaucaccuacggcgccugccccagauacgugaagcagaacacccugaagcuggccaccggcaugagaaacgugcccgagaagcagaccagaggcaucuucggcgccaucgccggcuucaucgagaacggcugggagggcaugguggacggcugguacggcuucagacaccagaacagcgagggcaccggccaggccgccgaccugaagagcacccaggccgccaucaaccagaucaacggcaagcugaacagacugaucggcaagaccaacgagaaguuccaccagaucgagaaggaguucagcgagguggagggcagaauccaggaccuggagaaguacguggaggacaccaagaucgaccuguggagcuacaacgccgagcugcugguggcccuggagaaccagcacaccaucgaccugaccgacagcgagaugaacaagcuguucgagagaaccaagaagcagcugagagagaacgccgaggacaugggcaacggcugcuucaagaucuaccacaagugcgacaacgccugcaucggcagcaucagaaacggcaccuacgaccacgacguguacagagacgaggcccugaacaacagauuccagaucaagggcguggagcugaagagcggcuacaaggacuggauccuguggaucagcuucgccaucagcugcuuccugcugugcguggcccugcugggcuucaucaugugggccugccagaagggcaacaucagaugcgacaucugcaucuga

SEQ ID NO: 160121 - RNA, 1701 nt, Artificial Sequence; identical to SEQ ID NO: 160091
  derived and/or modified CDS sequence (opt4) from hemagglutinin__InfluenzaA__AAX56410

SEQ ID NO: 160122 - RNA, 1701 nt, Artificial Sequence
  derived and/or modified CDS sequence (opt4) from hemagglutinin__InfluenzaA__AAX56420
augaagaccaucaucgcccugagcuacuuccugugccugguguucgcccagaagcugcccggcaacgacaacagcaccgccacccugugccugggccaccacgccgugcccaacggcaccaucgugaagaccaucaccaacgaccagaucgaggugaccaacgccaccgagcuggugcagagcagcagcaccggcggcaucugcgacagcccccaccagauccuggacggcgagaacugcacccugaucgacgcccugcugggcgacccccagugcgacggcuuccagaacaagaagugggaccuguucguggagagaagcaaggccuacagcaacugcuaccccuacgacgugcccgacuacgccagccugagaagccugguggccagcagcggcacccuggaguucaacaacgagagcuucgacuggaccggcgugacccagaacggcaccagcagcgccugcaagagaagaagcaacaagagcuucuucagcagacugaacuggcugacccaccugaaguacaaguaccccgcccugaacgugaccaugcccaacaacgagaaguucgacaagcuguacaucuggggcgugcaccaccccggcaccgacagcgaccagaucagccuguacgcccaggccagcggcagaaucaccgugagcaccaagagaagccagcagaccgugauccccaacaucggcagcagacccagagugagagacgugagcagcagaaucagcaucuacuggaccaucgugaagcccggcgacauccugcugaucaacagcaccggcaaccugaucgcccccagaggcuacuucaagaucagaagcggcaagagcagcaucaugagaagcgacgcccccaucggcaagugcaacagcgagugcaucacccccaacggcagcauccccaacgacaagcccuuccagaacgugaacagaaucaccuacggcgccugccccagauacgugaagcagaacacccugaagcuggccaccggcaugagaaacgugcccgagaagcagaccagaggcaucuucggcgccaucgccggcuucaucgagaacggcugggagggcaugguggacggcugguacggcuucagacaccagaacagcgagggcaccggccaggccgccgaccugaagagcacccaggccgccaucaaccagaucaacggcaagcugaacagacugaucggcaagaccaacgagaaguuccaccagaucgagaaggaguucagcgagguggagggcagaauccaggaccuggagaaguacguggaggacaccaagaucgaccuguggagcuacaacgccgagcugcugguggcccuggagaaccagcacaccaucgaccugaccgacagcgagaugaacaagcuguucgagagaaccaagaagcagcugagagagaacgccgaggacaugggcaacggcugcuucaagaucuaccacaagugcgacaacgccugcaucggcagcaucagaaacggcaccuacgaccacgacguguacagagacgaggcccugaacaacagauuccagaucaagggcguggagcugaagagcggcuacaaggacuggauccuguggaucagcuucgccaucagcugcuuccugcugugcguggcccugcugggcuucaucaugugggccugccagaagggcaacaucagaugcaacaucugcaucuga

SEQ ID NO: 160123 - RNA, 1701 nt, Artificial Sequence
  derived and/or modified CDS sequence (opt4) from hemagglutinin__InfluenzaA__AAX56430
augaagaccaucaucgcccugagcuacauccugugccugguguucacccagaagcugcccggcaacgacaacagcaccgccacccugugccugggccaccacgccgugcccaacggcaccaucgugaagaccaucaccaacgaccagaucgaggugaccaacgccaccgagcuggugcagagcagcagcaccggcggcaucugcgacagcccccaccagauccuggacggcgagaacugcacccugaucgacgcccugcugggcgacccccagugcgacggcuuccagaacaagaagugggaccuguucguggagagaagcaaggccuacagcaacugcuaccccuacgacgugcccgacuacgccagccugagaagccugguggccagcagcggcacccuggaguucaacaacgagagcuucaacuggaccggcgugacccagaacggcaccagcagcgccugcgagagaagaagcaacaagagcuucuucagcagacugaacuggcugacccaccugaaguacaaguaccccgcccugaacgugaccaugcccaacaacgagaaguucgacaagcuguacaucuggggcgugcaccaccccggcaccgacagcgaccagaucagccuguacgcccaggccagcggcagaaucaccgugagcaccaagagaagccagcagaccgugauccccaacaucggcagcagacccagagugagagacgugagcagcagaaucagcaucuacuggaccaucgugaagcccggcgacauccugcugaucaacagcaccggcaaccugaucgcccccagaggcuacuucaagaucagaagcggcaagagcagcaucaugagaagcgacgcccccaucggcaagugcaacagcgagugcaucacccccaacggcagcauccccaacgacaagcccuuccagaacgugaacagaaucaccuacggcgccugccccagauacgugaagcagaacacccugaagcuggccaccggcaugagaaacgugcccgagaagcagaccagaggcaucuucggcgccaucgccggcuucaucgagaacggcugggagggcaugguggacggcugguacggcuucagacaccagaacagcgagggcaccggccaggccgccgaccugaagagcacccaggccgccaucaaccagaucaacggcaagcugaacagacugaucggcaagaccaacgagaaguuccaccagaucgagaaggaguucagcgagguggagggcagaauccaggaccuggagaaguacguggaggacaccaagaucgaccuguggagcuacaacgccgagcugcugguggcccuggagaaccagcacaccaucgaccugaccgacagcgagaugaacaagcuguucgagagaaccaagaagcagcugagagagaacgccgaggacaugggcaacggcugcuucaagaucuaccacaagugcgacaacgccugcaucggcagcaucagaaacggcaccuacgaccacgacguguacagagacgaggcccugaacaacagauuccagaucaagggcguggagcugaagagcggcuacaaggacuggauccuguggaucagcuucgccaucagcugcuuccugcugugcguggcccugcugggcuucaucaugugggccugccagaagggcaacaucagaugcgacaucugcaucuga

SEQ ID NO: 160124 - RNA, 1701 nt, Artificial Sequence
  derived and/or modified CDS sequence (opt4) from hemagglutinin__InfluenzaA__AAX56440
augaagaccaucaucgcccugagcuacauccugugccugguguucgcccagaagcugcccggcaacgacaacagcaccgccacccugugccugggccaccacgccgugcccaacggcacccuggugaagaccaucaccaacgaccagaucgaggugaccaacgccaccgagcuggugcagaacagcagcaccggcagaaucugcgacagcccccaccagauccuggacggcgagaacugcacccugaucgacgcccugcugggcgacccccacugcgacggcuuccagaacaaggagugggaccuguucguggagagaagcaaggccuacagcaacugcuaccccuacgacgugcccgacuacgugagccugagaagccugguggccagcagcggcacccuggaguucaacaacgagagcuucaacuggaccggcguggcccagaacggcaccagcagcgccugcaagagaagaagcgacaagagcuucuucagcagacugaacuggcugcaccagcugaaguacaaguaccccgcccugaacgugaccaugcccaacaacgagaaguucgacaagcuguacaucuggggcgugcaccaccccggcaccgacaacgaccagaucagccuguacgcccaggccagcggcagagugaccgugagcaccaagagaagccagcagaccgugauccccaacaucggcagcggccccugggugagaggcgugagcagcagaaucagcaucuacuggaccaucgugaagcccggcgacauccugcugaucaacagcaccggcaaccugaucgcccccagaggcuacuucaagaucagaagcggcaagagcagcaucaugagaagcgacgcccccaucggcaagugcaacagcgagugcaucacccccaacggcagcauccccaacgacaagcccuuccagaacgugaacagaaucaccuacggccccugccccagauacgugaagcagaacacccugaagcuggccaccggcaugagaaacgugcccgagaagcagaccagaggcaucuucggcgccaucgccggcuucaucgagaacggcugggagggcaugauggacggcugguacggcuucagacaccagaacagcgagggcaccggccaggccgccgaccugaagagcacccaggccgccaucaaccagaucaacggcaagcugaacagacugaucgagaagaccaacgagaaguuccaccagaucgagaaggaguucagcgagguggagggcagaauccaggaccuggagaaguacguggaggacaccaagaucgaccuguggagcuacaacgccgagcugcugguggcccuggagaaccagcacaccaucgaccugaccgacagcgagaugaacaagcuguucgagagaaccaagaagcagcugagagagaacgccgaggacaugggcaacggcugcuucaagaucuaccacaagugcgacaacgccugcaucggcagcaucagaaacggcaccuacgaccacgacguguacagagacgaggcccugaacaacagauuccagaucaagggcguggagcugaagagcggcuacaaggacuggauccuguggaucagcuucgccaucagcugcuuccugcugugcaucgugcugcugggcuucaucaugugggccugccagaagggcaacaucagaugcaacaucugcaucuga

SEQ ID NO: 160125 - RNA, 1701 nt, Artificial Sequence; identical to SEQ ID NO: 160107
  derived and/or modified CDS sequence (opt4) from hemagglutinin__InfluenzaA__AAX56450

SEQ ID NO: 160126 - RNA, 1701 nt, Artificial Sequence
  derived and/or modified CDS sequence (opt4) from hemagglutinin__InfluenzaA__AAX56460
augaagaccaucaucgcccugagcuacauccugugccugguguucgcccagaagcugcccgagaacgacaacagcaccgccacccugugccugggccaccacgccgugcccaacggcacccuggugaagaccaucaccaacgaccagaucgaggugaccaacgccaccgagcuggugcagagcagcagcaccggcagaaucugcgacagcccccaccagauccuggacggcgagaacugcacccugaucgacgcccugcugggcgacccccacugcgacggcuuccagaacaaggagugggaccuguucguggagagaagcaaggccuacagcaacugcuaccccuacgacgugcccgacuacgugagccugagaagccugguggccagcagcggcacccuggaguucaacaacgagagcuucaacuggaccggcguggcccagaacggcaccagcagcgccugcaagagaagaagcgacaagagcuucuucagcagacugaacuggcugcaccagcugaaguacaaguaccccgcccugaacgugaccaugcccaacaacgagaaguucgacaagcuguacaucuggggcgugcaccaccccggcaccgacagcgaccagaucagccuguacgcccaggccagcggcagagugaccgugagcaccaagagaagccagcagaccgugauccccaacaucggcagcagacccugggugagaggcgugagcagcagaaucagcaucuacuggaccaucgugaagcccggcgacauccugcugaucaacagcaccggcaaccugaucgcccccagaggcuacuucaagaucagaagcggcaagagcagcaucaugagaagcgacgcccccaucggcaagugcaacagcgagugcaucacccccaacggcagcauccccaacgacaagcccuuccagaacgugaacagaaucacccacggccccugccccagauacgugaagcagaacacccugaagcuggccaccggcaugagaaacgugcccgagaagcagaccagaggcaucuucggcgccaucgccggcuucaucgagaacggcugggagggcaugauggacggcugguacggcuucagacaccagaacagcgagggcaccggccaggccgccgaccugaagagcacccaggccgccaucaaccagaucaacggcaagcugaacagacugaucgagaagaccaacgagaaguuccaccagaucgagaaggaguucagcgagguggagggcagaauccaggaccuggagaaguacguggaggacaccaagaucgaccuguggagcuacaacgccgagcugcugguggcccuggagaaccagcacaccaucgaccugaccgacagcgagaugaacaagcuguucgagagaaccaagaagcagcugagagagaacgccgaggacaugggcaacggcugcuucaagaucuaccacaagugcgacaacgccugcaucggcagcaucagaaacggcaccuacgaccacgacguguacagagacgaggcccugaacaacagauuccagaucaagggcguggagcugaagagcggcuacaaggacuggauccuguggaucagcuucgccaucagcugcuuccugcugugcaucgugcugcugggcuucaucaugugggccugccagaagggcaacaucagaugcaacaucugcaucuga

SEQ ID NO: 160127 - RNA, 1701 nt, Artificial Sequence
  derived and/or modified CDS sequence (opt4) from hemagglutinin__InfluenzaA__AAX56470
augaagaccaucaucgcccugagcuacauccugugccugguguucgcccagaagcugcccggcaacgacaacagcaccgccacccugugccugggccaccacgccgugcccaacggcacccuggugaagaccaucaccaacgaccagaucgaggugaccaacgccaccgagcuggugcagagcagcagcaccggcagaaucugcgacagcccccaccagauccuggacggcgagaacugcacccugaucgacgcccugcugggcgacccccacugcgacggcuuccagaacaaggagugggaccuguucguggagagaagcaaggccuacagcaacugcuaccccuacgacgugcccgacuacgugagccugagaagccugguggccagcagcggcacccuggaguucaacaacgagagcuucaacuggaccggcguggcccagaacggcaccagcagcgccugcaagagaagaagcgacaagagcuucuucagcagacugaacuggcugcaccagcugaaguacaaguaccccgcccugaacgugaccaugcccaacaacgagaaguucgacaagcuguacaucuggggcgugcaccaccccggcaccgacagcgaccagaucagccuguacgcccaggccagcggcagagugaccgugagcaccaagagaagccagcagaccgugauccccaacaucggcagcagacccugggugagaggcgugagcagcagaaucagcaucuacuggaccaucgugaagcccggcgacauccugcugaucaacagcaccggcaaccugaucgcccccagaggcuacuucaagaugagaagcggcaagagcagcaucaugagaagcgacgcccccaucggcaagugcaacagcgagugcaucacccccaacggcagcauccccaacgacaagcccuuccagaacgugaacagaaucaccuacggccccugccccagauacgugaagcagaacacccugaagcuggccaccggcaugagaaacgugcccgagaagcagaccagaggcaucuucggcgccaucgccggcuucaucgagaacggcugggagggcaugauggacggcugguacggcuucagacaccagaacagcgagggcaccggccaggccgccgaccugaagagcacccaggccgccaucaaccagaucaacggcaagcugaacagacugaucgagaagaccaacgagaaguuccaccagaucgagaaggaguucagcgagguggagggcagaauccaggaccuggagaaguacguggaggacaccaagaucgaccuguggagcuacaacgccgagcugcugguggcccuggagaaccagcacaccaucgaccugaccgacagcgagaugaacaagcuguucgagagaaccaagaagcagcugagagagaacgccgaggacaugggcaacggcugcuucaagaucuaccacaagugcgacaacgccugcaucggcagcaucagaaacggcaccuacgaccacgacguguacagagacgaggcccugaacaacagauuccagaucaagggcguggagcugaagagcggcuacaaggacuggauccuguggaucagcuucgccaucagcugcuuccugcugugcaucgugcugcugggcuucaucaugugggccugccagaagggcaacaucagaugcaacaucugcaucuga

SEQ ID NO: 160128 - RNA, 1701 nt, Artificial Sequence; identical to SEQ ID NO: 160111
  derived and/or modified CDS sequence (opt4) from hemagglutinin__InfluenzaA__AAX56480

SEQ ID NO: 160129 - RNA, 1701 nt, Artificial Sequence
  derived and/or modified CDS sequence (opt4) from hemagglutinin__InfluenzaA__AAX56510
augaagaccaucaucgcccugagcuacauccugugccugguguucgcccagaagcugcccggcaacgacaacagcaccgccacccugugccugggccaccacgccgugcccaacggcacccuggugaagaccaucaccaacgaccagaucgaggugaccaacgccaccgagcuggugcagagcagcagcaccggcagaaucugcgacagcccccaccagauccuggacggcgagaacugcacccugaucgacgcccugcugggcgacccccacugcgacggcuuccagaacaaggagugggaccuguucguggagagaagcaaggccuacagcaacugcuaccccuacgacgugcccgacuacgugagccugagaagccugguggccagcagcggcacccuggaguucaacaacgagagcuucaacuggaccggcguggcccagaacggcaccagcagcgccugcaagagaagaagcgacaagagcuucuucagcagacugaacuggcugcaccagcugaaguacaaguaccccgcccugaacgugaccaugcccaacaacgagaaguucgacaagcuguacaucuggggcgugcaccaccccggcaccgacagcgaccagaucagccuguacgcccaggccagcggcagagugaccgugagcaccaagagaagccagcagaccgugauccccaacaucggcagcagacccugggugagaggcgugagcagcaagaucagcaucuacuggaccaucgugaagcccggcgacauccugcugaucaacagcaccggcaaccugaucgcccccagaggcuacuucaagaucagaagcggcaagagcagcaucaugagaagcgacgcccccaucggcaagugcaacagcgagugcaucacccccaacggcagcauccccaacgacaagcccuuccagaacgugaacagaaucaccuacggcgccugccccagauacgugaagcagaacacccugaagcuggccaccggcaugagaaacgugcccgagaagcagaccagaggcaucuucggcgccaucgccggcuucaucgagaacggcugggagggcaugauggacggcugguacggcuucagacaccagaacagcgagggcaccggccaggccgccgaccugaagagcacccaggccgccaucaaccagaucaacggcaagcugaacagacugaucgagaagaccaacgagaaguuccaccagaucgagaaggaguucagcgagguggagggcagaauccaggaccuggagaaguacguggaggacaccaagaucgaccuguggagcuacaacgccgagcugcugguggcccuggagaaccagcacaccaucgaccugaccgacagcgagaugaacaagcuguucgagagaaccaagaagcagcugagagagaacgccgaggacaugggcaacggcugcuucaagaucuaccacaagugcgacaacgccugcaucggcagcaucagaaacggcaccuacgaccacgacguguacagagacgaggcccugaacaacagauuccagaucaagggcguggagcugaagagcggcuacaaggacuggauccuguggaucagcuucgccaucagcugcuuccugcugugcaucgugcugcugggcuucaucaugugggccugccagaagggcaacaucagaugcaacaucugcaucuga

SEQ ID NO: 160130 - RNA, 1701 nt, Artificial Sequence; identical to SEQ ID NO: 160107
  derived and/or modified CDS sequence (opt4) from hemagglutinin__InfluenzaA__AAX56520

SEQ ID NO: 160131 - RNA, 1701 nt, Artificial Sequence
  derived and/or modified CDS sequence (opt4) from hemagglutinin__InfluenzaA__AAX56530
augaaggccaagcugcuggugcugcugugcgccuucaccgccaccuacgccgacaccaucugcaucggcuaccacgccaacaacagcaccgacaccguggacaccgugcuggagaagaacgugaccgugacccacagcgugaaccugcuggaggacagccacaacggcaagcugugcagacugaagggcaccgccccccugcagcugggcaacugcagcaucgccggcuggauccugggcaaccccgagugcgagagccuguucagcaaggagagcuggagcuacaucgccgagacccccaaccccaagaacggcaccugcuaccccggcuacuucgccgacuacgaggagcugagagagcagcugagcagcgugagcagcuucgagagauucgagaucuuccccaaggacagcagcuggcccaaccacaccgugaccaagggcgugaccgccagcugcagccacaacggcaagagcagcuucuacaagaaccugcuguggcugaccgagaagaacggccuguaccccaaccugagcaagagcuacgugaacaagaagggcaaggaggugcuggugcuguggggcgugcaccaccccagcaacaugggcgaccagagagccaucuaccacaaggagaacgccuacgugagcgugcugagcagccacuacagcagaagauucacccccgagaucgccaagagacccaaggugagagaccaggagggcagaaucaacuacuacuggacccugcuggagcccggcgacaccaucaucuucgaggccaacggcaaccugaucgcccccugguacgccuucgcccugagcagaggcuucggcagcggcaucaucaucagcaacgccagcaugggcgagugcgacgccaagugccagaccccccagggcgccaucaacagcagccugcccuuccagaacgugcaccccgugaccaucggcgagugccccaaguacgugagaagcaccaagcugagaauggugaccggccugagaaacgugcccagcauccagagcagaggccuguucggcgccaucgccggcuucaucgagggcggcuggaccggcaugaucgacggcugguacggcuaccaccaccagaacgagcagggcagcggcuacgccgccgaccagaagagcacccagaacgccaucaacggcaucaccaacaaggugaacagcaucaucgagaagaugaacacccaguucaccgccgugggcaaggaguucaacaagcuggagaagagaauggagaaccugaacaagaagguggacgacggcuuccuggacaucuggaccuacaacgccgagcugcuggugcugcuggagaacgagagaacccuggacuuccacgaccugaacgugaagaaccuguacgagaaggugaagaaccagcugaagaacaacgccaaggagaucggcaacggcugcuucgaguucuaccacaagugcaacaacgagugcauggagagcgugaagaacggcaccuacgacuaccccaaguacagcaaggagagcaagcugaacagagagaagaucgacggcgugaagcuggagagcaugggcguguaccagauccuggccaucuacagcaccguggccagcagccuggugcugcuggugagccugggcgccaucagcuucuggaugugcagcaacggcagccugcagugcagaaucugcaucuga

SEQ ID NO: 160132 - RNA, 1701 nt, Artificial Sequence
  derived and/or modified CDS sequence (opt4) from hemagglutinin__InfluenzaA__AAX56550
augaagaccaucaucgcccugagcuacauccugugccugguguucgcccagaagcugcccgugaacgacaacagcaccgccacccugugccugggccaccacgccgugcccaacggcacccuggugaagaccaucaccaacgaccacaucgaggugaccaacgccaccgagcuggugcagagcagcagcaccggcagaaucugcgacagcccccaccagauccuggacggcgagaacugcacccugaucgacgcccugcugggcgacccccacugcgacggcuuccagaacaaggagugggaccuguucguggagagaagcaccgccuacagcaacugcuaccccuacgacgugcccgacuacgccagccugagaagccugguggccagcagcggcacccuggaguucaacaacgagagcuucaacuggaccggcguggcccagaacggcaccagcagcgccugcaagagaagaagcaucaagagcuucuucagcagacugaacuggcugcaccagcugaaguacaaguaccccgcccugaacgugaccaugcccaacaacgagaaguucgacaagcuguacaucuggggcgugcaccaccccagcaccgacagcgaccagaucagccuguacgcccaggccagcggcagagugaccgugagcaccaagagaagccagcagaccgugauccccaacaucggcagcagacccugggugagaggcgugagcagcagaaucagcaucuacuggaccaucgugaagcccggcgacauccugcugaucaacagcaccggcaaccugaucgcccccagaggcuacuucaagaucagaagcggcaagagcagcaucaugagaagcaacgcccccaucggcaagugcaacagcgagugcaucacccccaacggcagcauccccaacgacaagcccuuccagaacgugaacagaaucaccuacggcgccugccccagauacgugaagcagaacacccugaagcuggccaccggcaugagaaacgugcccgagaagcagaccagaggcaucuucggcgccaucgccggcuucaucgagaacggcugggagggcaugguggacggcugguacggcuucagacaccagaacagcgagggcaccggccaggccgccgaccugaagagcacccaggccgccaucaaccagaucaacggcaagcugaacagacugaucgagaagaccaacgagaaguuccaccagaucgagaaggaguucagcgagguggagggcagaauccaggaccuggagaaguacguggaggacaccaagaucgaccuguggagcuacaacgccgagcugcugguggcccuggagaaccagcacaccaucgaccugaccgacagcgagaugaacaagcuguucgagagaaccagaaagcagcugagagagaacgccgaggacaugggcaacggcugcuucaagaucuaccacaagugcgacaacgccugcaucggcagcaucagaaacggcaccuacgaccacgacguguacagagacgaggcccugaacaacagauuccagaucaagggcguggagcugaagagcggcuacaaggacuggauccuguggaucagcuucgccaucagcugcuuccugcugugcguggugcugcugggcuucaucaugugggccugccagaagggcaacaucagaugcaacaucugcaucuga

SEQ ID NO: 160133 - RNA, 1701 nt, Artificial Sequence
  derived and/or modified CDS sequence (opt4) from hemagglutinin__InfluenzaA__AAX56560
augaagaccaucaucgcccugagcuacauccugugccugguguucgcccagaagcugcccggcaacgacaacagcaccgccacccugugccugggccaccacgccgugcccaacggcaccaucgugaagaccaucaccaacgaccagaucgaggugaccaacgccaccgagcuggugcagaucagcagcaccggcggcaucugcgacagcccccaccagauccuggacggcgagaacugcacccugaucgacgcccugcugggcgacccccagugcgacggcuuccagaacaagaagugggaccuguucguggagagaagcaaggccuacagcaacugcuaccccuacgacgugcccgacuacgccagccugagaagccugguggccagcagcggcacccuggaguucaacaacgagagcuucgacuggaccggcgugacccagaacggcaccagcagcgccugcaagagaagaagcaacaagagcuucuucagcagacugaacuggcugacccaccugaaguacaaguaccccgcccugaacgugaccaugcccaacaacgagaaguucgacaagcuguacaucuggggcgugcaccaccccggcaccgacagcgaccagaucagccuguacgcccaggccagcggcagaaucaccgugagcaccaagagaagccagcagaccgugauccccaacaucggcagcagacccagagugagagacgugagcagcagaaucagcaucuacuggaccaucgugaagcccggcgacauccugcugaucaacagcaccggcaaccugaucgcccccagaggcuacuucaagaucagaagcggcaagagcagcaucaugagaagcgacgcccccaucggcaagugcaacagcgagugcaucacccccaacggcagcauccccaacgacaagcccuuccagaacgugaacagaaucaccuacggcgccugccccagauacgugaagcagaacacccugaagcuggccaccggcaugagaaacgugcccgagaagcagaccagaggcaucuucggcgccaucgccggcuucaucgagaacggcugggagggcaugguggacggcugguacggcuucagacaccagaacagcgagggcaccggccaggccgccgaccugaagagcacccaggccgccaucaaccagaucaacggcaagcugaacagacugaucggcaagaccaacgagaaguuccaccagaucgagaaggaguucagcgagguggagggcagaauccaggaccuggagaaguacguggaggacaccaagaucgaccuguggagcuacaacgccgagcugcugguggcccuggagaaccagcacaccaucgaccugaccgacagcgagaugaacaagcuguucgagagaaccaagaagcagcugagagagaacgccgaggacaugggcaacggcugcuucaagaucuaccacaagugcgacaacgccugcaucggcagcaucagaaacggcaccuacgaccacgacguguacagagacgaggcccugaacaacagauuccagaucaagggcguggagcugaagagcggcuacaaggacuggauccuguggaucagcuucgccaucagcugcuuccugcugugcguggcccugcugggcuucaucaugugggccugccagaagggcaacaucagaugcaacaucugcaucuga

SEQ ID NO: 160134 - RNA, 1701 nt, Artificial Sequence
  derived and/or modified CDS sequence (opt4) from hemagglutinin__InfluenzaA__AAX56570
augaagaccaucaucgcccugagcuacauccugugccugguguucgcccagaagcugcccggcaacgacaacagcaccgccacccugugccugggccaccacgccgugcccaacggcacccuggugaagaccaucaccaacgaccagaucgaggugaccaacgccaccgagcuggugcagagcagcagcaccagcagaaucugcgacagcccccaccagauccuggacggcgagaacugcacccugaucgacgcccugcugggcgacccccacugcgacggcuuccagaacaaggagugggaccuguucguggagagaagcaaggccuacagcaacugcuaccccuacgacgugcccgacuacgugagccugagaagccugguggccagcagcggcacccuggaguucaacaacgagagcuucaacuggaccggcguggcccagaacggcaccagcagcgccugcaagagaagaagcgacaagagcuucuucagcagacugaacuggcugcaccagcugaaguacaaguaccccgcccugaacgugaccaugcccaacaacgagaaguucgacaagcuguacaucuggggcgugcaccaccccggcaccgacagcgaccagaucagccuguacgcccaggccagcggcagagugaccgugagcaccaagagaagccagcagaccgugauccccaacaucggcagcagacccugggugagaggcgugagcagcggcaucagcaucuacuggaccaucgugaagcccggcgacauccugcugaucaacagcaccggcaaccugaucgcccccagaggcuacuucaagaucagaagcggcaagagcagcaucaugagaagcgacgcccccaucggcaagugcaacagcgagugcaucacccccaacggcagcauccccaacgacaagcccuuccagaacgugaacagaaucaccuacggcgccugccccagauacgugaagcagaacacccugaagcuggccaccggcaugagaaacgugcccgagaagcagaccagaggcaucuucggcgccaucgccggcuucaucgagaacggcugggagggcaugauggacggcugguacggcuucagacaccagaacagcgagggcaccggccaggccgccgaccugaagagcacccaggccgccaucaaccagaucaacggcaagcugaacagacugaucgagaagaccaacgagaaguuccaccagaucgagaaggaguucagcgagguggagggcagaauccaggaccuggagaaguacguggaggacaccaagaucgaccuguggagcuacaacgccgagcugcugguggcccuggagaaccagcacaccaucgaccugaccgacagcgagaugaacaagcuguucgagagaaccaagaagcagcugagagagaacgccgaggacaugggcaacggcugcuucaagaucuaccacaagugcgacaacgccugcaucggcagcaucagaaacggcaccuacgaccacgacguguacagagacgaggcccugaacaacagauuccagaucaagggcguggagcugaagagcggcuacaaggacuggauccuguggaucagcuucgccaucagcugcuuccugcugugcaucgugcugcugggcuucaucaugugggccugccagaagggcaacaucagaugcaacaucugcaucuga

SEQ ID NO: 160135 - RNA, 1701 nt, Artificial Sequence
  derived and/or modified CDS sequence (opt4) from hemagglutinin__InfluenzaA__AAX56590
augaagaccaucaucgcccugagcuacauccugugccugguguucgcccagaagcugcccggcaacgacaacagcaccgccacccugugccugggccaccacgccgugcccaacggcacccuggugaagaccaucaccaacgaccagaucgaggugaccaacgccaccgagcuggugcagagcagcagcaccagcagaaucugcgacagcccccaccagauccuggacggcgagaacugcacccugaucgacgcccugcugggcgacccccacugcgacggcuuccagaacaaggagugggaccuguucguggagagaagcaaggccuacagcaacugcuaccccuacgacgugcccgacuacgugagccugagaagccugguggccagcagcggcacccuggaguucaacaacgagagcuucaacuggaccggcguggcccagaacggcaccagcagcgccugcaagagaagaagcgacaagagcuucuucagcagacugaacuggcugcaccagcugaaguacaaguaccccgcccugaacgugaccaugcccaacaacgagaaguucgacaagcuguacaucuggggcgugcaccaccccagcaccgacagcgaccagaucagccuguacgcccaggccagcggcagagugaccgugagcaccaagagaagccagcagaccgugauccccaacaucggcagcagacccugggugagaggcgugagcagcagaaucagcaucuacuggaccaucgugaagcccggcgacauccugcugaucaacagcaccggcaaccugaucgcccccagaggcuacuucaagaucagaagcggcaagagcagcaucaugagaagcgacgcccccaucggcaagugcaacagcgagugcaucacccccaacggcagcauccccaacgacaagcccuuccagaacgugaacagaaucaccuacggcgccugccccagauacgugaagcagaacacccugaagcuggccaccggcaugagaaacgugcccgagaagcagaccagaggcaucuucggcgccaucgccggcuucaucgagaacggcugggagggcaugauggacggcugguacggcuucagacaccagaacagcgagggcaccggccaggccgccgaccugaagagcacccaggccgccaucaaccagaucaacggcaagcugaacagacugaucgagaagaccaacgagaaguuccaccagaucgagaaggaguucagcgagguggagggcagaauccaggaccuggagaaguacguggaggacaccaagaucgaccuguggagcuacaacgccgagcugcugguggcccuggagaaccagcacaccaucgaccugaccgacagcgagaugaacaagcuguucgagagaaccaagaagcagcugagagagaacgccgaggacaugggcaacggcugcuucaagaucuaccacaagugcgacaacgccugcaucggcagcaucagaaacggcaccuacgaccacgacguguacagagacgaggcccugaacaacagauuccagaucaagggcguggagcugaagagcggcuacaaggacuggauccuguggaucagcuucgccaucagcugcuuccugcugugcaucgugcugcugggcuucaucaugugggccugccagaagggcaacaucagaugcaacaucugcaucuga

SEQ ID NO: 160136 - RNA, 1701 nt, Artificial Sequence; identical to SEQ ID NO: 160133
  derived and/or modified CDS sequence (opt4) from hemagglutinin__InfluenzaA__AAX56600

SEQ ID NO: 160137 - RNA, 1701 nt, Artificial Sequence
  derived and/or modified CDS sequence (opt4) from hemagglutinin__InfluenzaA__AAX57644
augaagaccaucaucgcccugagcuacauccugugccugguguucgcccagaagcugcccggcaacgacaacagcaccgccacccugugccugggccaccacgccgugcccaacggcaccaucgugaagaccaucaccaacgaccagaucgaggugaccaacgccaccgagcuggugcagagcagcagcaccggcggcaucugcgacagcccccaccagauccuggacggcgagaacugcacccugaucgacgcccugcugggcgacccccagugcgacggcuuccagaacaagaagugggaccuguucguggagagaagcaaggccuacagcaacugcuaccccuacgacgugcccgacuacgccagccugagaagccugguggccagcagcggcacccuggaguucaacaacgagagcuucgacuggaccggcgugacccagaacggcaccagcagcgccugcaagagaagaagcaacaagagcuucuucagcagacugaacuggcugacccaccugaaguacaaguaccccgcccugaacgugaccaugcccaacaacgagaaguucgacaagcuguacaucuggggcgugcaccaccccggcaccgacagcgaccagaucagccuguacgcccaggccagcggcagaaucaccgugagcaccaagagaagccagcagaccgugauccccaacaucggcagcagacccagagugagagacgugagcagcagaaucagcaucuacuggaccguggugaagcccggcgacauccugcugaucaacagcaccggcaaccugaucgcccccagaggcuacuucaagaugagaagcggcaagagcagcaucaugagaagcgacgcccccaucggcaagugcaacagcgagugcaucacccccaacggcagcauccccaacgacaagcccuuccagaacgugaacagaaucaccuacggcgccugccccagauacgugaagcagaacacccugaagcuggccaccggcaugagaaacgugcccgagaagcagaccagaggcaucuucggcgccaucgccggcuucaucgagaacggcugggagggcaugguggacggcugguacggcuucagacaccagaacagcgagggcaccggccaggccgccgaccugaagagcacccaggccgccaucaaccagaucaacggcaagcugaacagacugaucggcaagaccaacgagaaguuccaccagaucgagaaggaguucagcgagguggagggcagaauccaggaccuggagaaguacguggaggacaccaagaucgaccuguggagcuacaacgccgagcugcugguggcccuggagaaccagcacaccaucgaccugaccgacagcgagaugaacaagcuguucgagagaaccaagaagcagcugagagagaacgccgaggacaugggcaacggcugcuucaagaucuaccacaagugcgacaacgccugcaucggcagcaucagaaacggcaccuacgaccacgacguguacagagacgaggcccugaacaacagauuccagaucaagggcguggagcugaagagcggcuacaaggacuggauccuguggaucagcuucgccaucagcugcuuccugcugugcguggcccugcugggcuucaucaugugggccugccagaagggcaacaucagaugcaacaucugcaucuga

SEQ ID NO: 160138 - RNA, 1701 nt, Artificial Sequence; identical to SEQ ID NO: 160091
  derived and/or modified CDS sequence (opt4) from hemagglutinin__InfluenzaA__AAX57654

SEQ ID NO: 160139 - RNA, 1701 nt, Artificial Sequence; identical to SEQ ID NO: 160107
  derived and/or modified CDS sequence (opt4) from hemagglutinin__InfluenzaA__AAX57664

SEQ ID NO: 160140 - RNA, 1701 nt, Artificial Sequence
  derived and/or modified CDS sequence (opt4) from hemagglutinin__InfluenzaA__AAX57684
augaagaccaucaucgcccugagcuacauccugugccugguguucgcccagaagcugcccggcaacgacaacagcaccgccacccugugccugggccaccacgccgugcccaacggcacccuggugaagaccaucaccaacgaccagaucgaggugaccaacgccaccgagcuggugcagagcagcagcaccagcagaaucugcgacagcccccaccagauccuggacggcgagaacugcacccugaucgacgcccugcugggcgacccccacugcgacggcuuccagaacaaggagugggaccuguucguggagagaagcaaggccuacagcaacugcuaccccuacgacgugcccgacuacgugagccugagaagccugguggccagcagcggcacccuggaguucaacaacgagagcuucaacuggaccggcguggcccagaacggcaccagcagcgccugcaagagaagaagcgacaagagcuucuucagcagacugaacuggcugcaccagcugaaguacaaguaccccgcccugaacgugaccaugcccaacaacgagaaguucgacaagcuguacaucuggggcgugcaccaccccggcaccgacagcgaccagaucagccuguacgcccaggccagcggcagagugaccgugagcaccaagagaagccagcagaccgugauccccaacaucggcagcggccccugggugagaggcgugagcagcagaaucagcaucuacuggaccaucgugaagcccggcgacauccugcugaucaacagcaccggcaaccugaucgcccccagaggcuacuucaagaucagaagcggcaagagcagcaucaugagaagcgacgcccccaucggcaagugcaacagcgagugcaucacccccaacggcagcauccccaacgacaagcccuuccagaacgugaacagaaucaccuacggcgccugccccagauacgugaagcagaacacccugaagcuggccaccggcaugagaaacgugcccgagaagcagaccagaggcaucuucggcgccaucgccggcuucaucgagaacggcugggagggcaugauggacggcugguacggcuucagacaccagaacagcgagggcaccggccaggccgccgaccugaagagcacccaggccgccaucaaccagaucaacggcaagcugaacagacugaucgagaagaccaacgagaaguuccaccagaucgagaaggaguucagcgagguggagggcagaauccaggaccuggagaaguacguggaggacaccaagaucgaccuguggagcuacaacgccgagcugcugguggcccuggagaaccagcacaccaucgaccugaccgacagcgagaugaacaagcuguucgagagaaccaagaagcagcugagagagaacgccgaggacaugggcaacggcugcuucaagaucuaccacaagugcgacaacgccugcaucggcagcaucagaaacggcaccuacgaccacgacguguacagagacgaggcccugaacaacagauuccagaucaagggcguggagcugaagagcggcuacaaggacuggauccuguggaucagcuucgccaucagcugcuuccugcugugcaucgugcugcugggcuucaucaugugggccugccagaagggcaacaucagaugcaacaucugcaucuga

SEQ ID NO: 160141 - RNA, 1701 nt, Artificial Sequence; identical to SEQ ID NO: 160111
  derived and/or modified CDS sequence (opt4) from hemagglutinin__InfluenzaA__AAX57694

SEQ ID NO: 160142 - RNA, 1701 nt, Artificial Sequence; identical to SEQ ID NO: 160133
  derived and/or modified CDS sequence (opt4) from hemagglutinin__InfluenzaA__AAX57704

SEQ ID NO: 160143 - RNA, 1701 nt, Artificial Sequence; identical to SEQ ID NO: 160111
  derived and/or modified CDS sequence (opt4) from hemagglutinin__InfluenzaA__AAX57714

SEQ ID NO: 160144 - RNA, 1701 nt, Artificial Sequence; identical to SEQ ID NO: 160140
  derived and/or modified CDS sequence (opt4) from hemagglutinin__InfluenzaA__AAX57733

SEQ ID NO: 160145 - RNA, 1701 nt, Artificial Sequence
  derived and/or modified CDS sequence (opt4) from hemagglutinin__InfluenzaA__AAX57734
augaagaccaucaucgcccugagcuacauccugugccugguguucgcccagaagcugcccggcaacgacaacagcaccgccacccugugccugggccaccacgccgugcccaacggcacccuggugaagaccaucaccaacgaccagaucgaggugaccaacgccaccgagcuggugcagagcagcagcaccagcagaaucugcaacagcccccaccagauccuggacggcgagaacugcacccugaucgacgcccugcugggcgacccccacugcgacggcuuccagaacaaggagugggaccuguucguggagagaagcaaggccuacagcaacugcuaccccuacgacgugcccgacuacgugagccugagaagccugguggccagcagcggcacccuggaguucaacaacgagagcuucaacuggaccggcguggcccagaacggcaccagcagcgccugcaagagaagaagcgacaagagcuucuucagcagacugaacuggcugcaccagcugaaguacaaguaccccgcccugaacgugaccaugcccaacaacgagaaguucgacaagcuguacaucuggggcgugcaccaccccggcaccgacagcgaccagaucagccuguacgcccaggccagcggcagagugaccgugagcaccaagagaagccagcagaccgugauccccaacaucggcagcggccccugggugagaggcgugagcagcagaaucagcaucuacuggaccaucgugaagcccggcgacauccugcugaucaacagcaccggcaaccugaucgcccccagaggcuacuucaagaucagaagcggcaagagcagcaucaugagaagcgacgcccccaucggcaagugcaacagcgagugcaucacccccaacggcagcauccccaacgacaagcccuuccagaacgugaacagaaucaccuacggcgccugccccagauacgugaagcagaacacccugaagcuggccaccggcaugagaaacgugcccgagaagcagaccagaggcaucuucggcgccaucgccggcuucaucgagaacggcugggagggcaugauggacggcugguacggcuucagacaccagaacagcgagggcaccggccaggccgccgaccugaagagcacccaggccgccaucaaccagaucaacggcaagcugaacagacugaucgagaagaccaacgagaaguuccaccagaucgagaaggaguucagcgagguggagggcagaauccaggaccuggagaaguacguggaggacaccaagaucgaccuguggagcuacaacgccgagcugcugguggcccuggagaaccagcacaccaucgaccugaccgacagcgagaugaacaagcuguucgagagaaccaagaagcagcugagagagaacgccgaggacaugggcaacggcugcuucaagaucuaccacaagugcgacaacgccugcaucggcagcaucagaaacggcaccuacgaccacgacguguacagagacgaggcccugaacaacagauuccagaucaagggcguggagcugaagagcggcuacaaggacuggauccuguggaucagcuucgccaucagcugcuuccugcugugcaucgugcugcugggcuucaucaugugggccugccagaagggcaacaucagaugcaacaucugcaucuga

SEQ ID NO: 160146 - RNA, 1701 nt, Artificial Sequence; identical to SEQ ID NO: 160132
  derived and/or modified CDS sequence (opt4) from hemagglutinin__InfluenzaA__AAX57744

SEQ ID NO: 160147 - RNA, 1701 nt, Artificial Sequence; identical to SEQ ID NO: 160132
  derived and/or modified CDS sequence (opt4) from hemagglutinin__InfluenzaA__AAX57764

SEQ ID NO: 160148 - RNA, 1701 nt, Artificial Sequence; identical to SEQ ID NO: 160132
  derived and/or modified CDS sequence (opt4) from hemagglutinin__InfluenzaA__AAX57774

SEQ ID NO: 160149 - RNA, 1701 nt, Artificial Sequence
  derived and/or modified CDS sequence (opt4) from hemagglutinin__InfluenzaA__AAX57784
augaagaccaucaucgcccugagcuacauccugugccugguguucgcccagaagcugcccggcaacgacaacagcaccgccacccugugccugggccaccacgccgugcccaacggcacccuggugaagaccaucaccaacgaccagaucgaggugaccaacgccaccgagcuggugcagaacagcagcaccagcagaaucugcgacagcccccaccagauccuggacggcgagaacugcacccugaucgacgcccugcugggcgacccccacugcgacggcuuccagaacaaggagugggaccuguucguggagagaagcaaggccuacagcaacugcuaccccuacgacgugcccgacuacgugagccugagaagccugguggccagcagcggcacccuggaguucaacaacgagagcuucaacuggaccggcguggcccagaacggcaccagcagcgccugcaagagaagaagcgacaagagcuucuucagcagacugaacuggcugcaccagcugaaguacaaguaccccgcccugaacgugaccaugcccaacaacgagaaguucgacaagcuguacaucuggggcgugcaccaccccggcaccgacagcgaccagaucagccuguacgcccaggccagcggcagagugaccgugagcaccaagagaagccagcagaccgugauccccaacaucggcagcagacccugggugagaggcgugagcagcagaaucagcaucuacuggaccaucgugaagcccggcgacauccugcugaucaacagcaccggcaaccugaucgcccccagaggcuacuucaagaucagaagcggcaagagcagcaucaugagaagcgacgcccccaucggcaagugcaacagcgagugcaucacccccaacggcagcauccccaacgacaagcccuuccagaacgugaacagaaucaccuacggcgccugccccagauacgugaagcagaacacccugaagcuggccaccggcaugagaaacgugcccgagaagcagaccagaggcaucuucggcgccaucgccggcuucaucgagaacggcugggagggcaugauggacggcugguacggcuucagacaccagaacagcgagggcaccggccaggccgccgaccugaagagcacccaggccgccaucaaccagaucaacggcaagcugaacagacugaucgagaagaccaacgagaaguuccaccagaucgagaaggaguucagcgagguggagggcagaauccaggaccuggagaaguacguggaggacaccaagaucgaccuguggagcuacaacgccgagcugcugguggcccuggagaaccagcacaccaucgaccugaccgacagcgagaugaacaagcuguucgagagaaccaagaagcagcugagagagaacgccgaggacaugggcaacggcugcuucaagaucuaccacaagugcgacaacgccugcaucggcagcaucagaaacggcaccuacgaccacgacguguacagagacgaggcccugaacaacagauuccagaucaagggcguggagcugaagagcggcuacaaggacuggauccuguggaucagcuucgccaucagcugcuuccugcugugcaucgugcugcugggcuucaucaugugggccugccagaagggcaacaucagaugcaacaucugcaucuga

SEQ ID NO: 160150 - RNA, 1701 nt, Artificial Sequence
  derived and/or modified CDS sequence (opt4) from hemagglutinin__InfluenzaA__AAX57794
augaagaccaucaucgcccugagcuacauccugugccugguguucgcccagaagcugcccgugaacgacaacagcaccgccacccugugccugggccaccacgccgugcccaacggcacccuggugaagaccaucaccaacgaccacaucgaggugaccaacgccaccgagcuggugcagagcagcagcaccggcagaaucugcgacagcccccaccagauccuggacggcgagaacugcacccugaucgacgcccugcugggcgacccccacugcgacggcuuccagaacaaggagugggaccuguucguggagagaagcaccgccuacagcaacugcuaccccuacgacgugcccgacuacgccagccugagaagccugguggccagcagcggcacccuggaguucaacaacgagagcuucaacuggaccggcguggcccagaacggcaccagcagcgccugcaagagaagaagcaucaagagcuucuucagcagacugaacuggcugcaccagcugaaguacaaguaccccgcccugaacgugaccaugcccaacaacgagaaguucgacaagcuguacaucuggggcgugcaccaccccagcaccgacagcgaccagaucagccuguacgcccaggccagcggcagagugaccgugagcaccaagagaagccagcagaccgugauccccaacaucggcagcagacccugggugagaggcgugagcagcagaaucagcauccacuggaccaucgugaagcccggcgacauccugcugaucaacagcaccggcaaccugaucgcccccagaggcuacuucaagaucagaagcggcaagagcagcaucaugagaagcaacgcccccaucggcaagugcaacagcgagugcaucacccccaacggcagcauccccaacgacaagcccuuccagaacgugaacagaaucaccuacggcgccugccccagauacgugaagcagaacacccugaagcuggccaccggcaugagaaacgugcccgagaagcagaccagaggcaucuucggcgccaucgccggcuucaucgagaacggcugggagggcaugguggacggcugguacggcuucagacaccagaacagcgagggcaccggccaggccgccgaccugaagagcacccaggccgccaucaaccagaucaacggcaagcugaacagacugaucgagaagaccaacgagaaguuccaccagaucgagaaggaguucagcgagguggagggcagaauccaggaccuggagaaguacguggaggacaccaagaucgaccuguggagcuacaacgccgagcugcugguggcccuggagaaccagcacaccaucgaccugaccgacagcgagaugaacaagcuguucgagagaaccagaaagcagcugagagagaacgccgaggacaugggcaacggcugcuucaagaucuaccacaagugcgacaacgccugcaucggcagcaucagaaacggcaccuacgaccacgacguguacagagacgaggcccugaacaacagauuccagaucaagggcguggagcugaagagcggcuacaaggacuggauccuguggaucagcuucgccaucagcugcuuccugcugugcguggugcugcugggcuucaucaugugggccugccagaagggcaacaucagaugcaacaucugcaucuga

SEQ ID NO: 160151 - RNA, 1701 nt, Artificial Sequence; identical to SEQ ID NO: 160132
  derived and/or modified CDS sequence (opt4) from hemagglutinin__InfluenzaA__AAX57814

SEQ ID NO: 160152 - RNA, 1701 nt, Artificial Sequence
  derived and/or modified CDS sequence (opt4) from hemagglutinin__InfluenzaA__AAX57824
augaagaccaucaucgcccugagcuacauccugugcaugguguucgcccagaagcugcccgugaacgacaacagcaccgccacccugugccugggccaccacgccgugcccaacggcacccuggugaagaccaucaccaacgaccacaucgaggugaccaacgccaccgagcuggugcagagcagcagcaccggcagaaucugcgacagcccccaccagauccuggacggcgagaacugcacccugaucgacgcccugcugggcgacccccacugcgacggcuuccagaacaaggagugggaccuguucguggagagaagcaccgccuacagcaacugcuaccccuacgacgugcccgacuacgccagccugagaagccugguggccagcagcggcacccuggaguucaacaacgagagcuucaacuggaccggcguggcccagaacggcaccagcagcgccugcaagagaagaagcaucaagagcuucuucagcagacugaacuggcugcaccagcugaaguacaaguaccccgcccugaacgugaccaugcccaacaacgagaaguucgacaagcuguacaucuggggcgugcaccaccccagcaccgacagcgaccagaucagccuguacgcccaggccagcggcagagugaccgugagcaccaagagaagccagcagaccgugauccccaacaucggcagcagacccugggugagaggcgugagcagcagaaucagcaucuacuggaccaucgugaagcccggcgacauccugcugaucaacagcaccggcaaccugaucgcccccagaggcuacuucaagaucagaagcggcaagagcagcaucaugagaagcaacgcccccaucggcaagugcaacagcgagugcaucacccccaacggcagcauccccaacgacaagcccuuccagaacgugaacagaaucaccuacggcgccugccccagauacgugaagcagaacacccugaagcuggccaccggcaugagaaacgugcccgagaagcagaccagaggcaucuucggcgccaucgccggcuucaucgagaacggcugggagggcaugguggacggcugguacggcuucagacaccagaacagcgagggcaccggccaggccgccgaccugaagagcacccaggccgccaucaaccagaucaacggcaagcugaacagacugaucgagaagaccaacgagaaguuccaccagaucgagaaggaguucagcgagguggagggcagaauccaggaccuggagaaguacguggaggacaccaagaucgaccuguggagcuacaacgccgagcugcugguggcccuggagaaccagcacaccaucgaccugaccgacagcgagaugaacaagcuguucgagagaaccagaaagcagcugagagagaacgccgaggacaugggcaacggcugcuucaagaucuaccacaagugcgacaacgccugcaucggcagcaucagaaacggcaccuacgaccacgacguguacagagacgaggcccugaacaacagauuccagaucaagggcguggagcugaagagcggcuacaaggacuggauccuguggaucagcuucgccaucagcugcuuccugcugugcguggugcugcugggcuucaucaugugggccugccagaagggcaacaucagaugcaacaucugcaucuga

SEQ ID NO: 160153 - RNA, 1701 nt, Artificial Sequence; identical to SEQ ID NO: 160132
  derived and/or modified CDS sequence (opt4) from hemagglutinin__InfluenzaA__AAX57834

SEQ ID NO: 160154 - RNA, 1701 nt, Artificial Sequence; identical to SEQ ID NO: 160132
  derived and/or modified CDS sequence (opt4) from hemagglutinin__InfluenzaA__AAX57844

SEQ ID NO: 160155 - RNA, 1701 nt, Artificial Sequence
  derived and/or modified CDS sequence (opt4) from hemagglutinin__InfluenzaA__AAX57864
augaagaccaucaucgcccugagcuacuuccugugccugguguucgcccagaagcugcccgugaacgacaacagcaccgccacccugugccugggccaccacgccgugcccaacggcacccuggugaagaccaucaccaacgaccacaucgaggugaccaacgccaccgagcuggugcagagcagcagcaccggcagaaucugcgacagcccccaccagauccuggacggcgagaacugcacccugaucgacgcccugcugggcgacccccacugcgacggcuuccagaacaaggagugggaccuguucguggagagaagcaccgccuacagcaacugcuaccccuacgacgugcccgacuacgccagccugagaagccugguggccagcagcggcacccuggaguucaacaacgagagcuucaacuggaccggcguggcccagaacggcaccagcagcgccugcaagagaagaagcaucaagagcuucuucagcagacugaacuggcugcaccagcugaaguacaaguaccccgcccugaacgugaccaugcccaacaacgagaaguucgacaagcuguacaucuggggcgugcaccaccccagcaccgacagcgaccagaucagccuguacgcccaggccagcggcagagugaccgugagcaccaagagaagccagcagaccgugauccccaacaucggcagcagacccugggugagaggcgugagcagcagaaucagcaucuacuggaccaucgugaagcccggcgacauccugcugaucaacagcaccggcaaccugaucgcccccagaggcuacuucaagaucagaagcggcaagagcagcaucaugagaagcaacgcccccaucggcaagugcaacagcgagugcaucacccccaacggcagcauccccaacgacaagcccuuccagaacgugaacagaaucaccuacggcgccugccccagauacgugaagcagaacacccugaagcuggccaccggcaugagaaacgugcccgagaagcagaccagaggcaucuucggcgccaucgccggcuucaucgagaacggcugggagggcaugguggacggcugguacggcuucagacaccagaacagcgagggcaccggccaggccgccgaccugaagagcacccaggccgccaucaaccagaucaacggcaagcugaacagacugaucgagaagaccaacgagaaguuccaccagaucgagaaggaguucagcgagguggagggcagaauccaggaccuggagaaguacguggaggacaccaagaucgaccuguggagcuacaacgccgagcugcugguggcccuggagaaccagcacaccaucgaccugaccgacagcgagaugaacaagcuguucgagagaaccagaaagcagcugagagagaacgccgaggacaugggcaacggcugcuucaagaucuaccacaagugcgacaacgccugcaucggcagcaucagaaacggcaccuacgaccacgacguguacagagacgaggcccugaacaacagauuccagaucaagggcguggagcugaagagcggcuacaaggacuggauccuguggaucagcuucgccaucagcugcuuccugcugugcguggugcugcugggcuucaucaugugggccugccagaagggcaacaucagaugcaacaucugcaucuga

SEQ ID NO: 160156 - RNA, 1701 nt, Artificial Sequence; identical to SEQ ID NO: 160132
  derived and/or modified CDS sequence (opt4) from hemagglutinin__InfluenzaA__AAX57874

SEQ ID NO: 160157 - RNA, 1701 nt, Artificial Sequence; identical to SEQ ID NO: 160132
  derived and/or modified CDS sequence (opt4) from hemagglutinin__InfluenzaA__AAX57884

SEQ ID NO: 160158 - RNA, 1701 nt, Artificial Sequence
  derived and/or modified CDS sequence (opt4) from hemagglutinin__InfluenzaA__AAX57894
augaagaccaucaucgcccugagcuacauccugugccugguguucgcccagaagcugcccgugaacgacaacagcaccgccacccugugccugggccaccacgccgugcccaacggcacccuggugaagaccaucaccaacgaccacaucgaggugaccaacgccaccgagcuggugcagagcagcagcaccggcagaaucugcgacagcccccaccaggugcuggacggcgagaacugcacccugaucgacgcccugcugggcgacccccacugcgacggcuuccagaacaaggagugggaccuguucguggagagaagcaccgccuacagcaacugcuaccccuacgacgugcccgacuacgccagccugagaagccugguggccagcagcggcacccuggaguucaacaacgagagcuucaacuggaccggcguggcccagaacggcaccagcagcgccugcaagagaagaagcaucaagagcuucuucagcagacugaacuggcugcaccagcugaaguacaaguaccccgcccugaacgugaccaugcccaacaacgagaaguucgacaagcuguacaucuggggcgugcaccaccccagcaccgacagcgaccagaucagccuguacgcccaggccagcggcagagugaccgugagcaccaagagaagccagcagaccgugauccccaacaucggcagcagacccugggugagaggcgugagcagcagaaucagcaucuacuggaccaucgugaagcccggcgacauccugcugaucaacagcaccggcaaccugaucgcccccagaggcuacuucaagaucagaagcggcaagagcagcaucaugagaagcaacgcccccaucggcaagugcaacagcgagugcaucacccccaacggcagcauccccaacgacaagcccuuccagaacgugaacagaaucaccuacggcgccugccccagauacgugaagcagaacacccugaagcuggccaccggcaugagaaacgugcccgagaagcagaccagaggcaucuucggcgccaucgccggcuucaucgagaacggcugggagggcaugguggacggcugguacggcuucagacaccagaacagcgagggcaccggccaggccgccgaccugaagagcacccaggccgccaucaaccagaucaacggcaagcugaacagacugaucgagaagaccaacgagaaguuccaccagaucgagaaggaguucagcgagguggagggcagaauccaggaccuggagaaguacguggaggacaccaagaucgaccuguggagcuacaacgccgagcugcugguggcccuggagaaccagcacaccaucgaccugaccgacagcgagaugaacaagcuguucgagagaaccagaaagcagcugagagagaacgccgaggacaugggcaacggcugcuucaagaucuaccacaagugcgacaacgccugcaucggcagcaucagaaacggcaccuacgaccacgacguguacagagacgaggcccugaacaacagauuccagaucaagggcguggagcugaagagcggcuacaaggacuggauccuguggaucagcuucgccaucagcugcuuccugcugugcguggugcugcugggcuucaucaugugggccugccagaagggcaacaucagaugcaacaucugcaucuga

SEQ ID NO: 160159 - RNA, 1701 nt, Artificial Sequence
  derived and/or modified CDS sequence (opt4) from hemagglutinin__InfluenzaA__AAX57924
augaagaccaucaucgcccugagcuacauccugugccugguguucgcccagaagcugcccgugaacgacaacagcaccgccacccugugccugggccaccacgccgugcccaacggcacccuggugaagaccaucaccaacgaccacaucgaggugaccaacgccaccgagcuggugcagagcagcagcaccggcagaaucugcgacagcccccaccagauccuggacggcgagaacugcacccugaucgacgcccugcugggcgacccccacugcgacggcuuccagaacaaggagugggaccuguucguggagagaagcaccgccuacagcaacugcuaccccuacgacgugcccgacuacgccagccugagaagccugguggccagcagcggcacccuggaguucaacaacgagagcuucaacuggaccggcguggcccagaacggcaccagcuucgccugcaagagaagaagcaucaagagcuucuucagcagacugaacuggcugcaccagcugaaguacaaguaccccgcccugaacgugaccaugcccaacaacgagaaguucgacaagcuguacaucuggggcgugcaccaccccagcaccgacagcgaccagaucagccuguacgcccaggccagcggcagagugaccgugagcaccaagagaagccagcagaccgugauccccaacaucggcagcagacccugggugagaggcgugagcagcagaaucagcaucuacuggaccaucgugaagcccggcgacauccugcugaucaacagcaccggcaaccugaucgcccccagaggcuacuucaagaucagaagcggcaagagcagcaucaugagaagcaacgcccccaucggcaagugcaacagcgagugcaucacccccaacggcagcauccccaacgacaagcccuuccagaacgugaacagaaucaccuacggcgccugccccagauacgugaagcagaacacccugaagcuggccaccggcaugagaaacgugcccgagaagcagaccagaggcaucuucggcgccaucgccggcuucaucgagaacggcugggagggcaugguggacggcugguacggcuucagacaccagaacagcgagggcaccggccaggccgccgaccugaagagcacccaggccgccaucaaccagaucaacggcaagcugaacagacugaucgagaagaccaacgagaaguuccaccagaucgagaaggaguucagcgagguggagggcagaauccaggaccuggagaaguacguggaggacaccaagaucgaccuguggagcuacaacgccgagcugcugguggcccuggagaaccagcacaccaucgaccugaccgacagcgagaugaacaagcuguucgagagaaccagaaagcagcugagagagaacgccgaggacaugggcaacggcugcuucaagaucuaccacaagugcgacaacgccugcaucggcagcaucagaaacggcaccuacgaccacgacguguacagagacgaggcccugaacaacagauuccagaucaagggcguggagcugaagagcggcuacaaggacuggauccuguggaucagcuucgccaucagcugcuuccugcugugcguggugcugcugggcuucaucaugugggccugccagaagggcaacaucagaugcaacaucugcaucuga

SEQ ID NO: 160160 - RNA, 1701 nt, Artificial Sequence; identical to SEQ ID NO: 160132
  derived and/or modified CDS sequence (opt4) from hemagglutinin__InfluenzaA__AAX57934

SEQ ID NO: 160161 - RNA, 1701 nt, Artificial Sequence
  derived and/or modified CDS sequence (opt4) from hemagglutinin__InfluenzaA__AAX57944
augaagaccaucaucgcccugagcuacauccugugccugguguucgcccagaagcugcccggcaacgacaacagcaccgccacccugugccugggccaccacgccgugcccaacggcacccuggugaagaccaucaccaacgaccagaucgaggugaccaacgccaccgagcuggugcagagcagcagcaccggcagaaucugcgacagcccccaccagauccuggacggcgagaacugcacccugaucgacgcccugcugggcgacccccacugcgacggcuuccagaacaaggagugggaccuguucguggagagaagcaaggccuacagcaacugcuaccccuacgacgugcccgacuacgugagccugagaagccugguggccagcagcggcacccuggaguucaacaacgagagcuucaacuggaccggcguggcccagaacggcaccagcagcgccugcaagagaagaagcgacaagagcuucuucagcagacugaacuggcugcaccagcugaaguacaaguaccccgcccugaacgugaccaugcccaacaacgagaaguucgacaagcuguacaucuggggcgugcaccaccccggcaccgacagcgaccagaucagccuguacgcccaggccagcggcagagugaccgugagcaccaagagaagccagcagaccgugauccccaacaucggcagcggccccugggugagaggcgugagcagcagaaucagcaucuacuggaccaucgugaagcccggcgacauccugcugaucaacagcaccggcaaccugaucgcccccagaggcuacuucaagaucagaagcggcaagagcagcaucaugagaagcgacgcccccaucggcaagugcaacagcgagugcaucacccccaacggcagcauccccaacggcaagcccuuccagaacgugaacagaaucaccuacggcgccugccccagauacgugaagcagaacacccugaagcuggccaccggcaugagaaacgugcccgagaagcagaccagaggcaucuucggcgccaucgccggcuucaucgagaacggcugggagggcaugauggacggcugguacggcuucagacaccagaacagcgagggcaccggccaggccgccgaccugaagagcacccaggccgccaucaaccagaucaacggcaagcugaacagacugaucgagaagaccaacgagaaguuccaccagaucgagaaggaguucagcgagguggagggcagaauccaggaccuggagaaguacguggaggacaccaagaucgaccuguggagcuacaacgccgagcugcugguggcccuggagaaccagcacaccaucgaccugaccgacagcgagaugaacaagcuguucgagagaaccaagaagcagcugagagagaacgccgaggacaugggcaacggcugcuucaagaucuaccacaagugcgacaacgccugcaucggcagcaucagaaacggcaccuacgaccacgacguguacagagacgaggcccugaacaacagauuccagaucaagagcguggagcugaagagcggcuacaaggacuggauccuguggaucagcuucgccaucagcugcuuccugcugugcaucgugcugcugggcuucaucaugugggccugccagaagggcaacaucagaugcaacaucugcaucuga

SEQ ID NO: 160162 - RNA, 1701 nt, Artificial Sequence
  derived and/or modified CDS sequence (opt4) from hemagglutinin__InfluenzaA__AAX76623
augaagaccaucaucgcccugagcuacauccugugccugguguucgcccagaagcugcccggcaacgacaagagcaccgccacccugugccugggccaccacgccgugcccaacggcaccaucgugaagaccaucaccaacgaccagaucgaggugaccaacgccaccgagcuggugcagagcagcagcaccggcggcaucugcgacagcccccaccagauccuggacggcgagaacugcacccugaucgacgcccugcugggcgacccccagugcgacggcuuccagaacaagaagugggaccuguucguggagagaagcaaggccuacagcaacugcuaccccuacgacgugcccgacuacgccagccugagaagccugguggccagcagcggcacccuggaguucaacaacgagagcuucgacuggaccggcgugacccagaacggcaccagcagcgccugcaagagaagaagcaacaagagcuucuucagcagacugaacuggcugacccaccugaaguacaaguaccccgcccugaacgugaccaugcccaacaacgagaaguucgacaagcuguacaucuggggcgugcaccaccccggcaccgacagcgaccagaucagccuguacgcccaggccagcggcagaaucaccgugagcaccaagagaagccagcagaccgugauccccaacaucggcagcagacccagagugagagacaucagcagcagaaucagcaucuacuggaccaucgugaagcccggcgacauccugcugaucaacagcaccggcaaccugaucgcccccagaggcuacuucaagaucagaagcggcaagagcagcaucaugagaagcgacgcccccaucggcaagugcaacagcgagugcaucacccccaacggcagcauccccaacgacaagcccuuccagaacgugaacagaaucaccuacggcgccugccccagauacgugaagcagaacacccugaagcuggccaccggcaugagaaacgugcccgagaagcagaccagaggcaucuucggcgccaucgccggcuucaucgagaacggcugggagggcaugguggacggcugguacggcuucagacaccagaacagcgagggcaccggccaggccgccgaccugaagagcacccaggccgccaucaaccagaucaacggcaagcugaacagacugaucggcaagaccaacgagaaguuccaccagaucgagaaggaguucagcgagguggagggcagaauccaggaccuggagaaguacguggaggacaccaagaucgaccuguggagcuacaacgccgagcugcugguggcccuggagaaccagcacaccaucgaccugaccgacagcgagaugaacaagcuguucgagagaaccaagaagcagcugagagagaacgccgaggacaugggcaacggcugcuucaagaucuaccacaagugcgacaacgccugcaucggcagcaucagaaacggcaccuacgaccacgacguguacagagacgaggcccugaacaacagauuccagaucaagggcguggagcugagaagcggcuacaaggacuggauccuguggaucagcuucgccaucagcugcuuccugcugugcguggccagccugggcuucaucaugugggccugccagaagggcaacaucagaugcaacaucugcaucuga

SEQ ID NO: 160163 - RNA, 1701 nt, Artificial Sequence
  derived and/or modified CDS sequence (opt4) from hemagglutinin__InfluenzaA__AAX76643
augaagaccaucaucgcccugagcuacuuccugugccugguguucgcccagaagcugcccggcaacgacaacagcaccgccacccugugccugggccaccacgccgugcccaacggcaccaucgugaagaccaucaccaacgaccagaucgaggugaccaacgccaccgagcuggugcagagcagcagcaccggcggcaucugcgacagcccccaccagauccuggacggcgagaacugcacccugaucgacgcccugcugggcgacccccagugcgacggcuuccagaacaagaagugggaccuguucguggagagaagcaaggccuacagcaacugcuaccccuacgacgugcccgacuacgccagccugagaagccugguggccagcagcggcacccuggaguucaacaacgagagcuucaacuggaccggcgugacccagaacggcaccagcagcgccugcgagagaagaagcaacaagagcuucuucagcagacugaacuggcugacccaccugaaguacaaguaccccgcccugaacgugaccaugcccaacaacgagaaguucgacaagcuguacaucuggggcgugcaccaccccggcaccgacagcgaccagaucagccuguacgcccaggccagcggcagaaucaccgugagcaccaagagaagccagcagaccgugauccccaacaucggcagcagacccagagugagagacgugagcagcagaaucagcaucuacuggaccaucgugaagcccggcgacauccugcugaucaacagcaccggcaaccugaucgcccccagaggcuacuucaagaucagaagcggcaagagcagcaucaugagaagcgacgcccccaucggcaagugcaacagcgagugcaucacccccaacggcagcauccccaacgacaagcccuuccagaacgugaacagaaucaccuacggcgccugccccagauacgugaagcagaacacccugaagcuggccaccggcaugagaaacgugcccgagaagcagaccagaggcaucuucggcgccaucgccggcuucaucgagaacggcugggagggcaugguggacggcugguacggcuucagacaccagaacagcgagggcaccggccaggccgccgaccugaagagcacccaggccgccaucaaccagaucaacggcaagcugaacagacugaucggcaagaccaacgagaaguuccaccagaucgagaaggaguucagcgagguggagggcagaauccaggaccuggagaaguacguggaggacaccaagaucgaccuguggagcuacaacgccgagcugcugguggcccuggagaaccagcacaccaucgaccugaccgacagcgagaugaacaagcuguucgagagaaccaagaagcagcugagagagaacgccgaggacaugggcaacggcugcuucaagaucuaccacaagugcgacaacgccugcaucggcagcaucagaaacggcaccuacgaccacgacguguacagagacgaggcccugaacaacagauuccagaucaagggcguggagcugaagagcggcuacaaggacuggauccuguggaucagcuucgccaucagcugcuuccugcugugcguggcccugcugggcuucaucaugugggccugccagaagggcaacaucagaugcgacaucugcaucuga

SEQ ID NO: 160164 - RNA, 1701 nt, Artificial Sequence
  derived and/or modified CDS sequence (opt4) from hemagglutinin__InfluenzaA__AAX76653
augaagaccaucaucgcccugagcuacuuccugugccugguguucgcccagaagcugcccggcaacgacaacagcaccgccacccugugccugggccaccacgccgugcccaacggcaccaucgugaagaccaucaccaacgaccagaucgaggugaccaacgccaccgagcuggugcagagcagcagcaccggcggcaucugcgacagcccccaccagauccuggacggcgagaacugcacccugaucgacgcccugcugggcgacccccagugcgacggcuuccagaacaagaagugggaccuguucguggagagaagcaaggccuacagcaacugcuaccccuacgacgugcccgacuacgccagccugagaagccugguggccagcagcggcacccuggaguucaacaacgagagcuucaacuggaccggcgugacccagaacggcaccagcagcgccugcgagagaagaagcaacaagagcuucuucagcagacugaacuggcugacccaccugaaguacaaguaccccgcccugaacgugaccaugcccaacaacgagaaguucgacaagcuguacaucuggggcgugcaccaccccggcaccgacagcgaccagaucagccuguucgcccaggccagcggcagaaucaccgugagcaccaagagaagccagcagaccgugauccccaacaucggcagcggccccagagugagagacgugagcagcagaaucagcaucuacuggaccaucgugaagcccggcgacauccugcugaucaacagcaccggcaaccugaucgcccccagaggcuacuucaagaucagaagcggcaagagcagcaucaugagaagcgacgcccccaucggcaagugcaacagcgagugcaucacccccaacggcagcauccccaacgacaagcccuuccagaacgugaacagaaucaccuacggcgccugccccagauacgugaagcagaacacccugaagcuggccaccggcaugagaaacgugcccgagaagcagaccagaggcaucuucggcgccaucgccggcuucaucgagaacggcugggagggcaugguggacggcugguacggcuucagacaccagaacagcgagggcaccggccaggccgccgaccugaagagcacccaggccgccaucaaccagaucaacggcaagcugaacagacugaucggcaagaccaacgagaaguuccaccagaucgagaaggaguucagcgagguggagggcagaauccaggaccuggagaaguacguggaggacaccaagaucgaccuguggagcuacaacgccgagcugcugguggcccuggagaaccagcacaccaucgaccugaccgacagcgagaugaacaagcuguucgagagaaccaagaagcagcugagagagaacgccgaggacaugggcaacggcugcuucaagaucuaccacaagugcgacaacgccugcaucggcagcaucagaaacggcaccuacgaccacgacguguacagagacgaggcccugaacaacagauuccagaucaagggcguggagcugaagagcggcuacaaggacuggauccuguggaucagcuucgccaucagcugcuuccugcugugcguggcccugcugggcuucaucaugugggccugccagaagggcaacaucagaugcgacaucugcaucuga

SEQ ID NO: 160165 - RNA, 1701 nt, Artificial Sequence
  derived and/or modified CDS sequence (opt4) from hemagglutinin__InfluenzaA__AAX76663
augaagaccaucaucgcccugagcuacauccugugccugguguucgcccagaagcugcccggcaacgacaacagcaccgccacccugugccugggccaccacgccgugcccaacggcacccuggugaagaccaucaccaacgaccagaucgaggugaccaacgccaccgagcuggugcagagcagcagcaccggcagaaucugcgacagcccccaccagauccuggacggcgagaacugcacccugaucgacgcccugcugggcgacccccacugcgacggcuuccagaacaaggagugggaccuguucguggagagaagcaaggccuacagcaacugcuaccccuacgacgugcccgacuacgugagccugagaagccugguggccagcagcggcacccuggaguucaacaacgagagcuucaacuggaccggcguggcccagaacggcaccagcagcgccugcaagagaagaagcgacaagagcuucuucagcagacugaacuggcugcaccagcugaaguacaaguaccccgcccugaacgugaccaugcccaacaacgagaaguucgacaagcuguacaucuggggcgugcaccaccccggcaccgacagcgaccagaucagccuguacgcccaggccagcggcagagugaccgugagcaccaagagaagccagcagaccgugauccccaacaucggcagcggccccugggugagaggcgugagcagcagaaucagcaucuacuggaccaucgugaagcccggcgacauccugcugaucaacagcaccggcaaccugaucgcccccagaggcuacuucaagaucagaagcggcaagagcagcaucaugagaagcgacgcccccaucggcaagugcaacagcgagugcaucacccccaacggcagcauccccaacgacaagcccuuccagaacgugaacagaaucaccuacggccccugccccagauacgugaagcagaacacccugaagcuggccaccggcaugagaaacgugcccgagaagcagaccagaggcaucuucggcgccaucgccggcuucaucgagaacggcugggagggcaugauggacggcugguacggcuucagacaccagaacagcgagggcaccggccaggccgccgaccugaagagcacccaggccgccaucaaccagaucaacggcaagcugaacagacugaucgagaagaccaacgagaaguuccaccagaucgagaaggaguucagcgagguggagggcagaauccaggaccuggagaaguacguggaggacaccaagaucgaccuguggagcuacaacgccgagcugcugguggcccuggagaaccagcacaccaucgaccugaccgacagcgagaugaacaagcuguucgagagaaccaagaagcagcugagagagaacgccgaggacaugggcaacggcugcuucaagaucuaccacaagugcgacaacgccugcaucggcagcaucagaaacggcaccuacgaccacgacguguacagagacgaggcccugaacaacagauuccagaucaagggcguggagcugaagagcggcuacaaggacuggauccuguggaucagcuucgccaucagcugcuuccugcugugcaucgugcugcugggcuucaucaugugggccugccagaagggcaacaucagaugcaacaucugcaucuga

SEQ ID NO: 160166 - RNA, 1701 nt, Artificial Sequence
  derived and/or modified CDS sequence (opt4) from hemagglutinin__InfluenzaA__AAX76673
augaagaccaucaucgcccugagcuacauccugugccugguguucgcccagaagcugcccgugaacgacaacagcaccgccacccugugccugggccaccacgccgugcccaacggcacccuggugaagaccaucaccaacgaccacaucgaggugaccaacgccaccgagcuggugcagagcagcagcaccggcagaaucugcgacagcccccaccagauccuggacggcgagaacugcacccugaucgacgcccugcugggcgacccccacugcgacggcuuccagaacaaggagugggaccuguucguggagagaagcaccgccuacagcaacugcuaccccuacgacgugcccgacuacgccagccugagaagccugguggccagcagcggcacccuggaguucaacaacgagagcuucaacuggaccggcguggcccagaacggcaccagcagcgccugcaagagaagaagcaucaagagcuucuucagcagacugaacuggcugcaccagcugaaguacaaguaccccgcccugaacgugaccaugcccaacaacgagaaguucgacaagcuguacaucuggggcgugcaccaccccagcaccgacagcgaccagaucagccuguacgcccaggccagcggcagagugaccgugagcaccaagagaagccagcagaccgugauccccaacaucggcagcagacccugggugagaggcgugagcagcagaaucagcaucuacuggaccaucgugaagcccggcgacauccugcugaucaacagcaccggcaaccugaucgcccccagaggcuacuucaagaucagaagcggcaagagcagcaucaugagaagcaacgcccccaucggcaagugcaacagcgagugcaucacccccaacggcagcauccccaacgacaagcccuuccagaacgugaacagaaucaccuacggcgccugccccagauacgugaagcagaacacccugaagcuggccaccggcaugagaaacgugcccgagaagcagaccagaggcaucuucggcgccaucgccggcuucaucgagaacggcugggagggcaugguggacggcugguacggcuucagacaccagaacagcgagggcaccggccaggccgccgaccugaagagcacccaggccgccaucaaccagaucaacggcaagcugaacagacugaucgagaagaccaacgagaaguuccaccagaucgagaaggaguucagcgagguggagggcagaauccaggaccuggagagauacguggaggacaccaagaucgaccuguggagcuacaacgccgagcugcugguggcccuggagaaccagcacaccaucgaccugaccgacagcgagaugaacaagcuguucgagagaaccagaaagcagcugagagagaacgccgaggacaugggcaacggcugcuucaagaucuaccacaagugcgacaacgccugcaucggcagcaucagaaacggcaccuacgaccacgacguguacagagacgaggcccugaacaacagauuccagaucaagggcguggagcugaagagcggcuacaaggacuggauccuguggaucagcuucgccaucagcugcuuccugcugugcguggugcugcugggcuucaucaugugggccugccagaagggcaacaucagaugcaacaucugcaucuga

SEQ ID NO: 160167 - RNA, 1701 nt, Artificial Sequence
  derived and/or modified CDS sequence (opt4) from hemagglutinin__InfluenzaA__AAX76683
augaagaccaucaucgcccugagcuacauccugugccugguguucgcccagaagcugcccgugaacgacaacagcaccgccacccugugccugggccaccacgccgugcccaacggcacccuggugaagaccaucaccaacgaccacaucgaggugaccaacgccaccgagcuggugcagagcagcagcaccggcagaaucugcgacagcccccaccagauccuggacggcgagaacugcacccugaucgacgcccugcugggcgacccccacugcgacggcuuccagaacaaggagugggaccuguucguggagagaagcaccgccuacagcaacugcuaccccuacgacgugcccgacuacgccagccugagaagccugguggccagcagcggcacccuggaguucaacaacgagagcuucaacuggaccggcguggcccagaacggcaccagcagcgccugcaagagaagaagcaucaagagcuucuucagcagacugaacuggcugcaccagcugaaguacaaguaccccgcccugaacgugaccaugcccaacaacgagaaguucgacaagcuguacaucuggggcgugcaccaccccagcaccgacagcgaccagaucagccuguacgcccaggccagcggcagagugaccgugagcaccaagagaagccagcagaccgugauccccaacaucggcagcagacccugggugagaggcgugagcagcagaaucagcaucuacuggaccaucgugaagcccggcgacauccugcugaucaacagcaccggcaaccugaucgcccccagaggcuacuucaagaucagaagcggcaagagcagcgugaugagaagcaacgcccccaucggcaagugcaacagcgagugcaucacccccaacggcagcauccccaacgacaagcccuuccagaacgugaacagaaucaccuacggcgccugccccagauacgugaagcagaacacccugaagcuggccaccggcaugagaaacgugcccgagaagcagaccagaggcaucuucggcgccaucgccggcuucaucgagaacggcugggagggcaugguggacggcugguacggcuucagacaccagaacagcgagggcaccggccaggccgccgaccugaagagcacccaggccgccaucaaccagaucaacggcaagcugaacagacugaucgagaagaccaacgagaaguuccaccagaucgagaaggaguucagcgagguggagggcagaauccaggaccuggagaaguacguggaggacaccaagaucgaccuguggagcuacaacgccgagcugcugguggcccuggagaaccagcacaccaucgaccugaccgacagcgagaugaacaagcuguucgagagaaccagaaagcagcugagagagaacgccgaggacaugggcaacggcugcuucaagaucuaccacaagugcgacaacgccugcaucggcagcaucagaaacggcaccuacgaccacgacguguacagagacgaggcccugaacaacagauuccagaucaagggcguggagcugaagagcggcuacaaggacuggauccuguggaucagcuucgccaucagcugcuuccugcugugcguggugcugcugggcuucaucaugugggccugccagaagggcaacaucagaugcaacaucugcaucuga

SEQ ID NO: 160168 - RNA, 1701 nt, Artificial Sequence; identical to SEQ ID NO: 160132
  derived and/or modified CDS sequence (opt4) from hemagglutinin__InfluenzaA__AAX76713

SEQ ID NO: 160169 - RNA, 1701 nt, Artificial Sequence
  derived and/or modified CDS sequence (opt4) from hemagglutinin__InfluenzaA__AAX76723
augaagaccaucaucgcccugagcuacauccugugccugguguucgcccagaagcugcccgugaacgacaacagcaccgccacccugugccugggccaccacgccgugcccaacggcacccuggugaagaccaucaccaacgaccacaucgaggugaccaacgccaccgagcuggugcagagcagcagcaccggcagaaucugcgacagcccccaccagauccuggacggcgagaacugcacccugaucgacgcccugcugggcgacccccacugcgacggcuuccagaacaaggagugggaccuguucguggagagaagcaccgccuacagcaacugcuaccccuacgacgugcccgacuacgccagccugagaagccugguggccagcagcggcacccuggaguucaacaacgagagcuucaacuggaccggcguggcccagaacggcaccagcagcgccugcaagagaagaagcaucaagagcuucuucagcagacugaacuggcugcaccagcugaaguacaaguaccccgcccugaacgugaccaugcccaacaacgaggaguucgacaagcuguacaucuggggcgugcaccaccccagcaccgacagcgaccagaucagccuguacgcccaggccagcggcagagugaccgugagcaccaagagaagccagcagaccgugauccccaacaucggcagcagacccugggugagaggcgugagcagcaucaucagcaucuacuggaccaucgugaagcccggcgacauccugcugaucaacagcaccggcaaccugaucgcccccagaggcuacuucaagaucagaagcggcaagagcagcaucaugagaagcaacgcccccaucggcaagugcaacagcgagugcaucacccccaacggcagcauccccaacgacaagcccuuccagaacgugaacagaaucaccuacggcgccugccccagauacgugaagcagaacacccugaagcuggccaccggcaugagaaacgugcccgagaagcagaccagaggcaucuucggcgccaucgccggcuucaucgagaacggcugggagggcaugguggacggcugguacggcuucagacaccagaacagcgagggcaccggccaggccgccgaccugaagagcacccaggccgccaucaaccagaucaacggcaagcugaacagacugaucgagaagaccaacgagaaguuccaccagaucgagaaggaguucagcgagguggagggcagaauccaggaccuggagaaguacguggaggacaccaagaucgaccuguggagcuacaacgccgagcugcugguggcccuggagaaccagcacaccaucgaccugaccgacagcgagaugaacaagcuguucgagagaaccagaaagcagcugagagagaacgccgaggacaugggcaacggcugcuucaagaucuaccacaagugcgacaacgccugcaucggcagcaucagaaacggcaccuacgaccacgacguguacagagacgaggcccugaacaacagauuccagaucaagggcguggagcugaagagcggcuacaaggacuggauccuguggaucagcuucgccaucagcugcuuccugcugugcguggugcugcugggcuucaucaugugggccugccagaagggcaacaucagaugcaacaucugcaucuga

SEQ ID NO: 160170 - RNA, 1701 nt, Artificial Sequence
  derived and/or modified CDS sequence (opt4) from hemagglutinin__InfluenzaA__AAX76733
augaagaccaucaucgcccugagcuacauccugugccugguguucgcccagaagcugcccggcaacgacaacagcaccgccacccugugccugggccaccacgccgugcccaacggcacccuggugaagaccaucaccaacgaccagaucgaggugaccaacgccaccgagcuggugcagagcagcagcaccgacagaaucugcgacagcccccaccagauccuggacggcggcaacugcacccugaucgacgcccugcugggcgacccccacugcgacggcuuccagaacaaggagugggaccuguucguggagagaagcaaggccuacagcaacugcuaccccuacgacgugcccgacuacgugagccugagaagccugguggccagcagcggcacccuggaguucaacaacgagagcuucaacuggaccggcguggcccagaacggcaccagcagcgccugcaagagaagaagcgacaagagcuucuucagcagacugaacuggcugcaccagcugaagaacaaguaccccgcccugaacguggccaugcccaacaacgagaaguucgacaagcuguacaucuggggcgugcaccaccccggcaccgacagcgaccagaucagccuguacgcccaggccagcggcagagugaccgugagcaccaagagaagccagcagaccgugauccccaacaucggcagcagacccagagugagagacaucagcagcagaaucagcaucuacuggaccaucgugaagcccggcgacauccugcugaucaacagcaccggcaaccugaucgcccccagaggcuacuucaagaucagaagcggcaagagcagcaucaugagaagcgacgcccccaucggcaagugcaacagcgagugcaucacccccaacggcagcauccccaacgacaagcccuuccagaacgugaacagaaucaccuacggcgccugccccagauacgugaagcagaacacccugaagcuggccaccggcaugagaaacgugcccgagaagcagaccagaggcaucuucggcgccaucgccggcuucaucgagaacggcugggagggcaugguggacggcugguacggcuucagacaccagaacuacgagggcaccggccaggccgccgaccugaagagcacccaggccgccaucaaccagaucaacggcaagcugaacagacugaucgagaagaccaacgagaaguuccaccagaucgagaaggaguucagcgagguggagggcagaauccaggaccuggagaaguacguggaggacaccaagaucgaccuguggagcuacaacgccgagcugcugguggcccuggagaaccagcacaccaucgaccugaccgacagcgagaugaacaagcuguucgagagaaccaagaagcagcugagagagaacgccgaggacaugggcaacggcugcuucaagaucuaccacaagugcgacaacgccugcaucggcagcaucagaaacggcaccuacgaccacgacguguacagagacgaggcccugaacaacagauuccagaucaagggcguggagcugaagagcggcuacaaggacuggauccuguggaucagcuucgccaucagcugcuuccugcugugcaucgugcugcugggcuucaucaugugggccugccagaagggcaacaucagaugcaacaucugcaucuga

SEQ ID NO: 160171 - RNA, 1701 nt, Artificial Sequence
  derived and/or modified CDS sequence (opt4) from hemagglutinin__InfluenzaA__AAX76743
augaagaccaucaucgcccugagcuacauccugugccugguguucgcccagaagcugcccggcaacgacaacagcaccgccacccugugccugggccaccacgccgugcccaacggcacccuggugaagaccaucaccaacgaccagaucgaggugaccaacgccaccgagcuggugcagagcagcagcaccggcagaaucugcgacagcccccaccagauccuggacggcgagaacugcacccugaucgacgcccugcugggcgacccccacugcgacggcuuccagaacaaggagugggaccuguucguggagagaagcaaggccuacagcaacugcuaccccuacgacgugcccgacuacgugagccugagaagccugguggccagcagcggcacccuggaguucaacaacgagagcuucaacuggaccggcguggcccagaacggcaccagcagcgccugcaagagaagaagcaacaagagcuucuucagcagacugaacuggcugcaccagcugaagaacaaguaccccgcccugaacguggccaugcccaacaacgagaaguucgacaagcuguacaucuggggcgugcaccaccccggcaccgacagcgaccagaucagccuguacgcccaggccagcggcagagugaccgugagcaccaagagaagccagcagaccgugauccccaacaucggcagcagacccagagugagagacaucagcagcagaaucagcaucuacuggaccaucgugaagcccggcgacauccugcugaucaacagcaccggcaaccugaucgcccccagaggcuacuucaagaucagaagcggcaagagcagcaucaugagaagcgacgcccccaucggcaagugcaacagcgagugcaucacccccaacggcagcauccccaacgacaagcccuuccagaacgugaacagaaucaccuacggcgccugccccagauacgugaagcagaacacccugaagcuggccaccggcaugagaaacgugcccgagaagcagaccagaggcaucuucggcgccaucgccggcuucaucgagaacggcugggagggcaugauggacggcugguacggcuucagacaccagaacagcgagggcaccggccaggccgccgaccugaagagcacccaggccgccaucaaccagaucaacggcaagcugaacagacugaucgagaagaccaacgagaaguuccaccagaucgagaaggaguucagcgagguggagggcagaauccaggaccuggagaaguacguggaggacaccaagaucgaccuguggagcuacaacgccgagcugcugguggcccuggagaaccagcacaccaucgaccugaccgacagcgagaugaacaagcuguucgagagaaccaagaagcagcugagagagaacgccgaggacaugggcaacggcugcuucaagaucuaccacaagugcgacaacgccugcaucggcagcaucagaaacggcaccuacgaccacgacguguacagagacgaggcccugaacaacagauuccagaucaagggcguggagcugaagagcggcuacaaggacuggauccuguggaucagcuucgccaucagcugcuuccugcugugcaucgugcugcugggcuucaucaugugggccugccagaagggcaacaucagaugcaacaucugcaucuga

SEQ ID NO: 160172 - RNA, 1701 nt, Artificial Sequence
  derived and/or modified CDS sequence (opt4) from hemagglutinin__InfluenzaA__AAX76763
augaagaccaucaucgcccugagcuacauccugugccugguguucgcccagaagcugcccggcaacgacaacagcaccgccacccugugccugggccaccacgccgugcccaacggcaccaucgugaagaccaucaccaacgaccagaucgaggugaccaacgccaccgagcuggugcagagcagcagcaccggcggcaucugcgacagcccccaccagauccuggacggcgagaacugcacccugaucgacgcccugcugggcgacccccagugcgacggcuuccagaacaagaagugggaccuguucguggagagaagcaaggccuacagcaacugcuaccccuacgacgugcccgacuacgccagccugagaagccugguggccagcagcggcacccuggaguucaacaacgagagcuucgacuggaccggcgugacccagaacggcaccagcagcgccugcaagagaagaagcaacaagagcuucuucagcagacugaacuggcugacccaccugaaguacaaguaccccgcccugaacgugaccaugcccaacaacgagaaguucgacaagcuguacaucuggggcgugcaccaccccggcaccgacagcgaccagaucagccuguacgcccaggccagcggcagaaucaccgugagcaccaagagaagccagcagaccgugauccccaacaucggcagcagacccagagugagagacaucagcagcagaaucagcaucuacuggaccaucgugaagcccggcgacauccugcugaucaacagcaccggcaaccugaucgcccccagaggcuacuucaagaucagaagcggcaagagcagcaucaugagaagcgacgcccccaucggcaagugcaacagcgagugcaucacccccaacggcagcauccccaacgacaagcccuuccagaacgugaacagaaucaccuacggcgccugccccagauacgugaagcagaacacccugaagcuggccaccggcaugagaaacgugcccgagaagcagaccagaggcaucuucggcgccaucgccggcuucaucgagaacggcugggagggcaugguggacggcugguacggcuucagacaccagaacagcgagggcaccggccaggccgccgaccugaagagcacccaggccgccaucaaccagaucaacggcaagcugaacagacugaucggcaagaccaacgagaaguuccaccagaucgagaaggaguucagcgagguggagggcagaauccaggaccuggagaaguacguggaggacaccaagaucgaccuguggagcuacaacgccgagcugcugaucgcccuggagaaccagcacaccaucgaccugaccgacagcgagaugaacaagcuguucgagagaaccaagaagcagcugagagagaacgccgaggacaugggcaacggcugcuucaagaucuaccacaagugcgacaacgccugcaucggcagcaucagaaacggcaccuacgaccacgacguguacagagacgaggcccugaacaacagauuccagaucaagggcguggagcugaagagcggcuacaaggacuggauccuguggaucagcuucgccaucagcugcuuccugcugugcguggcccugcugggcuucaucaugugggccugccagaagggcaacaucagaugcaacaucugcaucuga

SEQ ID NO: 160173 - RNA, 1701 nt, Artificial Sequence; identical to SEQ ID NO: 160092
  derived and/or modified CDS sequence (opt4) from hemagglutinin__InfluenzaA__AAY18086

SEQ ID NO: 160174 - RNA, 1701 nt, Artificial Sequence
  derived and/or modified CDS sequence (opt4) from hemagglutinin__InfluenzaA__AAY18096
augaagaccaucaucgcccugagcugcauccugugccugguguucgcccagaagcugcccggcaacgacaacagcaccgccacccugugccugggccaccacgccgugcccaacggcaccaucgugaagaccaucaccaacgaccagaucgaggugaccaacgccaccgagcuggugcagagcagcagcaccggcggcaucugcgacagcccccaccagauccuggacggcgagaacugcacccugaucgacgcccugcugggcgacccccagugcgacggcuuccagaacaagaagugggaccuguucguggagagaagcaaggccuacagcaacugcuaccccuacgacgugcccgacuacgccagccugagaagccugguggccagcagcggcacccuggaguucaacaacgagagcuucaacuggaccggcgugacccagaacggcaccagcagcgccugcgagagaagaagcaacaagagcuucuucagcagacugaacuggcugacccaccugaaguacaaguaccccgcccugaacgugaccaugcccaacaacgagaaguucgacaagcuguacaucuggggcgugcaccaccccggcaccgacagcgaccagaucagccuguacgcccaggccagcggcagaaucaccgugagcaccaagagaagccagcagaccgugauccccaacaucggcagcagacccagagugagagacgugagcagcagaaucagcaucuacuggaccaucgugaagcccggcgacauccugcugaucaacagcaccggcaaccugaucgcccccagaggcuacuucaagaucagaagcggcaagagcagcaucaugagaagcgacgcccccaucggcaagugcaacagcgagugcaucacccccaacggcagcauccccaacgacaagcccuuccagaacgugaacagaaucaccuacggcgccugccccagauacgugaagcagaacacccugaagcuggccaccggcaugagaaacgugcccgagaagcagaccagaggcaucuucggcgccaucgccggcuucaucgagaacggcugggagggcaugguggacggcugguacggcuucagacaccagaacagcgagggcaccggccaggccgccgaccugaagagcacccaggccgccaucaaccagaucaacggcaagcugaacagacugaucggcaagaccaacgagaaguuccaccagaucgagaaggaguucagcgagguggagggcagaauccaggaccuggagaaguacguggaggacaccaagaucgaccuguggagcuacaacgccgagcugcugguggcccuggagaaccagcacaccaucgaccugaccgacagcgagaugaacaagcuguucgagagaaccaagaagcagcugagagagaacgccgaggacaugggcaacggcugcuucaagaucuaccacaagugcgacaacgccugcaucggcagcaucagaaacggcaccuacgaccacgacguguacagagacgaggcccugaacaacagauuccagaucaagggcguggagcugaagagcggcuacaaggacuggauccuguggaucagcuucgccaucagcugcuuccugcugugcguggcccugcugggcuucaucaugugggccugccagaagggcaacaucagaugcgacaucugcaucuga

SEQ ID NO: 160175 - RNA, 1701 nt, Artificial Sequence; identical to SEQ ID NO: 160107
  derived and/or modified CDS sequence (opt4) from hemagglutinin__InfluenzaA__AAY18106

SEQ ID NO: 160176 - RNA, 1701 nt, Artificial Sequence; identical to SEQ ID NO: 160107
  derived and/or modified CDS sequence (opt4) from hemagglutinin__InfluenzaA__AAY18116

SEQ ID NO: 160177 - RNA, 1701 nt, Artificial Sequence
  derived and/or modified CDS sequence (opt4) from hemagglutinin__InfluenzaA__AAY18126
augaagaccaucaucgcccugagcuacauccugugccugguguucgcccagaagcugcccggcaacgacaacagcaccgccacccugugccugggccaccacgccgugcccaacggcaccaucgugaagaccaucaccaacgaccagaucgaggugaccaacgccaccgagcuggugcagagcagcagcaccggcggcaucugcgacagcccccaccagauccuggacggcgagaacugcacccugaucgacgcccugcugggcgacccccagugcgacggcuuccagaacaagaagugggaccuguucguggagagaagcaaggccuacagcaacugcuaccccuacgacgugcccgacuacgccagccugagaagccugguggccagcagcggcacccuggaguucaacaacgagggcuucaacuggaccggcgugacccagaacggcaccagcagcgccugcaagagaaagagcaacaagagcuucuucagcagacugaacuggcugacccaccugaaguacaaguaccccgcccugaacgugaccaugcccaacaacgagaaguucgacaagcuguacaucuggggcgugcaccaccccggcaccgacaacgaccagaucagccuguacgcccaggccagcggcagaaucaccgugagcaccaagagaagccagcagaccgugauccccaacaucggcagcagacccagagugagagacgugagcagcagaaucagcaucuacuggaccaucgugaagcccggcgacauccugcugaucaacagcaccggcaaccugaucgcccccagaggcuacuucaagaucagaagcggcaagagcagcaucaugagaagcgacgcccccaucggcaagugcaacagcgagugcaucacccccaacggcagcauccccaacgacaagcccuuccagaacgugaacagaaucaccuacggcgccugccccagauacgugaagcagaacacccugaagcuggccaccggcaugagaaacgugcccgagaagcagaccagaggcaucuucggcgccaucgccggcuucaucgagaacggcugggagggcaugguggacggcugguacggcuucagacaccagaacagcgagggcaccggccaggccgccgaccugaagagcacccaggccgccaucaaccagaucaacggcaagcugaacagacugaucggcaagaccaacgagaaguuccaccagaucgagaaggaguucagcgagguggagggcagaauccaggaccuggagaaguacguggaggacaccaagaucgaccuguggagcuacaacgccgagcugcugguggcccuggagaaccagcacaccaucgaccugaccgacagcgagaugaacaagcuguucgagagaaccaagaagcagcugagagagaacgccgaggacaugggcaacggcugcuucaagaucuaccacaagugcgacaacgccugcaucggcagcaucagaaacggcaccuacgaccacgacguguacagagacgaggcccugaacaacagauuccagaucaagggcguggagcugaagagcggcuacaaggacuggauccuguggaucagcuucgccaucagcugcuuccugcugugcguggcccugcugggcuucaucaugugggccugccagaagggcaacaucagaugcaacaucugcaucuga

SEQ ID NO: 160178 - RNA, 1701 nt, Artificial Sequence
  derived and/or modified CDS sequence (opt4) from hemagglutinin__InfluenzaA__AAY18136
augaagaccaucaucgcccugagcuacauccugugccugguguucgcccagaagcugcccggcaacgacaacagcaccgccacccugugccugggccaccacgccgugcccaacggcaccaucgugaagaccaucaccaacgaccagaucgaggugaccaacgccaccgagcuggugcagagcagcagcaccggcggcaucugcgacagcccccaccagauccuggacggcgagaacugcacccugaucgacgcccugcugggcgacccccagugcgacggcuuccagaacaagaagugggaccuguucguggagagaagcaaggccuacagcaacugcuaccccuacgacgugcccgacuacgccagccugagaagccugguggccagcagcggcacccuggaguucaacaacgagagcuucgacuggaccggcgugacccagaacggcaccagcagcgccugcaagagaagaagcaacaagagcuucuucagcagacugaacuggcugacccaccugaaguacaaguaccccgcccugaacgugaccaugcccaacaacgagaaguucgacaagcuguacaucuggggcgugcaccaccccggcaccgacagcgaccagaucagccuguacgcccaggccagcggcagaaucaccgugagcaccaagagaagccagcagaccgugauccccaacaucggcagcagacccagagugagagacgugagcagcagaaucagcaucuacuggaccaucgugaagcccggcgacauccugcugaucaacagcaccggcaaccugaucgcccccagaggcuacuucaagaucagaagcggcaagagcagcaucaugagaagcgacgcccccaucggcaagugcaacagcgagugcaucacccccaacggcagcauccccaacgacaagcccuuccagaacgugaacagaaucaccuacggcgccugccccagauacaucaagcagaacacccugaagcuggccaccggcaugagaaacgugcccgagaagcagaccagaggcaucuucggcgccaucgccggcuucaucgagaacggcugggagggcaugguggacggcugguacggcuucagacaccagaacagcgagggcaccggccaggccgccgaccugaagagcacccaggccgccaucaaccagaucaacggcaagcugaacagacugaucggcaagaccaacgagaaguuccaccagaucgagaaggaguucagcgagguggagggcagaauccaggaccuggagaaguacguggaggacaccaagaucgaccuguggagcuacaacgccgagcugcugguggcccuggagaaccagcacaccaucgaccugaccgacagcgagaugaacaagcuguucgagagaaccaagaagcagcugagagagaacgccgaggacaugggcaacggcugcuucaagaucuaccacaagugcgacaacgccugcaucggcagcaucagaaacggcaccuacgaccacgacguguacagagacgaggcccugaacaacagauuccagaucaagggcguggagcugaagagcggcuacaaggacuggauccuguggaucagcuucgccaucagcugcuuccugcugugcguggcccugcugggcuucaucaugugggccugccagaagggcaacaucagaugcaacaucugcaucuga

SEQ ID NO: 160179 - RNA, 1701 nt, Artificial Sequence; identical to SEQ ID NO: 160132
  derived and/or modified CDS sequence (opt4) from hemagglutinin__InfluenzaA__AAY18156

SEQ ID NO: 160180 - RNA, 1701 nt, Artificial Sequence; identical to SEQ ID NO: 160132
  derived and/or modified CDS sequence (opt4) from hemagglutinin__InfluenzaA__AAY18176

SEQ ID NO: 160181 - RNA, 1701 nt, Artificial Sequence; identical to SEQ ID NO: 160132
  derived and/or modified CDS sequence (opt4) from hemagglutinin__InfluenzaA__AAY18186

SEQ ID NO: 160182 - RNA, 1701 nt, Artificial Sequence; identical to SEQ ID NO: 160133
  derived and/or modified CDS sequence (opt4) from hemagglutinin__InfluenzaA__AAY18564

SEQ ID NO: 160183 - RNA, 1701 nt, Artificial Sequence
  derived and/or modified CDS sequence (opt4) from hemagglutinin__InfluenzaA__AAY18585
augaagaccaucaucgcccugagcuacauccugugccugguguucgcccagaagcugcccgagaacgacaacagcaccgccacccugugccugggccaccacgccgugcccaacggcacccuggugaagaccaucaccaacgaccagaucgaggugaccaacgccaccgagcuggugcagagcagcagcaccggcagaaucugcgacagcccccaccagauccuggacggcgagaacugcacccugaucgacgcccugcugggcgacccccacugcgacggcuuccagaacaaggagugggaccuguucguggagagaagcaaggccuacagcaacugcuaccccuacgacgugcccgacuacgugagccugagaagccugguggccagcagcggcacccuggaguucaacaacgagagcuucaacuggaccggcguggcccagaacggcaccagcagcgccugcaagagaagaagcgacaagagcuucuucagcagacugaacuggcugcaccagcugaaguacaaguaccccgcccugaacgugaccaugcccaacaacgagaaguucgacaagcuguacaucuggggcgugcaccaccccggcaccgacagcgaccagaucagccuguacgcccaggccagcggcagagugaccgugagcaccaagagaagccagcagaccgugauccccaacaucggcagcagacccugggugagaggcgugagcagcagaaucagcaucuacuggaccaucgugaagcccggcgacauccugcugaucaacagcaccggcaaccugaucgcccccagaggcuacuucaagaucagaagcggcaagagcagcaucaugagaagcgacgcccccaucggcaagugcaacagcgagugcaucacccccaacggcagcauccccaacgacaagcccuuccagaacgugaacagaaucaccuacggccccugccccagauacgugaagcagaacacccugaagcuggccaccggcaugagaaacgugcccgagaagcagaccagaggcaucuucggcgccaucgccggcuucaucgagaacggcugggagggcaugauggacggcugguacggcuucagacaccagaacagcgagggcaccggccaggccgccgaccugaagagcacccaggccgccaucaaccagaucaacggcaagcugaacagacugaucgagaagaccaacgagaaguuccaccagaucgagaaggaguucagcgagguggagggcagaauccaggaccuggagaaguacguggaggacaccaagaucgaccuguggagcuacaacgccgagcugcugguggcccuggagaaccagcacaccaucgaccugaccgacagcgagaugaacaagcuguucgagagaaccaagaagcagcugagagagaacgccgaggacaugggcaacggcugcuucaagaucuaccacaagugcgacaacgccugcaucggcagcaucagaaacggcaccuacgaccacgacguguacagagacgaggcccugaacaacagauuccagaucaagggcguggagcugaagagcggcuacaaggacuggauccuguggaucagcuucgccaucagcugcuuccugcugugcaucgugcugcugggcuucaucaugugggccugccagaagggcaacaucagaugcaacaucugcaucuga

SEQ ID NO: 160184 - RNA, 1701 nt, Artificial Sequence; identical to SEQ ID NO: 160092
  derived and/or modified CDS sequence (opt4) from hemagglutinin__InfluenzaA__AAY18611

SEQ ID NO: 160185 - RNA, 1701 nt, Artificial Sequence; identical to SEQ ID NO: 160133
  derived and/or modified CDS sequence (opt4) from hemagglutinin__InfluenzaA__AAY27843

SEQ ID NO: 160186 - RNA, 1701 nt, Artificial Sequence; identical to SEQ ID NO: 160092
  derived and/or modified CDS sequence (opt4) from hemagglutinin__InfluenzaA__AAY27853

SEQ ID NO: 160187 - RNA, 1701 nt, Artificial Sequence
  derived and/or modified CDS sequence (opt4) from hemagglutinin__InfluenzaA__AAY27863
augaagaccaucaucgcccugagcuacauccugugccugguguucgcccagaagcugcccggcaacgacaacagcaccgccacccugugccugggccaccacgccgugcccaacggcaccaucgugaagaccaucaccaacgaccagaucgaggugaccaacgccaccgagcuggugcagagcagcagcaccggcggcaucugcgacagcccccaccagaucaucgacggcgagaacugcacccugaucgacgcccugcugggcgacccccagugcgacggcuuccagaacaagaagugggaccuguucguggagagaagcaaggccuacagcaacugcuaccccuacgacgugcccgacuacgccagccugagaagccugguggccagcagcggcacccuggaguucaacaacgagagcuucgacuggaccggcgugacccagaacggcaccagcagcgccugcaagagaagaagcaacaagagcuucuucagcagacugaacuggcugacccaccugaaguacaaguaccccgcccugaacgugaccaugcccaacaacgagaaguucgacaagcuguacaucuggggcgugcaccaccccggcaccgacagcgaccagaucagccuguacgcccaggccagcggcagaaucaccgugagcaccaagagaagccagcagaccgugauccccaacaucggcagcagacccagagugagagacgugagcagcagaaucagcaucuacuggaccaucgugaagcccggcgacauccugcugaucaacagcaccggcaaccugaucgcccccagaggcuacuucaagaucagaagcggcaagagcagcaucaugaucagcgacgcccccaucggcaagugcaacagcgagugcaucacccccaacggcagcauccccaacgacaagcccuuccagaacgugaacagaaucaccuacggcgccugccccagauacgugaagcagaacacccugaagcuggccaccggcaugagaaacgugcccgagaagcagaccagaggcaucuucggcgccaucgccggcuucaucgagaacggcugggagggcaugguggacggcugguacggcuucagacaccagaacagcgagggcaccggccaggccgccgaccugaagagcacccaggccgccaucaaccagaucaacggcaagcugaacagacugaucggcaagaccaacgagaaguuccaccagaucgagaaggaguucagcgagguggagggcagaauccaggaccuggagaaguacguggaggacaccaagaucgaccuguggagcuacaacgccgagcugcugguggcccuggagaaccagcacaccaucgaccugaccgacagcgagaugaacaagcuguucgagagaaccaagaagcagcugagagagaacgccgaggacaugggcaacggcugcuucaagaucuaccacaagugcgacaacgccugcaucggcagcaucagaaacggcaccuacgaccacgacguguacagagacgaggcccugaacaacagauuccagaucaagggcguggagcugaagagcggcuacaaggacuggauccuguggaucagcuucgccaucagcugcuuccugcugugcguggcccugcugggcuucaucaugugggccugccagaagggcaacaucagaugcaacaucugcaucuga

SEQ ID NO: 160188 - RNA, 1701 nt, Artificial Sequence; identical to SEQ ID NO: 160111
  derived and/or modified CDS sequence (opt4) from hemagglutinin__InfluenzaA__AAY27959

SEQ ID NO: 160189 - RNA, 1701 nt, Artificial Sequence; identical to SEQ ID NO: 160091
  derived and/or modified CDS sequence (opt4) from hemagglutinin__InfluenzaA__AAY27994

SEQ ID NO: 160190 - RNA, 1701 nt, Artificial Sequence; identical to SEQ ID NO: 160091
  derived and/or modified CDS sequence (opt4) from hemagglutinin__InfluenzaA__AAY28004

SEQ ID NO: 160191 - RNA, 1701 nt, Artificial Sequence; identical to SEQ ID NO: 160091
  derived and/or modified CDS sequence (opt4) from hemagglutinin__InfluenzaA__AAY28265

SEQ ID NO: 160192 - RNA, 1701 nt, Artificial Sequence
  derived and/or modified CDS sequence (opt4) from hemagglutinin__InfluenzaA__AAY28275
augaagaccaucaucgcccugagcuacauccugugccugguguucgcccagaagcugcccggcaacgacaacagcaccgccacccugugccugggccaccacgccgugcccaacggcacccuggugaagaccaucaccaacgaccagaucgaggugaccaacgccaccgagcuggugcagagcagcagcaccggcagaaucugcgacagcccccaccagauccuggacggcgagaacugcacccugaucgacgcccugcugggcgacccccacugcgacggcuuccagaacaaggagugggaccuguucguggagagaagcaaggccuacagcaacugcuaccccuacgacgugcccgacuacgccagccugagaagccugguggccagcagcggcacccuggaguucaacaacgagagcuucaacuggaccggcguggcccagaacggcaccagcagcgccugcaagagaagaagcaacaagagcuucuucagcagacugaacuggcugcaccagcugaaguacaaguaccccgcccugaacgugaccaugcccaacaacgagaaguucgacaagcuguacaucuggggcgugcaccaccccagcaccgacagcgaccagaucagccuguacgcccaggccagcggcagagugaccgugagcaccaagagaagccagcagaccgugauccccaacaucggcagcagacccugggugagaggcgugagcagcagaaucagcaucuacuggaccaucgugaagcccggcgacauccugcugaucaacagcaccggcaaccugaucgcccccagaggcuacuucaagaucagaagcggcaagagcagcgugaugagaagcgacgccagcaucggcaagugcaacagcgagugcaucacccccaacggcagcauccccaacgacaagcccuuccagaacgugaacagaaucaccuacggcgccugccccagauacgugaagcagaacacccugaagcuggccaccggcaugagaaacgugcccgagaagcagaccagaggcaucuucggcgccaucgccggcuucaucgagaacggcugggagggcaugguggacggcugguacggcuucagacaccagaacagcgagggcaccggccaggccgccgaccugaagagcacccaggccgccaucaaccagaucaacggcaagcugaacagacugaucgagaagaccaacgagaaguuccaccagaucgagaaggaguucagcgagguggagggcagaauccaggaccuggagaaguacguggaggacaccaagaucgaccuguggagcuacaacgccgagcugcugguggcccuggagaaccagcacaccaucgaccugaccgacagcgagaugaacaagcuguucgagagaaccaagaagcagcugagagagaacgccgaggacaugggcaacggcugcuucaagaucuaccacaagugcgacaacgccugcaucggcagcaucagaaacggcaccuacgaccacgacguguacagagacgaggcccugaacaacagauuccagaucaagggcguggagcugaagagcggcuacaaggacuggauccuguggaucagcuucgccaucagcugcuuccugcugugcguggugcugcugggcuucaucaugugggccugccagaagggcaacaucagaugcaacaucugcaucuga

SEQ ID NO: 160193 - RNA, 1701 nt, Artificial Sequence
  derived and/or modified CDS sequence (opt4) from hemagglutinin__InfluenzaA__AAY28285
augaagaccaucaucgcccugagcuacauccugugccugguguucgcccagaagcugcccggcaacgacaacagcaccgccacccugugccugggccaccacgccgugcccaacggcacccuggugaagaccaucaccaacgaccagaucgaggugaccaacgccaccgagcuggugcagaacagcagcaccggcagaaucugcgacagcccccaccagauccuggacggcgagaacugcacccugaucgacgcccugcugggcgacccccacugcgacggcuuccagaacaaggagugggaccuguucguggagagaagcaaggccuacagcaacugcuaccccuacgacgugcccgacuacgugagccugagaagccugguggccagcagcggcacccuggaguucaacaacgagagcuucaacuggaccggcguggcccagaacggcaccagcagcgccugcaagagaagaagcgacaagagcuucuucagcagacugaacuggcugcaccagcugaaguacaaguaccccgcccugaacgugaccaugcccaacaacgagaaguucgacaagcuguacaucuggggcgugcaccaccccggcaccgacaacgaccagaucagccuguacgcccaggccagcggcagagugaccgugagcaccaagagaagccagcagaccgugauccccaacaucggcagcagacccugggugagaggcgugagcagcagaaucagcaucuacuggaccaucgugaagcccggcgacauccugcugaucaacagcaccggcaaccugaucgcccccagaggcuacuucaagaucagaagcggcaagagcagcaucaugagaagcgacgcccccaucggcaagugcaacagcgagugcaucacccccaacggcagcauccccaacgacaagcccuuccagaacgugaacagaaucaccuacggccccugccccagauacgugaagcagaacacccugaagcuggccaccggcaugagaaacgugcccgagaagcagaccagaggcaucuucggcgccaucgccggcuucaucgagaacggcugggagggcaugauggacggcugguacggcuucagacaccagaacagcgagggcaccggccaggccgccgaccugaagagcacccaggccgccaucaaccagaucaacggcaagcugaacagacugaucgagaagaccaacgagaaguuccaccagaucgagaaggaguucagcgagguggagggcagaauccaggaccuggagaaguacguggaggacaccaagaucgaccuguggagcuacaacgccgagcugcugguggcccuggagaaccagcacaccaucgaccugaccgacagcgagaugaacaagcuguucgagagaaccaagaagcagcugagagagaacgccgaggacaugggcaacggcugcuucaagaucuaccacaagugcgacaacgccugcaucggcagcaucagaaacggcaccuacgaccacgacguguacagagacgaggcccugaacaacagauuccagaucaagggcguggagcugaagagcggcuacaaggacuggauccuguggaucagcuucgccaucagcugcuuccugcugugcaucgugcugcugggcuucaucaugugggccugccagaagggcaacaucagaugcaacaucugcaucuga

SEQ ID NO: 160194 - RNA, 1701 nt, Artificial Sequence
  derived and/or modified CDS sequence (opt4) from hemagglutinin__InfluenzaA__AAY28295
augaagaccaucaucgcccugagcuacauccugugccugguguucgcccagaagcugcccggcaacgacaacagcaccgccacccugugccugggccaccacgccgugcccaacggcaccaucgugaagaccaucaccaacgaccagaucgaggugaccaacgccaccgagcuggugcagagcagcagcaccggcggcaucugcgacagcccccaccagauccuggacggcgagaacugcacccugaucgacgcccugcugggcgacccccagugcgacggcuuccagaacaagaagugggaccuguucguggagagaagcaaggccuacagcaacugcuaccccuacgacgugcccgacuacgccagccugagaagccugguggccagcagcggcacccuggaguucaacaacgagagcuucgacuggaccggcgugacccagaacggcaccagcagcgccugcaagagaagaagcaacaagagcuucuucagcagacugaacuggcugacccaccugaaguacaaguaccccgcccugaacgugaccaugcccaacaacgagaaguucgacaagcuguacaucuggggcgugcaccaccccggcaccgacagcgaccagaucagccuguacgcccaggccagcggcaagaucaccgugagcaccaagagaagccagcagaccgugauccccaacaucggcagcagacccagagugagagacgugagcagcagaaucagcaucuacuggaccaucgugaagcccggcgacauccugcugaucaacagcaccggcaaccugaucgcccccagaggcuacuucaagauccagagcggcaagagcagcaucaugagaagcgacgcccccaucggcaagugcaacagcgagugcaucacccccaacggcagcauccccaacgacaagcccuuccagaacgugaacagaaucaccuacggcgccugccccagauacgugaagcagaagacccugaagcuggccaccggcaugagaaacgugcccgagaagcagaccagaggcaucuucggcgccaucgccggcuucaucgagaacggcugggagggcaugguggacggcugguacggcuucagacaccagaacagcgagggcaccggccaggccgccgaccugaagagcacccaggccgccaucaaccagaucaacggcaagcugaacagacugaucggcaagaccaacgagaaguuccaccagaucgagaaggaguucagcgagguggagggcagaauccaggaccuggagaaguacguggaggacaccaagaucgaccuguggagcuacaacgccgagcugcugguggcccuggagaaccagcacaccaucgaccugaccgacagcgagaugaacaagcuguucgagagaaccaagaagcagcugagagagaacgccgaggacaugggcaacggcugcuucaagaucuaccacaagugcgacaacgccugcaucggcagcaucagaaacggcaccuacgaccacgacguguacagagacgaggcccugaacaacagauuccagaucaagggcguggagcugaagagcggcuacaaggacuggauccuguggaucagcuucgccaucagcugcuuccugcugugcguggcccugcugggcuucaucaugugggccugccagaagggcaacaucagaugcaacaucugcaucuga

SEQ ID NO: 160195 - RNA, 1701 nt, Artificial Sequence
  derived and/or modified CDS sequence (opt4) from hemagglutinin__InfluenzaA__AAY28305
augaaggccaucaucgcccugagcuacauccugugccugguguucgcccagaagcugcccggcaacgacaacagcaccgccacccugugccugggccaccacgccgugcccaacggcacccuggugaagaccaucaccaacgaccagaucgaggugaccaacgccaccgagcuggugcagagcagcagcaccggcagaaucugcgacagcccccaccagauccuggacggcgagaacugcacccugaucgacgcccugcugggcgacccccacugcgacggcuuccagaacaaggagugggaccuguucguggagagaagcaaggccuacagcaacugcuaccccuacgacgugcccgacuacgugagccugagaagccugguggccagcagcggcacccuggaguucaacaacgagagcuucaacuggaccggcguggcccagaacggcaccagcagcgccugcaagagaagaagcgacaagagcuucuucagcagacugaacuggcugcaccagcugaaguacaaguaccccgcccugaacgugaccaugcccaacaacgagaaguucgacaagcuguacaucuggggcgugcaccaccccggcaccgacagcgaccagaucagccuguacgcccaggccagcggcagagugaccgugagcaccaagagaagccagcagaccgugauccccaacaucggcagcggccccugggugagaggcgugagcagcagaaucagcaucuacuggaccaucgugaagcccggcgacauccugcugaucaacagcaccggcaaccugaucgcccccagaggcuacuucaagaucagaagcggcaagagcagcaucaugagaagcgacgcccccaucggcaagugcaacagcgagugcaucacccccaacggcagcauccccaacgacaagcccuuccagaacgugaacagaaucaccuacggcgccugccccagauacgugaagcagaacacccugaagcuggccaccggcaugagaaacgugcccgagaagcagaccagaggcaucuucggcgccaucgccggcuucaucgagaacggcugggagggcaugauggacggcugguacggcuucagacaccagaacagcgagggcaccggccaggccgccgaccugaagagcacccaggccgccaucaaccagaucaacggcaagcugaacagacugaucgagaagaccaacgagaaguuccaccagaucgagaaggaguucagcgagguggagggcagaauccaggaccuggagaaguacguggaggacaccaagaucgaccuguggagcuacaacgccgagcugcugguggcccuggagaaccagcacaccaucgaccugaccgacagcgagaugaacaagcuguucgagagaaccaagaagcagcugagagagaacgccgaggacaugggcaacggcugcuucaagaucuaccacaagugcgacaacgccugcaucggcagcaucagaaacggcaccuacgaccacgacguguacagagacgaggcccugaacaacagauuccagaucaagggcguggagcugaagagcggcuacaaggacuggauccuguggaucagcuucgccaucagcugcuuccugcugugcaucgugcugcugggcuucaucaugugggccugccagaagggcaacaucagaugcaacaucugcaucuga

SEQ ID NO: 160196 - RNA, 1701 nt, Artificial Sequence
  derived and/or modified CDS sequence (opt4) from hemagglutinin__InfluenzaA__AAY28325
augaagaccaucaucgcccugagcuacauccugugccugguguucgcccagaagcugcccggcaacgacaacagcaccgccacccugugccugggccaccacgccgugcccaacggcacccuggugaagaccaucaccaacgaccagaucgaggugaccaacgccaccgagcuggugcagagcagcagcaccagcagaaucugcgacagcccccaccagauccuggacggcgagaacugcacccugaucgacgcccugcugggcgacccccacugcgacggcuuccagaacaaggagugggaccuguucguggagagaagcaaggccuacagcaacugcuaccccuacgacgugcccgacuacgugagccugagaagccugguggccagcagcggcacccuggaguucaacaacgagagcuucaacuggaccggcguggcccagaacggcaccagcagcgccugcaagagaagaagcgacaagagcuucuucagcagacugaacuggcugcaccagcugaaguacaaguaccccgcccugaacgugaccaugcccaacaacgagaaguucgacaagcuguacaucuggggcgugcaccaccccggcaccgacagcgaccagaucagccuguacgcccaggccagcggcagagugaucgugagcaccaagagaagccagcagaccgugauccccaacaucggcagcggccccugggugagaggcgugagcagcagaaucagcaucuacuggaccaucgugaagcccggcgacauccugcugaucaacagcaccggcaaccugaucgcccccagaggcuacuucaagaucagaagcggcaagagcagcaucaugagaagcgacgcccccaucggcaagugcaacagcgagugcaucacccccaacggcagcauccccaacgacaagcccuuccagaacgugaacagaaucaccuacggcgccugccccagauacgugaagcagaacacccugaagcuggccaccggcaugagaaacgugcccgagaagcagaccagaggcaucuucggcgccaucgccggcuucaucgagaacggcugggagggcaugauggacggcugguacggcuucagacaccagaacagcgagggcaccggccaggccgccgaccugaagagcacccaggccgccaucaaccagaucaacggcaagcugaacagacugaucgagaagaccaacgagaaguuccaccagaucgagaaggaguucgccgagguggagggcagaauccaggaccuggagaaguacguggaggacaccaagaucgaccuguggagcuacaacgccgagcugcugguggcccuggagaaccagcacaccaucgaccugaccgacagcgagaugaacaagcuguucgagagaaccaagaagcagcugagagagaacgccgaggacaugggcaacggcugcuucaagaucuaccacaagugcgacaacgccugcaucggcagcaucagaaacggcaccuacgaccacgacguguacagagacgaggcccugaacaacagauuccagaucaagggcguggagcugaagagcggcuacaaggacuggauccuguggaucagcuucgccaucagcugcuuccugcugugcaucgugcugcugggcuucaucaugugggccugccagaagggcaacaucagaugcaacaucugcaucuga

SEQ ID NO: 160197 - RNA, 1701 nt, Artificial Sequence
  derived and/or modified CDS sequence (opt4) from hemagglutinin__InfluenzaA__AAY28335
augaagaccaucaucgcccugagcuacauccugugccuggugagcgcccagaagcugcccggcaacgacaacagcaccgccacccugugccugggccaccacgccgugcccaacggcacccuggugaagaccaucaccaacgaccagaucgaggugaccaacgccaccgagcuggugcagagcagcagcaccagcagaaucugcgacagcccccaccagauccuggacggcgagaacugcacccugaucgacgcccugcugggcgacccccacugcgacggcuuccagaacaaggagugggaccuguucguggagagaagcaaggccuacagcaacugcuaccccuacgacgugcccgacuacgugagccugagaagccugguggccagcagcggcacccuggaguucaacaacgagagcuucaacuggaccggcguggcccagaacggcaccagcagcgccugcaagagaagaagcgacaagagcuucuucagcagacugaacuggcugcaccagcugaaguacaaguaccccgcccugaacgugaccaugcccaacaacgagaaguucgacaagcuguacaucuggggcgugcaccaccccggcaccgacagcgaccagaucagccuguacgcccaggccagcggcagagugaccgugagcaccaagagaagccagcagaccgugauccccaacaucggcagcagacccugggugagaggcgugagcagcagaaucagcaucuacuggaccaucgugaagcccggcgacauccugcugaucaacagcaccggcaaccugaucgcccccagaggcuacuucaagaucagaagcggcaagagcagcaucaugagaagcgacgcccccaucggcaagugcaacagcgagugcaucacccccaacggcagcauccccaacgacaagcccuuccagaacgugaacagaaucaccuacggcgccugccccagauacgugaagcagaacacccugaagcuggccaccggcaugagaaacgugcccgagaagcagaccagaggcaucuucggcgccaucgccggcuucaucgagaacggcugggagggcaugauggacggcugguacggcuucagacaccagaacagcgagggcaccggccaggccgccgaccugaagagcacccaggccgccaucaaccagaucaacggcaagcugaacagacugaucgagaagaccaacgagaaguuccaccagaucgagaaggaguucagcgagguggagggcagaauccaggaccuggagaaguacguggaggacaccaagguggaccuguggagcuacaacgccgagcugcugguggcccuggagaaccagcacaccaucgaccugaccgacagcgagaugaacaagcuguucgagagaaccaagaagcagcugagagagaacgccgaggacaugggcaacggcugcuucaagaucuaccacaagugcgacaacgccugcaucggcagcaucagaaacggcaccuacgaccacgacguguacagagacgaggcccugaacaacagauuccagaucaagggcguggagcugaagagcggcuacaaggacuggauccuguggaucagcuucgccaucagcugcuuccugcugugcaucgugcugcugggcuucaucaugugggccugccagaagggcaacaucagaugcaacaucugcaucuga

SEQ ID NO: 160198 - RNA, 1701 nt, Artificial Sequence; identical to SEQ ID NO: 160092
  derived and/or modified CDS sequence (opt4) from hemagglutinin__InfluenzaA__AAY28345

SEQ ID NO: 160199 - RNA, 1701 nt, Artificial Sequence; identical to SEQ ID NO: 160132
  derived and/or modified CDS sequence (opt4) from hemagglutinin__InfluenzaA__AAY28355

SEQ ID NO: 160200 - RNA, 1701 nt, Artificial Sequence
  derived and/or modified CDS sequence (opt4) from hemagglutinin__InfluenzaA__AAY28363
augaagaccaucaucgcccugagcuacauccugugcaugguguucgcccagaagcugcccgugaacgacaacagcaccgccacccugugccugggccaccacgccgugcccaacggcacccuggugaagaccaucaccaacgaccacaucgaggugaccaacgccaccgagcuggugcagagcagcagcaccggcagaaucugcgacagcccccaccagauccuggacggcgagaacugcacccugaucgacgcccugcugggcgacccccacugcgacggcuuccagaacaaggagugggaccuguucguggagagaagcaccgccuacagcaacugcuaccccuacgacgugcccgacuacgccagccugagaagccugguggccagcagcggcacccuggaguucaacaacgagagcuucaacuggaccggcguggcccagaacggcaccagcagcgccugcaagagaagaagcaucaagagcuucuucagcagacugaacuggcugcaccagcugaaguacaaguaccccagccugaacgugaccaugcccaacaacgagaaguucgacaagcuguacaucuggggcgugcaccaccccagcaccgacagcgaccagaucagccuguacgcccaggccagcggcagagugaccgugagcaccaagagaagccagcagaccgugauccccaacaucggcagcagacccugggugagaggcgugagcagcagaaucagcaucuacuggaccaucgugaagcccggcgacauccugcugaucaacagcaccggcaaccugaucgcccccagaggcuacuucaagaucagaagcggcaagagcagcaucaugagaagcaacgcccccaucggcaagugcaacagcgagugcaucacccccaacggcagcauccccaacgacaagcccuuccagaacgugaacagaaucaccuacggcgccugccccagauacgugaagcagaacacccugaagcuggccaccggcaugagaaacgugcccgagaagcagaccagaggcaucuucggcgccaucgccggcuucaucgagaacggcugggagggcaugguggacggcugguacggcuucagacaccagaacagcgagggcaccggccaggccgccgaccugaagagcacccaggccgccaucaaccagaucaacggcaagcugaacagacugaucgagaagaccaacgagaaguuccaccagaucgagaaggaguucagcgagguggagggcagaauccaggaccuggagaaguacguggaggacaccaagaucgaccuguggagcuacaacgccgagcugcugguggcccuggagaaccagcacaccaucgaccugaccgacagcgagaugaacaagcuguucgagagaaccagaaagcagcugagagagaacgccgaggacaugggcaacggcugcuucaagaucuaccacaagugcgacaacgccugcaucggcagcaucagaaacggcaccuacgaccacgacguguacagagacgaggcccugaacaacagauuccagaucaagggcguggagcugaagagcggcuacaaggacuggauccuguggaucagcuucgccaucagcugcuuccugcugugcguggugcugcugggcuucaucaugugggccugccagaagggcaacaucagaugcaacaucugcaucuga

SEQ ID NO: 160201 - RNA, 1701 nt, Artificial Sequence; identical to SEQ ID NO: 160132
  derived and/or modified CDS sequence (opt4) from hemagglutinin__InfluenzaA__AAY28375

SEQ ID NO: 160202 - RNA, 1701 nt, Artificial Sequence; identical to SEQ ID NO: 160092
  derived and/or modified CDS sequence (opt4) from hemagglutinin__InfluenzaA__AAY28385

SEQ ID NO: 160203 - RNA, 1701 nt, Artificial Sequence
  derived and/or modified CDS sequence (opt4) from hemagglutinin__InfluenzaA__AAY28395
augaagaccaucaucgcccugagcuacauccugugccugguguucgcccagaagcugcccggcaacgacaacagcaccgccacccugugccugggccaccacgccgugcccaacggcaccaucgugaagaccaucaccaacgaccagaucgaggugaccaacgccaccgagcuggugcagagcagcagcaccggcggcaucugcgacagcccccaccagauccuggacggcgagaacugcacccugaucgacgcccugcugggcgacccccagugcgacggcuuccagaacaagaagugggaccuguucguggagagaagcaaggccuacagcaacugcuaccccuacgacgugcccgacuacgccagccugagaagccugguggccagcagcggcacccuggaguucaacaacgagagcuucgacuggaccggcgugacccagaacggcaccagcagcgccugcaagagaagaagcaacaagagcuucuucagcagacugaacuggcugacccaccugaaguacaaguaccccgcccugaacgugaccaugcccaacaacgagaaguucgacaagcuguacaucuggggcgugcaccaccccggcaccgacagcgaccagaucaaccuguacgcccaggccagcggcagaaucaccgugagcaccaagagaagccagcagaccgugauccccaacaucggcagcagacccagagugagagacgugagcagcagaaucagcaucuacuggaccaucgugaagcccggcgacauccugcugaucaacagcaccggcaaccugaucgcccccagaggcuacuucaagaucagaagcggcaagagcagcaucaugagaagcgacgcccccaucggcaagugcaacagcgagugcaucacccccaacggcagcauccccaacgacaagcccuuccagaacgugaacagaaucaccuacggcgccugccccagauacaucaagcagaacacccugaagcuggccaccggcaugagaaacgugcccgagaagcagaccagaggcaucuucggcgccaucgccggcuucaucgagaacggcugggagggcaugguggacggcugguacggcuucagacaccagaacagcgagggcaccggccaggccgccgaccugaagagcacccaggccgccaucaaccagaucaacggcaagcugaacagacugaucggcaagaccaacgagaaguuccaccagaucgagaaggaguucagcgagguggagggcagaauccaggaccuggagaaguacguggaggacaccaagaucgaccuguggagcuacaacgccgagcugcugguggcccuggagaaccagcacaccaucgaccugaccgacagcgagaugaacaagcuguucgagagaaccaagaagcagcugagagagaacgccgaggacaugggcaacggcugcuucaagaucuaccacaagugcgacaacgccugcaucggcagcaucagaaacggcaccuacgaccacgacguguacagagacgaggcccugaacaacagauuccagaucaagggcguggagcugaagagcggcuacaaggacuggauccuguggaucagcuucgccaucagcugcuuccugcugugcguggcccugcugggcuucaucaugugggccugccagaagggcaacaucagaugcaacaucugcaucuga

SEQ ID NO: 160204 - RNA, 1701 nt, Artificial Sequence
  derived and/or modified CDS sequence (opt4) from hemagglutinin__InfluenzaA__AAY28405
augaagaccaucaucgcccugagcuacauccugugccugguguucgcccagaagcugcccggcaacgacaacagcaccgccacccugugccugggccaccacgccgugcccaacggcacccuggugaagaccaucaccaacgaccagaucgaggugaccaacgccaccgagcuggugcagaucagcagcaccggcagaaucugcgacaacccccaccagauccuggacggcgagaacugcacccugaucgacgcccugcugggcgacccccacugcgacggcuuccagaacaaggagugggaccuguucguggagagaagcaaggccuacagcaacugcuaccccuacgacgugcccgacuacgugagccugagaagccugguggccagcagcggcacccuggaguucaacaacgagagcuucaacuggaccggcguggcccagaacggcaccagcagcgccugcaagagaagaagcgacaagagcuucuucagcagacugaacuggcugcaccagcugaaguacaaguaccccgcccugaacgugaccaugcccaacaacgagaaguucgacaagcuguacaucuggggcgugcaccaccccggcaccgacagcgaccagaucagccuguacgcccaggccagcggcagagugaccgugagcaccaagagaagccagcagaccgugauccccaacaucggcagcagacccugggugagaggcgugagcagcagaaucagcaucuacuggaccaucgugaagcccggcgacauccugcugaucaacagcaccggcaaccugaucgcccccagaggcuacuucaagaucagaagcggcaagagcagcaucaugagaagcgacgcccccaucggcaagugcaacagcgagugcaucacccccaacggcagcauccccaacgacaagcccuuccagaacgugaacagaaucaccuacggccccugccccagauacgugaagcagaacacccugaagcuggccaccggcaugagaaacgugcccgagaagcagaccagaggcaucuucggcgccaucgccggcuucaucgagaacggcugggagggcaugauggacggcugguacggcuucagacaccagaacagcgagggcaccggccaggccgccgaccugaagagcacccaggccgccaucaaccagaucaacggcaagcugaacagacugaucgagaagaccaacgagaaguuccaccagaucgagaaggaguucagcgagguggagggcagaauccaggaccuggagaaguacguggaggacaccaagaucgaccuguggagcuacaacgccgagcugcugguggcccuggagaaccagcacaccaucgaccugaccgacagcgagaugaacaagcuguucgagagaaccaagaagcagcugagagagaacgccgaggacaugggcaacggcugcuucaagaucuaccacaagugcgacaacgccugcaucggcagcaucagaaacggcaccuacgaccacgacguguacagagacgaggcccugaacaacagauuccagaucaagggcguggagcugaagagcggcuacaaggacuggauccuguggaucagcuucgccaucagcugcuuccugcugugcaucgugcugcugggcuucaucaugugggccugccagaagggcaacaucagaugcaacaucugcguguga

SEQ ID NO: 160205 - RNA, 1701 nt, Artificial Sequence; identical to SEQ ID NO: 160092
  derived and/or modified CDS sequence (opt4) from hemagglutinin__InfluenzaA__AAY28486

SEQ ID NO: 160206 - RNA, 1701 nt, Artificial Sequence; identical to SEQ ID NO: 160092
  derived and/or modified CDS sequence (opt4) from hemagglutinin__InfluenzaA__AAY28521

SEQ ID NO: 160207 - RNA, 1701 nt, Artificial Sequence; identical to SEQ ID NO: 160091
  derived and/or modified CDS sequence (opt4) from hemagglutinin__InfluenzaA__AAY28531

SEQ ID NO: 160208 - RNA, 1701 nt, Artificial Sequence; identical to SEQ ID NO: 160092
  derived and/or modified CDS sequence (opt4) from hemagglutinin__InfluenzaA__AAY28541

SEQ ID NO: 160209 - RNA, 1701 nt, Artificial Sequence
  derived and/or modified CDS sequence (opt4) from hemagglutinin__InfluenzaA__AAY28551
augaagaccaucaucgcccugagcuacauccugugccugguguucgcccagaagcugcccgugaacgacaacagcaccgccacccugugccugggccaccacgccgugcccaacggcacccuggugaagaccaucaccaacgaccacaucgaggugaccaacgccaccgagcuggugcagagcagcagcaccggcagaaucugcgacagcccccaccagauccuggacggcgagaacugcacccugaucgacgcccugcugggcgacccccacugcgacggcuuccagaacaaggagugggaccuguucguggagagaagcaccgccuacagcaacugcuaccccuacgacgugcccgacuacgccagccugagaagccugguggccagcagcggcacccuggaguucaacaacgagagcuucaacuggaccggcguggcccagaacggcaccagcagcgccugcaagagaagaagcaucaagagcuucuucagcagacugaacuggcugcaccagcugaaguacaaguaccccgcccugaacgugaccaugcccaacaacgagaaguucgacaagcuguacaucuggggcgugcaccaccccagcaccgacagcgaccagaucagccuguacgcccaggccagcggcagagugaccgugagcaccaagagaagccagcagaccgugauccccaacaucggcagcggccccugggugagaggcgugagcagcagaaucagcaucuacuggaccaucgugaagcccggcgacauccugcugaucaacagcaccggcaaccugaucgcccccagaggcuacuucaagaucagaagcggcaagagcagcaucaugagaagcaacgcccccaucggcaagugcaacagcgagugcaucacccccaacggcagcauccccaacgacaagcccuuccagaacgugaacagaaucaccuacggcgccugccccagauacgugaagcagaacacccugaagcuggccaccggcaugagaaacgugcccgagaagcagaccagaggcaucuucggcgccaucgccggcuucaucgagaacggcugggagggcaugguggacggcugguacggcuucagacaccagaacagcgagggcaccggccaggccgccgaccugaagagcacccaggccgccaucaaccagaucaacggcaagcugaacagacugaucgagaagaccaacgagaaguuccaccagaucgagaaggaguucagcgagguggagggcagaauccaggaccuggagaaguacguggaggacaccaagaucgaccuguggagcuacaacgccgagcugcugguggcccuggagaaccagcacaccaucgaccugaccgacagcgagaugaacaagcuguucgagagaaccagaaagcagcugagagagaacgccgaggacaugggcaacggcugcuucaagaucuaccacaagugcgacaacgccugcaucggcagcaucagaaacggcaccuacgaccacgacguguacagagacgaggcccugaacaacagauuccagaucaagggcguggagcugaagagcggcuacaaggacuggauccuguggaucagcuucgccaucagcugcuuccugcugugcguggugcugcugggcuucaucaugugggccugccagaagggcaacaucagaugcaacaucugcaucuga

SEQ ID NO: 160210 - RNA, 1701 nt, Artificial Sequence; identical to SEQ ID NO: 160092
  derived and/or modified CDS sequence (opt4) from hemagglutinin__InfluenzaA__AAY28561

SEQ ID NO: 160211 - RNA, 1701 nt, Artificial Sequence; identical to SEQ ID NO: 160107
  derived and/or modified CDS sequence (opt4) from hemagglutinin__InfluenzaA__AAY28581

SEQ ID NO: 160212 - RNA, 1701 nt, Artificial Sequence
  derived and/or modified CDS sequence (opt4) from hemagglutinin__InfluenzaA__AAY28591
augaagaccaucaucgcccugagcuacauccugugccugguguucgcccagaagcugcccgugaacgacaacagcaccgccacccugugccugggccaccacgccgugcccaacggcacccuggugaagaccaucaccaacgaccacaucgaggugaccaacgccaccgagcuggugcagagcagcagcaccggcagaaucugcgacagcccccaccagauccuggacggcgagaacugcacccugaucgacgcccugcugggcgacccccacugcgacggcuuccagaacaaggagugggaccuguucguggagagaagcaccgccuacagcaacugcuaccccuacgacgugcccgacuacgccagccugagaagccugguggccagcagcggcacccuggaguucaacaacgagagcuucaacuggaccggcguggcccagaacggcaccagcagcgccugcaagagaagaagcaucaagagcuucuucagcagacugaacuggcugcaccagcugaaguacaaguaccccgcccuggacgugaccaugcccaacaacgagaaguucgacaagcuguacaucuggggcgugcaccaccccagcaccgacagcgaccagaucagccuguacgcccaggccagcggcagagugaccgugagcaccaagagaagccagcagaccgugauccccaacaucggcagcagacccugggugagaggcgugagcagcagaaucagcaucuacuggaccaucgugaagcccggcgacauccugcugaucaacagcaccggcaaccugaucgcccccagaggcuacuucaagaucagaagcggcaagagcagcaucaugagaagcaacgcccccaucggcaagugcaacagcgagugcaucacccccaacggcagcauccccaacgacaagcccuuccagaacgugaacagaaucaccuacggcgccugccccagauacgugaagcagaacacccugaagcuggccaccggcaugagaaacgugcccgagaagcagaccagaggcaucuucggcgccaucgccggcuucaucgagaacggcugggagggcaugguggacggcugguacggcuucagacaccagaacagcgagggcaccggccaggccgccgaccugaagagcacccaggccgccaucaaccagaucaacggcaagcugaacagacugaucgagaagaccaacgagaaguuccaccagaucgagaaggaguucagcgagguggagggcagaauccaggaccuggagaaguacguggaggacaccaagaucgaccuguggagcuacaacgccgagcugcugguggcccuggagaaccagcacaccaucgaccugaccgacagcgagaugaacaagcuguucgagagaaccagaaagcagcugagagagaacgccgaggacaugggcaacggcugcuucaagaucuaccacaagugcgacaacgccugcaucggcagcaucagaaacggcaccuacgaccacgacguguacagagacgaggcccugaacaacagauuccagaucaagggcguggagcugaagagcggcuacaaggacuggauccuguggaucagcuucgccaucagcugcuuccugcugugcguggugcugcugggcuucaucaugugggccugccagaagggcaacaucagaugcaacaucugcaucuga

SEQ ID NO: 160213 - RNA, 1701 nt, Artificial Sequence; identical to SEQ ID NO: 160132
  derived and/or modified CDS sequence (opt4) from hemagglutinin__InfluenzaA__AAY28608

SEQ ID NO: 160214 - RNA, 1701 nt, Artificial Sequence
  derived and/or modified CDS sequence (opt4) from hemagglutinin__InfluenzaA__AAY28618
augaagaccaucaucgcccugagcuacauccugugccugguguucgcccagaagcugcccggcaacgacaacagcaccgccacccugugccugggccaccacgccgugcccaacggcaccaucgugaagaccaucaccaacgaccagaucgaggugaccaacgccaccgagcuggugcagagcagcagcaccggcggcaucugcgacagcccccaccagauccuggacggcgagaacugcacccugaucgacgcccugcugggcgacccccagugcgacggcuuccagaacaagaagugggaccuguucguggagagaagcaaggccuacagcaacugcuaccccuacgacgugcccgacuacgccagccugagaagccugguggccagcagcggcacccuggaguucaacaacgagagcuucaacuggaccggcgugacccagaacggcaccagcagcgccugcaagagaagaagcaacaagagcuucuucagcagacugaacuggcugacccaccugaaguacaaguaccccgcccugaacgugaccaugcccaacaacgagaaguucgacaagcuguacaucuggggcgugcaccaccccggcaccgacagcgaccagaucagccuguacgcccaggccagcggcagaaucaccgugagcaccaagagaagccagcagaccgugauccccaacaucggcagcagacccagagugagagacgugagcagcagaaugagcaucuacuggaccaucgugaagcccggcgacauccugcugaucaacagcaccggcaaccugaucgcccccagaggcuacuucaagaucagaagcggcaagagcagcaucaugagaagcgacgcccccaucggcaagugcaacagcgagugcaucacccccaacggcagcauccccaacgacaagcccuuccagaacgugaacagaaucaccuacggcgccugccccagauacgugaagcagaacacccugaagcuggccaccggcaugagaaacgugcccgagaagcagaccagaggcaucuucggcgccaucgccggcuucaucgagaacggcugggagggcaugguggacggcugguacggcuucagacaccagaacagcgagggcaccggccaggccgccgaccugaagagcacccaggccgccaucaaccagaucaacggcaagcugaacagacugaucggcaagaccaacgagaaguuccaccagaucgagaaggaguucagcgagguggagggcagaauccaggaccuggagaaguacguggaggacaccaagaucgaccuguggagcuacaacgccgagcugcugguggcccuggagaaccagcacaccaucgaccugaccgacagcgagaugaacaagcuguucgagagaaccaagaagcagcugagagagaacgccgaggacaugggcaacggcugcuucaagaucuaccacaagugcgacaacgccugcaucgagagcaucagaaacggcaccuacgaccacgacguguacagagacgaggcccugaacaacagauuccagaucaagggcguggagcugaagagcggcuacaaggacuggauccuguggaucagcuucgccaucagcugcuuccugcugugcguggcccugcugggcuucaucaugugggccugccagaagggcaacaucagaugcaacaucugcaucuga

SEQ ID NO: 160215 - RNA, 1701 nt, Artificial Sequence; identical to SEQ ID NO: 160107
  derived and/or modified CDS sequence (opt4) from hemagglutinin__InfluenzaA__AAY28638

SEQ ID NO: 160216 - RNA, 1701 nt, Artificial Sequence
  derived and/or modified CDS sequence (opt4) from hemagglutinin__InfluenzaA__AAY28648
augaagaccaucaucgcccugagcuacauccugugccugguguucgcccagaagcugcccggcaacgacaacagcaccgccacccugugccugggccaccacgccgugcccaacggcacccuggugaagaccaucaccaacgaccagaucgaggugaccaacgccaccgagcuggugcagagcagcagcaccggcagaaucugcgacagcccccaccagauccuggacggcgagaacugcacccugaucgacgcccugcugggcgacccccacugcgacggcuuccagaacaaggagugggaccuguucguggagagaagcaaggccuacagcaacugcuaccccuacgacgugcccgacuacgugagccugagaagccugguggccagcagcggcacccuggaguucaacaacgagagcuucaacuggaccggcguggcccagaacggcaccagcagcgccugcaagagaagaagcgacaagagcuucuucagcagacugaacuggcugcaccagcugaaguacaaguaccccgcccugaacgugaccaugcccaacaacgagaaguucgacaagcuguacaucuggggcgugcaccaccccggcaccgacagcgaccagaucagccuguacgcccaggccagcggcagagugaccgugagcaccaagagaagccagcagaccgugauccccaacaucggcagcggccccugggugagaggcgugagcagcagaaucagcaucuacuggaccaucgugaagcccggcgacauccugcugaucaacagcaccggcaaccugaucgcccccagaggcuacuucaagaucagaagcggcaagagcagcaucaugagaagcgacgcccccaucggcaagugcaacagcgagugcaucacccccaacggcagcauccccaacgacaagcccuuccagaacgugaacagaaucaccuacggcgccugccccagauacgugaagcagaacacccugaagcuggccaccggcaugagaaacgugcccgagaagcagaccagaggcaucuucggcgccaucgccggcuucaucgagaacggcugggagggcaugauggacggcugguacggcuucagacaccagaacagcgagggcaccggccaggccgccgaccugaagagcacccaggccgccaucaaccagaucaacggcaagcugaacagacugaucgagaagaccaacgagaaguuccaccagaucgagaaggaguucagcgagguggagggcagaauccaggaccuggagaaguacguggaggacaccaagaucgaccuguggagcuacaacgccgagcugcugguggcccuggagaaccagcacaccaucgaccugaccgacagcgagaugaacaagcuguucgagagaaccaagaagcagcugagagagaacgccgaggacaugggcaacggcugcuucaagaucuaccacaagugcgacaacgccugcaucggcagcaucagaaacggcaccuacgaccacgacguguacagagacgaggcccugaacaacagauuccagaucaagggcguggagcugaagagcggcuacaaggacuggauccuguggaucagcuucgccaucagcugcuuccugcugugcaucgugcugcugggcuucaucaugugggccugccagaagggcaacaucagaugcaacaucugcaucuga

SEQ ID NO: 160217 - RNA, 1701 nt, Artificial Sequence
  derived and/or modified CDS sequence (opt4) from hemagglutinin__InfluenzaA__AAY44610
augaagaccaucaucgcccugagcuacauccugugccugguguucgcccagaagcugcccggcaacgacaacagcaccgccacccugugccugggccaccacgccgugcccaacggcaccaucgugaagaccaucaccaacgaccagaucgaggugaccaacgccaccgagcuggugcagagcagcagcaccggcggcaucugcgacagcccccaccagauccuggacggcgagaacugcacccugaucgacgcccugcugggcgacccccagugcgacggcuuccagaacaagaagugggaccuguucguggagagaaacaaggccuacagcaacugcuaccccuacgacgugcccgacuacgccagccugagaagccugguggccagcagcggcacccuggaguucaacaacgagagcuucgacuggaccggcgugacccagaacggcaccagcagcgccugcaagagaagaagcaacaagagcuucuucagcagacugaacuggcugacccaccugaaguacaaguaccccgcccugaacgugaccaugcccaacaacgagaaguucgacaagcuguacaucuggggcgugcaccaccccggcaccgacagcgaccagaucagccuguacgcccaggccagcggcagaaucaccgugagcaccaagagaagccagcagaccgugauccccaacaucggcagcagacccagagugagagacgugagcagcagaaucagcaucuacuggaccaucgugaagcccggcgacauccugcugaucaacagcaccggcaaccugaucgcccccagaggcuacuucaagaucagaagcggcaagagcagcaucaugagaagcgacgcccccaucggcaagugcaacagcgagugcaucacccccaacggcagcauccccaacgacaagcccuuccagaacgugaacagaaucaccuacggcgccugccccagauacgugaagcagaacacccugaagcuggccaccggcaugagaaacgugcccgagaagcagaccagaggcaucuucggcgccaucgccggcuucaucgagaacggcugggagggcaugguggacggcugguacggcuucagacaccagaacagcgagggcaccggccaggccgccgaccugaagagcacccaggccgccaucaaccagaucaacggcaagcugaacagacugaucggcaagaccaacgagaaguuccaccagaucgagaaggaguucagcgagguggagggcagaauccaggaccuggagaaguacguggaggacaccaagaucgaccuguggagcuacaacgccgagcugcugguggcccuggagaaccagcacaccaucgaccugaccgacagcgagaugaacaagcuguucgagagaaccaagaagcagcugagagagaacgccgaggacaugggcaacggcugcuucaagaucuaccacaagugcgacaacgccugcaucggcagcaucagaaacggcaccuacgaccacgacguguacagagacgaggcccugaacaacagauuccagaucaagggcguggagcugaagagcggcuacaaggacuggauccuguggaucagcuucgccaucagcugcuuccugcugugcguggcccugcugggcuucaucaugugggccugccagaagggcaacaucagaugcaacaucugcaucuga

SEQ ID NO: 160218 - RNA, 1701 nt, Artificial Sequence
  derived and/or modified CDS sequence (opt4) from hemagglutinin__InfluenzaA__AAY44620
augaagaccaucaucgcccugagcuacauccugugccugguguucgcccagaagcugcccggcaacgacaacagcaccgccacccugugccugggccaccacgccgugcccaacggcacccuggugaagaccaucaccaacgaccagaucgaggugaccaacgccaccgagcuggugcagagcagcagcaccggcagaaucugcgacagcccccaccagauccuggacggcgagaacugcacccugaucgacgcccugcugggcgacccccacugcgacggcuuccagaacaaggagugggaccuguucguggagagaagcaaggccuacagcaacugcuaccccuacgacgugcccgacuacgugagccugagaagccugguggccagcagcggcacccuggaguucaacaacgagagcuucaacuggaccggcguggcccagaacggcaccagcagcgccugcaagagaagaagcgacaagagcuucuucagcagacugaacuggcugcaccagcugaaguacaaguaccccgcccugaacgugaccaugcccaacaacgagaaguucgacaagcuguacaucuggggcgugcaccaccccggcaccgacagcgaccagaucagccuguacgcccaggccagcggcagagugaccgugagcaccaagagaagccagcagaccgugauccccaacaucggcagcagacccugggugagaggcgugagcagcagaaucagcaucuacuggaccaucgugaagcccggcgacauccugcugaucaacagcaccggcaaccugaucgcccccagaggcuacuucaagaucagaagcggcaagagcagcaucaugagaagcgacgcccccaucggcaagugcaacagcgagugcaucacccccaacggcagcauccccaacgacaagcccuuccagaacgugaacagaaucaccuacggccccugccccagauacgugaagcagaacacccugaagcuggccaccggcaugagaaacgugcccgagaagcagaccagaggcaucuucggcgccaucgccggcuucaucgagaacggcugggagggcaugauggacggcugguacggcuucagacaccagaacagcgagggcaccggccaggccgccgaccugaagagcacccaggccgccaucaaccagaucaacgagaagcugaacagacugaucgagaagaccaacgagaaguuccaccagaucgagaaggaguucagcgagguggagggcagaauccaggaccuggagaaguacguggaggacaccaagaucgaccuguggagcuacaacgccgagcugcugguggcccuggagaaccagcacaccaucgaccugaccgacagcgagaugaacaagcuguucgagagaaccaagaagcagcugagagagaacgccgaggacaugggcaacggcugcuucaagaucuaccacaagugcgacaacgccugcaucggcagcaucagaaacggcaccuacgaccacgacguguacagagacgaggcccugaacaacagauuccagaucaagggcguggagcugaagagcggcuacaaggacuggauccuguggaucagcuucgccaucagcugcuuccugcugugcaucgugcugcugggcuucaucaugugggccugccagaagggcaacaucagaugcaacaucugcaucuga

SEQ ID NO: 160219 - RNA, 1701 nt, Artificial Sequence; identical to SEQ ID NO: 160140
  derived and/or modified CDS sequence (opt4) from hemagglutinin__InfluenzaA__AAY44621

SEQ ID NO: 160220 - RNA, 1701 nt, Artificial Sequence; identical to SEQ ID NO: 160107
  derived and/or modified CDS sequence (opt4) from hemagglutinin__InfluenzaA__AAY44631

SEQ ID NO: 160221 - RNA, 1701 nt, Artificial Sequence
  derived and/or modified CDS sequence (opt4) from hemagglutinin__InfluenzaA__AAY44641
augaagaccaucaucgcccugagcuacauccugugccugguguucgcccagaagcugcccggcaacgacaacagcaccgccacccugugccugggccaccacgccgugcccaacggcacccuggugaagaccaucaccaacgaccagaucgaggugaccaacgccaccgagcuggugcagagcagcagcaccggcagaaucugcgacagcccccaccagauccuggacggcgagaacugcacccugaucgacgcccugcugggcgacccccacugcgacggcuuccagaacaaggagugggaccuguucguggagagaagcaaggccuacagcaacugcuaccccuacgacgugcccgacuacgugagccugagaagccugguggccagcagcggcacccuggaguucaacaacgagagcuucaacuggaccggcguggcccagaacggcaccagcagcgccugcaagagaagaagcgacaagagcuucuucagcagacugaacuggcugcaccagcugaaguacaaguaccccgcccugaacgugaccaugcccaacaacgagaaguucgacaagcuguacaucuggggcgugcaccaccccggcaccgacagcgaccagaucagccuguacgcccaggccagcggcagagugaccgugagcaccaagagaagccagcagaccgugauccccaacaucggcagcagacccugggugagaggcgugagcagcagaaucagcaucuacuggaccaucgugaagcccggcgacauccugcugaucaacagcaccggcaaccugaucgcccccagaggcuacuucaagaucagaagcggcaagagcagcaucaugagaagcgacgcccccaucggcaagugcaacagcgagugcaucacccccaacggcagcauccccaacgacaagcccuuccagaacgugaacagaaucaccuacggccccugccccagauacgugaagcagaacacccugaagcuggccaccggcaugagaaacgugcccgagaagcagaccagaggcaucuucggcgccaucgccggcuucaucgagaacggcugggagggcaugauggacggcugguacggcuucagacaccagaacagcgagggcaccggccaggccgccgaccugaagagcacccaggccgccaucaaccagaucaacggcaagcugaacagacugaucgagaagaccaacgagaaguuccaccagaucgagaaggaguucagcgagguggagggcagaauccaggaccuggagaaguacguggaggacaccaagaucgaccuguggagcuacaacgccgagcugcugguggcccuggagaaccagcacaccaucgaccugaccgacagcgagaugaacaagcuguucgagagaaccaagaagcagcugagagagaacgccgaggacaugggcaacggcugcuucaagaucuaccacaagugcgacaacgccugcaucggcagcaucagaaacggcaccuacgaccacgacguguacagagacgaggcccugaacaacagauuccagaucaagggcguggagcugaagagcggcuacaaggacuggauccuguggaucagcuucgccaucagcugcuuccugcugugcaucggccugcugggcuucaucaugugggccugccagaagggcaacaucagaugcaacaucugcaucuga

SEQ ID NO: 160222 - RNA, 1701 nt, Artificial Sequence
  derived and/or modified CDS sequence (opt4) from hemagglutinin__InfluenzaA__AAY44651
augaagaccaucaucgcccugagcuacauccugugccugguguucgcccagaagcugcccgugaacgacaacagcaccgccacccugugccugggccaccacgccgugcccaacggcacccuggugaagaccaucaccaacgaccacaucgaggugaccaacgccaccgagcuggugcagagcagcagcaccggcagaaucugcgacagcccccaccagauccuggacggcgagaacugcacccugaucgacgcccugcugggcgacccccacugcgacggcuuccagaacaaggagugggaccuguucguggagagaagcaccgccuacagcaacugcuaccccuacgacgugcccgacuacgccagccugagaagccugguggccagcagcggcacccuggaguucaacaacgagagcuucaacuggaccggcguggcccagaacggcaccagcagcgccugcaagagaagaagcaucaagagcuucuucagcagacugaacuggcugcaccagcugaaguacaaguaccccgcccugaacgugaccaugcccaacaacgagaaguucgacaagcuguacaucuggggcgugcaccaccccagcaccgacagcgaccagaucagccuguacgcccaggccagcggcagagugaccgugagcaccaagagaagccagcagaccgugauccccaacaucggcagcagacccugggagagaggcgugagcagcagaaucagcaucuacuggaccaucgugaagcccggcgacauccugcugaucaacagcaccggcaaccugaucgcccccagaggcuacuucaagaucagaagcggcaagagcagcaucaugagaagcaacgcccccaucggcaagugcaacagcgagugcaucacccccaacggcagcauccccaacgacaagcccuuccagaacgugaacagaaucaccuacggcgccugccccagauacgugaagcagaacacccugaagcuggccaccggcaugagaaacgugcccgagaagcagaccagaggcaucuucggcgccaucgccggcuucaucgagaacggcugggagggcaugguggacggcugguacggcuucagacaccagaacagcgagggcaccggccaggccgccgaccugaagagcacccaggccgccaucaaccagaucaacggcaagcugaacagacugaucgagaagaccaacgagaaguuccaccagaucgagaaggaguucagcgagguggagggcagaauccaggaccuggagaaguacguggaggacaccaagaucgaccuguggagcuacaacgccgagcugcugguggcccuggagaaccagcacaccaucgaccugaccgacagcgagaugaacaagcuguucgagagaaccagaaagcagcugaaggagaacgccgaggacaugggcaacggcugcuucaagaucuaccacaagugcgacaacgccugcaucggcagcaucagaaacggcaccuacgaccacgacguguacagagacgaggcccugaacaacagauuccagaucaagggcguggagcugaagagcggcuacaaggacuggauccuguggaucagcuucgccaucagcugcuuccugcugugcguggugcugcugggcuucaucaugugggccugccagaagggcaacaucagaugcaacaucugcaucuga

SEQ ID NO: 160223 - RNA, 1701 nt, Artificial Sequence
  derived and/or modified CDS sequence (opt4) from hemagglutinin__InfluenzaA__AAY44755
augaagaccaucaucgcccugagcuacauccugugccugguguucgcccagaagcugcccggcaacgacaacagcaccgccacccugugccugggccaccacgccgugcccaacggcacccuggugaagaccaucaccaacgaccagaucgaggugaccaacgccaccgagcuggugcagagcagcagcaccggcagaaucugcgacagcccccaccagauccuggacggcgagaacugcacccugaucgacgcccugcugggcgacccccacugcgacggcuuccagaacaaggagugggaccuguucguggagagaagcaaggccuacagcaacugcuaccccuacgacgugcccgacuacgccagccugagaagccugguggccagcagcggcacccuggaguucaacaacgagagcuucaacuggaccggcguggcccagaacggcaccagcagcgccugcaagagaagaagcaacaagagcuucuucagcagacugaacuggcugcaccagcugaaguacaaguaccccgcccugaacgugaccaugcccaacaacgagaaguucgacaagcuguacaucuggggcgugcaccaccccagcaccgacagcgaccagaucagccuguacgcccaggccagcggcagagugaccgugagcaccaagagaggccagcagaccgugauccccaacaucggcagcagacccugggugagaggcgugagcagcaucaucagcaucuacuggaccaucgugaagcccggcgacauccugcugaucaacagcaccggcaaccugaucgcccccagaggcuacuucaagaucagaagcggcaagagcagcgugaugagaagcgacgccagcaucggcaagugcaacagcgagugcaucacccccaacggcagcauccccaacgacaagcccuuccagaacgugaacagaaucaccuacggcgccugccccagauacgugaagcagaacacccugaagcuggccaccggcaugagaaacgugcccgagaagcagaccagaggcaucuucggcgccaucgccggcuucaucgagaacggcugggagggcaugguggacggcugguacggcuucagacaccagaacagcgagggcaccggccaggccgccgaccugaagagcacccaggccgccaucaaccagaucaacggcaagcugaacagacugaucgagaagaccaacgagaaguuccaccagaucgagaaggaguucagcgagguggagggcagaauccaggaccuggagaaguacguggaggacaccaagaucgaccuguggagcuacaacgccgagcugcugguggcccuggagaaccagcacaccaucgaccugaccgacagcgagaugaacaagcuguucgagagaaccaagaagcagcugagagagaacgccgaggacaugggcaacggcugcuucaagaucuaccacaagugcgacaacgccugcaucggcagcaucagaaacggcaccuacgaccacgacguguacagagacgaggcccugaacaacagauuccagaucaagggcguggagcugaagagcggcuacaaggacuggauccuguggaucagcuucgccaucagcugcuuccugcugugcguggugcugcugggcuucaucaugugggccugccagaagggcaacaucagaugcaacaucugcaucuga

SEQ ID NO: 160224 - RNA, 1701 nt, Artificial Sequence
  derived and/or modified CDS sequence (opt4) from hemagglutinin__InfluenzaA__AAY44775
augaagaccaucaucgcccugagcuacauccugugccugguguucgcccagaagcugcccgugaacgacaacagcaccgccacccugugccugggccaccacgccgugcccaacggcacccuggugaagaccaucaccaacgaccacaucgaggugaccaacgccaccgagcuggugcagagcagcagcaccggcagaaucugcgacagcccccaccagauccuggacggcgagaacugcacccugaucgacgcccugcugggcgacccccacugcgacggcuuccaggacaaggagugggaccuguucguggagagaagcaccgccuacagcaacugcuaccccuacgacgugcccgacuacgccagccugagaagccugguggccagcagcggcacccuggaguucaacaacgagagcuucaacuggaccggcguggcccagaacggcaccagcagcgccugcaagagaagaagcaucaagagcuucuucagcagacugaacuggcugcaccagcugaaguacaaguaccccgcccugaacgugaccaugcccaacaacgagaaguucgacaagcuguacaucuggggcgugcaccaccccagcaccgacagcgaccagaucagccuguacgcccaggccagcggcagagugaccgugagcaccaagagaagccagcagaccgugauccccaacaucggcagcagacccugggugagaggcgugagcagcagaaucagcaucuacuggaccaucgugaagcccggcgacauccugcugaucaacagcaccggcaaccugaucgcccccagaggcuacuucaagaucagaagcggcaagagcagcaucaugagaagcaacgcccccaucggcaagugcaacagcgagugcaucacccccaacggcagcauccccaacgacaagcccuuccagaacgugaacagaaucaccuacggcgccugccccagauacgugaagcagaccacccugaagcuggccaccggcaugagaaacgugcccgagaagcagaccagaggcaucuucggcgccaucgccggcuucaucgagaacggcugggagggcaugguggacggcugguacggcuucagacaccagaacagcgagggcaccggccaggccgccgaccugaagagcacccaggccgccaucaaccagaucaacggcaagcugaacagacugaucgagaagaccaacgagaaguuccaccagaucgagaaggaguucagcgagguggagggcagaauccaggaccuggagaaguacguggaggacaccaagaucgaccuguggagcuacaacgccgagcugcugguggcccuggagaaccagcacaccaucgaccugaccgacagcgagaugaacaagcuguucgagagaaccagaaagcagcugagagagaacgccgaggacaugggcaacggcugcuucaagaucuaccacaagugcgacaacgccugcaucggcagcaucagaaacggcaccuacgaccacgacguguacagagacgaggcccugaacaacagauuccagaucaagggcguggagcugaagagcggcuacaaggacuggauccuguggaucagcuucgccaucagcugcuuccugcugugcguggugcugcugggcuucaucaugugggccugccagaagggcaacaucagaugcaacaucugcaucuga

SEQ ID NO: 160225 - RNA, 1701 nt, Artificial Sequence; identical to SEQ ID NO: 160132
  derived and/or modified CDS sequence (opt4) from hemagglutinin__InfluenzaA__AAY44785

SEQ ID NO: 160226 - RNA, 1701 nt, Artificial Sequence
  derived and/or modified CDS sequence (opt4) from hemagglutinin__InfluenzaA__AAY44795
augaagaccaucaucgcccugagcuacauccugugccugguguucgcccagaagcugcccgugaacgacaacagcaccgccacccugugccugggccaccacgccgugcccaacggcacccuggugaagaccaucaccaacgaccacaucgaggugaccaacgccaccgagcuggugcagagcagcagcaccggcagaaucugcgacagcacccaccagauccuggacggcgagaacugcacccugaucgacgcccugcugggcgacccccacugcgacggcuuccagaacaaggagugggaccuguucguggagagaagcaccgccuacagcaacugcuaccccuacgacgugcccgacuacgccagccugagaagccugguggccagcagcggcacccuggaguucaacaacgagagcuucaacuggaccggcguggcccagaacggcaccagcagcgccugcaagagaagaagcaucaagagcuucuucagcagacugaacuggcugcaccagcugaaguacaaguaccccgcccugaacgugaccaugcccaacaacgagaaguucgacaagcuguacaucuggggcgugcaccaccccagcaccgacagcgaccagaucagccuguacgcccaggccagcggcagagugaccgugagcaccaagagaagccagcagaccgugauccccaacaucggcagcagacccugggugagaggcgugagcagcagaaucagcaucuacuggaccaucgugaagcccggcgacauccugcugaucaacagcaccggcaaccugaucgcccccagaggcuacuucaagaucagaagcggcaagagcagcaucaugagaagcaacgcccccaucggcaagugcaacagcgagugcaucacccccaacggcagcauccccaacgacaagcccuuccagaacgugaacagaaucaccuacggcgccugccccagauacgugaagcagaacacccugaagcuggccaccggcaugagaaacgugcccgagaagcagaccagaggcaucuucggcgccaucgccggcuucaucgagaacggcugggagggcaugguggacggcugguacggcuucagacaccagaacagcgagggcaccggccaggccgccgaccugaagagcacccaggccgccaucaaccagaucaacggcaagcugaacagacugaucgagaagaccaacgagaaguuccaccagaucgagaaggaguucagcgagguggagggcagaauccaggaccuggagaaguacguggaggacaccaagaucgaccuguggagcuacaacgccgagcugcugguggcccuggagaaccagcacaccaucgaccugaccgacagcgagaugaacaagcuguucgagagaaccagaaagcagcugagagagaacgccgaggacaugggcaacggcugcuucaagaucuaccacaagugcgacaacgccugcaucggcagcaucagaaacggcaccuacgaccacgacguguacagagacgaggcccugaacaacagauuccagaucaagggcguggagcugaagagcggcuacaaggacuggauccuguggaucagcuucgccaucagcugcuuccugcugugcguggugcugcugggcuucaucaugugggccugccagaagggcaacaucagaugcaacaucugcaucuga

SEQ ID NO: 160227 - RNA, 1701 nt, Artificial Sequence
  derived and/or modified CDS sequence (opt4) from hemagglutinin__InfluenzaA__AAY44796
augaagaccaucaucgcccugagcuacacccugugccugguguucgcccagaagcugcccggcaacgacaacagcaccgccacccugugccugggccaccacgccgugcccaacggcaccaucgugaagaccaucaccaacgaccagaucgaggugaccaacgccaccgagcuggugcagagcagcagcaccggcggcaucugcgacagcccccaccagauccuggacggcgagaacugcacccugaucgacgcccugcugggcgacccccagugcgacggcuuccagaacaagaagugggaccuguucguggagagaagcaaggccuacagcaacugcuaccccuacgacgugcccgacuacgccagccugagaagccugguggccagcagcggcacccuggaguucaacaacgagagcuucgacuggaccggcgugacccagaacggcaccagcagcgccugcaagagaagaagcaacaagagcuucuucagcagacugaacuggcugacccaccugaaguacaaguaccccgcccugaacgugaccaugcccaacaacgagaaguucgacaagcuguacaucuggggcgugcaccaccccggcaccgacagcgaccagaucagccuguacgcccaggccagcggcagaaucaccgugagcaccaagagaagccagcagaccgugauccccaacaucggcagcagacccagagugagagacgugagcagcagaaucagcaucuacuggaccaucgugaagcccggcgacauccugcugaucaacagcaccggcaaccugaucgcccccagaggcuacuucaagaucagaagcggcaagagcagcaucaugagaagcgacgcccccaucggcaagugcaacagcgagugcaucacccccaacggcagcauccccaacgacaagcccuuccagaacgugaacagaaucaccuacggcgccugccccagauacaucaagcagaacacccugaagcuggccaccggcaugagaaacgugcccgagaagcagaccagaggcaucuucggcgccaucgccggcuucaucgagaacggcugggagggcaugguggacggcugguacggcuucagacaccagaacagcgagggcaccggccaggccgccgaccugaagagcacccaggccgccaucaaccagaucaacggcaagcugaacagacugaucggcaagaccaacgagaaguuccaccagaucgagaaggaguucagcgagguggagggcagaauccaggaccuggagaaguacguggaggacaccaagaucgaccuguggagcuacaacgccgagcugcugguggcccuggagaaccagcacaccaucgaccugaccgacagcgagaugaacaagcuguucgagagaaccaagaagcagcugagagagaacgccgaggacaugggcaacggcugcuucaagaucuaccacaagugcgacaacgccugcaucggcagcaucagaaacggcaccuacgaccacgacguguacagagacgaggcccugaacaacagauuccagaucaagggcguggagcugaagagcggcuacaaggacuggauccuguggaucagcuucgccaucagcugcuuccugcugugcguggcccugcugggcuucaucaugugggccugccagaagggcaacaucagaugcaacaucugcaucuga

SEQ ID NO: 160228 - RNA, 1701 nt, Artificial Sequence; identical to SEQ ID NO: 160107
  derived and/or modified CDS sequence (opt4) from hemagglutinin__InfluenzaA__AAY44896

SEQ ID NO: 160229 - RNA, 1701 nt, Artificial Sequence
  derived and/or modified CDS sequence (opt4) from hemagglutinin__InfluenzaA__AAY44906
augaagaccaucaucgcccugagcuacauccugugccugguguucgcccagaagcugcccggcaacgacaacagcaccgccacccugugccugggccaccacgccgugcccaacggcaccaucgugaagaccaucaccaacgaccagaucgaggugaccaacgccaccgagcuggugcagagcagcagcaccggcggcaucugcgacagcccccaccagauccuggacggcgagaacugcacccugaucgacgcccugcugggcgacccccagugcgacggcuuccagaacaagaagugggaccuguucguggagagaagcaaggccuacagcaacugcuaccccuacgacgugcccgacuacgccagccugagaagccugguggccagcagcggcacccuggaguucaacaacgagagcuucgacuggaccggcgugacccagaacggcaccagcagcgccugcaagagaagaagcaacaagagcuucuucagcagacugaacuggcugacccaccugaaguacaaguaccccgcccugaacgugaccaugcccaacaacgagaaguucgacaagcuguacaucuggggcgugcaccaccccggcaccgacagcgaccagaucagccuguacgcccaggccagcggcagaaucaccgugagcaccaagagaagccagcagaccgugauccccaacaucggcagcagacccagagugagagacgugagcagcagaaucagcaucuacuggaccaucgugaagcccggcgacauccugcugaucaacagcaccggcaaccugaucgcccccagaggcuacuucaagaucagaagcggcaagagcagcaucaugagaagcgacgcccccaucggcaagugcaacagcgagugcaucacccccaacggcagcauccccaacgacaagcccuuccagaacgugaacagaaucaccuacggcgccugccccagauacgugaagcagaacacccugaagcuggccaccggcaugagaaacgugcccgagagacagaccagaggcaucuucggcgccaucgccggcuucaucgagaacggcugggagggcaugguggacggcugguacggcuucagacaccagaacagcgagggcaccggccaggccgccgaccugaagagcacccaggccgccaucaaccagaucaacggcaagcugaacagacugaucggcaagaccaacgagaaguuccaccagaucgagaaggaguucagcgagguggagggcagaauccaggaccuggagaaguacguggaggacaccaagaucgaccuguggagcuacaacgccgagcugcugguggcccuggagaaccagcacaccaucgaccugaccgacagcgagaugaacaagcuguucgagagaaccaagaagcagcugagagagaacgccgaggacaugggcaacggcugcuucaagaucuaccacaagugcgacaacgccugcaucggcagcaucagaaacggcaccuacgaccacgacguguacagagacgaggcccugaacaacagauuccagaucaagggcguggagcugaagagcggcuacaaggacuggauccuguggaucagcuucgccaucagcugcuuccugcugugcguggcccugcugggcuucaucaugugggccugccagaagggcaacaucagaugcaacaucugcaucuga

SEQ ID NO: 160230 - RNA, 1701 nt, Artificial Sequence
  derived and/or modified CDS sequence (opt4) from hemagglutinin__InfluenzaA__AAY46371
augaagaccaucaucgcccugagcuacauccugugccugguguucgcccagaagcugcccggcaacgacaacagcaccgccacccugugccugggccaccacgccgugcccaacggcacccuggugaagaccaucaccagcgaccagaucgaggugaccaacgccaccgagcuggugcagagcagcagcaccggcagaaucugcgacagcccccacagaauccuggacggcgagaacugcacccugaucgacgcccugcugggcgacccccacugcgacggcuuccagaacaaggagugggaccuguucguggagagaagcaaggccuacagcaacugcuaccccuacgacgugcccgacuacgccagccugagaagccugguggccagcagcggcacccuggaguucaacaacgagagcuucaacuggaccggcguggcccagaacggcaccagcuucgccugcaagagaagaagcaucaagagcuucuucagcagacugaacuggcugcaccagcugaaguacaaguaccccgcccugaacgugaccaugcccaacaacgacaaguucgacaagcuguacaucuggggcgugcaccaccccggcaccgacagcgaccagaccagccuguacgcccaggccagcggcagagugaccgugagcaccaagagaagccagcagaccgugauccccaacaucggcagcagacccugggugagaggcgugagcagcagaaucagcaucuacuggaccaucgugaagcccggcgacauccugcugaucaacagcaccggcaaccugaucgcccccagaggcuacuucaagaucagaagcggcaagagcagcaucaugagaagcgacgcccccaucggcaagugcaacagcgagugcaucacccccaacggcagcauccccaacggcaagcccuuccagaacgugaacagaaucaccuacggcgccugccccagauacgugaagcagaacacccugaagcuggccaccggcaugagaaacgugcccgagaagcagaccagaggcaucuucggcgccaucgccggcuucaucgagaacggcugggagggcaugguggacggcugguacggcuucagacaccagaacagcgagggcaccggccaggccgccgaccugaagagcacccaggccgccaucaaccagaucaacggcaagcugaacagacugaucgagaagaccaacgagaaguuccaccagaucgagaaggaguucaccgagguggagggcagaauccaggaccuggagaaguacguggaggacaccaagaucgaccuguggagcuacaacgccgagcugcugguggcccuggagaaccagcacaccaucgaccugaccgacagcgagaugaacaagcuguucgagagaaccagaaagcagcugagagagaacgccgaggacaugggcaacggcugcuucaagaucuaccacaagugcgacaacgccugcaucggcagcaucagaaacggcaccuacgaccacgacguguacagagacgaggcccugaacaacagauuccagaucaagggcguggagcugaagagcggcuacaaggacuggauccuguggaucagcuucgccaccagcugcuuccugcugugcguggugcugcugggcuucaucaugugggccugccagaagggcaacaucagaugcaacaucugcaucuga

SEQ ID NO: 160231 - RNA, 1701 nt, Artificial Sequence; identical to SEQ ID NO: 160092
  derived and/or modified CDS sequence (opt4) from hemagglutinin__InfluenzaA__AAY46381

SEQ ID NO: 160232 - RNA, 1701 nt, Artificial Sequence
  derived and/or modified CDS sequence (opt4) from hemagglutinin__InfluenzaA__AAY46391
augaagaccaucaucgcccugagcuacauccugugccugguguucgcccagaagcugcccgugaacgacaacagcaccgccacccugugccugggccaccacgccgugcccaacggcacccuggugaagaccaucaccaacgaccacaucgaggugaccaacgccaccgagcuggugcagagcagcagcaccggcagaaucugcgacagcccccaccagauccuggacggcgagaacugcacccugaucgacgcccugcugggcgacccccacugcgacggcuuccagaacaaggagugggaccuguucguggagagaagcaccgccuacagcaacugcuaccccuacgacgugcccgacuacgccagccugagaagccugguggccagcagcggcacccuggaguucaacaacgagagcuucaacuggaccggcguggcccagaacggcaccagcagcgccugcaagagaagaagcaucaagagcuucuucagcagacugaacuggcugcaccagcugaaguacaaguaccccgcccugaacgugaccaugcccaacaacgagaaguucgacaagcuguacaucuggggcgugcaccaccccagcaccgacagcgaccagaucagccuguacgcccaggccagcggcagagugaccgugagcaccaagagaagccagcagaccgugauccccaacaucggcagcagacccugggugagaggcgugagcagcaucaucagcaucuacuggaccaucgugaagcccggcgacauccugcugaucaacagcaccggcaaccugaucgcccccagaggcuacuucaagaucagaagcggcaagagcagcaucaugagaagcaacgcccccaucggcaagugcaacagcgagugcaucacccccaacggcagcauccccaacgacaagcccuuccagaacgugaacagaaucaccuacggcgccugccccagauacgugaagcagaacacccugaagcuggccaccggcaugagaaacgugcccgagaagcagaccagaggcaucuucggcgccaucgccggcuucaucgagaacggcugggagggcaugguggacggcugguacggcuucagacaccagaacagcgagggcaccggccaggccgccgaccugaagagcacccaggccgccaucaaccagaucaacggcaagcugaacagacugaucgagaagaccaacgagaaguuccaccagaucgagaaggaguucagcgagguggagggcagaauccaggaccuggagaaguacguggaggacaccaagaucgaccuguggagcuacaacgccgagcugcugguggcccuggagaaccagcacaccaucgaccugaccgacagcgagaugaacaagcuguucgagagaaccagaaagcagcugagagagaacgccgaggacaugggcaacggcugcuucaagaucuaccacaagugcgacaacgccugcaucggcagcaucagaaacggcaccuacgaccacgacguguacagagacgaggcccugaacaacagauuccagaucaagggcguggagcugaagagcggcuacaaggacuggauccuguggaucagcuucgccaucagcugcuuccugcugugcguggugcugcugggcuucaucaugugggccugccagaagggcaacaucagaugcaacaucugcaucuga

SEQ ID NO: 160233 - RNA, 1701 nt, Artificial Sequence
  derived and/or modified CDS sequence (opt4) from hemagglutinin__InfluenzaA__AAY46426
augaagaccaucaucgcccugagcuacauccugugccugguguucgcccagaagcugcccggcaacgacaacagcaccgccacccugugccugggccaccacgccgugcccaacggcacccuggugaagaccaucaccaacgaccagaucgaggugaccaacgccaccgagcuggugcagagcagcagcaccggcagaaucugcgacagcccccaccagauccuggacggcgagaacugcacccugaucgacgcccugcugggcgacccccacugcgacggcuuccagaacaaggagugggaccuguucguggagagaagcaaggccuacagcaacugcuaccccuacgacgugcccgacuacgccagccugagaagccugguggccagcagcggcacccuggaguucaacaacgagagcuucaacuggaccggcguggcccagaacggcaccagcagcgccugcaagagaagaagcaacaagagcuucuucagcagacugaacuggcugcaccagcugaaguacaaguaccccgcccugaacgugaccaugcccaacaacaagaaguucgacaagcuguacaucuggggcgugcaccaccccagcaccgacagcgaccagaucagccuguacgcccaggccagcggcagagugaccgugagcaccaagagaagccagcagaccgugauccccaacaucggcagcagacccugggugagaggcgugagcagcagaaucagcaucuacuggaccaucgugaagcccggcgacauccugcugaucaacagcaccggcaaccugaucgcccccagaggcuacuucaagaucagaagcggcaagagcagcaucaugagaagcgacgcccccaucggcaagugcaacagcgagugcaucacccccaacggcagcauccccaacgacaagcccuuccagaacgugaacagaaucaccuacggcgccugccccagauacgugaagcagaacacccugaagcuggccaccggcaugagaaacauccccgagaagcagaccagaggcaucuucggcgccaucgccggcuucaucgagaacggcugggagggcaugguggacggcugguacggcuucagacaccagaacagcgagggcaccggccaggccgccgaccugaagagcacccaggccgccaucaaccagaucaacggcaagcugaacagacugaucgagaagaccaacgagaaguuccaccagaucgagaaggaguucagcgagguggagggcagaauccaggaccuggagaaguacguggaggacaccaagaucgaccuguggagcuacaacgccgagcugcugguggcccuggagaaccagcacaccaucgaccugaccgacagcgagaugaacaagcuguucgagagaaccaagaagcagcugagagagaacgccgaggacaugggcaacggcugcuucaagaucuaccacaagugcgacaacgccugcaucggcagcaucagaaacggcaccuacgaccacgacguguacagagacgaggcccugaacaacagauuccagaucaagggcguggagcugaagagcggcuacaaggacuggauccuguggaucagcuucgccaucagcugcuuccugcugugcguggugcugcugggcuucaucaugugggccugccagaagggcaacaucagaugcaacaucugcaucuga

SEQ ID NO: 160234 - RNA, 1701 nt, Artificial Sequence
  derived and/or modified CDS sequence (opt4) from hemagglutinin__InfluenzaA__AAY47013
augaagaccaucaucgcccugagcuacauccugugccugguguucgcccagaagcugcccggcaacgacaacagcaccgccacccugugccugggccaccacgccgugcccaacggcacccuggugaagaccaucaccaacgaccagaucgaggugaccaacgccaccgagcuggugcagagcagcagcaccggcagaaucugcgacagcccccaccagauccuggacggcgagaacugcacccugaucgacgcccugcugggcgacccccacugcgacggcuuccagaacaaggagugggaccuguucguggagagaagcaaggccuacagcaacugcuaccccuacgacgugcccgacuacgugagccugagaagccugguggccagcagcggcacccuggaguucaacaacgagagcuucaacuggaccggcguggcccagaacggcaccagcagcgccugcaagagaagaagcgacaagagcuucuucagcagacugaacuggcugcaccagcugaaguacaaguaccccgcccugaacgugaccaugcccaacaacgagaaguucgacaagcuguacaucuggggcgugcaccaccccggcaccgacagcgaccagaucagccuguacgcccaggccagcggcagagugaccgugagcaccaagagaagccagcagaccgugauccccaacaucggcagcggccccugggugagaggcgugagcagcagaaucagcaucuacuggaccaucgugaagcccggcgacauccugcugaucaacagcaccggcaaccugaucgcccccagaggcuacuucaagaucagaagcggcaagagcagcaucaugagaagcgacgcccccaucggcaagugcaacagcgagugcaucacccccaacggcagcauccccaacgacaagcccuuccagaacgugaacagaaucaccuacggccccugccccagauacgugaagcagaacacccugaagcuggccaccggcaugagaaacgugcccgagaagcagaccagaggcaucuucggcgccaucgccggcuucaucgagaacggcugggagggcaugauggacggcugguacggcuucagacaccagaacagcgagggcaccggccaggccgccgaccugaagagcacccaggccgccaucaaccagaucaacggcaagcugaacagacugaucaagaagaccaacgagaaguuccaccagaucgagaaggaguucagcgagguggagggcagaauccaggaccuggagaaguacguggaggacaccaagaucgaccuguggagcuacaacgccgagcugcugguggcccuggagaaccagcacaccaucgaccugaccgacagcgagaugaacaagcuguucgagagaaccaagaagcagcugagagagaacgccgaggacaugggcaacggcugcuucaagaucuaccacaagugcgacaacgccugcaucggcagcaucagaaacggcaccuacgaccacgacguguacagagacgaggcccugaacaacagauuccagaucaagggcguggagcugaagagcggcuacaaggacuggauccuguggaucagcuucgccaucagcugcuuccugcugugcaucgugcugcugggcuucaucaugugggccugccagaagggcaacaucagaugcaacaucugcaucuga

SEQ ID NO: 160235 - RNA, 1701 nt, Artificial Sequence
  derived and/or modified CDS sequence (opt4) from hemagglutinin__InfluenzaA__AAY47023
augaagaccaucaucgcccugagcuacauccugugccugguguucgcccagaagcugcccggcaacgacaacagcaccgccacccugugccugggccaccacgccgugcccaacggcacccuggugaagaccaucaccaacgaccagaucgaggugaccaacgccaccgagcuggugcagagcagcagcaccagcagaaucugcgacagcccccaccagauccuggacggcgagaacugcacccugaucgacgcccugcugggcgacccccacugcgacggcuuccagaacaaggaguggggccuguucguggagagaagcaaggccuacagcaacugcuaccccuacgacgugcccgacuacgugagccugagaagccugguggccagcagcggcacccuggaguucaacaacgagagcuucaacuggaccggcguggcccagaacggcaccagcagcgccugcaagagaagaagcgacaagagcuucuucagcagacugaacuggcugcaccagcugaaguacaaguaccccgcccugaacgugaccaugcccaacaacgagaaguucgacaagcuguacaucuggggcgugcaccaccccggcaccgacagcgaccagaucagccuguacgcccaggccagcggcagagugaccgugagcaccaagagaagccagcagaccgugauccccaacaucggcagcagacccugggugagaggcgugagcagcagaaucagcaucuacuggaccaucgugaagcccggcgacauccugcugaucaacagcaccggcaaccugaucgcccccagaggcuacuucaagaucagaagcggcaagagcagcaucaugagaagcgacgcccccaucggcaagugcaacagcgagugcaucacccccaacggcagcauccccaacgacaagcccuuccagaacgugaacagaaucaccuacggcgccugccccagauacgugaagcagaacacccugaagcuggccaccggcaugagaaacgugcccgagaagcaggccagaggcaucuucggcgccaucgccggcuucaucgagaacggcugggagggcaugauggacggcugguacggcuucagacaccagaacagcgagggcaccggccaggccgccgaccugaagagcacccaggccgccaucaaccagaucaacggcaagcugaacagacugaucgagaagaccaacgagaaguuccaccagaucgagaaggaguucagcgagguggagggcagaauccaggaccuggagaaguacguggaggacaccaagaucgaccuguggagcuacaacgccgagcugcugguggcccuggagaaccagcacaccaucgaccugaccgacagcgagaugaacaagcuguucgagagaaccaagaagcagcugagagagaacgccgaggacaugggcaacggcugcuucaagaucuaccacaagugcgacaacgccugcaucggcagcaucagaaacggcaccuacgaccacgacguguacagagacgaggcccugaacaacagauuccagaucaagggcguggagcugaagagcggcuacaaggacuggauccuguggaucagcuucgccaucagcugcuuccugcugugcaucgugcugcugggcuucaucaugugggccugccagaagggcaacaucagaugcaacaucugcaucuga

SEQ ID NO: 160236 - RNA, 1701 nt, Artificial Sequence; identical to SEQ ID NO: 160232
  derived and/or modified CDS sequence (opt4) from hemagglutinin__InfluenzaA__AAY47052

SEQ ID NO: 160237 - RNA, 1701 nt, Artificial Sequence
  derived and/or modified CDS sequence (opt4) from hemagglutinin__InfluenzaA__AAY47075
augaagaccaucaucgcccugagcuacauccugugccugguguucgcccagaagcugcccggcaacgacaacagcauggccacccugugccugggccaccacgccgugcccaacggcacccuggugaagaccaucaccaacgaccagaucgaggugaccaacgccaccgagcuggugcagagcagcagcaccggcagaaucugcgacagcccccaccagauccuggacggcgagaacugcacccugaucgacgcccugcugggcgacccccacugcgacggcuuccagaacaaggagugggaccuguucguggagagaagcaaggccuacagcaacugcuaccccuacgacgugcccgacuacgugagccugagaagccugguggccagcagcggcacccuggaguucaacaacgagagcuucaacuggaccggcguggcccagaacggcaccagcagcgccugcaagagaagaagcaacaagagcuucuucagcagacugaacuggcugcaccagcugaagaacaaguaccccgcccugaacgugaccaugcccaacaacgagaaguucgacaagcuguacaucuggggcgugcaccaccccggcaccgacagcgaccagaucagccuguacgcccaggccagcggcagagugaccgugagcaccaagagaagccagcagaccgugauccccaacaucggcagcagacccagagugagagacaucagcagcagaaucagcaucuacuggaccaucgugaagcccggcgacauccugcugaucaacagcaccggcaaccugaucgcccccagaggcuacuucaagaucagaagcggcaagagcagcaucaugagaagcgacgcccccaucggcaagugcaacagcgagugcaucacccccaacggcagcauccccaacgacaagcccuuccagaacgugaacagaaucaccuacggcgccugccccagauacgugaagcagaacacccugaagcuggccaccggcaugagaaacgugcccgagaagcagaccagaggcaucuucggcgccaucgccggcuucaucgagaacggcugggagggcaugauggacggcugguacggcuucagacaccagaacagcgagggcaccggccaggccgccgaccugaagagcacccaggccgccaucaaccagaucaacggcaagcugaacagacugaucgagaagaccaacgagaaguuccaccagaucgagaaggaguucagcgagguggagggcagaauccaggaccuggagaaguacguggaggacaccaagaucgaccuguggagcuacaacgccgagcugcugguggcccuggagaaccagcacaccaucgaccugaccgacagcgagaugaacaagcuguucgagagaaccaagaagcagcugagagagaacgccgaggacaugggcaacggcugcuucaagaucuaccacaagugcgacaacgccugcaucggcagcaucagaaacggcaccuacgaccacgacguguacagagacgaggcccugaacaacagauuccagaucaagggcguggagcugaagagcggcuacaaggacuggauccuguggaucagcuucgccaucagcugcuuccugcugugcaucgugcugcugggcuucaucaugugggccugccagaagggcaacaucagaugcaacaucugcaucuga

SEQ ID NO: 160238 - RNA, 1701 nt, Artificial Sequence
  derived and/or modified CDS sequence (opt4) from hemagglutinin__InfluenzaA__AAY47085
augaagaccaucaucgcccugagcuacauccugugccugguguucgcccagaagcugcccggcaacgacaacagcaccgccacccugugccugggccaccacgccgugcccaacggcaccaucgugaagaccaucaccaacgaccagaucgaggugaccaacgccaccgagcuggugcagagcagcagcaccggcggcaucugcgacagcccccaccagauccuggacggcgagaacugcacccugaucgacgcccugcugggcgacccccagugcgacggcuuccagaacaagaagugggaccuguucguggagagaagcaaggccuacagcaacugcuaccccuacgacgugcccgacuacgccagccugagaagccugguggccagcagcggcacccuggaguucaacaacgagagcuucaacuggaccggcgugacccagaacggcaccagcagcgccugcaagagaagaagcaacaagagcuucuucagcagacugaacuggcugacccaccugaaguacaaguaccccgcccugaacgugaccaugcccaacaacgagaaguucgacaagcuguacaucuggggcgugcaccaccccggcaccgacagcgaccagaucagccuguacgcccaggccagcggcagaaucaccgugagcaccaagagaagccagcagaccgugauccccaacgugggcagcagacccagagugagagacgugagcagcagaaucagcaucuacuggaccaucgugaagcccggcgacauccugcugaucaacagcaccggcaaccugaucgcccccagaggcuacuucaagaucagaagcggcaagagcagcaucaugagaagcgacgcccccaucggcaagugcaacagcgagugcaucacccccaacggcagcauccccaacgacaagcccuuccagaacgugaacagaaucaccuacggcgccugccccagauacgugaagcagaacacccugaagcuggccaccggcaugagaaacgugcccgagaagcagaccagaggcaucuucggcgccaucgccggcuucaucgagaacggcugggagggcaugguggacggcugguacggcuucagacaccagaacagcgagggcaccggccaggccgccgaccugaagagcacccaggccgccaucaaccagaucaacggcaagcugaacagacugaucggcaagaccaacgagaaguuccaccagaucgagaaggaguucagcgagguggagggcagaauccaggaccuggagaaguacguggaggacaccaagaucgaccuguggagcuacaacgccgagcugcugguggcccuggagaaccagcacaccaucgaccugaccgacagcgagaugaacaagcuguucgagagaaccaagaagcagcugagagagaacgccgaggacaugggcaacggcugcuucaagaucuaccacaagugcgacaacgccugcaucgagagcaucagaaacggcaccuacgaccacgacguguacagagacgaggcccugaacaacagauuccagaucaagggcguggagcugaagagcggcuacaaggacuggauccuguggaucagcuucgccaucagcugcuuccugcugugcguggcccugcugggcuucaucaugugggccugccagaagggcaacaucagaugcaacaucugcaucuga

SEQ ID NO: 160239 - RNA, 1701 nt, Artificial Sequence
  derived and/or modified CDS sequence (opt4) from hemagglutinin__InfluenzaA__AAY58320
augaagaccaucaucgcccugagcuacauccugugccugguguucgcccagaagcugcccggcaacgacaacagcaccgccacccugugccugggccaccacgccgugcccaacggcaccaucgugaagaccaucaccaacgaccagaucgaggugaccaacgccaccgagcuggugcagagcagcagcaccggcggcaucugcgacagcccccaccagauccuggacggcgagaacugcacccugaucgacgcccugcugggcgacccccagugcgacggcuuccagaacaagaagugggaccuguucguggagagaagcaaggccuacagcaacugcuaccccuacgacgugcccgacuacgccagccugagaagccugguggccagcagcggcacccuggaguucaacaacgagagcuucgacuggaccggcgugacccagaacggcaccagcagcgccugcaagagaagaagcaacaagagcuucuucagcagacugaacuggcugacccaccugaaguacaaguaccccgcccugaacgugaccaugcccaacaacgagaaguucgacaagcuguacaucuggggcgugcaccaccccggcaccgacagcgaccagaucagccuguacgcccaggccagcggcagaaucaccgugagcaccaagagaagccagcagaccgugauccccaacaucggcagcagacccagagugagagacaucagcagcagaaucagcaucuacuggaccaucgugaagcccggcgacauccugcugaucaacagcaccggcaaccugaucgcccccagaggcuacuucaagaucagaagcggcaagagcagcaucaugagaagcgacgcccccaucggcaagugcaacagcgagugcaucacccccaacggcagcauccccaacgacaagcccuuccagaacgugaacagaaucaccuacggcgccugccccagauacgugaagcagaacacccugaagcuggccaccggcaugagaaacgugcccgagaagcagaccagaggcaucuucggcgccaucgccggcuucaucgagaacggcugggagggcaugguggacggcugguacggcuucagacaccagaacagcgagggcaccggccaggccgccgaccugaagagcacccaggccgccaucaaccagaucaacggcaagcugaacagacugaucggcaagaccaacgagaaguuccaccagaucgagaaggaguucagcgagguggagggcagaauccaggaccuggagaaguacguggaggacaccaagaucgaccuguggagcuacaacgccgagcugcugguggcccuggagaaccagcacaccaucgaccugaccgacagcgagaugaacaagcuguucgagagaaccaagaagcagcugagagagaacgccgaggacaugggcaacggcugcuucaagaucuaccacaagugcgacaacgccugcaucggcagcaucagaaacggcaccuacgaccacgacguguacagagacgaggcccugaacaacagauuccagaucaagggcguggagcugaagagcggcuacaaggacuggauccuguggaucagcuucgccaucagcugcuuccugcugugcguggcccugcugggcuucaucaugugggccugccagaagggcaacaucagaugcaacaucugcaucuga

SEQ ID NO: 160240 - RNA, 1701 nt, Artificial Sequence
  derived and/or modified CDS sequence (opt4) from hemagglutinin__InfluenzaA__AAY59035
augaagaccaucaucgcccugagcuacauccugugccugguguucgcccagaagcugaccgugaacgacaacagcaccgccacccugugccugggccaccacgccgugcccaacggcacccuggugaagaccaucaccaacgaccacaucgaggugaccaacgccaccgagcuggugcagagcagcagcaccggcagaaucugcgacagcccccaccagauccuggacggcgagaacugcacccugaucgacgcccugcugggcgacccccacugcgacggcuuccagaacaaggagugggaccuguucguggagagaagcaccgccuacagcaacugcuaccccuacgacgugcccgacuacgccagccugagaagccugguggccagcagcggcacccuggaguucaacaacgagagcuucaacuggaccggcguggcccagaacggcaccagcagcgccugcaagagaagaagcaucaagagcuucuucagcagacugaacuggcugcaccagcugaaguacaaguaccccgcccugaacgugaccaugcccaacaacgagaaguucgacaagcuguacaucuggggcgugcaccaccccagcaccgacagcgaccagaucagccuguacgcccaggccagcggcagagugaccgugagcaccaagagaagccagcagaccgugauccccaacaucggcagcagacccugggugagaggcgugagcagcagaaucagcaucuacuggaccaucgugaagcccggcgacauccugcugaucaacagcaccggcaaccugaucgcccccagaggcuacuucaagaucagaagcggcaagagcagcaucaugagaagcaacgcccccaucggcaagugcaacagcgagugcaucacccccaacggcagcauccccaacgacaagcccuuccagaacgugaacagaaucaccuacggcgccugccccagauacgugaagcagaacacccugaagcuggccaccggcaugagaaacgugcccgagaagcagaccagaggcaucuucggcgccaucgccggcuucaucgagaacggcugggagggcaugguggacggcugguacggcuucagacaccagaacagcgagggcaccggccaggccgccgaccugaagagcacccaggccgccaucaaccagaucaacggcaagcugaacagacugaucgagaagaccaacgagaaguuccaccagaucgagaaggaguucagcgagguggagggcagaauccaggaccuggagaaguacguggaggacaccaagaucgaccuguggagcuacaacgccgagcugcugguggcccuggagaaccagcacaccaucgaccugaccgacagcgagaugaacaagcuguucgagagaaccagaaagcagcugagagagaacgccgaggacaugggcaacggcugcuucaagaucuaccacaagugcgacaacgccugcaucggcagcaucagaaacggcaccuacgaccacgacguguacagagacgaggcccugaacaacagauuccagaucaagggcguggagcugaagagcggcuacaaggacuggauccuguggaucagcuucgccaucagcugcuuccugcugugcguggugcugcugggcuucaucaugugggccugccagaagggcaacaucagaugcaacaucugcaucuga

SEQ ID NO: 160241 - RNA, 1701 nt, Artificial Sequence
  derived and/or modified CDS sequence (opt4) from hemagglutinin__InfluenzaA__AAY64202
augaagaccaucaucgcccugagcuacauccugugccugguguucgcccagaagcugcccggcaacgacaacagcaccgccacccugugccugggccaccacgccgugcccaacggcaccaucgugaagaccaucaccaacgaccagaucgaggugaccaacgccaccgagcuggugcagagcagcagcaccggcggcaucugcgacagcccccaccagauccuggacggcgagaacugcacccugaucgacgcccugcugggcgacccccagugcgacggcuuccagaacaagaagugggaccuguucguggagagaagcaaggccuacagcaacugcuaccccuacgacgugcccgacuacgccagccugagaagccugguggccagcagcggcacccuggaguucaacaacgagagcuucaacuggaccggcgugacccagaacggcaccagcagcgccugcgagagaagaagcaacaagagcuucuucagcagacugaacuggcugacccaccugaaguacaaguaccccgcccugaacgugaccaugcccaacaacgagaaguucgacaagcuguacaucuggggcgugcaccaccccggcaccgacagcgaccagaucagccuguacgcccaggccagcggcagaaucaccgugagcaccaagagaagccagcagaccgugauccccaacaucggcagcagacccagagugagagacgugagcagcagaaucagcaucuacuggaccaucgugaagcccggcgacauccugcugaucaacagcaccggcaaccugaucgcccccagaggcuacuucaagaucagaagcggcaagagcagcaucaugagaagcgacgcccccaucggcaagugcaacagcgagugcaucacccccaacggcagcauccccaacgacaagcccuuccagaacgugaacagaaucaccuacggcgccugccccagauacgugaagcagaacacccugaagcuggccaccggcaugagaaacgugcccgagaagcagaacagaggcaucuucggcgccaucgccggcuucaucgagaacggcugggagggcaugguggacggcugguacggcuucagacaccagaacagcgagggcaccggccaggccgccgaccugaagagcacccaggccgccaucaaccagaucaacggcaagcugaacagacugaucggcaagaccaacgagaaguuccaccagaucgagaaggaguucagcgagguggagggcagaauccaggaccuggagaaguacguggaggacaccaagaucgaccuguggagcuacaacgccgagcugcugguggcccuggagaaccagcacaccaucgaccugaccgacagcgagaugaacaagcuguucgagagaaccaagaagcagcugagagagaacgccgaggacaugggcaacggcugcuucaagaucuaccacaagugcgacaacgccugcaucggcagcaucagaaacggcaccuacgaccacgacguguacagagacgaggcccugaacaacagauuccagaucaagggcguggagcugaagagcggcuacaaggacuggauccuguggaucagcuucgccaucagcugcuuccugcugugcguggcccugcugggcuucaucaugugggccugccagaagggcaacaucagaugcgacaucugcaucuga

SEQ ID NO: 160242 - RNA, 1701 nt, Artificial Sequence
  derived and/or modified CDS sequence (opt4) from hemagglutinin__InfluenzaA__AAY64212
augaagaccaucaucgcccugagcuacauccugugccugguguucgcccagaagauccccgugaacgacaacagcaccgccacccugugccugggccaccacgccgugcccaacggcacccuggugaagaccaucaccaacgagcacaucgaggugaccaacgccaccgagcuggugcagagcagcagcaccggcagaaucugcgacagcccccaccagauccuggacggcgagaacugcacccugaucgacgcccugcugggcgacccccacugcgacggcuuccagaacaaggagugggaccuguucguggagagaagcaccgccuacagcaacugcuaccccuacgacgugcccgacuacgccagccugagaagccugguggccagcagcggcacccuggaguucaacaacgagagcuucaacuggaccggcguggcccagaacggcaccagcagcgccugcaagagaagaagcaucaagagcuucuucagcagacugaacuggcugcaccagcugaaguacaaguaccccgcccugaacgugaccaugcccaacaacgagaaguucgacaagcuguacaucuggggcgugcaccaccccagcaccgacagcgaccagaucagccuguacgcccaggccagcggcagagugaccgugagcaccaagagaagccagcagaccgugauccccaacaucggcagcagacccugggugagaggcgugagcagcagaaucagcaucuacuggaccaucgugaagcccggcgacauccugcugaucaacagcaccggcaaccugaucgcccccagaggcuacuucaagaucagaagcggcaagagcagcaucaugagaagcaacgcccugaucggcaagugcaacagcgagugcaucacccccaacggcagcauccccaacgacaagcccuuccagaacgugaacagaaucaccuacggcgccugccccagauacgugaagcagaacacccugaagcuggccaccggcaugagaaacgugcccgagaagcagaccagaggcaucuucggcgccaucgccggcuucaucgagaacggcugggagggcaugguggacggcugguacggcuucagacaccagaacagcgagggcaccggccaggccgccgaccugaagagcacccaggccgccaucaaccagaucaacggcaagcugaacagacugaucgagaagaccaacgagaaguuccaccagaucgagaaggaguucagcgagguggagggcagaauccaggaccuggagaaguacguggaggacaccaagaucgaccuguggagcuacaacgccgagcugcugguggcccuggagaaccagcacaccaucgaccugaccgacagcgagaugaacaagcuguucgagagaaccagaaagcagcugagagagaacgccgaggacaugggcaacggcugcuucaagaucuaccacaagugcgacaacgccugcaucggcagcaucagaaacggcaccuacgaccacgacguguacagagacgaggcccugaacaacagauuccagaucaagggcguggagcugaagagcggcuacaaggacuggauccuguggaucagcuucgccaucagcugcuuccugcugugcguggugcugcugggcuucaucaugugggccugccagaagggcaacaucagaugcaacaucugcaucuga

SEQ ID NO: 160243 - RNA, 1701 nt, Artificial Sequence
  derived and/or modified CDS sequence (opt4) from hemagglutinin__InfluenzaA__AAY64222
augaagaccaucaucgcccugagcuacauccugugccugguguucgcccagaagcugcccggcaacgacaacagcaccgccacccugugccugggccaccacgccgugcccaacggcacccuggugaagaccaucaccaacgaccagaucgaggugaccaacgccaccgagcuggugcagagcagcagcaucggcagaaucugcgacagcccccaccagauccuggacggcgagaacugcacccugaucgacgcccugcugggcgacccccacugcgacggcuuccagaacaaggagugggaccuguucguggagagaagcaaggccuacagcaacugcuaccccuacgacgugcccgacuacgugagccugagaagccugguggccagcagcggcacccuggaguucaacaacgagagcuucaacuggaccggcguggcccagaacggcaccagcagcagcugcaagagaagaagcgacaagagcuucuucagcagacugaacuggcugcaccagcugaaguacaaguaccccgcccugaacgugaccaugcccaacaacgagaaguucgacaagcuguacaucuggggcgugcaccaccccggcaccgacagcgaccagaucagccuguacgcccaggccagcggcagagugaccgugagcaccaagagaagccagcagaccgugauccccaacaucggcagcagacccugggugagaggcgugagcagcagaaucagcaucuacuggaccaucgugaagcccggcgacauccugcugaucaacagcaccggcaaccugaucgcccccagaggcuacuucaagaucagaagcggcaagagcagcaucaugagaagcgacgcccccaucggcaagugcaacagcgagugcaucacccccaacggcagcauccccaacgacaagcccuuccagaacgugaacagaaucaccuacggccccugccccagauacgugaagcagaacacccugaagcuggccaccggcaugagaaacgugcccgagaagcagaccagaggcaucuucggcgccaucgccggcuucaucgagaacggcugggagggcaugauggacggcugguacggcuucagacaccagaacagcgagggcaccggccaggccgccgaccugaagagcacccaggccgccaucaaccagaucaacggcaagcugaacagacugaucgagaagaccaacgagaaguuccaccagaucgagaaggaguucagcgagguggagggcagaauccaggaccuggagaaguacguggaggacaccaagaucgaccuguggagcuacaacgccgagcugcugguggcccuggagaaccagcacaccaucgaccugaccgacagcgagaugaacaagcuguucgagaagaccaagaagcagcugagagagaacgccgaggacaugggcaacggcugcuucaagaucuaccacaagugcgacaacgccugcaucggcagcaucagaaacggcaccuacgaccacgacguguacagagacgaggcccugaacaacagauuccagaucaagggcguggagcugaagagcggcuacaaggacuggauccuguggaucagcuucgccaucagcugcuuccugcugugcaucgugcugcugggcuucaucaugugggccugccagaagggcaacaucagaugcaacaucugcaucuga

SEQ ID NO: 160244 - RNA, 1701 nt, Artificial Sequence
  derived and/or modified CDS sequence (opt4) from hemagglutinin__InfluenzaA__AAY64262
augaagaccaucaucgcccugagcuacauccugugccugguguucgcccagaagcugcccggcaacgacaacagcaccgccacccugugccugggccaccacgccgugcccaacggcacccuggugaagaccaucaccaacgaccagaucgaggugaccaacgccaccgagcuggugcagagcagcagcaccggcagaaucugcgacagcccccaccagauccuggacggcgagaacugcacccugaucgacgcccugcugggcgacccccacugcgacggcuuccagaacaaggagugggaccuguucguggagagaagcaaggccuacagcaacugcuaccccuacgacgugcccgacuacgccagccugagaagccugguggccagcagcggcacccuggaguucaacaacgagagcuucaacuggaccggcguggcccagaacggcaccagcagcgccugcaagagaagaagcaacaagagcuucuucagcagacugaacuggcugcaccagcugaaguacaaguaccccgcccugaacgugaccaugcccaacaacgagaaguucgacaagcuguacaucuggggcgugcaccaccccagcaccgacagcgaccagaucagccuguacgcccaggccagcggcagagugaccgugagcaccaagagaagccagcagaccgugauccccaacaucggcagcagacccugggugagaggcgugagcagcagaaucagcaucuacuggaccaucgugaagcccggcgacauccugcugaucaacagcaccggcaaccugaucgcccccagaggcuacuucaagaucagaagcggcaagagcagcaucaugagaagcgacgcccccaucggcaagugcaacagcgagugcaucacccccaacggcagcauccccaacgacaagcccuuccagaacgugaacagaaucaccuacggcgccugccccagauacgugaagcagaacacccugaagcuggccaccggcaugagaaacgugcccgagaagcagaccagaggcaucuucggcgccaucgccggcuucaucgagaacggcugggagggcaugguggacggcugguacggcuucagacaccagaacagcgagggcaccggccaggccgccgaccugaagagcacccaggccgccaucaaccagaucaacggcaagcugaacagacugaucgagaagaccaacgagaaguuccaccagaucgagaaggaguucagcgagguggagggcagaauccaggaccuggagaaguacguggaggacaccaagaucgaccuguggagcuacaacgccgagcugcugguggcccuggagaaccagcacaccaucgaccugaccgacagcgagaugaacaagcuguucgagagaaccaagaagcagcugagagagaacgccgaggacaugggcaacggcugcuucaagaucuaccacaagugcgacaacgccugcaugggcagcaucagaaacggcaccuacgaccacgacguguacagagacgaggcccugaacaacagauuccagaucaagggcguggagcugaagagcggcuacaaggacuggauccuguggaucagcuucgccaucagcugcuuccugcugugcguggugcugcugggcuucaucaugugggccugccagaagggcaacaucagaugcaacaucugcaucuga

SEQ ID NO: 160245 - RNA, 1701 nt, Artificial Sequence
  derived and/or modified CDS sequence (opt4) from hemagglutinin__InfluenzaA__AAY64272
augaagaccaucaucgcccugagcuacauccugugccugguguucgcccagaagcugcccggcaacgacaacagcaccgccacccugugccugggccaccacgccgugcccaacggcaccaucgugaagaccaucaccaacgaccagaucgaggugaccaacgccaccgagcuggugcagagcagcagcaccggcggcaucugcgacagcccccaccagauccuggacggcgagaacugcacccugaucgacgcccugcugggcgacccccagugcgacggcuuccagaacaagaagugggaccuguucguggagagaagcaaggccuacagcaacugcuaccccuacgacgugcccgacuacgccagccugagaagccugguggccagcagcggcacccuggaguucaacaacgagagcuucaacuggaccggcgugacccagaacggcaccagcagcgccugcaagagaagaagcaacaagagcuucuucagcagacugaacuggcugacccaccugaaguacaaguaccccgcccugaacgugaccaugcccaacaacgagaaguucgacaagcuguacaucuggggcgugcaccaccccggcaccgacagcgaccagaucagccuguacgcccaggccagcggcagaaucaccgugagcaccaagagaagccagcagaccgugauccccaacaucggcagcagacccagagugagagacgugagcagcagaaucagcaucuacuggaccaucgugaagcccggcgacauccugcugaucaacagcaccggcaaccugaucgcccccagaggcuacuucaagaucagaagcggcaagagcagcaucaugagaagcgacgcccccaucggcaagugcaacagcgagugcaucacccccaacggcagcauccccaacgacaagcccuuccagaacgugaacagaaucaccuacggcgccugccccagauacgugaagcagaacacccugaagcuggccaccggcaugagaaacgugcccgagaagcagaccagaggcaucuucggcgccaucgccggcuucaucgagaacggcugggagggcaugguggacggcugguacggcuucagacaccagaacagcgagggcaccggccaggccgccgaccugaagagcacccaggccgccaucaaccagaucaacggcaagcugaacagacugaucggcaagaccaacgagaaguuccaccagaucgagaaggaguucagcgagguggagggcagaauccaggaccuggagaaguacguggaggacaccaagaucgaccuguggagcuacaacgccgagcugcugguggcccuggagaaccagcacaccaucgaccugaccgacagcgagaugaacaagcuguucgagagaaccaagaagcagcugagagagaacgccgaggacaugggcaacggcugcuucaagaucuaccacaagugcgacaacgccugcaucgagagcaucagaaacggcaccuacgaccacgacguguacagagacgaggcccugaacaacagauuccagaucaagggcguggagcugaagagcggcuacaaggacuggauccuguggaucagcuucgccaucagcugcuuccugcugugcguggcccugcugggcuucaucaugugggccugccagaagggcaacaucagaugcaacaucugcaucuga

SEQ ID NO: 160246 - RNA, 1701 nt, Artificial Sequence
  derived and/or modified CDS sequence (opt4) from hemagglutinin__InfluenzaA__AAY64282
augaagaccaucaucgcccugagcuacauccugugccugguguucgcccagaagcugcccggcaacgacaacagcaccgccacccugugccugggccaccacgccgugcccaacggcacccuggugaagaccaucaccaacgaccagaucgaggugaccaacgccaccgagcuggugcagagcagcagcaccggcagaaucugcgacagcccccaccagauccuggacggcgagaacugcacccugaucgacgcccugcugggcgacccccacugcgacggcuuccagaacaaggagugggaccuguucguggagagaagcaaggccuacagcaacugcuaccccuacgacgugcccgacuacgccagccugagaagccugguggccagcagcggcacccuggaguucaacaacgagagcuucaacuggaccggcguggcccagaacggcaccagcagcgccugcaagagaagaagcaacaagagcuucuucagcagacugaacuggcugcaccagcugaaguacaaguaccccgcccugaacgugaccaugcccaacaacgagaaguucgacaagcuguacaucuggggcgugcaccaccccagcaccgacagcgaccagaucagccuguacgcccaggccagcggcagagugaccgugagcaccaagagaagccagcagaccgugauccccaacaucggcagcagacccugggugagaggcgugagcagcagaaucagcaucuacuggaccaucgugaagcccggcgacauccugcugaucaacagcaccggcaaccugaucgcccccagaggcuacuucaagaucagaagcggcaagagcagcaucaugagaagcgacgcccccaucggcaagugcaacagcgagugcaucacccccaacggcagcauccccaacgacaagcccuuccagaacgugaacagaaucaccuacggcgccugccccagauacgugaagcagaacacccugaagcuggccaccggcaugagaaacgugcccgagaagcagaccagaggcaucuucggcgccaucgccggcuucaucgagaacggcugggagggcaugguggacggcugguacggcuucagacaccagaacagcgagggcaccggccaggccgccgaccugaagagcacccaggccgccaucaaccagaucaacggcaagcugaacagacugaucgagaagaccaacgagaaguuccaccagaucgagaaggaguucagcgagguggagggcagaauccaggaccuggagaaguacguggaggacaccaagaucgaccuguggagcuacaacgccgagcugcugguggcccuggagaaccagcacaccaucgaccugaccgacagcgagaugaacaagcuguucgagagaaccaagaagcagcugagagagaacgccgaggacaugggcaacggcugcuucaagaucuaccacaagugcgacaacgccugcaucggcagcaucagaaacggcaccuacgaccacgacguguacagagacgaggcccugaacaacagauuccagaucaagggcguggagcugaagagcggcuacaaggacuggauccuguggaucagcuucgccaucagcugcuuccugcugugcguggugcugcugggcuucaucaugugggccugccagaagggcaacaucagaugcaacaucugcaucuga

SEQ ID NO: 160247 - RNA, 1701 nt, Artificial Sequence
  derived and/or modified CDS sequence (opt4) from hemagglutinin__InfluenzaA__AAY64292
augaagaccaucaucgcccugagcuacauccugugccugguguucgcccagaagcugcccggcaacgacaacagcaccgccacccugugccugggccaccacgccgugcccaacggcacccuggugaagaccaucaccaacgaccagaucgaggugaccaacgccaccgagcuggugcagagcagcagcaccgacaagaucugcgacagcccccaccagauccuggacggcggcaacugcacccugaucgacgcccugcugggcgacccccacugcgacggcuuccagaacaaggagugggaccuguucguggagagaagcaaggccuacagcaacugcuaccccuacgacgugcccgacuacgugagccugagaagccugguggccagcagcggcacccuggaguucaacaacgagagcuucaacuggaccggcguggcccagaacggcaccagcagcgccugcaagagaagaagcgacaagagcuucuucagcagacugaacuggcugcaccagcugaagaacaaguaccccgcccugaacgugaccaugcccaacaacgagaaguucgacaagcuguacaucuggggcgugcaccaccccggcaccgacagcgaccagaucagccuguacgcccaggccagcggcagagugaccgugagcaccaagagaagccagcagaccgugauccccaacaucggcagcagacccagagugagagacaucagcagcagaaucagcaucuacuggaccaucgugaagcccggcgacauccugcugaucaacagcaccggcaaccugaucgcccccagaggcuacuucaagaucagaagcggcaagagcagcaucaugagaagcgacgcccccaucggcaagugcaacagcgagugcaucacccccaacggcagcauccccaacgacaagcccuuccagaacgugaacagaaucaccuacggcgccugccccagauacgugaagcagaacacccugaagcuggccaccggcaugagaaacgugcccgagaagcagaccagaggcaucuucggcgccaucgccggcuucaucgagaacggcugggagggcaugguggacggcugguacggcuucagacaccagaacagcgagggcaccggccaggccgccgaccugaagagcacccaggccgccaucaaccagaucaacggcaagcugaacagacugaucgagaagaccaacgagaaguuccaccagaucgagaaggaguucagcgagguggagggcagaauccaggaccuggagaaguacguggaggacaccaagaucgaccuguggagcuacaacgccgagcugcugguggcccuggagaaccagcacaccaucgaccugaccgacagcgagaugaacaagcuguucgagagaaccaagaagcagcugagagagaacgccgaggacaugggcaacggcugcuucaagaucuaccacaagugcgacaacgccugcaucggcagcaucagaaacggcaccuacgaccacgacguguacagagacgaggcccugaacaacagauuccagaucaagggcguggagcugaagagcggcuacaaggacuggauccuguggaucagcuucgccaucagcugcuuccugcugugcaucgugcugcugggcuucaucaugugggccugccagaagggcaacaucagaugcaacaucugcaucuga

SEQ ID NO: 160248 - RNA, 1701 nt, Artificial Sequence
  derived and/or modified CDS sequence (opt4) from hemagglutinin__InfluenzaA__AAY64302
augaagaccaucaucgcccugagcuacauccugugccugguguucgcccagaagcugcccggcaacgacaacagcaccgccacccugugccugggccaccacgccgugcccaacggcacccuggugaagaccaucaccagcgaccagaucgaggugaccaacgccaccgagcuggugcagagcagcagcaccggcagaaucugcgacagcccccacagaauccuggacggcgagaacugcacccugaucgacgcccugcugggcgacccccacugcgacggcuuccagaacaaggagugggaccuguucguggagagaagcaaggccuacagcaacugcuaccccuacgacgugcccgacuacgccagccugagaagccugguggccagcagcggcacccuggaguucaacaacgagagcuucaacuggaccggcguggcccagaacggcaccagcuucgccugcaagagaagaagcaucaagagcuucuucagcagacugaacuggcugcaccagcugaaguacaaguaccccgcccugaacgugaccaugcccaacaacgacaaguucgacaagcuguacaucuggggcgugcaccaccccagcaccgacagcgaccagaccagccuguacgcccaggccagcggcagagugaccgugagcaccaagagaagccagcagaccgugauccccaacaucggcagcagacccugggugagaggcgugagcagcagaaucagcaucuacuggaccaucgugaagcccggcgacauccugcugaucaacagcaccggcaaccugaucgcccccagaggcuacuucaagaucagaagcggcaagagcagcaucaugaagagcgacgcccccaucggcaagugcaacagcgagugcaucacccccaacggcagcauccccaacgacaagcccuuccagaacgugaacagaaucaccuacggcgccugccccagauacgugaagcagaacacccugaagcuggccaccggcaugagaaacgugcccgagaagcagaccagaggcaucuucggcgccaucgccggcuucaucgagaacggcugggagggcaugguggacggcugguacggcuucagacaccagaacagcgagggcaccggccaggccgccgaccugaagagcacccaggccgccaucaaccagaucaacggcaagcugaacagacugaucgagaagaccaacgagaaguuccaccagaucgagaaggaguucaccgagguggagggcagaauccaggaccuggagaaguacguggaggacaccaagaucgaccuguggagcuacaacgccgagcugcugguggcccuggagaaccagcacaccaucgaccugaccgacagcgagaugaacaagcuguucgagagaaccagaaagcagcugagagagaacgccgaggacaugggcaacggcugcuucaagaucuaccacaagugcgacaacgugugcaucggcagcaucagaaacggcaccuacgaccacgacguguacagagacgaggcccugaacaacagauuccagaucaagggcguggagcugaagagcggcuacaaggacuggauccuguggaucagcuucgccaccagcugcuuccugcugugcguggugcugcugggcuucaucaugugggccugccagaagggcaacaucagaugcaacaucugcaucuga

SEQ ID NO: 160249 - RNA, 1701 nt, Artificial Sequence; identical to SEQ ID NO: 160243
  derived and/or modified CDS sequence (opt4) from hemagglutinin__InfluenzaA__AAY64312

SEQ ID NO: 160250 - RNA, 1701 nt, Artificial Sequence; identical to SEQ ID NO: 160246
  derived and/or modified CDS sequence (opt4) from hemagglutinin__InfluenzaA__AAY64322

SEQ ID NO: 160251 - RNA, 1701 nt, Artificial Sequence
  derived and/or modified CDS sequence (opt4) from hemagglutinin__InfluenzaA__AAY64332
augaagaccaucaucgcccugagcuacauccugugccugguguucacccagaagcugcccggcaacgacaacagcaccgccacccugugccugggccaccacgccgugcccaacggcaccaucgugaagaccaucaccaacgaccagaucgaggugaccaacgccaccgagcuggugcagagcagcagcaccggcggcaucugcgacagcccccaccagauccuggacggcgagaacugcacccugaucgacgcccugcugggcgacccccagugcgacggcuuccagaacaagaagugggaccuguucguggagagaagcaaggccuacagcaacugcuaccccuacgacgugcccgacuacgccagccugagaagccugguggccagcagcggcacccuggaguucaacaacgagagcuucgacuggaccggcgugacccagaacggcaccagcagcgccugcaagagaagaagcaacaagagcuucuucagcagacugaacuggcugacccaccugaaguucaaguaccccgcccugaacgugaccaugcccaacaacgagaaguucgacaagcuguacaucuggggcgugcaccaccccggcaccgacagcgaccagaucagccuguacgcccaggccagcggcagaaucaccgugagcaccaagagaagccagcagaccgugauccccaacaucggcagcagacccagagugagagacgugagcagcagaaucagcaucuacuggaccaucgugaagcccggcgacauccugcugaucaacagcaccggcaaccugaucgcccccagaggcuacuucaagaucagaagcggcaagagcagcaucaugagaagcgacgcccccaucggcaagugcaacagcgagugcaucacccccaacggcagcauccccaacgacaagcccuuccagaacgugaacagaaucaccuacggcgccugccccagauacgugaagcagaacacccugaagcuggccaccggcaugagaaacgugcccgagaagcagaccagaggcaucuucggcgccaucgccggcuucaucgagaacggcugggagggcaugguggacggcugguacggcuucagacaccagaacagcgagggcaccggccaggccgccgaccugaagagcacccaggccgccaucaaccagaucaacggcaagcugaacagacugaucggcaagaccaacgagaaguuccaccagaucgagaaggaguucagcgagguggagggcagaauccaggaccuggagaaguacguggaggacaccaagaucgaccuguggagcuacaacgccgagcugcugguggcccuggagaaccagcacaccaucgaccugaccgacagcgagaugaacaagcuguucgagagaaccaagaagcagcugagagagaacgccgaggacaugggcaacggcugcuucaagaucuaccacaagugcgacaacgccugcaucggcagcaucagaaacggcaccuacgaccacgacguguacagagacgaggcccugaacaacagauuccagaucaagggcguggagcugaagagcggcuacaaggacuggauccuguggaucagcuucgccaucagcugcuuccugcugugcguggcccugcugggcuucaucaugugggccugccagaagggcaacaucagaugcgacaucugcaucuga

SEQ ID NO: 160252 - RNA, 1701 nt, Artificial Sequence
  derived and/or modified CDS sequence (opt4) from hemagglutinin__InfluenzaA__AAY64342
augaagaccaucaucgcccugagcuacauccugugccugguguucgcccagaagcugcccggcaacgacaacagcaccgccacccugugccugggccaccacgccgugcccaacggcacccuggugaagaccaucaccaacgaccagaucgaggugaccaacgccaccgagcuggugcagagcagcagcaccggcagaaucugcgacagcccccaccagauccuggacggcgagaacugcacccugaucgacgcccugcugggcgacccccacugcgacggcuuccagaacaaggagugggaccuguucguggagagaagcaaggccuacagcaacugcuaccccuacgacgugcccgacuacgccagccugagaagccugguggccagcagcggcacccuggaguucaacaacgagagcuucaacuggaccggcguggcccagaacggcaccagcagcgccugcaagagaagaagcaacaagagcuucuucagcagacugaacuggcugcaccagcugaaguacaaguaccccgcccugaacgugaccaugcccaacaacgagaaguucgacaagcuguacaucuggggcgugcaccaccccagcaccgacagcgaccagaucagccuguacgcccaggccagcggcagagugaccgugagcaccaagagaagccagcagaccgugauccccaacaucggcagcagacccugggugagaggcgugagcagcagaaucagcaucuacuggaccaucgugaagcccggcgacauccugcugaucaacagcaccggcaaccugaucgcccccagaggcuacuucaagaucagaagcggcaagagcagcaucaugagaagcgacgcccccaucggcaagugcaacagcgagugcaucacccccaacggcagcauccccaacgacaagcccuuccagaacgugaacagaaucaccuacggcgccugccccagauacgugaagcagaacacccugaagcuggccaccggcaugagaaacgugcccgagaagcagaccagaggcaucuucggcgccaucgccggcuucaucgagaacggcugggagggcaugguggacggcugguacggcuucagacaccagaacagcgagggcaccggccaggccgccgaccugaagagcacccaggccgccaucaaccagaucaacggcaagcugaacagacugaucgagaagaccaacgagaaguuccaccagaucgagaaggaguucagcgagguggagggcagaauccaggaccuggagaaguacguggaggacaccaagaucgaccuguggagcuacaacgccgagcugcugguggcccuggagaaccagcacaccaucgaccugaccgacagcgagaugaacaagcuguucgagagaaccaagaagcagcugagagagaacgccgaggacaugggcaacggcugcuucaagaucuaccacaagugcgacaacgccugcaucggcagcaucagaaacggcaccuacgaccacgacguguacagagacgaggcccugaacaacagauuccagaucaagggcguggagcugaagagcggcuacaaggacuggauccuguggaucagcuucgccaccagcugcuuccugcugugcguggugcugcugggcuucaucaugugggccugccagaagggcaacaucagaugcaacaucugcaucuga

SEQ ID NO: 160253 - RNA, 1701 nt, Artificial Sequence; identical to SEQ ID NO: 160092
  derived and/or modified CDS sequence (opt4) from hemagglutinin__InfluenzaA__AAY64352

SEQ ID NO: 160254 - RNA, 1701 nt, Artificial Sequence
  derived and/or modified CDS sequence (opt4) from hemagglutinin__InfluenzaA__AAY64362
augaagaccaucaucgcccugagcuacauccugugccugguguucgcccagaagcugcccggcaacgacaacagcaccgccacccugugccugggccaccacgccgugcccaacggcaccaucgugaagaccaucaccaacgaccagaucgaggugaccaacgccaccgagcuggugcagagcagcagcaccggcgagaucugcgacagcccccaccagauccuggacggcgagaacugcacccugaucgacgcccugcugggcgacccccagugcgacggcuuccagaacaagaagugggaccuguucguggagagaagcaaggccuacagcaacugcuaccccuacgacgugcccgacuacgccagccugagaagccugguggccagcagcggcacccuggaguucaacaacgagagcuucgacuggaccggcgugacccagaacggcaccagcagcgccugcaagagaagaagcaacaagagcuucuucagcagacugaacuggcugacccaccugaaguacaaguaccccgcccugaacgugaccaugcccaacaacgagaaguucgacaagcuguacaucuggggcgugcaccaccccggcaccgacagcgaccagaucagccuguacgcccaggccagcggcagaaucaccgugagcaccaagagaagccagcagaccgugauccccaacaucggcagcagacccagagugagagacaucagcagcagaaucagcaucuacuggaccaucgugaagcccggcgacauccugcugaucaacagcaccggcaaccugaucgcccccagaggcuacuucaagaucagaagcggcaagagcagcaucaugagaagcgacgcccccaucggcaagugcaacagcgagugcaucacccccaacggcagcauccccaacgacaagcccuuccagaacgugaacagaaucaccuacggcgccugccccagauacaucaagcagaacacccugaagcuggccaccggcaugagaaacgugcccgagaagcagaccagaggcaucuucggcgccaucgccggcuucaucgagaacggcugggagggcaugguggacggcugguacggcuucagacaccagaacagcgagggcaccggccaggccgccgaccugaagagcacccaggccgccaucaaccagaucaacggcaagcugaacagacugaucggcaagaccaacgagaaguuccaccagaucgagaaggaguucagcgagguggagggcagaauccaggaccuggagaaguacguggaggacaccaagaucgaccuguggagcuacaacgccgagcugcugguggcccuggagaaccagcacaccaucgaccugaccgacagcgagaugaacaagcuguucgagagaaccaagaagcagcugagagagaacgccgaggacaugggcaacggcugcuucaagaucuaccacaagugcgacaacgccugcaucggcagcaucagaaacggcaccuacgaccacgacguguacagagacgaggcccugaacaacagauuccagaucaagggcguggagcugaagagcggcuacaaggacuggauccuguggaucagcuucgccaucagcugcuuccugcugugcguggcccugcugggcuucaucaugugggccugccagaagggcaacaucagaugcaacaucugcaucuga

SEQ ID NO: 160255 - RNA, 1701 nt, Artificial Sequence; identical to SEQ ID NO: 160246
  derived and/or modified CDS sequence (opt4) from hemagglutinin__InfluenzaA__AAY64382

SEQ ID NO: 160256 - RNA, 1701 nt, Artificial Sequence
  derived and/or modified CDS sequence (opt4) from hemagglutinin__InfluenzaA__AAY64392
augaagaccaucaucgcccugagcuacauccugugccugguguucgcccagaagcugcccggcaacgacaacagcaccgccacccugugccugggccaccacgccgugcccaacggcaccaucgugaagaccaucaccaacgaccagaucgaggugaccaacgccaccgagcuggugcagagcagcagcaccggcggcaucugcgacagcccccaccagauccuggacggcgagaacugcacccugaucgacgcccugcugggcgacccccagugcgacggcuuccagaacaagaagugggaccuguucguggagagaagcaaggccuacagcaacugcuaccccuacgacgugcccgacuacgccagccugagaagccugguggccagcagcggcacccuggaguucaacaacgagagcuucaacuggaccggcgugacccagaacggcaccagcagcgccugcaagagaagaagcaacaagagcuucuucagcagacugaacuggcugacccaccugaaguacaaguaccccgcccugaacgugaccaugcccaacaacgagaaguucgacaagcuguacaucuggggcgugcaccaccccggcaccgacaacgaccagaucagccuguacgcccaggccagcggcagaaucaccgugagcaccaagagaagccagcagaccgugauccccaacaucggcagcagacccagagugagagacgugagcagcagaaucagcaucuacuggaccaucgugaagcccggcgacauccugcugaucaacagcaccggcaaccugaucgcccccagaggcuacuucaagaucagaagcggcaagagcagcaucaugagaagcgacgcccccaucggcaagugcaacagcgagugcaucacccccaacggcagcauccccaacgacaagcccuuccagaacgugaacagaaucaccuacggcgccugccccagauacgugaagcagaacacccugaagcuggccaccggcaugagaaacgugcccgagaagcagaccagaggcaucuucggcgccaucgccggcuucaucgagaacggcugggagggcaugguggacggcugguacggcuucagacaccagaacagcgagggcaccggccaggccgccgaccugaagagcacccaggccgccaucaaccagaucaacggcaagcugaacagacugaucggcaagaccaacgagaaguuccaccagaucgagaaggaguucagcgagguggagggcagaauccaggaccuggagaaguacguggaggacaccaagaucgaccuguggagcuacaacgccgagcugcugguggcccuggagaaccagcacaccaucgaccugaccgacagcgagaugaacaagcuguucgagagaaccaagaagcagcugagagagaacgccgaggacaugggcaacggcugcuucaagaucuaccacaagugcgacaacgccugcaucggcagcaucagaaacggcaccuacgaccacgacguguacagagacgaggcccugaacaacagauuccagaucaagggcguggagcugaagagcggcuacaaggacuggauccuguggaucagcuucgccaucagcugcuuccugcugugcguggcccugcugggcuucaucaugugggccugccagaagggcaacaucagaugcaacaucugcaucuga

SEQ ID NO: 160257 - RNA, 1701 nt, Artificial Sequence; identical to SEQ ID NO: 160248
  derived and/or modified CDS sequence (opt4) from hemagglutinin__InfluenzaA__AAY64402

SEQ ID NO: 160258 - RNA, 1701 nt, Artificial Sequence; identical to SEQ ID NO: 160246
  derived and/or modified CDS sequence (opt4) from hemagglutinin__InfluenzaA__AAY98037

SEQ ID NO: 160259 - RNA, 1701 nt, Artificial Sequence; identical to SEQ ID NO: 160246
  derived and/or modified CDS sequence (opt4) from hemagglutinin__InfluenzaA__AAY98047

SEQ ID NO: 160260 - RNA, 1701 nt, Artificial Sequence; identical to SEQ ID NO: 160107
  derived and/or modified CDS sequence (opt4) from hemagglutinin__InfluenzaA__AAY98057

SEQ ID NO: 160261 - RNA, 1701 nt, Artificial Sequence
  derived and/or modified CDS sequence (opt4) from hemagglutinin__InfluenzaA__AAY98067
augaagaccaucaucgcccugagcuacauccugugccugguguucgcccaggagcugcccggcaacgacaacagcaccgccacccugugccugggccaccacgccgugcccaacggcacccuggugaagaccaucaccaacgaccagaucgaggugaccaacgccaccgagcuggugcagagcagcagcaccggcagaaucugcgacagcccccaccagauccuggacggcgagaacugcacccugaucgacgcccugcugggcgacccccacugcgacggcuuccagaacaaggagugggaccuguucguggagagaagcaaggccuacagcaacugcuaccccuacgacgugcccgacuacgugagccugagaagccugguggccagcagcggcacccuggaguucaacaacgagagcuucaacuggaccggcguggcccagaacggcaccagcagcgccugcaagagaagaagcgacaagagcuucuucagcagacugaacuggcugcaccagcugaaguacaaguaccccgcccugaacgugaccaugcccaacaacgagaaguucgacaagcuguacaucuggggcgugcaccaccccggcaccgacagcgaccagaucagccuguacgcccaggccagcggcagagugaccgugagcaccaagagaagccagcagaccgugauccccaacaucggcagcggccccugggugagaggcgugagcagcagaaucagcaucuacuggaccaucgugaagcccggcgacauccugcugaucaacagcaccggcaaccugaucgcccccagaggcuacuucaagaucagaagcggcaagagcagcaucaugagaagcgacgcccccaucggcaagugcaacagcgagugcaucacccccaacggcagcauccccaacgacaagcccuuccagaacgugaacagaaucaccuacggccccugccccagauacgugaagcagaacacccugaagcuggccaccggcaugagaaacgugcccgagaagcagaccagaggcaucuucggcgccaucgccggcuucaucgagaacggcugggagggcaugauggacggcugguacggcuucagacaccagaacagcgagggcaccggccaggccgccgaccugaagagcacccaggccgccaucaaccagaucaacggcaagcugaacagacugaucgagaagaccaacgagaaguuccaccagaucgagaaggaguucagcgagguggagggcagaauccaggaccuggagaaguacguggaggacaccaagaucgaccuguggagcuacaacgccgagcugcugguggcccuggagaaccagcacaccaucgaccugaccgacagcgagaugaacaagcuguucgagagaaccaagaagcagcugagagagaacgccgaggacaugggcaacggcugcuucaagaucuaccacaagugcgacaacgccugcaucggcagcaucagaaacggcaccuacgaccacgacguguacagagacgaggcccugaacaacagauuccagaucaagggcguggagcugaagagcggcuacaaggacuggauccuguggaucagcuucgccaucagcugcuuccugcugugcaucgugcugcugggcuucaucaugugggccugccagaagggcaacaucagaugcaacaucugcaucuga

SEQ ID NO: 160262 - RNA, 1701 nt, Artificial Sequence
  derived and/or modified CDS sequence (opt4) from hemagglutinin__InfluenzaA__AAY98077
augaagaccaucaucgcccugagcuacauccugugccugguguucgcccagaagcugcccggcaacgacaacagcaccgccacccugugccugggccaccacgccgugcccaacggcacccuggugaagaccaucaccaacgaccagaucgaggugaccaacgccaccgagcuggugcagagcagcagcgccagcagaaucugcgacagcccccaccagauccuggacggcgagaacugcacccugaucgacgcccugcugggcgacccccacugcgacggcuuccagaacaaggagugggaccuguucguggagagaagcaaggccuacagcaacugcuaccccuacgacgugcccgacuacgugagccugagaagccugguggccagcagcggcacccuggaguucaacaacgagagcuucaacuggaccggcguggcccagaacggcaccagcagcgccugcaagagaagaagcgacaagagcuucuucagcagacugaacuggcugcaccagcugaaguacaaguaccccgcccugaacgugaccaugcccaacaacgagaaguucgacaagcuguacaucuggggcgugcaccaccccggcaccgacagcgaccagaucagccuguacgcccaggccagcggcagagugaccgugagcaccaagagaagccagcagaccgugauccccaacaucggcagcagacccugggugagaggcgugagcagcagaaucagcaucuacuggaccaucgugaagcccggcgacauccugcugaucaacagcaccggcaaccugaucgcccccagaggcuacuucaagaucagaagcggcaagagcagcaucaugagaagcgacgcccccaucggcaagugcaacagcgagugcaucacccccaacggcagcauccccaacgacaagcccuuccagaacgugaacagaaucaccuacggcgccugccccagauacgugaagcagaacacccugaagcuggccaccggcaugagaaacgugcccgagaagcagaccagaggcaucuucggcgccaucgccggcuucaucgagaacggcugggagggcaugauggacggcugguacggcuucagacaccagaacagcgagggcaccggccaggccgccgaccugaagagcacccaggccgccaucaaccagaucaacggcaagcugaacagacugaucgagaagaccaacgagaaguuccaccagaucgagaaggaguucagcgagguggagggcagaauccaggaccuggagaaguacguggaggacaccaagaucgaccuguggagcuacaacgccgagcugcugguggcccuggagaaccagcacaccaucgaccugaccgacagcgagaugaacaagcuguucgagagaaccaagaagcagcugagagagaacgccgaggacaugggcaacggcugcuucaagaucuaccacaagugcgacaacgccugcaucggcagcaucagaaacggcaccuacgaccacgacguguacagagacgaggcccugaacaacagauuccagaucaagggcguggagcugaagagcggcuacaaggacuggauccuguggaucagcuucgccaucagcugcuuccugcugugcaucgugcugcugggcuucaucaugugggccugccagaagggcaacaucagaugcaacaucugcaucuga

SEQ ID NO: 160263 - RNA, 1701 nt, Artificial Sequence
  derived and/or modified CDS sequence (opt4) from hemagglutinin__InfluenzaA__AAY98087
augaagaccaucaucgcccugagcuacauccugugccugguguucgcccagaagcugcccggcaacgacaacagcaccgccacccugugccugggccaccacgccgugcccaacggcacccuggugaagaccaucaccaacgaccagaucgaggugaccaacgccaccgagcuggugcagagcagcagcaccggcagaaucugcgacagcccccacagaauccuggacggcgagaacugcacccugaucgacgcccugcugggcgacccccacugcgacggcuuccagaacaaggagugggaccuguucguggagagaagcaaggccuacagcaacugcuaccccuacgacgugcccgacuacgccagccugagaagccugguggccagcagcggcacccuggaguucaacaacgagagcuucaacuggaccggcguggcccagaacggcaccagcagcgccugcaagagaagaagcaucaagagcuucuucagcagacugaacuggcugcaccagcugaaguacaaguaccccgcccugaacgugaccaugcccaacaacgacaaguucgacaagcuguacaucuggggcgugcaccaccccagcaccgacagcgaccagaccagccuguacgcccaggccagcggcagagugaccgugagcaccaagagaagccagcagaccgugauccccaacaucggcagcagacccugggugagaggcgugagcagcagaaucagcaucuacuggaccaucgugaagcccggcgacauccugcugaucaacagcaccggcaaccugaucgcccccagaggcuacuucaagaucagaagcggcaagagcagcaucaugagaagcgacgcccccaucggcaagugcaacagcgagugcaucacccccaacggcagcauccccaacgacaagcccuuccagaacgugaacagaaucaccuacggcgccugccccagauacgugaagcagaacacccugaagcuggccaccggcaugagaaacgugcccgagaagcagaccagaggcaucuucggcgccaucgccggcuucaucgagaacggcugggagggcaugguggacggcugguacggcuucagacaccagaacagcgagggcaccggccaggccgccgaccugaagagcacccaggccgccaucaaccagaucaacggcaagcugaacagacugaucgagaagaccaacgagaaguuccaccagaucgagaaggaguucagcgagguggagggcagaauccaggaccuggagaaguacguggaggacaccaagaucgaccuguggagcuacaacgccgagcugcugguggcccuggagaaccagcacaccaucgaccugaccgacagcgagaugaacaagcuguucgagagaaccagaaagcagcugagagagaacgccgaggacaugggcaacggcugcuucaagaucuaccacaagugcgacaacgccugcaucggcagcaucagaaacggcaccuacgaccacgacguguacagagacgaggcccugaacaacagauuccagaucaagggcguggagcugaagagcggcuacaaggacuggauccuguggaucagcuucgccaucagcugcuuccugcugugcguggugcugcugggcuucaucaugugggccugccagaagggcaacaucagaugcaacaucugcaucuga

SEQ ID NO: 160264 - RNA, 1701 nt, Artificial Sequence; identical to SEQ ID NO: 160246
  derived and/or modified CDS sequence (opt4) from hemagglutinin__InfluenzaA__AAY98097

SEQ ID NO: 160265 - RNA, 1701 nt, Artificial Sequence; identical to SEQ ID NO: 160246
  derived and/or modified CDS sequence (opt4) from hemagglutinin__InfluenzaA__AAY98107

SEQ ID NO: 160266 - RNA, 1701 nt, Artificial Sequence
  derived and/or modified CDS sequence (opt4) from hemagglutinin__InfluenzaA__AAY98117
augaagaccaucaucgcccugagcuacauccugugccugguguucgcccagaagcugcccggcaacgacaacagcaccgccacccugugccugggccaccacgccgugcccaacggcacccuggugaagaccaucaccaacgaccagaucgaggugaccaacgccaccgagcuggugcagagcagcagcaccggcagaaucugcgacagcccccaccagauccuggacggcgagaacugcacccugaucgacgcccugcugggcgacccccacugcgacggcuuccagaacaaggagugggaccuguucguggagagaagcaaggccuacagcaacugcuaccccuacgacgugcccgacuacgccagccugagaagccugguggccagcagcggcacccuggaguucaacaacgagagcuucaacuggaccggcguggcccagaacggcaccagcagcgccugcaagagaggcagcaacaagagcuucuucagcagacugaacuggcugcaccagcugaaguacaaguaccccgcccugaacgugaccaugcccaacaacgagaaguucgagaagcuguacaucuggggcgugcaccaccccagcaccgacagcgaccagaucagccuguacgcccaggccagcggcagagugaccgugagcaccaagagaagccagcagaccgugauccccaacaucggcagcagacccugggugagaggcgugagcagcagaaucagcaucuacuggaccaucgugaagcccggcgacauccugcugaucaacagcaccggcaaccugaucgcccccagaggcuacuucaagaucagaagcggcaagagcagcaucaugagaagcgacgcccccaucggcaagugcaacagcgagugcaucacccccaacggcagcauccccaacgacaagcccuuccagaacgugaacagaaucaccuacggcgccugccccagauacgugaagcagaacacccugaagcuggccaccggcaugagaaacgugcccgagaagcagaccagaggcaucuucggcgccaucgccggcuucaucgagaacggcugggagggcaugguggacggcugguacggcuucagacaccagaacagcgagggcaccggccaggccgccgaccugaagagcacccaggccgccaucaaccagaucaacggcaagcugaacagacugaucgagaagaccaacgagaaguuccaccagaucgagaaggaguucagcgagguggagggcagaauccaggaccuggagaaguacguggaggacaccaagaucgaccuguggagcuacaacgccgagcugcugguggcccuggagaaccagcacaccaucgaccugaccgacagcgagaugaacaagcuguucgagagaaccaagaagcagcugagagagaacgccgaggacaugggcaacggcugcuucaagaucuaccacaagugcgacaacgccugcaucggcagcaucagaaacggcaccuacgaccacgacguguacagagacgaggcccugaacaacagauuccagaucaagggcguggagcugaagagcggcuacaaggacuggauccuguggaucagcuucgccaucagcugcuuccugcugugcguggugcugcugggcuucaucaugugggccugccagaagggcaacaucagaugcaacaucugcaucuga

SEQ ID NO: 160267 - RNA, 1701 nt, Artificial Sequence; identical to SEQ ID NO: 160246
  derived and/or modified CDS sequence (opt4) from hemagglutinin__InfluenzaA__AAY98147

SEQ ID NO: 160268 - RNA, 1701 nt, Artificial Sequence; identical to SEQ ID NO: 160246
  derived and/or modified CDS sequence (opt4) from hemagglutinin__InfluenzaA__AAY98157

SEQ ID NO: 160269 - RNA, 1701 nt, Artificial Sequence
  derived and/or modified CDS sequence (opt4) from hemagglutinin__InfluenzaA__AAY98167
augaagaccaucaucgcccugagcuacauccugugccugguguucgcccagaagcugcccggcaacgacaacagcaccgccacccugugccugggccaccacgccgugcccaacggcacccuggugaagaccaucaccaacgaccagaucgaggugaccaacgccaccgagcuggugcagagcagcagcaccggcagaaucugcgacagcccccaccagauccuggacggcgagaacugcacccugaucgacgcccugcugggcgacccccacugcgacggcuuccagaacaaggagugggaccuguucguggagagaagcaaggccuacagcaacugcuaccccuacgacgugcccgacuacgccagccugagaagccugguggccagcagcggcacccuggaguucaacaacgagagcuucaacuggaccggcguggcccagaacggcaccagcagcgccugcaagagaagaagcaacaagagcuucuucagcagacugaacuggcugcaccagcugaaguacaaguaccccgcccugaacgugaccaugcccaacaacgagaaguucgacaagcuguacaucuggggcgugcaccaccccagcaccgacagcgaccagaucagccuguacgcccaggccagcggcagagugaccgugagcacccagagaagccagcagaccgugauccccaacaucggcagcagacccugggugagaggcgugagcagcagaaucagcaucuacuggaccaucgugaagcccggcgacauccugcugaucaacagcaccggcaaccugaucgcccccagaggcuacuucaagaucagaagcggcaagagcagcaucaugagaagcgacgcccccaucggcaagugcaacagcgagugcaucacccccaacggcagcauccccaacgacaagcccuuccagaacgugaacagaaucaccuacggcgccugccccagauacgugaagcagaacacccugaagcuggccaccggcaugagaaacgugcccgagaagcagaccagaggcaucuucggcgccaucgccggcuucaucgagaacggcugggagggcaugguggacggcugguacggcuucagacaccagaacagcgagggcaccggccaggccgccgaccugaagagcacccaggccgccaucaaccagaucaacggcaagcugaacagacugaucgagaagaccaacgagaaguuccaccagaucgagaaggaguucagcgagguggagggcagaauccaggaccuggagaaguacguggaggacaccaagaucgaccuguggagcuacaacgccgagcugcugguggcccuggagaaccagcacaccaucgaccugaccgacagcgagaugaacaagcuguucgagagaaccaagaagcagcugagagagaacgccgaggacaugggcaacggcugcuucaagaucuaccacaagugcgacaacgccugcaucggcagcaucagaaacggcaccuacgaccacgacguguacagagacgaggcccugaacaacagauuccagaucaagggcguggagcugaagagcggcuacaaggacuggauccuguggaucagcuucgccaucagcugcuuccugcugugcguggugcugcugggcuucaucaugugggccugccagaagggcaacaucagaugcaacaucugcaucuga

SEQ ID NO: 160270 - RNA, 1701 nt, Artificial Sequence
  derived and/or modified CDS sequence (opt4) from hemagglutinin__InfluenzaA__AAY98177
augaagaccaucaucgcccugagcuacauccugugccugguguucgcccagaagcugcccggcaacgacaacagcaccgccacccugugccugggccaccacgccgugcccaacggcacccuggugaagaccaucaccaacgaccagaucgaggugaccaacgccaccgagcuggugcagagcagcagcaccggcagaaucugcgacagcccccaccagauccuggacggcgagaacugcacccugaucgacgcccugcugggcgacccccacugcgacggcuuccagaacaaggagugggaccuguucguggagagaagcaaggccuacagcaacugcuaccccuacgacgugcccgacuacgccagccugagaagccugguggccagcagcggcacccuggaguucaacaacgagagcuucaacuggaccggcguggcccagaacggcaccagcagcgccugcaagagaagaagcaacaagagcuucuucagcagacugaacuggcugcaccagcugaaguacaaguaccccgcccugaacgugaccaugcccaacaacgagaaguucgacaagcuguacaucuggggcgugcaccaccccagcaccgacagcgaccagaucagccuguacgcccaggccagcggcagagugaccgugagcaccaagagaagccagcagaccgugauccccaacaucggcagcagacccugggugagaggcgugagcagcagaaucagcaucuacuggaccaucgugaagcccggcgacauccugcugaucaacagcaccggcaaccugaucgcccccagaggcuacuucaagaucagaagcggcaagagcagcaucaugagaagcgacgcccccaucggcaagugcaacagcgagugcaucacccccaacggcagcauccccaacgacaagcccuuccagaacgugaacagaaucaccuacggcgccugccccagauacgugaagcagaacacccugaagcuggccaccggcaugagaaacgugcccgagaagcagaccagaggcaucuucggcgccaucgccggcuucaucgagaacggcugggagggcaugguggacggcugguacggcuucagacaccagaacagcgagggcaccggccaggccgccgaccugaagagcacccaggccgccaucaaccagaucaacggcaagcugaacagacugaucgagaagaccaacgagaaguuccaccagaucgagaaggaguucagcgagguggagggcagaauccaggaccuggagaaguacguggaggacaccaagaucgaccuguggagcuacaacgccggccugcugguggcccuggagaaccagcacaccaucgaccugaccgacagcgagaugaacaagcuguucgagagaaccaagaagcagcugagagagaacgccgaggacaugggcaacggcugcuucaagaucuaccacaagugcgacaacgccugcaucggcagcaucagaaacggcaccuacgaccacgacguguacagagacgaggcccugaacaacagauuccagaucaagggcguggagcugaagagcggcuacaaggacuggauccuguggaucagcuucgccaucagcugcuuccugcugugcguggugcugcugggcuucaucaugugggccugccagaagggcaacaucagaugcaacaucugcaucuga

SEQ ID NO: 160271 - RNA, 1701 nt, Artificial Sequence
  derived and/or modified CDS sequence (opt4) from hemagglutinin__InfluenzaA__AAY98195
augaagaccaucaucgcccugagcuacauccugugccugguguucgcccagaagcugcccggcaacgacaacagcaccgccacccugugccugggccaccacgccgugcccaacggcacccuggugaagaccaucaccaacgaccagaucgaggugaccaacgccaccgagcuggugcagagcagcagcaccggcagaaucugcgacagcccccaccagauccuggacggcgagaacugcacccugaucgacgcccugcugggcgacccccacugcgacggcuuccagaacaaggagugggaccuguucguggagagaagcaaggccuacagcaacugcuaccccuacgacgugcccgacuacgccagccugagaagccugguggccagcagcggcacccuggaguucaacaacgagagcuucaacuggaccggcguggcccagaacggcaccagcagcgccugcaagagaagaagcaacaagagcuucuucagcagacugaacuggcugcaccagcugaaguacaaguaccccgcccugaacgugaccaugcccaacaacgagaaguucgacaagcuguacaucuggggcgugcaccaccccagcaccgacagcgaccagaucagccuguacgcccaggccagcggcagagugaccgugagcaccaagagaagccagcagaccgugauccccaacaucggcagcagacccugggugagaggcgugagcagcagaaucagcaucuacuggaccaucgugaagcccggcgacauccugcugaucaacagcaccggcaaccugaucgcccccagaggcuacuucaagaucagaagcggcaagagcagcaucaugagaagcgacgcccccaucggcaagugcaacagcgagugcaucacccccaacggcagcauccccaacgacaagcccuuccagaacgugaacagaaucaccuacggcgccugccccagauacgugaagcagaacacccugaagcuggccaccggcaugagaaacgugcccgagaagcagaccagaggcaucuucggcgccaucgccggcuucaucgagaacggcugggagggcaugguggacggcugguacggcuucagacaccagaacagcgagggcaccggccaggccgccgaccugaagagcacccaggccgccaucaaccagaucaacggcaagcugaacagacugaucgagaagaccaacgagaaguuccaccagaucgagaaggaguucagcgagguggagggcagaauccaggaccuggagaaguacguggaggacaccaagaucgaccuguggagcuacaacgccgagcugcugguggcccuggagaaccagcacaccaucgaccugaccgacagcgagaugaacaagcuguucgagagaaccagaaagcagcugagagagaacgccgaggacaugggcaacggcugcuucaagaucuaccacaagugcgacaacgccugcaucggcagcaucagaaacggcaccuacgaccacgacguguacagagacgaggcccugaacaacagauuccagaucaagggcguggagcugaagagcggcuacaaggacuggauccuguggaucagcuucgccaucagcugcuuccugcugugcguggugcugcugggcuucaucaugugggccugccagaagggcaacaucagaugcaacaucugcaucuga

SEQ ID NO: 160272 - RNA, 1701 nt, Artificial Sequence; identical to SEQ ID NO: 160246
  derived and/or modified CDS sequence (opt4) from hemagglutinin__InfluenzaA__AAY98207

SEQ ID NO: 160273 - RNA, 1701 nt, Artificial Sequence; identical to SEQ ID NO: 160248
  derived and/or modified CDS sequence (opt4) from hemagglutinin__InfluenzaA__AAY98217

SEQ ID NO: 160274 - RNA, 1701 nt, Artificial Sequence; identical to SEQ ID NO: 160246
  derived and/or modified CDS sequence (opt4) from hemagglutinin__InfluenzaA__AAY98227

SEQ ID NO: 160275 - RNA, 1701 nt, Artificial Sequence; identical to SEQ ID NO: 160246
  derived and/or modified CDS sequence (opt4) from hemagglutinin__InfluenzaA__AAY98237

SEQ ID NO: 160276 - RNA, 1701 nt, Artificial Sequence
  derived and/or modified CDS sequence (opt4) from hemagglutinin__InfluenzaA__AAY98247
augaagaccaucaucgcccugagcuacauccugugccugguguucgcccagaagcugcccggcaacgacaacagcaccgccacccugugccugggccaccacgccgugcccaacggcacccuggugaagaccaucaccaacgaccagaucgaggugaccaacgccaccgagcuggugcagagcagcagcaccggcagaaucugcgacagcccccaccagauccuggacggcgagaacugcacccugaucgacgcccugcugggcgacccccacugcgacggcuuccagaacaaggagugggaccuguucguggagagaagcaaggccuacagcaacugcuaccccuacgacgugcccgacuacgccagccugagaagccugguggccagcagcggcacccuggaguucaacaacgagagcuucaacuggaccggcguggcccagaacggcaccagcagcgccugcaagagaagaagcaacaagagcuucuucagcagacugaacuggcugcaccagcugaaguacaaguaccccgcccugaacgugaccaugcccaacaacgagaaguucgacaagcuguacaucuggggcgugcaccaccccagcaccgacagcgaccagaucagccuguacgcccaggccagcggcagagugaccgugagcaccaagagaagccagcagaccgugauccccaacaucggcagcagacccugggugagaggcgugagcagcagaaucagcaucuacuggaccaucgugaagcccggcgacauccugcugaucaacagcaccggcaaccugaucgcccccagaggcuacuucaagaucagaagcggcaagagcagcaucaugagaagcgacgcccccaucggcaagugcaacagcgagugcaucacccccaacggcagcauccccaacgacaagcccuuccagaacgugaacagaaucaccuacggcgccugccccagauacaucaagcagaacacccugaagcuggccaccggcaugagaaacgugcccgagaagcagaccagaggcaucuucggcgccaucgccggcuucaucgagaacggcugggagggcaugguggacggcugguacggcuucagacaccagaacagcgagggcaccggccaggccgccgaccugaagagcacccaggccgccaucaaccagaucaacggcaagcugaacagacugaucgagaagaccaacgagaaguuccaccagaucgagaaggaguucagcgagguggagggcagaauccaggaccuggagaaguacguggaggacaccaagaucgaccuguggagcuacaacgccgagcugcugguggcccuggagaaccagcacaccaucgaccugaccgacagcgagaugaacaagcuguucgagagaaccaagaagcagcugagagagaacgccgaggacaugggcaacggcugcuucaagaucuaccacaagugcgacaacgccugcaucggcagcaucagaaacggcaccuacgaccacgacguguacagagacgaggcccugaacaacagauuccagaucaagggcguggagcugaagagcggcuacaaggacuggauccuguggaucagcuucgccaucagcugcuuccugcugugcguggugcugcugggcuucaucaugugggccugccagaagggcaacaucagaugcaacaucugcaucuga

SEQ ID NO: 160277 - RNA, 1701 nt, Artificial Sequence; identical to SEQ ID NO: 160246
  derived and/or modified CDS sequence (opt4) from hemagglutinin__InfluenzaA__AAY98319

SEQ ID NO: 160278 - RNA, 1701 nt, Artificial Sequence
  derived and/or modified CDS sequence (opt4) from hemagglutinin__InfluenzaA__AAY98329
augaagaccaucaucgcccugagcuacauccugugccugguguucgcccagaagcugcccggcaacgacaacagcaccgccacccugugccugggccaccacgccgugcccaacggcacccuggugaagaccaucaccaacgaccagaucgaggugaccaacgccaccgagcuggugcagagcagcagcaccggcagaaucugcgacagcccccaccagauccuggacggcgagaacugcacccugaucgacgcccugcugggcgacccccacugcgacggcuuccagaacaaggagugggaccuguucguggagagaagcaaggccuacagcaacugcuaccccuacgacgugcccgacuacgccagccugagaagccugguggccagcagcggcacccuggaguucaacaacgagagcuucaacuggaccggcguggcccagaacggcaccagcagcgccugcaagagaagaagcaacaagagcuucuucagcagacugaacuggcugcaccagcugaaguacaaguaccccgcccugaacgugaccaugcccaacaacgagaaguucgacaagcuguacaucuggggcgugcaccaccccagcaccgacagcgaccagaucagccuguacgcccaggcccugggcagagugaccgugagcaccaagagaagccagcagaccgugauccccaacaucggcagcagacccugggugagaggcgugagcagcagaaucagcaucuacuggaccaucgugaagcccggcgacauccugcugaucaacagcaccggcaaccugaucgcccccagaggcuacuucaagaucagaagcggcaagagcagcaucaugagaagcgacgcccccaucggcaagugcaacagcgagugcaucacccccaacggcagcauccccaacgacaagcccuuccagaacgugaacagaaucaccuacggcgccugccccagauacgugaagcagaacacccugaagcuggccaccggcaugagaaacgugcccgagaagcagaccagaggcaucuucggcgccaucgccggcuucaucgagaacggcugggagggcaugguggacggcugguacggcuucagacaccugaacagcgagggcaccggccaggccgccgaccugaagagcacccaggccgccaucaaccagaucaacggcaagcugaacagacugaucgagaagaccaacgagaaguuccaccagaucgagaaggaguucagcgagguggagggcagaauccaggaccuggagaaguacguggaggacaccaagaucgaccuguggagcuacaacgccgagcugcugguggcccuggagaaccagcacaccaucgaccugaccgacagcgagaugaacaagcuguucgagagaaccaagaagcagcugagagagaacgccgaggacaugggcaacggcugcuucaagaucuaccacaagugcgacaacgccugcaucggcagcaucagaaacggcaccuacgaccacgacguguacagagacgaggcccugaacaacagauuccagaucaagggcguggagcugaagagcggcuacaaggacuggauccuguggaucagcuucgccaucagcugcuuccugcugugcguggugcugcugggcuucaucaugugggccugccagaagggcaacaucagaugcaacaucugcaucuga

SEQ ID NO: 160279 - RNA, 1701 nt, Artificial Sequence; identical to SEQ ID NO: 160246
  derived and/or modified CDS sequence (opt4) from hemagglutinin__InfluenzaA__AAY98339

SEQ ID NO: 160280 - RNA, 1701 nt, Artificial Sequence; identical to SEQ ID NO: 160246
  derived and/or modified CDS sequence (opt4) from hemagglutinin__InfluenzaA__AAY98353

SEQ ID NO: 160281 - RNA, 1701 nt, Artificial Sequence
  derived and/or modified CDS sequence (opt4) from hemagglutinin__InfluenzaA__AAY98366
augaagaccaucaucgcccugagcuacauccugugccugguguucgcccagaagcugcccggcaacgacaacagcaccgccacccugugccugggccaccacgccgugcccaacggcacccuggugaagaccaucaccagcgaccagaucgaggugaccaacgccaccgagcuggugcagagcagcagcaccggcagaaucugcgacagcccccacagaauccuggacggcgagaacugcacccugaucgacgcccugcugggcgacccccacugcgacggcuuccagaacaaggagugggaccuguucguggagagaagcaaggccuacagcaacugcuaccccuacgacgugcccgacuacgccagccugagaagccugguggccagcagcggcacccuggaguucaacaacgagagcuucaacuggaccggcguggcccagaacggcaccagcuucgccugcaagagaagaagcaucaagagcuucuucagcagacugaacuggcugcaccagcugaaguacaaguaccccgcccugaacgugaccaugcccaacaacgacaaguucgacaagcuguacaucuggggcgugcaccaccccggcaccgacagcgaccagaccagccuguacgcccaggccagcggcagagugaccgugagcaccaagagaagccagcagaccgugauccccaacaucggcagcagacccugggugagaggcgugagcagcagaaucagcaucuacuggaccaucgugaagcccggcgacauccugcugaucaacagcaccggcaaccugaucgcccccagaggcuacuucaagaucagaagcggcaagagcagcaucaugagaagcgacgcccccaucggcaagugcaacagcgagugcaucacccccaacggcagcauccccaacgacaagcccuuccagaacgugaacagaaucaccuacggcgccugccccagauacgugaagcagaacacccugaagcuggccaccggcaugagaaacgugcccgagaagcagaccagaggcaucuucggcgccaucgccggcuucaucgagaacggcugggagggcaugguggacggcugguacggcuucagacaccagaacagcgagggcaccggccaggccgccgaccugaagagcacccaggccgccaucaaccagaucaacggcaagcugaacagacugaucgagaagaccaacgagaaguuccaccagaucgagaaggaguucaccgagguggagggcagaauccaggaccuggagaaguacguggaggacaccaagaucgaccuguggagcuacaacgccgagcugcugguggcccuggagaaccagcacaccaucgaccugaccgacagcgagaugaacaagcuguucgagagaaccagaaagcagcugagagagaacgccgaggacaugggcaacggcugcuucaagaucuaccacaagugcgacaacgccugcaucggcagcaucagaaacggcaccuacgaccacgacguguacagagacgaggcccugaacaacagauuccagaucaagggcguggagcugaagagcggcuacaaggacuggauccuguggaucagcuucgccaccagcugcuuccugcugugcguggugcugcugggcuucaucaugugggccugccagaagggcaacaucagaugcaacaucugcaucuga

SEQ ID NO: 160282 - RNA, 1701 nt, Artificial Sequence
  derived and/or modified CDS sequence (opt4) from hemagglutinin__InfluenzaA__AAY98376
augaagaccaucaucgcccugagcuacauccugugccugguguucgcccagaagcugcccggcaacgacaacagcaccgccacccugugccugggccaccacgccgugcccaacggcacccuggugaagaccaucaccaacgaccagaucgaggugaccaacgccaccgagcuggugcagagcagcagcaccggcagaaucugcgacagcccccaccagauccuggacggcgagaacugcacccugaucgacgcccugcugggcgacccccacugcgacggcuuccagaacaaggagugggaccuguucguggagagaagcaaggccuacagcaacugcuaccccuacgacgugcccgacuacgccagccugagaagccugguggccagcagcggcacccuggaguucaacaacgagagcuucaacuggaccggcguggcccagaacggcaccagcagcgccugcaagagaagaagcaucaagagcuucuucagcagacugaacuggcugcaccagcugaaguacaaguaccccgcccugaacgugaccaugcccaacaacgacaaguucgacaagcuguacaucuggggcgugcaccaccccagcaccgacagcgaccagaccagccuguacgcccaggccagcggcagagugaccgugagcaccaagagaagccagcagaccgugauccccaacaucggcagcagacccugggugagaggcgugagcagcagaaucagcaucuacuggaccaucgugaagcccggcgacauccugcugaucaacagcaccggcaaccugaucgcccccagaggcuacuucaagaucagaagcggcaagagcagcaucaugagaagcgacgcccccaucggcaagugcaacagcgagugcaucacccccaacggcagcauccccaacgacaagcccuuccagaacgugaacagaaucaccuacggcgccugccccagauacgugaagcagaacacccugaagcuggccaccggcaugagaaacgugcccgagaagcagaccagaggcaucuucggcgccaucgccggcuucaucgagaacggcugggagggcaugguggacggcugguacggcuucagacaccagaacagcgagggcaccggccaggccgccgaccugaagagcacccaggccgccaucaaccagaucaacggcaagcugaacagacugaucgagaagaccaacgagaaguuccaccagaucgagaaggaguucagcgagguggagggcagaauccaggaccuggagaaguacguggaggacaccaagaucgaccuguggagcuacaacgccgagcugcugguggcccuggagaaccagcacaccaucgaccugaccgacagcgagaugaacaagcuguucgagagaaccagaaagcagcugagagagaacgccgaggacaugggcaacggcugcuucaagaucuaccacaagugcgacaacgccugcaucggcagcaucagaaacggcaccuacgaccacgacguguacagagacgaggcccugaacaacagauuccagaucaagggcguggagcugaagagcggcuacaaggacuggauccuguggaucagcuucgccaucagcugcuuccugcugugcguggugcugcugggcuucaucaugugggccugccagaagggcaacaucagaugcaacaucugcaucuga

SEQ ID NO: 160283 - RNA, 1701 nt, Artificial Sequence
  derived and/or modified CDS sequence (opt4) from hemagglutinin__InfluenzaA__AAY98386
augaagaccaucaucgcccugagcuacauccugugccugguguucgcccagaagcugcccggcaacgacaacagcaccgccacccugugccugggccaccacgccgugcccaacggcacccuggugaagaccaucaccaacgaccagaucgaggugaccaacgccaccgagcuggugcagagcagcagcaccggcagaaucugcgacagcccccaccagauccuggacggcggcaacugcacccugaucgacgcccugcugggcgacccccacugcgacggcuuccagaacaaggagugggaccuguucguggagagaagcaagguguacagcaacugcuaccccuacgacgugcccgacuacgccagccugagaagccugguggccagcagcggcacccuggaguucaacaacgagagcuucaacuggaccggcguggcccagaacggcaccagcagcgccugcaagagaagaagcaucaagagcuucuucagcagacugaacuggcugcaccagcugaaguacaaguaccccgcccugaacgugaccaugcccaacaacgagaaguucgacaagcuguacaucuggggcgugcaccaccccagcaccgacagcgaccagaucagccuguacgcccaggccagcggcagagugaccgugagcaccaagagaagccagcagaccgugauccccaacaucggcagcagacccugggugagaggcgugagcagcagaaucagcaucuacuggaccaucgugaagcccggcgacauccugcugaucaacagcaccggcaaccugaucgcccccagaggcuacuucaagaucagaagcggcaagagcagcaucaugagaagcgacgcccccaucggcaagugcaacagcgagugcaucacccccaacggcagcauccccaacgacaagcccuuccagaacgugaacagaaucaccuacggcgccugccccagauacgugaagcagaacacccugaagcuggccaccggcaugagaaacgugcccgagaagcagaccagaggcaucuucggcgccaucgccggcuucaucgagaacggcugggagggcaugguggacggcugguacggcuucagacaccagaacagcgagggcaccggccaggccgccgaccugaagagcacccaggccgccaucaaccagaucaacggcaagcugaacagacugaucgagaagaccaacgagaaguuccaccagaucgagaaggaguucagcgagguggagggcagaauccaggaccuggagaaguacguggaggacaccaagaucgaccuguggagcuacaacgccgagcugcugguggcccuggagaaccagcacaccaucgaccugaccgacagcgagaugaacaagcuguucgagagaaccaagaagcagcugagagagaacgccgaggacaugggcaacggcugcuucaagaucuaccacaagugcgacaacgccugcaucggcagcaucagaaacggcaccuacgaccacgacguguacagagacgaggcccugaacaacagauuccagaucaagggcguggagcugaagagcggcuacaaggacuggauccuguggaucagcuucgccaucagcugcuuccugcugugcguggugcugcugggcuucaucaugugggccugccagaagggcaacaucagaugcaacaucugcaucuga

SEQ ID NO: 160284 - RNA, 1701 nt, Artificial Sequence; identical to SEQ ID NO: 160246
  derived and/or modified CDS sequence (opt4) from hemagglutinin__InfluenzaA__AAY98396

SEQ ID NO: 160285 - RNA, 1701 nt, Artificial Sequence; identical to SEQ ID NO: 160246
  derived and/or modified CDS sequence (opt4) from hemagglutinin__InfluenzaA__AAY98406

SEQ ID NO: 160286 - RNA, 1701 nt, Artificial Sequence
  derived and/or modified CDS sequence (opt4) from hemagglutinin__InfluenzaA__AAZ32946
augaagaccaucaucgcccugagcuacauccugugccugguguucgcccagaagcugcccggcaacgacaacagcaccgccacccugugccugggccaccacgccgugcccaacggcaccaucgugaagaccaucaccaacgaccagaucgaggugaccaacgccaccgagcuggugcagagcagcagcaccggcggcaucugcgacagcccccaccagauccuggacggcgagaacugcacccugaucgacgcccugcugggcgacccccagugcgacggcuuccagaacaagaagugggaccuguucguggagagaagcgaggccuacagcaacugcuaccccuacgacgugcccgacuacgccagccugagaagccugaucgccagcagcggcacccuggaguucaccaacgagagcuucaacuggaccggcgugacccagaacggcaccagcagcgccugcaagagaagaagcaacaagagcuucuucagcagacugaacuggcugacccaccugaaguacaaguaccccgcccugaacgugaccaugcccaacaacgagaaguucgacaagcuguacaucuggggcgugcaccaccccggcaccgacagcgaccagaucagccuguacgcccaggccagcggcagaaucaccgugagcaccaagagaagccagcagaccgugauccccaacaucggcagcagacccagagugagagacgugagcagcagaaucagcaucuacuggaccaucgugaagcccggcgacauccugcugaucaacagcaccggcaaccugaucgcccccagaggcuacuucaagaucagaagcggcaagagcagcaucaugagaagcgacgcccccaucggcaagugcaacagcgagugcaucacccccaacggcagcauccccaacgacaagcccuuccagaacaucaacagaaucaccuacggcaccugccccagauacgugaagcagaacacccugaagcuggccaccggcaugagaaacgugcccgagaagcagaccagaggcaucuucggcgccaucgccggcuucaucgagaacggcugggagggcaugguggacggcugguacggcuucagacaccagaacagcgagggcaccggccaggccgccgaccugaagagcacccaggccgccaucaaccagaucaacggcaagcugaacagacugaucggcaagaccaacgagaaguuccaccagaucgagaaggaguucagcgagguggagggcagaauccaggaccuggagaaguacguggaggacaccaagaucgaccuguggagcuacaacgccgagcugcugguggcccuggagaaccagcacaccaucgaccugaccgacagcgagaugaacaagcuguucgagagaaccaagaagcagcugagagagaacgccgaggacaugggcaacggcugcuucaagaucuaccacaagugcgacaacgccugcaucggcagcaucagaaacggcaccuacgaccacgacguguacagagacgaggcccugaacaacagauuccagaucaagggcguggagcugaagagcggcuacaaggacuggauccuguggaucagcuucgccaucagcugcuuccugcugugcguggugcugcugggcuucaucaugugggccugccagaagggcaacaucagaugcaacaucugcaucuga

SEQ ID NO: 160287 - RNA, 1701 nt, Artificial Sequence
  derived and/or modified CDS sequence (opt4) from hemagglutinin__InfluenzaA__AAZ32949
augaagaccaucaucgcccugagcuacauccugugccugguguucgcccagaagcugcccggcaacgacaacagcaccgccacccugugccugggccaccacgccgugcccaacggcaccaucgugaagaccaucaccaacgaccagaucgaggugaccaacgccaccgagcuggugcagagcagcagcaccggcggcaucugcgacagcccccaccagauccuggacggcgagaacugcacccugaucgacgcccugcugggcgacccccagugcgacggcuuccagaacaagaagugggaccuguucguggagagaagcgaggccuacagcaacugcuaccccuacgacgugcccgacuacgccagccugagaagccugaucgccagcagcggcacccuggaguucaccaacgagagcuucaacuggaccggcgugacccagaacggcaccagcagcgccugcaagagaagaagcaacaagagcuucuucagcagacugaacuggcugacccaccugaaguacaaguaccccgcccugaacgugaccaugcccaacaacgagaaguucgacaagcuguacaucuggggcgugcaccaccccggcaccgacagcgaccagaucagccuguacgcccaggccagcggcagaaucaccgugagcaccaagagaagccagcagaccgugauccccaacaucggcagcagacccagagugagagacaucagcagcagaaucagcaucuacuggaccaucgugaagcccggcgacauccugcugaucaacagcaccggcaaccugaucgcccccagaggcuacuucaagaucagaagcggcaagagcagcaucaugagaagcgacgcccccaucggcaagugcaacagcgagugcaucacccccaacggcagcauccccaacgacaagcccuuccagaacaucaacagaaucaccuacggcgccugccccagauacgugaagcagaacacccugaagcuggccaccggcaugagaaacgugcccgagaagcagaccagaggcaucuucggcgccaucgccggcuucaucgagaacggcugggagggcaugguggacggcugguacggcuucagacaccagaacagcgagggcaccggccaggccgccgaccugaagagcacccaggccgccaucaaccagaucaacggcaagcugaacagacugaucggcaagaccaacgagaaguuccaccagaucgagaaggaguucagcgagguggagggcagaauccaggaccuggagaaguacguggaggacaccaagaucgaccuguggagcuacaacgccgagcugcugguggcccuggagaaccagcacaccaucgaccugaccgacagcgagaugaacaagcuguucgagagaaccaagaagcagcugagagagaacgccgaggacaugggcaacggcugcuucaagaucuaccacaagugcgacaacgccugcaucggcagcaucagaaacggcaccuacgaccacgacguguacagagacgaggcccugaacaacagauuccagaucaagggcguggagcugaagagcggcuacaaggacuggauccuguggaucagcuucgccaucagcugcuuccugcugugcguggugcugcugggcuucaucaugugggccugccagaagggcaacaucagaugcaacaucugcaucuga

SEQ ID NO: 160288 - RNA, 1701 nt, Artificial Sequence
  derived and/or modified CDS sequence (opt4) from hemagglutinin__InfluenzaA__AAZ32950
augaagaccaucaucgcccugagcuacauccugugccugguguucgcccagaagcugcccggcaacgacaacagcaccgccacccugugccugggccaccacgccgugcccaacggcaccaucgugaagaccaucaccaacgaccagaucgaggugaccaacgccaccgagcuggugcagagcagcagcaccggcggcaucugcgacagcccccaccagauccuggacggcgagaacugcacccugaucgacgcccugcugggcgacccccagugcgacggcuuccagaacaagaagugggaccuguucguggagagaagcgaggccuacagcaacugcuaccccuacgacgugcccgacuacgccagccugagaagccugaucgccagcagcggcacccuggaguucaccaacgagagcuucaacuggaccggcgugacccagaacggcaccagcagcgccugcaagagaagaagcaacaagagcuucuucagcagacugaacuggcugacccaccugaaguacaaguaccccgcccugaacgugaccaugcccaacaacgagaaguucgacaagcuguacaucuggggcgugcaccaccccggcaccgacagcgaccagaucagccuguacgcccaggccagcggcagaaucaccgugagcaccaagagaagccagcagaccgugauccccaacaucggcagcagacccagagugagagacgugagcagcagaaucagcaucuacuggaccaucgugaagcccggcgacauccugcugaucaacagcaccggcaaccugaucgcccccagaggcuacuucaagaucagaagcggcaagagcagcaucaugagaagcgacgcccccaucggcaagugcaacagcgagugcaucacccccaacggcagcauccccaacgacaagcccuuccagaacaucaacagaaucaccuacggcgccugccccagauacgugaagcagaacacccugaagcuggccaccggcaugagaaacgugcccgagaagcagaccagaggcaucuucggcgccaucgccggcuucaucgagaacggcugggagggcaugguggacggcugguacggcuucagacaccagaacagcgagggcaccggccaggccgccgaccugaagagcacccaggccgccaucaaccagaucaacggcaagcugaacagacugaucggcaagaccaacgagaaguuccaccagaucgagaaggaguucagcgagguggagggcagaauccaggaccuggagaaguacguggaggacaccaagaucgaccuguggagcuacaacgccgagcugcugguggcccuggagaaccagcacaccaucgaccugaccgacagcgagaugaacaagcuguucgagagaaccaaggagcagcugagagagaacgccgaggacaugggcaacggcugcuucaagaucuaccacaagugcgacaacgccugcaucggcagcaucagaaacggcaccuacgaccacgacguguacagagacgaggcccugaacaacagauuccagaucaagggcguggagcugaagagcggcuacaaggacuggauccuguggaucagcuucgccaucagcugcuuccugcugugcguggugcugcugggcuucaucaugugggccugccagaagggcaacaucagaugcaacaucugcaucuga

SEQ ID NO: 160289 - RNA, 1701 nt, Artificial Sequence
  derived and/or modified CDS sequence (opt4) from hemagglutinin__InfluenzaA__AAZ32951
augaagaccaucaucgcccugagcuacauccugugccugguguucgcccagaagauccccggcaacgacaacagcaccgccacccugugccugggccaccacgccgugcccaacggcacccuggugaagaccaucaccaacgaccagaucgaggugaccaacgccaccgagcuggugcagagcagcagcaccggcggcaucugcgacagcccccaccagauccuggacggcgagaacugcacccugaucgacgcccugcugggcgacccccacugcgacggcuuccagaacaagaagugggaccuguucguggagagaagcaaggccuacagcaacugcuaccccuacgacgugcccgacuacgccagccugagaagccugguggccagcagcggcacccuggaguucaacaacgagagcuucaacuggaccggcgugacccagaacggcaccagcagcgccugcaagagaagaagcaacaagagcuucuucagcagacugaacuggcugcaccagcugaaguacaaguaccccgcccugaacguggccaugcccaacaacgagaaguucgacaagcuguacaucuggggcgugcaccaccccggcaccgacagcgaccagaucagccuguacgcccaggccagcggcagaaucaccgugagcaccaagagaagccagcagaccgugauccccaacaucggcagcagacccagagugagagacaucagcagcagaaucagcaucuacuggaccaucgugaagcccggcgacauccugcugaucaacagcaccggcaaccugaucgcccccagaggcuacuucaagaucagaagcggcaagagcagcaucaugagaagcgacgcccccaucggcaagugcaacagcgagugcaucacccccaacggcagcauccccaacgacaagcccuuccagaacgugaacagaaucaccuacggcgccugccccagauacgugaagcagaacacccugaagcuggccaccggcaugagaaacgugcccgagaagcagaccagaggcaucuucggcgccaucgccggcuucaucgagaacggcugggagggcaugguggacggcugguacggcuucagacaccagaacagcgagggcaccggccaggccgccgaccugaagagcacccaggccgccaucaaccagaucaacggcaagcugaacagacugaucggcaagaccaacgagaaguuccaccagaucgagaaggaguucagcgagguggagggcagaauccaggaccuggagaaguacguggaggacaccaagaucgaccuguggagcuacaacgccgagcugcugguggcccuggagaaccagcacaccaucgaccugaccgacagcgagaugaacaagcuguucgagagaaccaagaagcagcugagagagaacgccgaggacaugggcaacggcugcuucaagaucuaccacaagugcgacaacgccugcaucggcagcaucagaaacggcaccuacgaccacgacguguacagagacgaggcccugaacaacagauuccagaucaagggcguggagcugaagagcggcuacaaggacuggauccuguggaucagcuucgccaucagcugcuuccugcugugcguggcccugcugggcuucaucaugugggccugccagaagggcaacaucagaugcaacaucugcaucuga

SEQ ID NO: 160290 - RNA, 1701 nt, Artificial Sequence
  derived and/or modified CDS sequence (opt4) from hemagglutinin__InfluenzaA__AAZ32952
augaagaccaucaucgcccugagcuacauccugugccugguguucgcccagaagauccccggcaacgacaacagcaccgccacccugugccugggccaccacgccgugcccaacggcacccuggugaagaccaucaccaacgaccagaucgaggugaccaacgccaccgagcuggugcagagcagcagcaccggcggcaucugcgacagcccccaccagauccuggacggcgagaacugcacccugaucgacgcccugcugggcgacccccacugcgacggcuuccagaacaagaagugggaccuguucguggagagaagcaaggccuacagcaacugcuaccccuacgacgugcccgacuacgccagccugagaagccugguggccagcagcggcacccuggaguucaacaacgagagcuucaacuggaccggcgugacccagaacggcaccagcagcgccugcaagagaagaagcaacaagagcuucuucagcagacugaacuggcugcaccagcugaaguacaaguaccccgcccugaacguggccaugcccaacaacgagaaguucgacaagcuguacaucuggggcgugcaccaccccggcaccgacagcgaccagaucagccuguacgcccaggccagcggcagaaucaccgugagcaccaagagaagccagcagaccgugauccccaacaucggcagcagacccagagugagagacgugagcagcagaaucagcaucuacuggaccaucgugaagcccggcgacauccugcugaucaacagcaccggcaaccugaucgcccccagaggcuacuucaagaucagaagcggcaagagcagcaucaugagaagcgacgcccccaucggcaagugcaacagcgagugcaucacccccaacggcagcauccccaacgacaagcccuuccagaacgugaacaagaucaccuacggcgccugccccagauacgugaagcagaacacccugaagcuggccaccggcaugagaaacgugcccgagaagcagaccagaggcaucuucggcgccaucgccggcuucaucgagaacggcugggagggcaugguggacggcugguacggcuucagacaccagaacagcgagggcaccggccaggccgccgaccugaagagcacccaggccgccaucaaccagaucaacggcaagcugaacagacugaucggcaagaccaacgagaaguuccaccagaucgagaaggaguucagcgagguggagggcagaauccaggaccuggagaaguacguggaggacaccaagaucgaccuguggagcuacaacgccgagcugcugguggcccuggagaaccagcacaccaucgaccugaccgacagcgagaugaacaagcuguucgagagaaccaagaagcagcugagagagaacgccgaggacaugggcaacggcugcuucaagaucuaccacaagugcgacaacgccugcaucggcagcaucagaaacggcaccuacgaccacgacguguacagagacgaggcccugaacaacagauuccagaucaagggcguggagcugaagagcggcuacaaggacuggauccuguggaucagcuucgccaucagcugcuuccugcugugcguggcccugcugggcuucaucaugugggccugccagaagggcaacaucagaugcaacaucugcaucuga

SEQ ID NO: 160291 - RNA, 1701 nt, Artificial Sequence
  derived and/or modified CDS sequence (opt4) from hemagglutinin__InfluenzaA__AAZ32953
augaagaccaucaucgcccugagcuacauccugugccugguguucgcccagaagauccccggcaacgacaacagcaccgccacccugugccugggccaccacgccgugcccaacggcacccuggugaagaccaucaccaacgaccagaucgaggugaccaacgccaccgagcuggugcagagcagcagcaccggcggcaucugcgacagcccccaccagauccuggacggcgagaacugcacccugaucgacgcccugcugggcgacccccacugcgacggcuuccagaacaagaagugggaccuguucguggagagaagcaaggccuacagcaacugcuaccccuacgacgugcccgacuacgccagccugagaagccugguggccagcagcggcacccuggaguucaacaacgagagcuucaacuggaccggcgugacccagaacggcaccagcagcgccugcaagagaagaagcaacaagagcuucuucagcagacugaacuggcugcaccagcugaaguacaaguaccccgcccugaacguggccaugcccaacaacgagaaguucgacaagcuguacaucuggggcgugcaccaccccggcaccgacagcgaccagaucagccuguacgcccaggccagcggcagaaucaccgugagcaccaagagaagccagcagaccgugauccccaacaucggcagcagacccagagugagagacgugagcagcagaaucagcaucuacuggaccaucgugaagcccggcgacauccugcugaucaacagcaccggcaaccugaucgcccccagaggcuacuucaagaucagaagcggcaagagcagcaucaugagaagcgacgcccccaucggcaagugcaacagcgagugcaucacccccaacggcagcauccccaacgacaagcccuuccagaacgugaacagaaucaccuacggcgccugccccagauacgugaagcagaacacccugaagcuggccaccggcaugagaaacgugcccgagaagcagaccagaggcaucuucggcgccaucgccggcuucaucgagaacggcugggagggcaugguggacggcugguacggcuucagacaccagaacagcgagggcaccggccaggccgccgaccugaagagcacccaggccgccaucaaccagaucaacggcaagcugaacagacugaucggcaagaccaacgagaaguuccaccagaucgagaaggaguucagcgagguggagggcagaauccaggaccuggagaaguacguggaggacaccaagaucgaccuguggagcuacaacgccgagcugcugguggcccuggagaaccagcacaccaucgaccugaccgacagcgagaugaacaagcuguucgagagaaccaagaagcagcugagagagaacgccgaggacaugggcaacggcugcuucaagaucuaccacaagugcgacaacgccugcaucggcagcaucagaaacggcaccuacgaccacgacguguacagagacgaggcccugaacaacagauuccagaucaagggcguggagcugaagagcggcuacaaggacuggauccuguggaucagcuucgccaucagcugcuuccugcugugcguggcccugcugggcuucaucaugugggccugccagaagggcaacaucagaugcaacaucugcaucuga

SEQ ID NO: 160292 - RNA, 1701 nt, Artificial Sequence
  derived and/or modified CDS sequence (opt4) from hemagglutinin__InfluenzaA__AAZ38462
augaagaccaucaucgcccugagcuacauccugugccugguguucgcccagaagcugcccggcaacgacaacagcaccgccacccugugccugggccaccacgccgugcccaacggcacccuggugaagaccaucaccagcgaccagaucgaggugaccaacgccaccgagcuggugcagagcagcagcaccggcagaaucugcgacagcccccacagaauccuggacggcgagaacugcacccugaucgacgcccugcugggcgacccccacugcgacggcuuccagaacaaggagugggaccuguucguggagagaagcaaggccuacagcaacugcuaccccuacgacgugcccgacuacgccagccugagaagccugguggccagcagcggcacccuggaguucaacaacgagagcuucaacuggaccggcguggcccagaacggcaccagcuucgccugcaagagaagaagcaucaagagcuucuucagcagacugaacuggcugcaccagcugaaguacaaguaccccgcccugaacgugaccaugcccaacaacgacaaguucgacaagcuguacaucuggggcgugcacuaccccggcaccgacagcgaccagaccagccuguacgcccaggccagcggcagagugaccgugagcaccaagagaagccagcagaccgugauccccaacaucggcagcagacccugggugagaggcgugagcagcagaaucagcaucuacuggaccaucgugaagcccggcgacauccugcugaucaacagcaccggcaaccugaucgcccccagaggcuacuucaagaucagaagcggcaagagcagcaucaugagaagcgacgcccccaucggcaagugcaacagcgagugcaucacccccaacggcagcauccccaacggcaagcccuuccagaacgugaacagaaucaccuacggcgccugccccagauacgugaagcagaacacccugaagcuggccaccggcaugagaaacgugcccgagaagcagaccagaggcaucuucggcgccaucgccggcuucaucgagaacggcugggagggcaugguggacggcugguacggcuucagacaccagaacagcgagggcaccggccaggccgccgaccugaagagcacccaggccgccaucaaccagaucaacggcaagcugaacagacugaucgagaagaccaacgagaaguuccaccagaucgagaaggaguucaccgagguggagggcagaauccaggaccuggagaaguacguggaggacaccaagaucgaccuguggagcuacaacgccgagcugcugguggcccuggagaaccagcacaccaucgaccugaccgacagcgagaugaacaagcuguucgagagaaccagaagacagcugagagagaacgccgaggacaugggcaacggcugcuucaagaucuaccacaagugcgacaacgccugcaucggcagcaucagaaacggcaccuacgaccacgacguguacagagacgaggcccugaacaacagauuccagaucaagggcguggagcugaagagcggcuacaaggacuggauccuguggaucagcuucgccaccagcugcuuccugcugugcguggugcugcugggcuucaucaugugggccugccagaagggcaacaucagaugcaacaucugcaucuga

SEQ ID NO: 160293 - RNA, 1701 nt, Artificial Sequence
  derived and/or modified CDS sequence (opt4) from hemagglutinin__InfluenzaA__AAZ38473
augaagaccaucaucgcccugagcuacauccugugccugguguucgcccagaagcugcccggcaacgacaacagcaccgccacccugugccugggccaccacgccgugcccaacggcacccuggugaagaccaucaccagcgaccagaucgaggugaccaacgccaccgagcuggugcagagcagcagcaccggcagaaucugcgacagcccccacagaauccuggacggcgagaacugcacccugaucgacgcccugcugggcgacccccacugcgacggcuuccagaacaaggagugggaccuguucguggagagaagcaaggccuacagcaacugcuaccccuacgacgugcccgacuacgccagccugagaagccugguggccagcagcggcacccuggaguucaacaacgagagcuucaacuggaccggcguggcccagaacggcaccagcuucaccugcaagagaagaagcaucaagagcuucuucagcagacugaacuggcugcaccagcugaaguacaaguaccccgcccugaacgugaccaugcccaacaacgacaaguucgacaagcuguacaucuggggcgugcaccaccccagcaccgacagcgaccagaccagccuguacgcccaggccagcggcagagugaccgugagcaccaagagaagccagcagaccgugauccccaacaucggcagcagacccugggugagaggcgugagcagcagaaucagcaucuacuggaccaucgugaagcccggcgacauccugcugaucaacagcaccggcaaccugaucgcccccagaggcuacuucaagaucagaagcggcaagagcagcaucaugaagagcgacgcccccaucggcaagugcaacagcgagugcaucacccccaacggcagcauccccaacgacaagcccuuccagaacgugaacagaaucaccuacggcgccugccccagauacgugaagcagaacacccugaagcuggccaccggcaugagaaacgugcccgagaagcagaccagaggcaucuucggcgccaucgccggcuucaucgagaacggcugggagggcaugguggacggcugguacggcuucagacaccagaacagcgagggcaccggccaggccgccgaccugaagagcacccaggccgccaucaaccagaucaacggcaagcugaacagacugaucgagaagaccaacgagaaguuccaccagaucgagaaggaguucaccgagguggagggcagaauccaggaccuggagaaguacguggaggacaccaagaucgaccuguggagcuacaacgccgagcugcugguggcccuggagaaccagcacaccaucgaccugaccgacagcgagaugaacaagcuguucgagagaaccagaaagcagcugagagagaacgccgaggacaugggcaacggcugcuucaagaucuaccacaagugcgacaacgugugcaucggcagcaucagaaacggcaccuacgaccacgacguguacagagacgaggcccugaacaacagauuccagaucaagggcguggagcugaagagcggcuacaaggacuggauccuguggaucagcuucgccaccagcugcuuccugcugugcguggugcugcugggcuucaucaugugggccugccagaagggcaacaucagaugcaacaucugcaucuga

SEQ ID NO: 160294 - RNA, 1701 nt, Artificial Sequence; identical to SEQ ID NO: 160246
  derived and/or modified CDS sequence (opt4) from hemagglutinin__InfluenzaA__AAZ38484

SEQ ID NO: 160295 - RNA, 1701 nt, Artificial Sequence
  derived and/or modified CDS sequence (opt4) from hemagglutinin__InfluenzaA__AAZ38495
augaagaccaucaucgcccugagcuacauccugugccugguguucgcccagaagcugcccggcaacgacaacagcaccgccacccugugccugggccaccacgccgugcccaacggcacccuggugaagaccaucaccaacgaccagaucgaggugaccaacgccaccgagcuggugcagagcagcagcaccggcagaaucugcgacagcccccaccagauccuggacggcgagaacugcacccugaucgacgcccugcugggcgacccccacugcgacggcuuccagaacaaggagugggaccuguucguggagagaagcaaggccuacagcaacugcuaccccuacgacgugcccgacuacgccagccugagaagccugguggccagcagcggcacccuggaguucaacaacgagagcuucaacuggaccggcguggcccagaacggcaccagcagcgccugcaagagaagaagcaacaagagcuucuucagcagacugaacuggcugcaccagcugaaguacaaguaccccgcccugaacgugaccaugcccaacaacgagaaguucgacaagcuguacaucuggggcgugcaccaccccagcaccgacagcgaccagaucagccuguacgcccaggccagcggcagagugaccgugagcaccaagagaagccagcagaccgugauccccaacaucggcagcagacccugggugagaggcgugagcagcaagaucagcaucuacuggaccaucgugaagcccggcgacauccugcugaucaacagcaccggcaaccugaucgcccccagaggcuacuucaagaucagaagcggcaagagcagcaucaugagaagcgacgcccccaucggcaagugcaacagcgagugcaucacccccaacggcagcauccccaacgacaagcccuuccagaacgugaacagaaucaccuacggcgccugccccagauacgugaagcagaacacccugaagcuggccaccggcaugagaaacgugcccgagaagcagaccagaggcaucuucggcgccaucgccggcuucaucgagaacggcugggagggcaugguggacggcugguacggcuucagacaccagaacagcgagggcaccggccaggccgccgaccugaagagcacccaggccgccaucaaccagaucaacggcaagcugaacagacugaucgagaagaccaacgagaaguuccaccagaucgagaaggaguucagcgagguggagggcagaauccaggaccuggagaaguacguggaggacaccaagaucgaccuguggagcuacaacgccgagcugcugguggcccuggagaaccagcacaccaucgaccugaccgacagcgagaugaacaagcuguucgagagaaccaagaagcagcugagagagaacgccgaggacaugggcaacggcugcuucaagaucuaccacaagugcgacaacgccugcaucggcagcaucagaaacggcaccuacgaccacgacguguacagagacgaggcccugaacaacagauuccagaucaagggcguggagcugaagagcggcuacaaggacuggauccuguggaucagcuucgccaucagcugcuuccugcugugcguggugcugcugggcuucaucaugugggccugccagaagggcaacaucagaugcaacaucugcaucuga

SEQ ID NO: 160296 - RNA, 1701 nt, Artificial Sequence
  derived and/or modified CDS sequence (opt4) from hemagglutinin__InfluenzaA__AAZ38517
augaagaccaucaucgcccugagcuacauccugugccugguguucgcccagaagcugcccggcaacgacaacagcaccgccacccugugccugggccaccacgccgugcccaacggcaccaucgugaagaccaucaccaacgaccagaucgaggugaccaacgccaccgagcuggugcagagcagcagcaccggcggcaucugcgacagcccccaccagauccuggacggcgagaacugcacccugaucgacgcccugcugggcgacccccagugcgacggcuuccagaacaagaagugggaccuguucguggagagaagcaaggccuacagcaacugcuaccccuacgacgugcccgacuacgccagccugagaagccugguggccagcagcggcacccuggaguucaacaacgagagcuucaacuggaccggcgugacccagaacggcaccagcagcgccugcaagagaagaagcaacaacagcuucuucagcagacugaacuggcugacccaccugaaguucaaguaccccgcccugaacgugaccaugcccaacaacgagaaguucgacaagcuguacaucuggggcgugcaccaccccggcaccgacaacgaccagaucagccuguacgcccaggccagcggcagaaucaccgugagcaccaagagaagccagcagaccgugauccccaacaucggcagcagacccagagugagagacauccccagcagaaucagcaucuacuggaccaucgugaagcccggcgacauccugcugaucaacagcaccggcaaccugaucgcccccagaggcuacuucaagaucagaagcggcaagagcagcaucaugagaagcgacgcccccaucggcaagugcaacagcgagugcaucacccccaacggcagcauccccaacgacaagcccuuccagaacgugaacagaaucaccuacggcgccugccccagauacgugaagcagaacacccugaagcuggccaccggcaugagaaacgugcccgagaagcagaccagaggcaucuucggcgccaucgccggcuucaucgagaacggcugggagggcaugguggacggcugguacggcuucagacaccagaacagcgagggcaucggccaggccgccgaccugaagagcacccaggccgccaucaaccagaucaacggcaagcugaacagacugaucggcaagaccaacgagaaguuccaccagaucgagaaggaguucagcgagguggagggcagaauccaggaccuggagaaguacguggaggacaccaagaucgaccuguggagcuacaacgccgagcugcugguggcccuggagaaccagcacaccaucgaccugaccgacagcgagaugaacaagcuguucgagagaaccaagaagcagcugagagagaacgccgaggacaugggcaacggcugcuucaagaucuaccacaagugcaacaacgccugcaucggcagcaucagaaacggcaccuacgaccacgacguguacagagacgaggcccugaacaacagauuccagaucaagggcguggagcugaagagcggcuacaaggacuggauccuguggaucagcuucgccaucagcugcuuccugcugugcguggugcugcugggcuucaucaugugggccugccagaagggcaacaucagaugcaacaucugcaucuga

SEQ ID NO: 160297 - RNA, 1701 nt, Artificial Sequence
  derived and/or modified CDS sequence (opt4) from hemagglutinin__InfluenzaA__AAZ38539
augaagaccaucaucgcccugagcuacauccugugccugguguucgcccagaagcugcccggcaacgacaacagcaccgccacccugugccugggccaccacgccgugcccaacggcacccuggugaagaccaucaccaacgaccagaucgaggugaccaacgccaccgagcuggugcagagcagcagcaccggcagaaucugcgacagcccccaccagauccuggacggcgagaacugcacccugaucgacgcccugcugggcgacccccacugcgacggcuuccagaacaaggagugggaccuguucguggagagaagcaaggccuacagcaacugcuaccccuacgacgugcccgacuacgugagccugagaagccugguggccagcagcggcacccuggaguucaacaacgagagcuucaacuggaccggcguggcccagaacggcaccagcagcgccugcaagagaagaagcgacaagagcuucuucagcagacugaacuggcugcaccagcugaaguacaaguaccccgcccugaacgugaccaugcccaacaacgagaaguucgacaagcuguacaucuggggcgugcaccaccccggcaccgacagcgaccagaucagccuguacgcccaggccagcggcagagugaccgugagcaccaagagaagccagcagaccgugauccccaacaucggcagcagacccugggugagaggcgugagcagcaagaucagcaucuacuggaccaucgugaagcccggcgacaucuuccugaucaacagcaccggcaaccugaucgcccccagaggcuacuucaagaucagaagcggcaagagcagcaucaugagaagcgacgcccccaucggcaagugcaacagcgagugcaucacccccaacggcagcauccccaacgacaagcccuuccagaacgugaacagaaucaccuacggccccugccccagauacgugaagcagaacacccugaagcuggccaccggcaugagaaacgugcccgagaagcagaccagaggcaucuucggcgccaucgccggcuucaucgagaacggcugggagggcaugauggacggcugguacggcuucagacaccagaacagcgagggcaccggccaggccgccgaccugaagagcacccaggccgccaucaaccagaucaacggcaagcugaacagacugaucgagaagaccaacgagaaguuccaccagaucgagaaggaguucagcgagguggagggcagaauccaggaccuggagaaguacguggaggacaccaagaucgaccuguggagcuacaacgccgagcugcugguggcccuggagaaccagcacaccaucgaccugaccgacagcgagaugaacaagcuguucgagagaaccaagaagcagcugagagagaacgccgaggacaugggcaacggcugcuucaagaucuaccacaagugcgacaacgccugcaucggcagcaucagaaacggcaccuacgaccacgacguguacagagacgaggcccugaacaacagauuccagaucaagggcguggagcugaagagcggcuacaaggacuggauccuguggaucagcuucgccaucagcugcuuccugcugugcaucgugcugcugggcuucaucaugugggccugccagaagggcaacaucagaugcaacaucugcaucuga

SEQ ID NO: 160298 - RNA, 1701 nt, Artificial Sequence; identical to SEQ ID NO: 160246
  derived and/or modified CDS sequence (opt4) from hemagglutinin__InfluenzaA__AAZ38561

SEQ ID NO: 160299 - RNA, 1701 nt, Artificial Sequence
  derived and/or modified CDS sequence (opt4) from hemagglutinin__InfluenzaA__AAZ38583
augaagaccaucaucgcccugagcuacauccugugccugguguucgcccagaagauccccggcaacgacaacagcaccgccacccugugccugggccaccacgccgugcccaacggcaccaucgugaagaccaucaccaacgaccagaucgaggugaccaacgccaccgagcuggugcagagcagcagcaccggcggcaucugcgacagcccccaccagauccuggacggcgagaacugcacccugaucgacgcccugcugggcgacccccagugcgacggcuuccagaacaagaagugggaccuguucguggagagaagcaaggccuacagcaacugcuaccccuacgacgugcccgacuacgccagccugagaagccugguggccagcagcggcacccuggaguucaacaacgagagcuucaacuggaccggcgugacccagaacggcaccagcagcgccugcaagagaagaagcaacaacagcuucuucagcagacugaacuggcugacccaccugaaguucaaguaccccgcccugaacgugaccaugcccaacaacgagaaguucgacaagcuguacaucuggggcgugcaccaccccggcaccaacaacgaccagaucagccuguacgcccaggccagcggcagaaucaccgugagcaccaagagaagccagcagaccgugauccccaacaucggcagcagacccagagugagagacauccccagcagaaucagcaucuacuggaccaucgugaagcccggcgacauccugcugaucaacagcaccggcaaccugaucgcccccagaggcuacuucaagaucagaagcggcaagagcagcaucaugagaagcgacgcccccaucggcaagugcaacagcgagugcaucacccccaacggcagcauccccaacgacaagcccuuccagaacgugaacagaaucaccuacggcgccugccccagauacgugaagcagaacacccugaagcuggccaccggcaugagaaacgugcccgagaagcagaccagaggcaucuucggcgccaucgccggcuucaucgagaacggcugggagggcaugguggacggcugguacggcuucagacaccagaacagcgagggcaucggccaggccgccgaccugaagagcacccaggccgccaucaaccagaucaacggcaagcugaacagacugaucggcaagaccaacgagaaguuccaccagaucgagaaggaguucagcgagguggagggcagaauccaggaccuggagaaguacguggaggacaccaagaucgaccuguggagcuacaacgccgagcugcugguggcccuggagaaccagcacaccaucgaccugaccgacagcgagaugaacaagcuguucgagagaaccaagaagcagcugagagagaacgccgaggacaugggcaacggcugcuucaagaucuaccacaagugcgacaacgccugcaucggcagcaucagaaacggcaccuacgaccacgacguguacagagacgaggcccugaacaacagauuccagaucaagggcguggagcugaagagcggcuacaaggacuggaucaucuggaucagcuucgccaucagcugcuuccugcugugcguggcccugcugggcuucaucaugugggccugccagaagggcaacaucagaugcaacaucugcaucuga

SEQ ID NO: 160300 - RNA, 1701 nt, Artificial Sequence
  derived and/or modified CDS sequence (opt4) from hemagglutinin__InfluenzaA__AAZ38594
augaagaccaucaucgcccugagcuacauccugugccugguguucgcccagaagcugcccggcaacgacaacagcaccgccacccugugccugggccaccacgccgugcccaacggcaccaucgugaagaccaucaccaacgaccagaucgaggugaccaacgccaccgagcuggugcagagcagcagcaccggcggcaucugcgacagcccccaccagauccuggacggcgagaacugcacccugaucgacgcccugcugggcgacccccagugcgacggcuuccagaacaagaagugggaccuguucguggagagaagcaaggccuacagcaacugcuaccccuacgacgugcccgacuacgccagccugagaagccugguggccagcagcggcacccuggaguucaacaacgagagcuucaacuggaccggcgugacccagaacggcaccagcagcgccugcaagagaagaagcaacagcagcuucuucagcagacugaacuggcugacccaccugaaguucaaguaccccgcccugaacgugaccaugcccaacaacgagaaguucgacaagcuguacaucuggggcgugcaccaccccggcaccgacaacgaccagaucagccuguacgcccaggccagcggcagaaucaccgugagcaccaagagaagccagcagaccgugauccccaacaucggcagcagacccagagugagagacauccccagcagaaucagcaucuacuggaccaucgugaagcccggcgacauccugcugaucaacagcaccggcaaccugaucgcccccagaggcuacuucaagaucagaagcggcaagagcagcaucaugagaagcgacgcccccaucggcaagugcaacagcgagugcaucacccccaacggcagcauccccaacgacaagcccuuccagaacgugaacagaaucaccuacggcgccugccccagauacgugaagcagaacacccugaagcuggccaccggcaugagaaacgugcccgagaagcagaccagaggcaucuucggcgccaucgccggcuucaucgagaacggcugggagggcaugguggacggcugguacggcuucagacaccagaacagcgagggcaucggccaggccgccgaccugaagagcacccaggccgccaucaaccagaucaacggcaagcugaacagacugaucggcaagaccaacgagaaguuccaccagaucgagaaggaguucagcgagguggagggcagaauccaggaccuggagaaguacguggaggacaccaagaucgaccuguggagcuacaacgccgagcugcugguggcccuggagaaccagcacaccaucgaccugaccgacagcgagaugaacaagcuguucgagagaaccaagaagcagcugagagagaacgccgaggacaugggcaacggcugcuucaagaucuaccacaagugcgacaacgccugcaucggcagcaucagaaacggcaccuacgaccacgacguguacagagacgaggcccugaacaacagauuccagaucaagggcguggagcugaagagcggcuacaaggacuggauccuguggaucagcuucgccaucagcugcuuccugcugugcguggcccugcugggcuucaucaugugggccugccagaagggcaacaucagaugcaacaucugcaucuga

SEQ ID NO: 160301 - RNA, 1701 nt, Artificial Sequence
  derived and/or modified CDS sequence (opt4) from hemagglutinin__InfluenzaA__AAZ38605
augaagaccaucaucgcccugagcuacauccugugccugguguucacccagaagcugcccggcaacgacaacagcaccgccacccugugccugggccaccacgccgugcccaacggcaccaucgugaagaccaucaccaacgaccagaucgaggugaccaacgccaccgagcuggugcagagcagcagcaccggcggcaucugcgacagcccccaccagauccuggacggcgagaacugcacccugaucgacgcccugcugggcgacccccagugcgacggcuuccagaacaagaagugggaccuguucguggagagaagcaaggccuacagcaacugcuaccccuacgacgugcccgacuacgccagccugagaagccugguggccagcagcggcacccuggaguucaacaacgagagcuucaacuggaccggcgugacccagaacggcaccagcagcgccugcaagagaagaagcaacaacagcuucuucagcagacugaacuggcugacccaccugaaguucaaguaccccgcccugaacgugaccaugcccaacaacgagaaguucgacaagcuguacaucuggggcgugcaccaccccggcaccgacaacgaccagaucagccuguacgcccaggccagcggcagaaucaccgugagcaccaagagaagccagcagaccgugauccccagcaucggcagcagacccagaaucagagacgugcccagcagaaucagcaucuacuggaccaucgugaagcccggcgacauccugcugaucaacagcaccggcaaccugaucgcccccagaggcuacuucaagaucagaagcggcaagagcagcaucaugagaagcgacgcccccaucggcaagugcaacagcgagugcaucacccccaacggcagcauccccaacgacaagcccuuccagaacgugaacagaaucaccuacggcgccugccccagauacgugaagcagaacacccugaagcuggccaccggcaugagaaacgugcccgagaagcagaccagaggcaucuucggcgccaucgccggcuucaucgagaacggcugggagggcaugguggacggcugguacggcuucagacaccagaacagcgagggcaccggccaggccgccgaccugaagagcacccaggccgccaucaaccagaucaacggcaagcugaacagacugaucggcaagaccaacgagaaguuccaccagaucgagaaggaguucagcgagguggagggcagaauccaggaccuggagaaguacguggaggacaccaagaucgaccuguggagcuacaacgccgagcugcugguggcccuggagaaccagcacaccaucgaccugaccgacagcgagaugaacaagcuguucgagagaaccaagaagcagcugagagagaacgccgaggacaugggcaacggcugcuucaagaucuaccacaagugcgacaacgccugcaucggcagcaucagaaacggcaccuacgaccacgacguguacagagacgaggcccugaacaacagauuccagaucaagggcguggagcugaagagcggcuacaaggacuggauccuguggaucagcuucgccaucagcugcuuccugcugugcguggcccugcugggcuucaucaugugggccugccagaagggcaacaucagaugcaacaucugcaucuga

SEQ ID NO: 160302 - RNA, 1698 nt, Artificial Sequence
  derived and/or modified CDS sequence (opt4) from hemagglutinin__InfluenzaA__AAZ38627
augaaggccaagcugcuggugcugcugugcaccuucaccgccaccuacgccgacaccaucugcaucggcuaccacgccaacaacagcaccgacaccguggacaccgugcuggagaagaacgugaccgugacccacagcgugaaccugcuggaggacagccacaacggcaagcugugccugcugaagggcaucgccccccugcagcugggcaacugcagcguggccggcuggauccugggcaaccccgagugcgagcugcugaucagcaaggagagcuggagcuacaucguggagacccccaaccccgagaacggcaccugcuaccccggcuacuucgccgacuacgaggagcugagagagcagcugagcagcgugagcagcuucgagagauucgagaucuuccccaagggcagcagcuggcccaaccacaccgugaccggcgugagcgccagcugcagccacaacggcaagagcagcuucuacagaaaccugcuguggcugaccggcaagaacggccuguaccccaaccugagcaugagcuacgugaacaacaaggagaaggaggugcuggugcuguggggcgugcaccacccccccaacaucggcgaccagagagcccuguaccacaccgagaacgccuacgugagcguggugagcagccacuacagcagaagauucacccccgagaucgccaagagacccaaggugagagaccaggagggcagaaucaacuacuacuggacccugcuggagcccggcgacaccaucaucuucgaggccaacggcaaccugaucgcccccugguacgccuucgcccugagcagaggcuucggcagcggcaucaucaccagcaacgcccccauggacgagugcgacgccaagugccagaccccccagggcgccaucaacagcagccugcccuuccagaacgugcaccccgugaccaucggcgagugccccaaguacgugagaagcgccaagcugagaauggccaccggccugagaaacauccccagcauccagagcagaggccuguucggcgccaucgccggcuucaucgagggcggcuggaccggcaugguggacggcugguacggcuaccaccaccagaacgagcagggcagcggcuacgccgccgaccagaagagcacccagaacgccaucaacggcaucaccaacaaggugaacagcgugaucgagaagaugaacacccaguucaccgccgugggcaaggaguucaacaagcuggagagaagaauggagaaccugaacaagaagguggacgacggcuuccuggacaucuggaccuacaacgccgagcugcuggugcugcuggagaacgagagaacccuggacuuccacgacagcaacgugaagaaccuguacgagaaggugaagagccagcugaagaacaacgccaaggagaucggcaacggcugcuucgaguucuaccacaagugcaacaacgagugcauggagagcgugaagaacggcaccuacgacuaccccaaguacagcgaggagagcaagcugaacagagagaagaucgacggcgugaagcuggagagcaugggcguguaccagauccuggccaucuacagcaccguggccagcagccuggugcugcuggugagccugggcgccaucagcuucuggaugugcagcaacggcagccugcagugcagaaucugcaucuga

SEQ ID NO: 160303 - RNA, 1701 nt, Artificial Sequence
  derived and/or modified CDS sequence (opt4) from hemagglutinin__InfluenzaA__AAZ38638
augaagaccaucaucgcccugagcuacauccugugccugguguucgcccagaagcugcccggcaacgacaacagcaccgccacccugugccugggccaccacgccgugcccaacggcaccaucgugaagaccaucaccaacgaccagaucgaggugaccaacgccaccgagcuggugcagagcagcagcaccggcggcaucugcgacagcccccaccagauccuggacggcgagaacugcacccugaucgacgcccugcugggcgacccccagugcgacggcuuccagaacaagaagugggaccuguucguggagagaagcaaggccuacagcaacugcuaccccuacgacgugcccgacuacgccagccugagaagccugguggccagcagcggcacccuggaguucaacaacgagagcuucaacuggaccggcgugacccagaacggcaccagcagcgccugcaagagaagaagcaacaacagcuucuucagcagacugaacuggcugacccaccugaaguucaaguaccccgcccugaacgugaccaugcccaacaacgagaaguucgacaagcuguacaucuggggcgugcaccaccccggcaccgacaacgaccagaucagccuguacgcccaggccagcggcagaaucaccgugagcaccaagagaagccagcagaccgugauccccaacaucggcagcagacccagagugagagacauccccagcagaaucagcaucuacuggaccaucgugaagcccggcgacauccugcugaucaacagcaccggcaaccugaucgcccccagaggcuacuucaagaucagaagcggcaagagcagcaucaugagaagcgacgcccccaucggcaagugcaacagcgagugcaucacccccaacggcagcauccccaacgacaagcccuuccagaacgugaacagaaucaccuacggcgccugccccagauacgugaagcagaacacccugaagcuggccaccggcaugagaaacgugcccgagaagcagaccagaggcaucuucggcgccaucgccggcuucaucgagaacggcugggagggcaugguggacggcugguacggcuucagacaccagaacagcgagggcaucggccaggccgccgaccugaagagcacccaggccgccaucaaccagaucaacggcaagcugaacagacugaucggcaagaccaacgagaaguuccaccagaucgagaaggaguucagcgagguggagggcagaauccaggaccuggagaaguacguggaggacaccaagaucgaccuguggagcuacaacgccgagcugcugguggcccuggagaaccagcacaccaucgaccugaccgacagcgagaugaacaagcuguucgagagaaccaagaagcagcugagagagaacgccgaggacaugggcaacggcugcuucaagaucuaccacaagugcgacaacgccugcaucggcagcaucagaaacggcaccuacgaccacgacguguacagagacgaggcccugaacaacagauuccagaucaagggcguggagcugaagagcggcuacaaggacuggauccuguggaucagcuucgccaucagcugcuuccugcugugcguggcccugcugggcuucaucaugugggccugccagaagggcaacaucagaugcaacaucugcaucuga

SEQ ID NO: 160304 - RNA, 1701 nt, Artificial Sequence; identical to SEQ ID NO: 160303
  derived and/or modified CDS sequence (opt4) from hemagglutinin__InfluenzaA__AAZ38650

SEQ ID NO: 160305 - RNA, 1701 nt, Artificial Sequence
  derived and/or modified CDS sequence (opt4) from hemagglutinin__InfluenzaA__AAZ43370
augaagaccaucaucgcccugagcuacaucuucugccugguguucgcccagaagcugcccggcaacgacaacagcaccgccacccugugccugggccaccacgccgugcccaacggcacccuggugaagaccaucaccaacgaccagaucgaggugaccaacgccaccgagcuggugcagagcagcagcaccggcagaaucugcgacagcccccacagaauccuggacggcaagaacugcacccugaucgacgcccugcugggcgacccccacugcgacggcuuccagaacgagaagugggaccuguucaucgagagaagcaaggccuucagcaacugcuaccccuacgacgugcccgacuacgccagccugagaagccugguggccagcagcggcacccuggaguucaucaacgagggcuucaacuggaccggcgugacccagagcggcggcagcuacgccugcaagagaggcagcgugaagagcuucuucagcagacugaacuggcuguacgagagcgaguacaaguaccccgcccugaacgugaccaugcccaacaacggcaaguucgacaagcuguacaucuggggcgugcaccaccccagcaccgagaaggagcagaccaaccuguacgugagagccagcggcagagugaccgugagcaccaagagaagccagcagaccgugauccccaacaucggcagcagacccugggugagaggccugagcagcagaaucagcaucuacuggaccaucgugaagcccggcgacauccugcugaucaacagcaccggcaaccugaucgcccccagaggcuacuucaagaucagaaccggcaagagcagcaucaugagaagcgacgcccccaucggcaccugcagcagcgagugcaucacccccaacggcagcauccccaacgacaagcccuuccagaacgugaacaagaucaccuacggcgccugccccagauacgugaagcagaacacccugaagcuggccaccggcaugagaaacgugcccgagaagcagaccagaggcaucuucggcgccaucgccggcuucaucgagaacggcugggagggcaugguggacggcugguacggcuucagacaccagaacagcgagggcaccggccaggccgccgaccugaagagcacccaggccgccaucgaccagaucaacggcaagcugaacagacugaucgagaagaccaacgagaaguuccaccagaucgagaaggaguucagcgagguggagggcagaauccaggaccuggagaaguacguggaggacaccaagaucgaccuguggagcuacaacgccgagcugcugguggcccuggagaaccagcacaccaucgaccugaccgacagcgagaugaacaagcuguucgagaagaccagaaagcagcugagagagaacgccgaggacaugggcaacggcugcuucaagaucuaccacaagugcgacaacgccugcaucggcagcaucagaaacggcaccuacgaccacgacguguacagagacgaggcccugaacaacagauuccagaucaagggcguggagcugaagagcggcuacaaggacuggauccuguggaucagcuucgccaucagcugcuuccugcugugcguggugcugcugggcuucaucaugugggccugccagaagggcaacaucagaugcaacaucugcaucuga

SEQ ID NO: 160306 - RNA, 1701 nt, Artificial Sequence; identical to SEQ ID NO: 160178
  derived and/or modified CDS sequence (opt4) from hemagglutinin__InfluenzaA__AAZ43394

SEQ ID NO: 160307 - RNA, 1701 nt, Artificial Sequence
  derived and/or modified CDS sequence (opt4) from hemagglutinin__InfluenzaA__AAZ43405
augaagaccaucaucgcccugagcuacauccugugccugguguucgcccagaagcugcccggcaacgacaacagcaccgccacccugugccugggccaccacgccgugcccaacggcacccuggugaagaccaucaccaacgaccagaucgaggugaccaacgccaccgagcuggugcagagcagcagcaccggcagaaucugcgacagcccccaccagauccuggacggcgagaacugcacccugaucgacgcccugcugggcgacccccacugcgacggcuuccagaacaaggagugggaccuguucguggagagaagcaaggccuacagcaacugcuaccccuacgacgugcccgacuacgccagccugagaagccugguggccagcagcggcacccuggaguucaacaacgagagcuucaacuggaccggcguggcccagaacggcaccagcagcgccugcaagagaagaagcaacaagagcuucuucagcagacugaacuggcugcaccagcugaaguacaaguaccccgcccugaacgugaccaugcccaacaacgagaaguucgacaagcuguacaucuggggcgugcaccaccccagcaccgacagcgaccagaucagccuguacgcccaggccagcggcagagugaccgugagcaccaagagaagccagcagaccgugauccccaacaucggcagcagacccugggugagaggcgugagcagcagaaucagcaucuacuggaccaucgugaagcccggcgacauccugcugaucaacugcaccggcaaccugaucgcccccagaggcuacuucaagaucagaagcggcaagagcagcaucaugagaagcgacgccagcaucggcaagugcaacagcgagugcaucacccccaacggcagcauccccaacgacaagcccuuccagaacgugaacagaaucaccuacggcgccugccccagauacgugaagcagaacacccugaagcuggccaccggcaugagaaacgugcccgagaagcagaccagaggcaucuucggcgccaucgccggcuucaucgagaacggcugggagggcaugguggacggcugguacggcuucagacaccagaacagcgagggcaccggccaggccgccgaccugaagagcacccaggccgccaucaaccagaucaacggcaagcugaacagacugaucgagaagaccaacgagaaguuccaccagaucgagaaggaguucagcgagguggagggcagaauccaggaccuggagaaguacguggaggacaccaagaucgaccuguggagcuacaacgccgagcugcugguggcccuggagaaccagcacaccaucgaccugaccgacagcgagaugaacaagcuguucgagagaaccaagaagcagcugagagagaacgccgaggacaugggcaacggcugcuucaagaucuaccacaagugcgacaacgccugcaucggcagcaucagaaacggcaccuacgaccacgacguguacagagacgaggcccugaacaacagauuccagaucaagggcguggagcugaagagcggcuacaaggacuggauccuguggaucagcuucgccaucagcugcuuccugcugugcguggugcugcugggcuucaucaugugggccugccagaagggcaacaucagaugcaacaucugcaucuga

SEQ ID NO: 160308 - RNA, 1701 nt, Artificial Sequence; identical to SEQ ID NO: 160107
  derived and/or modified CDS sequence (opt4) from hemagglutinin__InfluenzaA__AAZ74352

SEQ ID NO: 160309 - RNA, 1701 nt, Artificial Sequence; identical to SEQ ID NO: 160263
  derived and/or modified CDS sequence (opt4) from hemagglutinin__InfluenzaA__AAZ74363

SEQ ID NO: 160310 - RNA, 1698 nt, Artificial Sequence
  derived and/or modified CDS sequence (opt4) from hemagglutinin__InfluenzaA__AAZ74374
augaaggugaagcugcugauccugcugugcaccuucaccgccaccuacgccgacaccaucugcaucggcuaccacgccaacaacagcaccgacaccguggacaccgugcuggagaagaacgugaccgugacccacagcgugaaccugcuggaggacagccacaacggcaagcugugccugcugaagggcaucgccccccugcagcugggcaacugcagcguggccggcuggauccugggcaaccccgagugcgagcugcugaucagcaaggagagcuggagcuacaucguggagacccccaaccccgagaacggcgccugcuaccccggcuacuucgccgacuacgaggagcugagagagcagcugagcagcgugagcagcuucgagagauucgagaucuuccccaaggagagcagcuggcccaaccacaccgugaccggcgugagcgccagcugcagccacaacggcaagagcagcuucuacagaaaccugcuguggcugaccggcaagaacggccuguaccccaaccugagcaagagcuacgccaacaacaaggagaaggaggugcugauccuguggggcgugcaccacccccccaacaucggcgaccagagaacccuguaccacaccgagaacgccuacgugagcguggugagcagccacuacggcagaagauucacccccgagaucaccaagagacccaaggugagagaccaggagggcagaaucaacuacuacuggacccugcuggagcccggcgacaccaucaucuucgaggccaacggcaaccugaucgcccccugguacgccuucgcccugagcagaggcuucggcagcggcaucaucaccagcaacgcccccauggacgagugcgacgccaagugccagaccccccagggcgccaucaacagcagccugcccuuccagaacgugcaccccgugaccaucggcgagugccccaaguacgugagaagcgccaagcugagaauggugaccggccugagaaacauccccagcauccagagcagaggccuguucggcgccaucgccggcuucaucgagggcggcuggaccggcaugguggacggcugguacggcuaccaccaccagaacgagcagggcagcggcuacgccgccgaccagaagagcacccagaacgccaucaacggcaucaccaacaaggugaacagcgugaucgagaagaugaacacccaguucaccgccgugggcaaggaguucaacaagcuggagagaagaauggagaaccugaacaagaagguggacgacggcuuccuggacguguggaccuacaacgccgagcugcuggugcugcuggagaacgagagaacccuggacuuccacgacagcaacgugaagaaccuguacgagaaggugaagagccagcugaagaacaacgccaaggagaucggcaacggcugcuucgaguucuaccacaagugcaacaacgagugcauggagagcgugaagaacggcaccuacgacuaccccaaguacagcgaggagagcaagcugaacagagagaagaucgacggcgugaagcuggacagcaugggcguguaccagauccuggccaucuacagcaccguggccagcagccuggugcugcuggugagccugggcgccaucagcuucuggaugugcagcaacggcagccugcagugcagaaucugcaucuga

SEQ ID NO: 160311 - RNA, 1701 nt, Artificial Sequence
  derived and/or modified CDS sequence (opt4) from hemagglutinin__InfluenzaA__AAZ74397
augaacaccaucaucgcccugagcuacauccugugccugguguucgcccagaagcugcccggcaacgacaacagcaccgccacccugugccugggccaccacgccgugcccaacggcacccuggugaagaccaucaccagcgaccagaucgaggugaccaacgccaccgagcuggugcagagcagcagcaccggcagaaucugcgacagcccccacagaauccuggacggcgagaacugcacccugaucgacgcccugcugggcgacccccugugcgacggcuuccagaacaaggagugggaccuguucguggagagaagcaaggccuacagcaacugcuaccccuacgacgugcccgacuacgccagccugagaagccugguggccagcagcggcacccuggaguucaacaacgagagcuucaacuggaccggcguggcccagaacggcaccagcuucgccugcaagagaagaagcaucaagagcuucuucagcagacugaacuggcugcaccagcugaaguacaaguaccccgcccugaacgugaccaugcccaacaacgacaaguucgacaagcuguacaucuggggcgugcaccaccccggcaccgacagcgaccagaccagccuguacgcccaggccagcggcagagugaccgugagcaccaagagaagccagcagaccgugauccccaacaucggcagcagacccugggugagaggcgugagcagcagaaucagcaucuacuggaccaucgugaagcccggcgacauccugcugaucaacagcaccggcaaccugaucgcccccagaggcuacuucaagaucagaagcggcaagagcagcaucaugagaagcgacgcccccaucggcaagugcaacagcgagugcaucacccccaacggcagcauccccaacggcaagcccuuccagaacgugaacagaaucaccuacggcgccugccccagauacgugaagcagaacacccugaagcuggccaccggcaugagaaacgugcccgagaagcagaccagaggcaucuucggcgccaucgccggcuucaucgagaacggcugggagggcaugguggacggcugguacggcuucagacaccagaacagcgagggcaccggccaggccgccgaccugaagagcacccaggccgccaucaaccagaucaacggcaagcugaacagacugaucgagaagaccaacgagaaguuccaccagaucgagaaggaguucaccgagguggagggcagaauccaggaccuggagaaguacguggaggacaccaagaucgaccuguggagcuacaacgccgagcugcugguggcccuggagaaccagcacaccaucgaccugaccgacagcgagaugaacaagcuguucgagagaaccagaaagcagcugagagagaacgccgaggacaugggcaacggcugcuucaagaucuaccacaagugcgacaacgccugcaucggcagcaucagaaacggcaccuacgaccacgacguguacagagacgaggcccugaacaacagauuccagaucaagggcguggagcugaagagcggcuacaaggacuggauccuguggaucagcuucgccaccagcugcuuccugcugugcguggugcugcugggcuucaucaugugggccugccagaagggcaacaucagaugcaacaucugcaucuga

SEQ ID NO: 160312 - RNA, 1701 nt, Artificial Sequence
  derived and/or modified CDS sequence (opt4) from hemagglutinin__InfluenzaA__AAZ74408
augaagaccaucaucgcccugagcuacauccugugccugguguucgcccagaagcugcccggcaacgacaacagcaccgccacccugugccugggccaccacgccgugcccaacggcacccuggugaagaccaucaccaacgaccagaucgaggugaccaacgccaccgagcuggugcagagcagcagcaccggcagaaucugcgacagcccccaccagauccuggacggcgagaacugcacccugaucgacgcccugcugggcgacccccacugcgacggcuuccagaacaaggagugggaccuguucguggagagaagcaaggccuacagcaacugcuaccccuacgacgugcccgacuacgccagccugagaagccugguggccagcagcggcacccuggaguucaacaacgagagcuucaacuggaccggcguggcccagaacggcaccagcagcgccugcaagagaagaagcaacaagagcuucuucagcagacugaacuggcugcaccagcugaaguacaaguaccccgcccugaacgugaccaugcccaacaacgagaaguucgacaagcuguacaucuggggcgugcaccaccccagcaccgacagcgaccagaucagccuguacgcccaggccagcggcagagugaccgugagcaccaagagaagccagcagaccgugauccccaacaucggcagcagacccugggugagaggcgugagcagcagaaucagcaucuacuggaccaucgugaagcccggcgacauccugcugaucaacagcaccggcaaccugaucgcccccagaggcuacuucaagaucagaagcggcaagagcagcaucaugagaagcgacgcccccaucggcaagugcaacagcgagugcaucacccccaacggcagcauccccaacgacaagcccuuccagaacgugaacagaaucaccuacggcgccugccccagauacgugaagcagaacacccugaagcuggccaccggcaugagaaacgugcccgagaagcagaccagaggcaucuucggcgccaucgccggcuucaucgagaacggcugggagggcaugguggacggcugguacggcuucagacaccagaacagcgagggcaccggccaggccgccgaccugaagagcacccaggccgccaucaaccagaucaacggcaagcugaacagacugaucgagaagaccaacgagaaguuccaccagaucgagaaggaguucagcgagguggagggcagaauccaggaccuggagaaguacguggaggacaccaagaucgaccuguggagcuacaacgccgagcugcugguggcccuggagaaccagcacaccaucgaccugaccgacagcgagaugaacaagcuguucgagagaaccaagaagcagcugagagagaacgccgaggacaugggcaacggcugcuucaagaucuaccacaagugcgacaacgccugcaucggcagcaucagaaacggcaccuacaaccacgacguguacagagacgaggcccugaacaacagauuccagaucaagggcguggagcugaagagcggcuacaaggacuggauccuguggaucagcuucgccaucagcugcuuccugcugugcguggugcugcugggcuucaucaugugggccugccagaagggcaacaucagaugcaacaucugcaucuga

SEQ ID NO: 160313 - RNA, 1701 nt, Artificial Sequence; identical to SEQ ID NO: 160246
  derived and/or modified CDS sequence (opt4) from hemagglutinin__InfluenzaA__AAZ74430

SEQ ID NO: 160314 - RNA, 1701 nt, Artificial Sequence; identical to SEQ ID NO: 160303
  derived and/or modified CDS sequence (opt4) from hemagglutinin__InfluenzaA__AAZ74441

SEQ ID NO: 160315 - RNA, 1701 nt, Artificial Sequence
  derived and/or modified CDS sequence (opt4) from hemagglutinin__InfluenzaA__AAZ74452
augaagaccaucaucgcccugagcuacauccugugccugguguucgcccagaagcugcccggcaacgacaacagcaccgccacccugugccugggccaccacgccgugcccaacggcaccaucgugaagaccaucaccaacgaccagaucgaggugaccaacgccaccgagcuggugcagagcagcagcaccggcggcaucugcgacagcccccaccagauccuggacggcgagaacugcacccugaucgacgcccugcugggcgacccccagugcgacggcuuccagaacaagaagugggaccuguucaucgagagaagcaaggccuacagcaacugcuaccccuacgacgugcccgacuacgccagccugagaagccugguggccagcagcggcacccuggaguucaacaacgagagcuucaacuggaccggcgugacccagaacggcaccagcagcgccugcaagagaagaagcaacaacagcuucuucagcagacugaacuggcugacccaccugaaguucaaguaccccgcccugaacgugaccaugcccaacaacgagaaguucgacaagcuguacaucuggggcgugcaccaccccggcaccgacaacgaccagaucagccuguacgcccaggccagcggcagaaucaccgugagcaccaagagaagccagcagaccgugauccccaacaucggcagcagacccagagugagagacauccccagcagaaucagcaucuacuggaccaucgugaagcccggcgacauccugcugaucaacagcaccggcaaccugaucgcccccagaggcuacuucaagaucagaagcggcaagagcagcaucaugagaagcgacgcccccaucggcaagugcaacagcgagugcaucacccccaacggcagcauccccaacgacaagcccuuccagaacgugaacagaaucaccuacggcgccugccccagauacgugaagcagaacacccugaagcuggccaccggcaugagaaacgugcccgagaagcagaccagaggcaucuucggcgccaucgccggcuucaucgagaacggcugggagggcaugguggacggcugguacggcuucagacaccagaacagcgagggcaucggccaggccgccgaccugaagagcacccaggccgccaucaaccagaucaacggcaagcugaacagacugaucggcaagaccaacgagaaguuccaccagaucgagaaggaguucagcgagguggagggcagaauccaggaccuggagaaguacguggaggacaccaagaucgaccuguggagcuacaacgccgagcugcugguggcccuggagaaccagcacaccaucgaccugaccgacagcgagaugaacaagcuguucgagagaaccaagaagcagcugagagagaacgccgaggacaugggcaacggcugcuucaagaucuaccacaagugcgacaacgccugcaucggcagcaucagaaacggcaccuacgaccacgacguguacagagacgaggcccugaacaacagauuccagaucaagggcguggagcugaagagcggcuacaaggacuggauccuguggaucagcuucgccaucagcugcuuccugcugugcguggcccugcugggcuucaucaugugggccugccagaagggcaacaucagaugcaacaucugcaucuga

SEQ ID NO: 160316 - RNA, 1701 nt, Artificial Sequence
  derived and/or modified CDS sequence (opt4) from hemagglutinin__InfluenzaA__AAZ74463
augaagaccaucaucgcccugagcuacauccugugccugguguucgcccagaagcugcccggcaacgacaacagcaccgccacccugugccugggccaccacgccgugcccaacggcaccaucgugaagaccaucaccaacgaccagaucgaggugaccaacgccaccgagcuggugcagagcagcagcaccggcggcaucugcgacagcccccaccagauccuggacggcgagaacugcacccugaucgacgcccugcugggcgacccccagugcgacggcuuccagaacaagaagugggaccuguucguggagagaagcaaggccuacagcaacugcuaccccuacgacgugcccgacuacgccagccugagaagccugguggccagcagcggcacccuggaguucaacaacgagagcuucaacuggaccggcgugacccagaacggcaccagcagcgccugcaagagaagaagcaacaacagcuucuucagcagacugaacuggcugacccaccugaaguucaaguaccccgcccugaacgugaccaugcccaacaacgagaaguucgacaagcuguacaucuggggcgugcaccaccccggcaccgacaacgaccagaucagccuguacgcccaggccagcggcagaaucaccgugagcaccaagagaagccagcagaccgugauccccaacaucggcagcagacccagagugagagacauccccagcagaaucagcaucuacuggaccaucgugaagcccggcgacauccugcugaucaacagcaccggcaaccugaucgcccccagaggcuacuucaagaucagaagcggcaagagcagcaucaugagaagcgacgcccccaucggcaagugcaacagcgagugcaucacccccaacggcagcauccccaacgacaagcccuuccagaacgugaacagaaucaccuacggcgccugccccagauacgugaagcagaacacccugaagcuggccaccggcaugagaaacgugcccgagaagcagaccagaggcaucuucggcgccaucgccggcuucaucgagaacggcugggagggcaugguggacggcugguacggcuucagacaccagaacagcgagggcaucggccaggccgccgaccugaagagcacccaggccgccaucaaccagaucaacggcaagcugaacagacugaucggcaagaccaacgagaaguuccaccagaucgagaaggaguucagcgagguggagggcagaauccaggaccuggagaaguacguggaggacaccaagaucgaccuguggagcuacaacgccgagcugcugguggcccuggagaaccagcacaccaucgaccugaccgacagcgagaugaacaagcuguucgagagaaccaagaagcagcugagagagaacgccgaggacaugggcaacggcugcuucaagaucuaccacaagugcgacaacgccugcaucggcagcaucagaaacggcaccuacgaccacgacguguacagagacgaggcccugaacaacagauuccagaucaagggcguggagcugaagagcggcuacaaggacuggauccuguggaucagcuucgccaucagcugcuuccugcugugcguggugcugcugggcuucaucaugugggccugccagaagggcaacaucagaugcaacaucugcaucuga

SEQ ID NO: 160317 - RNA, 1701 nt, Artificial Sequence
  derived and/or modified CDS sequence (opt4) from hemagglutinin__InfluenzaA__AAZ74474
augaagaccaucaucgcccugagcuacauccugugccugguguucgcccagaagcugcccggcaacgacaacagcaccgccacccugugccugggccaccacgccgugcccaacggcaccaucgugaagaccaucaccaacgaccagaucgaggugaccaacgccaccgagcuggugcagagcagcagcaccggcggcaucugcgacagcccccaccagauccuggacggcgagaacugcacccugaucgacgcccugcugggcgacccccagugcgacggcuuccagaacaagaagugggaccuguucguggagagaagcaaggccuacagcaacugcuaccccuacgacgugcccgacuacgccagccugagaagccugguggccagcagcggcacccuggaguucaacaacgagagcuucaacuggaccggcgugacccagaacggcaccagcagcgccugcaagaagagaagcaacaacagcuucuucagcagacugaacuggcugacccaccugaaguucaaguaccccgcccugaacgugaccaugcccaacaacgagaaguucgacaagcuguacaucuggggcgugcaccaccccggcaccgacaacgaccagaucagccuguacgcccaggccagcggcagaaucaccgugagcaccaagagaagccagcagaccgugauccccaacaucggcagcagacccagagugagagacauccccagcagaaucagcaucuacuggaccaucgugaagcccggcgacauccugcugaucaacagcaccggcaaccugaucgcccccagaggcuacuucaagaucagaagcggcaagagcagcaucaugagaagcgacgcccccaucggcaagugcaacagcgagugcaucacccccaacggcagcauccccaacgacaagcccuuccagaacgugaacagaaucaccuacggcgccugccccagauacgugaagcagaacacccugaagcuggccaccggcaugagaaacgugcccgagaagcagaccagaggcaucuucggcgccaucgccggcuucaucgagaacggcugggagggcaugguggacggcugguacggcuucagacaccagaacagcgagggcaucggccaggccgccgaccugaagagcacccaggccgccaucaaccagaucaacggcaagcugaacagacugaucggcaagaccaacgagaaguuccaccagaucgagaaggaguucagcgagguggagggcagaauccaggaccuggagaaguacguggaggacaccaagaucgaccuguggagcuacaacgccgagcugcugguggcccuggagaaccagcacaccaucgaccugaccgacagcgagaugaacaagcuguucgagagaaccaagaagcagcugagagagaacgccgaggacaugggcaacggcugcuucaagaucuaccacaagugcgacaacgccugcaucggcagcaucagaaacggcaccuacgaccacgacguguacagagacgaggcccugaacaacagauuccagaucaagggcguggagcugaagagcggcuacaaggacuggauccuguggaucagcuucgccaucagcugcuuccugcugugcguggcccugcugggcuucaucaugugggccugccagaagggcaacaucagaugcaacaucugcaucuga

SEQ ID NO: 160318 - RNA, 1701 nt, Artificial Sequence; identical to SEQ ID NO: 160315
  derived and/or modified CDS sequence (opt4) from hemagglutinin__InfluenzaA__AAZ74485

SEQ ID NO: 160319 - RNA, 1701 nt, Artificial Sequence; identical to SEQ ID NO: 160316
  derived and/or modified CDS sequence (opt4) from hemagglutinin__InfluenzaA__AAZ74496

SEQ ID NO: 160320 - RNA, 1701 nt, Artificial Sequence; identical to SEQ ID NO: 160315
  derived and/or modified CDS sequence (opt4) from hemagglutinin__InfluenzaA__AAZ74507

SEQ ID NO: 160321 - RNA, 1701 nt, Artificial Sequence; identical to SEQ ID NO: 160316
  derived and/or modified CDS sequence (opt4) from hemagglutinin__InfluenzaA__AAZ74518

SEQ ID NO: 160322 - RNA, 1701 nt, Artificial Sequence; identical to SEQ ID NO: 160315
  derived and/or modified CDS sequence (opt4) from hemagglutinin__InfluenzaA__AAZ74529

SEQ ID NO: 160323 - RNA, 1701 nt, Artificial Sequence
  derived and/or modified CDS sequence (opt4) from hemagglutinin__InfluenzaA__AAZ74551
augaagaccaucaucgcccugagcuacauccugugccugguguucgcccagaagcugcccggcaacgacaacagcaccgccacccugugccugggccaccacgccgugcccaacggcaccaucgugaagaccaucaccaacgaccagaucgaggugaccaacgccaccgagcuggugcagagcagcagcaccggcggcaucugcgacagcccccaccagauccuggacggcgagaacugcacccugaucgacgcccugcugggcgacccccagugcgacggcuuccagaacaagaagugggaccuguucguggagagaagcaaggccuacagcaacugcuaccccuacgacgugcccgacuacgccagccugagaagccugguggccagcagcggcacccuggaguucaacaacgagagcuucaacuggaccggcgugacccagaacggcaccagcagcgccugcaagagaagaagcaacaacagcuucuucagcagacugaacuggcugacccaccugaaguucaaguaccccgcccugaacgugaccaugcccaacaacgagaaguucgacaagcuguacaucuggggcgugcaccaccccggcaccgacaacgaccagaucagccuguacgcccaggccagcggcagaaucaccgugagcaccaagagaagccagcagaccgugauccccaacaucggcagcagacccagagugagagacauccccagcagaaucagcaucuacuggaccaucgugaagcccggcgacauccugcugaucaacagcaccggcaaccugaucgcccccagaggcuacuucaagaucagaagcggcaagagcagcaucaugagaagcgacgcccccaucggcaagugcaacagcgagugcaucacccccaacggcagcauccccaacgacaagcccuuccagaacgugaacagaaucaccuacggcgccugccccagauacgugaagcagaacacccugaagcuggccaccggcaugagaaacgugcccgagaagcagaccagaggcaucuucggcgccaucgccggcuucaucgagaacggcugggagggcaugguggacggcugguacggcuucagacaccagaacagcgagggcaucggccaggccgccgaccugaagagcacccaggccgccaucaaccagaucaacggcaagcugaacagacugaucggcaagaccaacgagaaguuccaccagaucgagaaggaguucagcgagguggagggcagaauccaggaccuggagaaguacguggaggacaccaagaucgaccuguggagcuacaacgccgagcugcugguggcccuggagaaccagcacacccuggaccugaccgacagcgagaugaacaagcuguucgagagaaccaagaagcagcugagagagaacgccgaggacaugggcaacggcugcuucaagaucuaccacaagugcgacaacgccugcaucggcagcaucagaaacggcaccuacgaccacgacguguacagagacgaggcccugaacaacagauuccagaucaagggcguggagcugaagagcggcuacaaggacuggauccuguggaucagcuucgccaucagcugcuuccugcugugcguggcccugcugggcuucaucaugugggccugccagaagggcaacaucagaugcaacaucugcaucuga

SEQ ID NO: 160324 - RNA, 1701 nt, Artificial Sequence; identical to SEQ ID NO: 160246
  derived and/or modified CDS sequence (opt4) from hemagglutinin__InfluenzaA__AAZ74562

SEQ ID NO: 160325 - RNA, 1701 nt, Artificial Sequence
  derived and/or modified CDS sequence (opt4) from hemagglutinin__InfluenzaA__AAZ74573
augaagaccaucaucgcccugagcuacauccugugccugguguucgcccagaagcugcccggcaacgacaacagcaccgccacccugugccugggccaccacgccgugcccaacggcaccaucgugaagaccaucaccaacgaccagaucgaggugaccaacgccaccgagcuggugcagagcagcagcaccggcggcaucugcgacagcccccaccagauccuggacggcgagaacugcacccugaucgacgcccugcugggcgacccccagugcgacggcuuccagaacaagaagugggaccuguucaucgagagaagcaaggccuacagcaacugcuaccccuacgacgugcccgacuacgccagccugagaagccugguggccagcagcggcacccuggaguucaacaacgagagcuucaacuggaccggcgugacccagaacggcaccagcagcgccugcaagagaagaagcaacaacagcuucuucagcagacugaacuggcugacccaccugaaguucaaguaccccgcccugaacgugaccaugcccaacaacgagaaguucgacaagcuguacaucuggggcgugcaccaccccggcaccggcaacgaccagaucagccuguacgcccaggccagcggcagaaucaccgugagcaccaagagaagccagcagaccgugauccccaacaucggcagcagacccagagugagagacauccccagcagaaucagcaucuacuggaccaucgugaagcccggcgacauccugcugaucaacagcaccggcaaccugaucgcccccagaggcuacuucaagaucagaagcggcaagagcagcaucaugagaagcgacgcccccaucggcaagugcaacagcgagugcaucacccccaacggcagcauccccaacgacaagcccuuccagaacgugaacagaaucaccuacggcgccugccccagauacgugaagcagaacacccugaagcuggccaccggcaugagaaacgugcccgagaagcagaccagaggcaucuucggcgccaucgccggcuucaucgagaacggcugggagggcaugguggacggcugguacggcuucagacaccagaacagcgagggcaucggccaggccgccgaccugaagagcacccaggccgccaucaaccagaucaacggcaagcugaacagacugaucggcaagaccaacgagaaguuccaccagaucgagaaggaguucagcgagguggagggcagaauccaggaccuggagaaguacguggaggacaccaagaucgaccuguggagcuacaacgccgagcugcugguggcccuggagaaccagcacaccaucgaccugaccgacagcgagaugaacaagcuguucgagagaaccaagaagcagcugagagagaacgccgaggacaugggcaacggcugcuucaagaucuaccacaagugcgacaacgccugcaucggcagcaucagaaacggcaccuacgaccacgacguguacagagacgaggcccugaacaacagauuccagaucaagggcguggagcugaagagcggcuacaaggacuggauccuguggaucagcuucgccaucagcugcuuccugcugugcguggcccugcugggcuucaucaugugggccugccagaagggcaacaucagaugcaacaucugcaucuga

SEQ ID NO: 160326 - RNA, 1701 nt, Artificial Sequence
  derived and/or modified CDS sequence (opt4) from hemagglutinin__InfluenzaA__AAZ74584
augaagaccaucaucgcccugagcuacauccugugccugguguucgcccagaagcugcccggcaacgacaacagcaccgccacccugugccugggccaccacgccgugcccaacggcacccuggugaagaccaucgccaacgaccagaucgaggugaccaacgccaccgagcuggugcagagcagcagcaccggcagaaucugcgacagcccccaccagauccuggacggcgagaacugcacccugaucgacgcccugcugggcgacccccacugcgacggcuuccagaacaaggagugggaccuguucguggagagaagcaaggccuacagcaacugcuaccccuacgacgugcccgacuacgccagccugagaagccugguggccagcagcggcacccuggaguucaacaacgagagcuucaacuggaccggcguggcccagaacggcaccagcagcgccugcaagagaagaagcaacaagagcuucuucagcagacugaacuggcugcaccagcugaaguacaaguaccccgcccagaacgugaccaugcccaacaacgagaaguucgacaagcuguacaucuggggcgugcaccaccccagcaccgacagcgaccagaucagccuguacgcccaggccagcggcagagugaccgugagcaccaagagaagccagcagaccgugauccccaacaucggcagcagacccugggugagaggcgugagcagcagaaucagcaucuacuggaccaucgugaagcccggcgacauccugcugaucaacagcaccggcaaccugaucgcccccagaggcuacuucaagaucagaagcggcaagagcagcaucaugagaagcgacgcccccaucggcaagugcaacagcgagugcaucacccccaacggcagcauccccaacgacaagcccuuccagaacgugaacagaaucaccuacggcgccugccccagauacgugaagcagaacacccugaagcuggccaccggcaugagaaacgugcccgagaagcagaccagaggcaucuucggcgccaucgccggcuucaucgagaacggcugggagggcaugguggacggcugguacggcuucagacaccagaacagcgagggcaccggccaggccgccgaccugaagagcacccaggccgccaucaaccagaucaacggcaagcugaacagacugaucgagaagaccaacgagaaguuccaccagaucgagaaggaguucagcgagguggagggcagaauccaggaccuggagaaguacguggaggacaccaagaucgaccuguggagcuacaacgccgagcugcugguggcccuggagaaccagcacaccaucgaccugaccgacagcgagaugaacaagcuguucgagagaaccaagaagcagcugagagagaacgccgaggacaugggcaacggcugcuucaagaucuaccacaagugcgacaacgccugcaucggcagcaucagaaacggcaccuacgaccacgacguguacagagacgaggcccugaacaacagauuccagaucaagggcguggagcugaagagcggcuacaaggacuggauccuguggaucagcuucgccaucagcugcuuccugcugugcguggcccugcugggcuucaucaugugggccugccagaagggcaacaucagaugcaacaucugcaucuga

SEQ ID NO: 160327 - RNA, 1701 nt, Artificial Sequence; identical to SEQ ID NO: 160303
  derived and/or modified CDS sequence (opt4) from hemagglutinin__InfluenzaA__AAZ74595

SEQ ID NO: 160328 - RNA, 1701 nt, Artificial Sequence
  derived and/or modified CDS sequence (opt4) from hemagglutinin__InfluenzaA__AAZ74617
augaagaccaucaucgcccugagcuacauccugugccugguguucgcccagaagcugcccgugaacgacaacagcaccgccacccugugccugggccaccacgccgugcccaacggcacccuggugaagaccaucaccaacgaccacaucgaggugaccaacgccaccgagcuggugcagagcagcagcaccggcagaaucugcgacagcccccaccagauccuggacggcgagaacugcacccugaucgacgcccugcugggcgacccccacugcgacggcuuccagaacaaggagugggaccuguucguggagagaagcaccgccuacagcaacugcuaccccuacgacgugcccgacuacgccagccugagaagccugguggccagcagcggcacccuggaguucaacaacgagagcuucaacuggaccggcguggcccagaacggcaccagcagcgccugcaagagaagaagcaucaagagcuucuucagcagacugaacuggcugcaccagcugaaguacaaguaccccgcccugaacgugaccaugcccaacaacgagaaguucgacaagcuguacaucuggggcgugcaccaccccagcaccgacagcgaccagaucagccuguacgcccaggccagcggcagagugaccgugagcaccaagagaagccagcagaccgugauccccaacaucggcagcagacccugggugagaggcgugagcagcaagaucagcaucuacuggaccaucgugaagcccggcgacauccugcugaucaacagcaccggcaaccugaucgcccccagaggcuacuucaagaucagaagcggcaagagcagcaucaugagaagcaacgcccccaucggcaagugcaacagcgagugcaucacccccaacggcagcauccccaacgacaagcccuuccagaacgugaacagaaucaccuacggcgccugccccagauacgugaagcagaacacccugaagcuggccaccggcaugagaaacgugcccgagaagcagaccagaggcaucuucggcgccaucgccggcuucaucgagaacggcugggagggcaugguggacggcugguacggcuucagacaccagaacagcgagggcaccggccaggccgccgaccugaagagcacccaggccgccaucaaccagaucaacggcaagcugaacagacugaucgagaagaccaacgagaaguuccaccagaucgagaaggaguucagcgagguggagggcagaauccaggaccuggagaaguacguggaggacaccaagaucgaccuguggagcuacaacgccgagcugcugguggcccuggagaaccagcacaccaucgaccugaccgacagcgagaugaacaagcuguucgagagaaccagaaagcagcugagagagaacgccgaggacaugggcaacggcugcuucaagaucuaccacaagugcgacaacgccugcaucggcagcaucagaaacggcaccuacgaccacgacguguacagagacgaggcccugaacaacagauuccagaucaagggcguggagcugaagagcggcuacaaggacuggauccuguggaucagcuucgccaucagcugcuuccugcugugcguggugcugcugggcuucaucaugugggccugccagaagggcaacaucagaugcaacaucugcaucuga

SEQ ID NO: 160329 - RNA, 1701 nt, Artificial Sequence; identical to SEQ ID NO: 160107
  derived and/or modified CDS sequence (opt4) from hemagglutinin__InfluenzaA__AAZ79505

SEQ ID NO: 160330 - RNA, 1701 nt, Artificial Sequence
  derived and/or modified CDS sequence (opt4) from hemagglutinin__InfluenzaA__AAZ79516
augaagaccaucaucgcccugagcuacauccugugccugguguucgcccagaagcugcccggcaacgacaacagcaccgccacccugugccugggccaccacgccgugcccaacggcacccuggugaagaccaucaccaacgaccagaucgaggugaccaacgccaccgagcuggugcagagcagcagcaccggcagaaucugcgacagcccccaccagauccuggacggcgagaacugcacccugaucgacgcccugcugggcgacccccacugcgacggcuuccagaacaaggagugggaccuguucguggagagaagcaaggccuacagcaacugcuaccccuacgacgugcccgacuacgccagccugagaagccugguggccagcagcggcacccuggaguucaacaacgagagcuucaacuggaccggcguggcccagaacggcaccagcagcgccugcaagagaagaagcaacaagagcuucuucagcagacugaacuggcugcaccagcugaaguacaaguaccccgcccugaacgugaccaugcccaacaacgagaaguucgacaagcuguacaucuggggcgugcaccaccccagcaccgacagcgaccagaucagccuguacgcccaggccagcggcagagugaccgugagcaccaagagaagccagcagaccgugauccccaacaucggcagcagacccugggugagaggcgugagcagcagaaucagcaucuacuggaccaucgugaagcccggcgacauccugcugaucaacagcaccggcaaccugaucgcccccagaggcuacuucaagaucagaagcggcaagagcagcaucaugagaagcgacgcccccaucggcaagugcaacagcgagugcaucacccccaacggcagcauccccaacgacaagcccuuccagaacgugaacagaaucaccuacggcgccugccccagauacgugaagcagaacacccugaagcuggccaccggcaugagaaacgugcccgagaagcagaccagaggcaucuucggcgccaucgccggcuucaucgagaacggcugggagggcaugguggacggcugguacggcuucagacaccagaacagcgagggcaccggccaggccgccgaccugaagagcacccaggccgccaucaaccagaucaacggcaagcugaacagacugaucgagaagaccaacgagaaguuccaccagaucgagaaggaguucagcgagguggagggcagaauccaggaccuggagaaguacguggaggacaccaagaucgaccuguggagcuacaacgccgagcugcugguggcccuggagaaccagcacaccaucgaccugaccgacagcgagaugaacaagcuguucgagagaaccaagaagcagcugagagagaacgccgaggacaugggcaacggcugccugaagaucuaccacaagugcgacaacgccugcaucggcagcaucagaaacggcaccuacgaccacgacguguacagagacgaggcccugaacaacagauuccagaucaagggcguggagcugaagagcggcuacaaggacuggauccuguggaucagcuucgccaucagcugcuuccugcugugcguggugcugcugggcuucaucaugugggccugccagaagggcaacaucagaugcaacaucugcaucuga

SEQ ID NO: 160331 - RNA, 1701 nt, Artificial Sequence
  derived and/or modified CDS sequence (opt4) from hemagglutinin__InfluenzaA__AAZ79527
augaagaccaucaucgcccugagcuacauccugugccugguguucgcccagaagcugcccggcaacgacaacagcaccgccacccugugccugggccaccacgccgugcccaacggcaccaucgugaagaccaucaccaacgaccagaucgaggugaccaacgccaccgagcuggugcagagcagcagcaccggcggcaucugcgacagcccccaccagauccuggacggcgagaacugcacccugaucgacgcccugcugggcgacccccagugcgacggcuuccagaacaagaagugggaccuguucguggagagaagcaaggccuacagcaacugcuaccccuacgacgugcccgacuacgccagccugagaagccugguggccagcagcggcacccuggaguucaacaacgagagcuucgacuggaccggcgugacccagaacggcaccagcagcgccugcaagagaagaagcaacaagagcuucuucagcagacugaacuggcugacccaccugaaguacaaguaccccgcccugaacgugaccaugcccaacaacgagaaguucgacaagcuguacaucuggggcgugcaccaccccggcaccgacagcgaccagaucagccuguacgcccaggccagcggcagaaucaccgugagcaccaagagaagccagcagaccgugauccccaacaucggcagcagacccagagugagagacgugagcagcagaaucagcaucuacuggaccaucgugaagcccggcgacauccugcugaucaacagcaccggcaaccugaucgcccccagaggcuacuucaagaucagaagcggcaagagcagcaucaugagaagcgacgcccccaucggcaagugcaacagcgagugcaucacccccaacggcagcauccccaacgacaagcccuuccagaacgugaacagaaucaccuacggcgccugccccagauacgugaagcagaacacccugaagcuggccaccggcaugagaaacgugcccgagagacagaccagaggcaucuucggcgccaucgccggcuucaucgagaacggcugggagggcaugguggacggcugguacggcuucagacaccagaacagcgagggcaccggccaggccgccgaccugaagagcacccaggccgccaucaaccagaucaacggcaagcugaacagacugaucggcaagaccaacgagaaguuccaccagaucgagaaggaguucagcgagguggagggcagaauccaggaccuggagagauacguggaggacaccaagaucgaccuguggagcuacaacgccgagcugcugguggcccuggagaaccagcacaccaucgaccugaccgacagcgagaugaacaagcuguucgagagaaccaagaagcagcugagagagaacgccgaggacaugggcaacggcugcuucaagaucuaccacaagugcgacaacgccugcaucggcagcaucagaaacggcaccuacgaccacgacguguacagagacgaggcccugaacaacagauuccagaucaagggcguggagcugaagagcggcuacaaggacuggauccuguggaucagcuucgccaucagcugcuuccugcugugcguggcccugcugggcuucaucaugugggccugccagaagggcaacaucagaugcaacaucugcaucuga

SEQ ID NO: 160332 - RNA, 1698 nt, Artificial Sequence
  derived and/or modified CDS sequence (opt4) from hemagglutinin__InfluenzaA__AAZ79549
augaaggugaagcugcugauccugcugugcaccuucaccgccaccuacgccgacaccaucugcaucggcuaccacgccaacaacagcaccgacaccguggacaccgugcuggagaagaacgugaccgugacccacagcgugaaccugcuggaggacagccacaacggcaagcugugccugcugaagggcaucgccccccugcagcugggcaacugcagcguggccggcuggauccugggcaaccccgagugcgagcugcugaucagcaaggagagcuggagcuacaucguggagacccccaaccccgagaacggcgccugcuaccccggcuacuucgccgacuacgaggagcugagagagcagcugagcagcgugagcagcuucgagagauucgagaucuuccccaaggagagcagcuggcccaaccacaccgugaccggcgugagcgccagcugcagccacaacggcaagagcagcuucuacagaaaccugcuguggcugaccggcaagaacggccuguaccccaaccugagcaagagcuacgccaacaacaaggagaaggaggugcugauccuguggggcgugcaccacccccccaacaucggcaaccagagaacccuguaccacaccgagaacgccuacgugagcguggugagcagccacuacagcagaagauucacccccgagaucaccaagagacccaaggugagagaccaggagggcagaaucaacuacuacuggacccugcuggagcccggcgacaccaucaucuucgaggccaacggcaaccugaucgcccccugguacgccuucgcccugagcagaggcuucggcagcggcaucaucaccagcaacgcccccauggacgagugcgacgccaagugccagaccccccagggcgccaucaacagcagccugcccuuccagaacgugcaccccgugaccaucggcgagugccccaaguacgugagaagcgccaagcugagaauggugaccggccugagaaacauccccagcauccagagcagaggccuguucggcgccaucgccggcuucaucgagggcggcuggaccggcaugguggacggcugguacggcuaccaccaccagaacgagcagggcagcggcuacgccgccgaccagaagagcacccagaacgccaucaacggcaucaccaacaaggugaacagcgugaucgagaagaugaacacccaguucaccgccgugggcaaggaguucaacaagcuggagagaagaauggagaaccugaacaagaagguggacgacggcuuccuggacaucuggaccuacaacgccgagcugcuggugcugcuggagaacgagagaacccuggacuuccacgacagcaacgugaagaaccuguacgagaaggugaagagccagcugaagaacaacgccaaggagaucggcaacggcugcuucgaguucuaccacaagugcaacaacgagugcauggagagcgugaagaacggcaccuacgacuaccccaaguacagcgaggagagcaagcugaacagagagaagaucgacggcgugaagcuggacagcaugggcguguaccagauccuggccaucuacagcaccguggccagcagccuggugcugcuggugagccugggcgccaucagcuucuggaugugcagcaacggcagccugcagugcagaaucugcaucuga

SEQ ID NO: 160333 - RNA, 1701 nt, Artificial Sequence
  derived and/or modified CDS sequence (opt4) from hemagglutinin__InfluenzaA__AAZ79560
augaagaccaucaucgcccugagcuacauccugugccugguguucgcccagaagcugcccggcaacgacaacagcaccgccacccugugccugggccaccacgccgugcccaacggcacccuggugaagaccaucaccaacgaccagaucgaggugaccaacgccaccgagcuggugcagagcagcagcaccggcagaaucugcgacagcccccaccagauccuggacggcgagaacugcacccugaucgacgcccugcugggcgacccccacugcgacggcuuccagaacaaggagugggaccuguucguggagagaagcaaggccuacagcaacugcuaccccuacgacgugcccgacuacgccagccugaagagccugguggccagcagcggcacccuggaguucaacaacgagagcuucaacuggaccggcguggcccagaacggcaccagcagcgccugcaagagaagaagcaacaagagcuucuucagcagacugaacuggcugcaccagcugaaguacaaguaccccgcccugaacgugaccaugcccaacaacgagaaguucgacaagcuguacaucuggggcgugcaccaccccagcaccgacagcgaccagaucagccuguacgcccaggccagcggcagagugaccgugagcaccaagagaagccagcagaccgugauccccaacaucggcagcagacccugggugagaggcgugagcagcagaaucagcaucuacuggaccaucgugaagcccggcgacauccugcugaucaacagcaccggcaaccugaucgcccccagaggcuacuucaagaucagaagcggcaagagcagcaucaugagaagcaacgcccccaucggcaagugcaacagcgagugcaucacccccaacggcagcauccccaacgacaagcccuuccagaacgugaacagaaucaccuacggcgccugccccagauacgugaagcagaacacccugaagcuggccaccggcaugagaaacgugcccgagaagcagaccagaggcaucuucggcgccaucgccggcuucaucgagaacggcugggagggcaugguggacggcugguacggcuucagacaccagaacagcgagggcaccggccaggccgccgaccugaagagcacccaggccgccaucaaccagaucaacggcaagcugaacagacugaucgagaagaccaacgagaaguuccaccagaucgagaaggaguucagcgagguggagggcagaauccaggaccuggagaaguacguggaggacaccaagaucgaccuguggagcuacaacgccgagcugcugguggcccuggagaaccagcacaccaucgaccugaccgacagcgagaugaacaagcuguucgagagaaccaagaagcagcugagagagaacgccgaggacaugggcaacggcugcuucaagaucuaccacaagugcgacaacgccugcaucggcagcaucagaaacggcaccuacgaccacgacguguacagagacgaggcccugaacaacagauuccagaucaagggcguggagcugaagagcggcuacaaggacuggauccuguggaucagcuucgccaucagcugcuuccugcugugcguggugcugcugggcuucaucaugugggccugccagaagggcaacaucagaugcaacaucugcaucuga

SEQ ID NO: 160334 - RNA, 1701 nt, Artificial Sequence
  derived and/or modified CDS sequence (opt4) from hemagglutinin__InfluenzaA__AAZ79571
augaagaccaucaucgcccugagcuacauccugugccugguguucgcccagaagcugcccggcaacgacaacagcaccgccacccugugccugggccaccacgccgugcccaacggcacccuggugaagaccaucaccaacgaccagaucgaggugaccaacgccaccgagcuggugcagagcagcagcaccggcagaaucugcgacagcccccaccagauccuggacggcgagaacugcacccugaucgacgcccugcugggcgaccccagaugcgacggcuuccagaacaaggagugggaccuguucguggagagaagcaaggccuacagcaacugcuaccccuacgacgugcccgacuacgccagccugagaagccugguggccagcagcggcacccuggaguucaacaacgagagcuucaacuggaccggcguggcccagaacggcaccagcagcgccugcaagagaagaagcaacaagagcuucuucagcagacugaacuggcugcaccagcugaaguacaaguaccccgcccugaacgugaccaugcccaacaacgagaaguucgacaagcuguacaucuggggcgugcaccaccccagcaccgacagcgaccagaucagccuguacgcccaggccagcggcagagugaccgugagcaccaagagaagccagcagaccgugauccccaacaucggcagcagacccugggugagaggcgugagcagcagaaucagcaucuacuggaccaucgugaagcccggcgacauccugcugaucaacagcaccggcaaccugaucgcccccagaggcuacuucaagaucagaagcggcaagagcagcaucaugagaagcgacgcccccaucggcaagugcaacagcgagugcaucacccccaacggcagcauccccaacgacaagcccuuccagaacgugaacagaaucaccuacggcgccugccccagauacgugaagcagaacacccugaagcuggccaccggcaugagaaacgugcccgagaagcagaccagaggcaucuucggcgccaucgccggcuucaucgagaacggcugggagggcaugguggacggcugguacggcuucagacaccagaacagcgagggcaccggccaggccgccgaccugaagagcacccaggccgccaucaaccagaucaacggcaagcugaacagacugaucgagaagaccaacgagaaguuccaccagaucgagaaggaguucagcgagguggagggcagaauccaggaccuggagaaguacguggaggacaccaagaucgaccuguggagcuacaacgccgagcugcugguggcccuggagaaccagcacaccaucgaccugaccgacagcgagaugaacaagcuguucgagagaaccaagaagcagcugagagagaacgccgaggacaugggcaacggcugcuucaagaucuaccacaagugcgacaacgccugcaucggcagcaucagaaacggcaccuacgaccacgacguguacagagacgaggcccugaacaacagauuccagaucaagggcguggagcugaagagcggcuacaaggacuggauccuguggaucagcuucgccaucagcugcuuccugcugugcguggugcugcugggcuucaucaugugggccugccagaagggcaacaucagaugcaacaucugcaucuga

SEQ ID NO: 160335 - RNA, 1701 nt, Artificial Sequence
  derived and/or modified CDS sequence (opt4) from hemagglutinin__InfluenzaA__AAZ79582
augaagaccaucaucgcccugagcuacauccugugccugguguucgcccagaagcugcccggcaacgacaacagcaccgccacccugugccugggccaccacgccgugcccaacggcacccuggugaagaccaucaccaacgaccagaucgaggugaccaacgccaccgagcuggugcagagcagcagcaccggcagaaucugcgacagcccccaccagauccuggacggcgagaacugcacccugaucgacgcccugcugggcgacccccacugcgacggcuuccagaacaaggagugggaccuguucguggagagaagcaaggccuacagcaacugcuaccccuacgacgugcccgacuacgccagccugagaagccugguggccagcagcggcacccuggaguucaacaacgagagcuucaacuggaccggcguggcccagaacggcaccagcagcgccugcaagagaagaagcaacaagagcuucuucagcagacugaacuggcugcaccagcugaaguacaaguaccccgcccugaacgugaccaugcccaacaacgagaaguucgacaagcuguacaucuggggcgugcaccaccccagcaccgacagcgaccagaucagccuguacgcccaggccagcggcagagugaccgugagcaccaagagaagccagcagaccgugauccccaacaucggcagcggccccugggugagaggcgugagcagcagaaucagcaucuacuggaccaucgugaagcccggcgacauccugcugaucaacagcaccggcaaccugaucgcccccagaggcuacuucaagaucagaagcggcaagagcagcaucaugagaagcgacgcccccaucggcaagugcaacagcgagugcaucacccccaacggcagcauccccaacgacaagcccuuccagaacgugaacagaaucaccuacggcgccugccccagauacgugaagcagaacacccugaagcuggccaccggcaugagaaacgugcccgagaagcagaccagaggcaucuucggcgccaucgccggcuucaucgagaacggcugggagggcaugguggacggcugguacggcuucagacaccagaacagcgagggcaccggccaggccgccgaccugaagagcacccaggccgccaucaaccagaucaacggcaagcugaacagacugaucgagaagaccaacgagaaguuccaccagaucgagaaggaguucagcgagguggagggcagaauccaggaccuggagaaguacguggaggacaccaagaucgaccuguggagcuacaacgccgagcugcugguggcccuggagaaccagcacaccaucgaccugaccgacagcgagaugaacaagcuguucgagagaaccaagaagcagcugagagagaacgccgaggacaugggcaacggcugcuucaagaucuaccacaagugcgacaacgccugcaucggcagcaucagaaacggcaccuacgaccacgacguguacagagacgaggcccugaacaacagauuccagaucaagggcguggagcugaagagcggcuacaaggacuggauccuguggaucagcuucgccaucagcugcuuccugcugugcguggugcugcugggcuucaucaugugggccugccagaagggcaacaucagaugcaacaucugcaucuga

SEQ ID NO: 160336 - RNA, 1698 nt, Artificial Sequence
  derived and/or modified CDS sequence (opt4) from hemagglutinin__InfluenzaA__AAZ79604
augaaggccaagcugcuggugcugcugugcaccuucaccgccaccuacgccgacaccaucugcaucggcuaccacgccaacaacagcaccgacaccguggacaccgugcuggagaagaacgugaccgugacccacagcgugaaccugcuggaggacagccacaacggcaagcugugccugcugaagggcaucgccccccugcagcugggcaacugcagcguggccggcuggauccugggcaaccccgagugcgagcugcugaucagcaaggagagcuggagcuacaucguggagacccccaaccccgagaacggcaccugcuaccccggcuacuucgccgacuacgaggagcugagagagcagcugagcagcgugagcagcuucgagagauucgagaucuuccccaagggcagcagcuggcccaaccacaccgugaccggcgugagcgccagcugcagccacaacggcaagagcagcuucuacagaaaccugcuguggcugaccggcaagaacggccuguaccccaaccugagcaugagcuacgugaacaacaaggagaaggaggugcuggugcuguggggcgugcaccacccccccaacaucggcgaccagagagcccuguaccacaccgagaacgccuacgugagcguggugagcagccacuacagcagaagauucacccccgagaucgccaagagacccaaggugagagaccaggagggcagaaucaacuacuacuggacccugcuggagcccggcgacaccaucaucuucgaggccaacggcaaccugaucgcccccugguacgccuucgcccugagcagaggcuucggcagcggcaucaucaccagcaacgcccccauggacgagugcgacgccaagugccagaccccccagggcgccaucaacagcagccugcccuuccagaacgugcaccccgugaccaucggcgagugccccaaguacgugagaagcgccaagcugagaauggugaccggccugagaaacauccccagcauccagagcagaggccuguucggcgccaucgccggcuucaucgagggcggcuggaccggcaugguggacggcugguacggcuaccaccaccagaacgagcagggcagcggcuacgccgccgaccagaagagcacccagaacgccaucaacagaaucaccaacaaggugaacagcgugaucgagaagaugaacacccaguucaccgccgugggcaaggaguucaacaagcuggagagaagaauggagaaccugaacaagaagguggacgacggcuuccuggacaucuggaccuacaacgccgagcugcuggugcugcuggagaacgagagaacccuggacuuccacgacagcaacgugaagaaccuguacgagaaggugaagagccagcugaagaacaacgccaaggagaucggcaacggcugcuucgaguucuaccacaagugcaacaacgagugcauggagagcgugaagaacggcaccuacgacuaccccaaguacagcgaggagagcaagcugaacagagagaagaucgacggcgugaagcuggagagcaugggcguguaccagauccuggccaucuacagcaccguggccagcagccuggugcugcuggugagccugggcgccaucagcuucuggaugugcagcaacggcagccugcagugcagaaucugcaucuga

SEQ ID NO: 160337 - RNA, 1701 nt, Artificial Sequence
  derived and/or modified CDS sequence (opt4) from hemagglutinin__InfluenzaA__AAZ79615
augaagaccaucaucgcccugagcuacauccugugccugguguucgcccagaagauccccggcaacgacaacagcaccgccacccugugcgugggccaccacgccgugcccaacggcaccaucgugaagaccaucaccaacgaccagaucgaggugaccaacgccaccgagcuggugcagagcagcagcaccggcggcaucugcgacagcccccaccagauccuggacggcgagaacugcacccugaucgacgcccugcugggcgacccccagugcgacggcuuccagaacaagaagugggaccuguucguggagagaagcaaggccuacagcaacugcuaccccuacgacgugcccgacuacgccagccugagaagccugguggccagcagcggcacccuggaguucaacaacgagagcuucaacuggaccggcgugacccagaacggcaccagcagcgccugcaagagaagaagcaacaacagcuucuucagcagacugaacuggcugacccaccugaaguucaaguaccccgcccugaacgugaccaugcccaacaacgagaaguucgacaagcuguacaucuggggcgugcaccaccccggcaccgacaacgaccagaucagccuguacgcccaggccagcggcagaaucaccgugagcaccaagagaagccagcagaccgugauccccaacaucggcagcagacccagagugagagacauccccagcagaaucagcaucuacuggaccaucgugaagcccggcgacauccugcugaucaacagcaccggcaaccugaucgcccccagaggcuacuucaagaucagaagcggcaagagcagcaucaugagaagcgacgcccccaucggcaagugcaacagcgagugcaucacccccaacggcagcauccccaacgacaagcccuuccagaacgugaacagaaucaccuacggcgccugccccagauacgugaagcagaacacccugaagcuggccaccggcaugagaaacgugcccgagaagcagaccagaggcaucuucggcgccaucgccggcuucaucgagaacggcugggagggcaugguggacggcugguacggcuucagacaccagaacagcgagggcaucggccaggccgccgaccugaagagcacccaggccgccaucaaccagaucaacggcaagcugaacagacugaucggcaagaccaacgagaaguuccaccagaucgagaaggaguucagcgagguggagggcagaauccaggaccuggagaaguacguggaggacaccaagaucgaccuguggagcuacaacgccgagcugcugguggcccuggagaaccagcacaccaucgaccugaccgacagcgagaugaacaagcuguucgagagaaccaagaagcagcugagagagaacgccgaggacaugggcaacggcugcuucaagaucuaccacaagugcgacaacgccugcaucggcagcaucagaaacggcaccuacgaccacgacguguacagagacgaggcccugaacaacagauuccagaucaagggcguggagcugaagagcggcuacaaggacuggauccuguggaucagcuucgccaucagcugcuuccugcugugcguggugcugcugggcuucaucaugugggccugccagaagggcaacaucagaugcaacaucugcaucuga

SEQ ID NO: 160338 - RNA, 1701 nt, Artificial Sequence
  derived and/or modified CDS sequence (opt4) from hemagglutinin__InfluenzaA__AAZ79627
augaagaccaucaucgcccugagcuacauccugugccugguguucgcccagaagcugcccggcaacgacaacagcaccgccacccugugccugggccaccacgccgugcccaacggcaccaucgugaagaccaucaccaacgaccagaucgaggugaccaacgccaccgagcuggugcagagcagcagcaccggcggcaucugcgacagcccccaccagauccuggacggcgagaacugcacccugaucgacgcccugcugggcgacccccagugcgacggcuuccagaacaagaagugggaccuguucguggagagaagcaaggccuacagcaacugcuaccccuacgacgugcccgacuacgccagccugagaagccugguggccagcagcggcacccuggaguucaacaacgagagcuucaacuggaccggcgugacccagaacggcaccagcagcgccugcaagagaagaagcaacagcagcuucuucagcagacugaacuggcugacccaccugaaguucaaguaccccgcccugaaggugaccaugcccaacaacgagaaguucgacaagcuguacaucuggggcgugcaccaccccggcaccgacaacgaccagaucagccuguacgcccaggccagcggcagaaucaccgugagcaccaagagaagccagcagaccgugauccccaacaucggcagcagacccagagugagagacauccccagcagaaucagcaucuacuggaccaucgugaagcccggcgacauccugcugaucaacagcaccggcaaccugaucgcccccagaggcuacuucaagaucagaagcggcaagagcagcaucaugagaagcgacgcccccaucggcaagugcaacagcgagugcaucacccccaacggcagcauccccaacgacaagcccuuccagaacgugaacagaaucaccuacggcgccugccccagauacgugaagcagaacacccugaagcuggccaccggcaugagaaacgugcccgagaagcagaccagaggcaucuucggcgccaucgccggcuucaucgagaacggcugggagggcaugguggacggcugguacggcuucagacaccagaacagcgagggcaucggccaggccgccgaccugaagagcacccaggccgccaucaaccagaucaacggcaagcugaacagacugaucggcaagaccaacgagaaguuccaccagaucgagaaggaguucagcgagguggagggcagaauccaggaccuggagaaguacguggaggacaccaagaucgaccuguggagcuacaacgccgagcugcugguggcccuggagaaccagcacaccaucgaccugaccgacagcgagaugaacaagcuguucgagagaaccaagaagcagcugagagagaacgccgaggacaugggcaacggcugcuucaagaucuaccacaagugcgacaacgccugcaucggcagcaucagaaacggcaccuacgaccacgacguguacagagacgaggcccugaacaacagauuccagaucaagggcguggagcugaagagcggcuacaaggacuggauccuguggaucagcuucgccaucagcugcuuccugcugugcguggcccugcugggcuucaucaugugggccugccagaagggcaacaucagaugcaacaucugcaucuga

SEQ ID NO: 160339 - RNA, 1701 nt, Artificial Sequence; identical to SEQ ID NO: 160316
  derived and/or modified CDS sequence (opt4) from hemagglutinin__InfluenzaA__AAZ79941

SEQ ID NO: 160340 - RNA, 1701 nt, Artificial Sequence; identical to SEQ ID NO: 160315
  derived and/or modified CDS sequence (opt4) from hemagglutinin__InfluenzaA__AAZ79944

SEQ ID NO: 160341 - RNA, 1701 nt, Artificial Sequence
  derived and/or modified CDS sequence (opt4) from hemagglutinin__InfluenzaA__AAZ79963
augaagaccaucaucgcccugagcuacauccugugccugguguucgcccagaagcugcccggcaacgacaacagcaccgccacccugugccugggccaccacgccgugcccaacggcaccaucgugaagaccaucaccaacgaccagaucgaggugaccaacgccaccgagcuggugcagagcagcagcaccggcggcaucugcgacagcccccaccagauccuggacggcgagaacugcacccugaucgacgcccugcugggcgacccccagugcgacggcuuccagaacaagaagugggaccuguucguggagagaagcaaggccuacagcaacugcuaccccuacgacgugcccgacuacgccagccugagaagccugguggccagcagcggcacccuggaguucaacaacgagagcuucaacuggaccggcgugacccagaacggcaccagcagcgccugcaagagaagaagcaacaacagcuucuucagcagacugaacuggcugacccaccugaaguucaaguaccccgcccugaacgugaccaugcccaacaacgagaaguucgacaagcuguacaucuggggcgugcaccaccccggcaccgacaacgaccagaucagccuguacgcccaggccagcggcagaaucaccgugagcaccaagagaagccagcagaccgugauccccagcaucggcagcagacccagaaucagagacgugcccagcagaaucagcaucuacuggaccaucgugaagcccggcgacauccugcugaucaacagcaccggcaaccugaucgcccccagaggcuacuucaagaucagaagcggcaagagcagcaucaugagaagcgacgcccccaucggcaagugcaacagcgagugcaucacccccaacggcagcauccccaacgacaagcccuuccagaacgugaacagaaucaccuacggcgccugccccagauacgugaagcagaacacccugaagcuggccaccggcaugagaaacgugcccgagaagcagaccagaggcaucuucggcgccaucgccggcuucaucgagaacggcugggagggcaugguggacggcugguacggcuucagacaccagaacagcgagggcaccggccaggccgccgaccugaagagcacccaggccgccaucaaccagaucaacggcaagcugaacagacugaucggcaagaccaacgagaaguuccaccagaucgagaaggaguucagcgagguggagggcagaauccaggaccuggagaaguacguggaggacaccaagaucgaccuguggagcuacaacgccgagcugcugguggcccuggagaaccagcacaccaucgaccugaccgacagcgagaugaacaagcuguucgagagaaccaagaagcagcugagagagaacgccgaggacaugggcaacggcugcuucaagaucuaccacaagugcgacaacgccugcaucggcagcaucagaaacggcaccuacgaccacgacguguacagagacgaggcccugaacaacagauuccagaucaagggcguggagcugaagagcggcuacaaggacuggauccuguggaucagcuucgccaucagcugcuuccugcugugcguggcccugcugggcuucaucaugugggccugccagaagggcaacaucagaugcaacaucugcaucuga

SEQ ID NO: 160342 - RNA, 1701 nt, Artificial Sequence
  derived and/or modified CDS sequence (opt4) from hemagglutinin__InfluenzaA__AAZ79974
augaagaccaucaucgcccugagcuacauccugugccugguguucgcccagaagcugcccggcaacgacaacagcaccgccacccugugccugggccaccacgccgugcccaacggcaccaucgugaagaccaucaccaacgaccagaucgaggugaccaacgccaccgagcuggugcagagcagcagcaccggcggcaucugcgacagcccccaccagauccuggacggcgagaacugcacccugaucgacgcccugcugggcgacccccagugcgacggcuuccagaacaagaagugggaccuguucguggagagaagcaaggccuacagcaacugcuaccccuacgacgugcccgacuacgccagccugagaagccugguggccagcagcggcacccuggaguucaacaacgagagcuucaacuggaccggcgugacccagaacggcaccagcagcgccugcaagagaagaagcaacaacagcuucuucagcagacugaacuggcugacccaccugaaguucaaguaccccgcccugaacgugaccaugcccaacaacgagaaguucgacaagcuguacaucuggggcgugcaccaccccggcaccaacaacgaccagaucagccuguacgcccaggccagcggcagaaucaccgugagcaccaagagaagccagcagaccgugauccccaacaucggcagcagacccagagugagagacauccccagcagaaucagcaucuacuggaccaucgugaagcccggcgacauccugcugaucaacagcaccggcaaccugaucgcccccagaggcuacuucaagaucagaagcggcaagagcagcaucaugagaagcgacgcccccaucggcaagugcaacagcgagugcaucacccccaacggcagcauccccaacgacaagcccuuccagaacgugaacagaaucaccuacggcgccugccccagauacgugaagcagaacacccugaagcuggccaccggcaugagaaacgugcccgagaagcagaccagaggcaucuucggcgccaucgccggcuucaucgagaacggcugggagggcaugguggacggcugguacggcuucagacaccagaacagcgagggcaucggccaggccgccgaccugaagagcacccaggccgccaucaaccagaucaacggcaagcugaacagacugaucggcaagaccaacgagaaguuccaccagaucgagaaggaguucagcgagguggagggcagaauccaggaccuggagaaguacguggaggacaccaagaucgaccuguggagcuacaacgccgagcugcugguggcccuggagaaccagcacaccaucgaccugaccgacagcgagaugaacaagcuguucgagagaaccaagaagcagcugagagagaacgccgaggacaugggcaacggcugcuucaagaucuaccacaagugcgacaacgccugcaucggcagcaucagaaacggcaccuacgaccacgacguguacagagacgaggcccugaacaacagauuccagaucaagggcguggagcugaagagcggcuacaaggacuggauccuguggaucagcuucgccaucagcugcuuccugcugugcguggcccugcugggcuucaucaugugggccugccagaagggcaacaucagaugcaacaucugcaucuga

SEQ ID NO: 160343 - RNA, 1701 nt, Artificial Sequence; identical to SEQ ID NO: 160315
  derived and/or modified CDS sequence (opt4) from hemagglutinin__InfluenzaA__AAZ79996

SEQ ID NO: 160344 - RNA, 1701 nt, Artificial Sequence
  derived and/or modified CDS sequence (opt4) from hemagglutinin__InfluenzaA__AAZ80007
augaagaccaucaucgcccugagccacaucuucugccuggugcugggccaguaccugcccggcaacgacaacagcaccgccacccugugccugggccaccacgccgugcccaacggcacccuggugaagaccaucaccaacgaccagaucgaggugaccaacgccaccgagcuggugcagagcagcagcaccggcaagaucugcaacaacccccacagaauccuggacggcaucgacugcacccugaucgacgcccugcugggcgacccccacugcgacggcuuccagaacgagaccugggaccuguucguggagagaagcaaggccuucagcaacugcuaccccuacgacgugcccgacuacgccagccugagaagccugguggccagcagcggcacccuggaguucaucaccgagggcuucaccuggaccggcgugacccagaacggcggcagcaacgccugcaagagaggccccggcagcggcuucuucagcagacugaacuggcugaccaagagcgagagcaccuaccccgugcugaacgugaccaugcccaacaacgacaacuucgacaagcuguacaucuggggcgugcaccaccccagcaccaaccaggagcagaccagccuguacgugcaggccagcggcagagugaccgugagcaccagaagaagccagcagaccaucauccccaacaucggcagcagacccugggugagaggccugagcagcagaaucagcaucuacuggaccaucgugaagcccggcgacgugcuggugaucaacagcaacggcaaccugaucgcccccagaggcuacuucaagaugagaaccggcaagagcagcaucaugagaagcgacgcccccaucgacaccugcaucagcgagugcaucacccccaacggcagcauccccaacgacaagcccuuccagaacgugaacaagaucaccuacggcgccugccccaaguacgugaagcagaacacccugaagcuggccaccggcaugagaaacgugcccgagaagcagaccagaggccuguucggcgccaucgccggcuucaucgagaacggcugggagggcaugaucgacggcugguacggcuucagacaccagaacagcgagggcaccggccaggccgccgaccugaagagcacccaggccgccaucgaccagaucaacggcaagcugaacagagugaucgagaagaccaacgagaaguuccaccagaucgagaaggaguucagcgagguggagggcagaauccaggaccuggagaaguacguggaggacaccaagaucgaccuguggagcuacaacgccgagcugcugguggcccuggagaaccagcacaccaucgaccugaccgacagcgagaugaacaagcuguucgagaagaccagaagacagcugagagagaacgccgaggacaugggcaacggcugcuucaagaucuaccacaagugcgacaacgccugcaucgagagcaucagaaacggcaccuacgaccacgacguguacagagacgaggcccugaacaacagauuccagaucaagggcguggagcugaagagcggcuacaaggacuggauccuguggaucagcuucgccaucagcugcuuccugcugugcguggugcugcugggcuucaucaugugggccugccagagaggcaacaucagaugcaacaucugcaucuga

SEQ ID NO: 160345 - RNA, 1701 nt, Artificial Sequence; identical to SEQ ID NO: 160316
  derived and/or modified CDS sequence (opt4) from hemagglutinin__InfluenzaA__AAZ80017

SEQ ID NO: 160346 - RNA, 1701 nt, Artificial Sequence
  derived and/or modified CDS sequence (opt4) from hemagglutinin__InfluenzaA__AAZ80030
augaagaccaucaucgcccugagcuacauccugugccugguguucgcccaggagcugcccggcaacgacaacagcaccgccacccugugccugggccaccacgccgugcccaacggcaccaucgugaagaccaucaccaacgaccagaucgaggugaccaacgccaccgagcuggugcagagcagcagcaccggcggcaucugcgacagcccccaccagauccuggacggcgagaacugcacccugaucgacgcccugcugggcgacccccagugcgacggcuuccagaacaagaagugggaccuguucguggagagaagcaaggccuacagcaacugcuaccccuacgacgugcccgacuacgccagccugagaagccugguggccagcagcggcacccuggaguucaacaacgagagcuucaacuggaccggcgugacccagaacggcaccagcagcgccugcaagagaagaagcaacaacagcuucuucagcagacugaacuggcugacccaccugaaguucaaguaccccgcccugaacgugaccaugcccaacaacgagaaguucgacaagcuguacaucuggggcgugcaccaccccggcaccgacaacgaccagaccagccuguacgcccaggccagcggcagaaucaccgugagcaccaagagaagccagcagaccgugauccccaacaucggcagcagacccagagugagagacauccccagcagaaucagcaucuacuggaccaucgugaagcccggcgacauccugcugaucaacagcaccggcaaccugaucgcccccagaggcuacuucaagaucagaagcggcaagagcagcaucaugagaagcgacgcccccaucggcaagugcaacagcgagugcaucacccccaacggcagcauccccaacgacaagcccuuccagaacgugaacagaaucaccuacggcgccugccccagauacgugaagcagaacacccugaagcuggccaccggcaugagaaacgugcccgagaagcagaccagaggcaucuucggcgccaucgccggcuucaucgagaacggcugggagggcaugguggacggcugguacggcuucagacaccagaacagcgagggcaucggccaggccgccgaccugaagagcacccaggccgccaucaaccagaucaacggcaagcugaacagacugaucggcaagaccaacgagaaguuccaccagaucgagaaggaguucagcgagguggagggcagaauccaggaccuggagaaguacguggaggacaccaagaucgaccuguggagcuacaacgccgagcugcugguggcccuggagaaccagcacaccaucgaccugaccgacagcgagaugaacaagcuguucgagagaaccaagaagcagcugagagagaacgccgaggacaugggcaacggcugcuucaagaucuaccacaagugcgacaacgccugcaucggcagcaucagaaacggcaccuacgaccacgacguguacagagacgaggcccugaacaacagauuccagaucaagggcguggagcugaagagcggcuacaaggacuggauccuguggaucagcuucgccaucagcugcuuccugcugugcguggcccugcugggcuucaucaugugggccugccagaagggcaacaucagaugcaacaucugcaucuga

SEQ ID NO: 160347 - RNA, 1701 nt, Artificial Sequence
  derived and/or modified CDS sequence (opt4) from hemagglutinin__InfluenzaA__AAZ83242
augaagaccaucaucgcccugagcuacauccugugccugguguucgcccagaagcugcccggcaacgacaacagcaccgccacccugugccugggccaccacgccgugcccaacggcaccaucgugaagaccaucaccaacgaccagaucgaggugaccaacgccaccgagcuggugcagagcagcagcaccggcgagaucugcgacagcccccaccagauccuggacggcgagaacugcacccugaucgacgcccugcugggcgacccccagugcgacggcuuccagaacaagaagugggaccuguucguggagagaaacaaggccuacagcaacugcuaccccuacgacgugcccgacuacgccagccugagaagccugguggccagcagcggcacccuggaguucaacaacgagagcuucaacuggaccggcgugacccagaacggcaccagcagcgccugcaagagaagaagcaacaagagcuucuucagcagacugaacuggcugacccaccugaaguacaaguaccccgcccugaacgugaccaugcccaacaacgagaaguucgacaagcuguacaucuggggcgugcaccaccccggcaccgacagcgaccagaucaaccuguacgcccaggccagcggcagaaucaccgugagcaccaagagaagccagcagaccgugauccccaacaucggcuacagacccagagugagagacgugcccagcagaaucagcaucuacuggaccaucgugaagcccggcgacauccugcugaucaacagcaccggcaaccugaucgcccccagaggcuacuucaagaucagaagcggcaagagcagcaucaugagaagcgacgcccccaucggcaagugcaacagcgagugcaucacccccaacggcagcauccccaacgacaagcccuuccagaacgugaacagaaucaccuacggcgccugccccagauacgugaagcagaacacccugaagcuggccaccggcaugagaaacgugcccgagaagcagaccagaggcaucuucggcgccaucgccggcuucaucgagaacggcugggagggcaugguggacggcugguacggcuucagacaccagaacagcgagggcaccggccaggccgccgaccugaagagcacccaggccgccaucaaccagaucaacggcaagcugaacagacugaucggcaagaccaacgagaaguuccaccagaucgagaaggaguucagcgagguggagggcagaauccaggaccuggagaaguacguggaggacaccaagaucgaccuguggagcuacaacgccgagcugcugguggcccuggagaaccagcacaccaucgaccugaccgacagcgagaugaacaagcuguucgagagaaccaagaagcagcugagagagaacgccgaggacaugggcaacggcugcuucaagaucuaccacaagugcgacaacgccugcaucggcagcaucagaaacggcaccuacgaccacgacguguacagagacgaggcccugaacaacagauuccagaucaagggcguggagcugaagagcggcuacaaggacuggauccuguggaucagcuucgccaucagcugcuuccugcugugcguggcccugcugggcuucaucaugugggccugccagaagggcaacaucagaugcaacaucugcaucuga

SEQ ID NO: 160348 - RNA, 1701 nt, Artificial Sequence
  derived and/or modified CDS sequence (opt4) from hemagglutinin__InfluenzaA__AAZ83266
augaagaccaucaucgcccugagcuacauccugugccugguguucgcccagaagcugcccggcaacgacaacagcaccgccacccugugccugggccaccacgccgugcccaacggcacccuggugaagaccaucaccaacgaccagaucgaggugaccaacgccaacgagcuggugcagagcagcagcaccggcagaaucugcgacagcccccaccagauccuggacggcgagaacugcacccugaucgacgcccugcugggcgaccccagaugcgacggcuuccagaacaaggagugggaccuguucguggagagaagcaaggccuacagcaacugcuaccccuacgacgugcccgacuacgccagccugagaagccugguggccagcagcggcacccuggaguucaacaacgagagcuucaacuggaccggcguggcccagaacggcaccagcagcgccugcaagagaagaagcaacaagagcuucuucagcagacugaacuggcugcaccagcugaaguacaaguaccccgcccugaacgugaccaugcccaacaacgagaaguucgacaagcuguacaucuggggcgugcaccaccccagcaccgacagcgaccagaucagccuguacgcccaggccagcggcagagugaccgugagcaccaagagaagccagcagaccgugauccccaacaucggcagcagacccugggugagaggcgugagcagcagaaucagcaucuacuggaccaucgugaagcccggcgacauccugcugaucaacagcaccggcaaccugaucgcccccagaggcuacuucaagaucagaagcggcaagagcagcaucaugagaagcgacgcccccaucggcaagugcaacagcgagugcaucacccccaacggcagcauccccaacgacaagcccuuccagaacgugaacagaaucaccuacggcgccugccccagauacgugaagcagaacacccugaagcuggccaccggcaugagaaacgugcccgagaagcagaccagaggcaucuucggcgccaucgccggcuucaucgagaacggcugggagggcaugguggacggcugguacggcuucagacaccagaacagcgagggcaccggccaggccgccgaccugaagagcacccaggccgccaucaaccagaucaacggcaagcugaacagacugaucgagaagaccaacgagaaguuccaccagaucgagaaggaguucagcgagguggagggcagaauccaggaccuggagaaguacguggaggacaccaagaucgaccuguggagcuacaacgccgagcugcugguggcccuggagaaccagcacaccaucgaccugaccgacagcgagaugaacaagcuguucgagagaaccaagaagcagcugagagagaacgccgaggacaugggcaacggcugcuucaagaucuaccacaagugcgacaacgccugcaucggcagcaucagaaacggcaccuacgaccacgacguguacagagacgaggcccugaacaacagauuccagaucaagggcguggagcugaagagcggcuacaaggacuggauccuguggaucagcuucgccaucagcugcuuccugcugugcguggugcugcugggcuucaucaugugggccugccagaagggcaacaucagaugcaacaucugcaucuga

SEQ ID NO: 160349 - RNA, 1701 nt, Artificial Sequence; identical to SEQ ID NO: 160246
  derived and/or modified CDS sequence (opt4) from hemagglutinin__InfluenzaA__AAZ83277

SEQ ID NO: 160350 - RNA, 1701 nt, Artificial Sequence; identical to SEQ ID NO: 160132
  derived and/or modified CDS sequence (opt4) from hemagglutinin__InfluenzaA__AAZ83288

SEQ ID NO: 160351 - RNA, 1701 nt, Artificial Sequence
  derived and/or modified CDS sequence (opt4) from hemagglutinin__InfluenzaA__AAZ83312
augaagaccaucaucgcccugagcuacauccugugccugguguucgcccagaagcugcccggcaacgacaacagcaccgccacccugugccugggccaccacgccgugcccaacggcacccuggugaagaccaucaccaacgaccagaucgaggugaccaacgccaccgagcuggugcagagcagcagcaccggcagaaucugcgacagcccccaccagauccuggacggcgagaacugcacccugaucgacgcccugcugggcgacccccacugcgacggcuuccagaacaaggagugggaccuguucguggagagaagcaaggccuacagcaacugcuaccccuacgacgugcccgacuacgccagccugagaagccugguggccagcagcggcacccuggaguucaacaacgagagcuucaacuggaccggcguggcccagaacggcaccagcagcgccugcaagagaagaagcaucaagagcuucuucagcagacugaacuggcugcaccagcugaaguacaaguaccccgcccugaacgugaccaugcccaacaacgacaaguucgacaagcuguacaucuggggcgugcaccaccccagcaccgacagcgaccagaccagccuguacgcccaggccagcggcagagugaccgugagcaccaagagaagccagcagaccgugauccccaacaucggcagcagacccugggugagaggcgugagcagcagaaucagcaucuacuggaccaucgugaagcccggcgacauccugcugaucaacagcaccggcaaccugaucgcccccagaggcuacuucaagaucagaagcggcaagagcagcaucaucagaagcgacgcccccaucggcaagugcaacagcgagugcaucacccccaacggcagcauccccaacgacaagcccuuccagaacgugaacagaaucaccuacggcgccugccccagauacgugaagcagaacacccugaagcuggccaccggcaugagaaacgugcccgagaagcagaccagaggcaucuucggcgccaucgccggcuucaucgagaacggcugggagggcaugguggacggcugguacggcuucagacaccagaacagcgagggcaccggccaggccgccgaccugaagagcacccaggccgccaucaaccagaucaacggcaagcugaacagacugaucgagaagaccaacgagaaguuccaccagaucgagaaggaguucagcgagguggagggcagaauccaggaccuggagaaguacguggaggacaccaagaucgaccuguggagcuacaacgccgagcugcugguggcccuggagaaccagcacaccaucgaccugaccgacagcgagaugaacaagcuguucgagagaaccagaaagcagcugagagagaacgccgaggacaugggcaacggcugcuucaagaucuaccacaagugcgacaacgccugcaucggcagcaucagaaacggcaccuacgaccacgacguguacagagacgaggcccugaacaacagauuccagaucaagggcguggagcugaagagcggcuacaaggacuggauccuguggaucagcuucgccaucagcugcuuccugcugugcguggugcugcugggcuucaucaugugggccugccagaagggcaacaucagaugcaacaucugcaucuga

SEQ ID NO: 160352 - RNA, 1701 nt, Artificial Sequence
  derived and/or modified CDS sequence (opt4) from hemagglutinin__InfluenzaA__AAZ83323
augaagaccaucaucgcccugagcuacauccugugccugguguucgcccagaagcugcccggcaacgacaacagcaccgccacccugugccugggccaccacgccgugcccaacggcacccuggugaagaccaucaccaacgaccagaucgaggugaccaacgccaccgagcuggugcagagcagcagcaccggcagaaucugcgacagcccccacagaauccuggacggcgagaacugcacccugaucgacgcccugcugggcgacccccacugcgacggcuuccagaacaaggagugggaccuguucguggagagaagcaaggccuacagcaacugcuaccccuacgacgugcaggacuacgccagccugagaagccugguggccagcagcggcacccuggaguucaacaacgagagcuucaacuggaccggcguggcccagaacggcaccagcuacgccugcaagagaagaagcaucaagagcuucuucagcagacugaacuggcugcaccagcugaaguacaaguaccccgcccugaacgugaccaugcccaacaacgacaaguucgacaagcuguacaucuggggcgugcaccaccccagcaccgacagcgaccagaccagccuguacgcccaggccagcggcagagugaccgugagcaccaagagaagccagcagaccgugaucagcaacaucggcagcagacccugggugagaggcgugagcagcagaaucagcaucuacuggaccaucgugaagcccggcgacauccugcugaucaccagcaccggcaaccugaucgcccccagaggcuacuucaagaucagaagcggcaagagcagcaucaugagaagcgacgcccccaucggcaagugcaacagcgagugcaucacccccaacggcagcauccccaacgacaagcccuuccagaacgugaacagaaucaccuacggcgccugccccagauacgugaagcagaacacccugaagcuggccaccggcaugagaaacgugcccgagaagcagaccagaggcaucuucggcgccaucgccggcuucaucgagaacggcugggagggcaugguggacggcugguacggcuucagacaccagaacagcgagggcaccggccaggccgccgaccugaagagcacccaggccgccaucaaccagaucaacggcaagcugaacagacugaucgagaagaccaacgagaaguuccaccagaucgagaaggaguucagcgagguggagggcagaauccaggaccuggagaaguacguggaggacaccaagaucgaccuguggagcuacaacgccgagcugcugguggcccuggagaaccagcacaccaucgaccugaccgacagcgagaugaacaagcuguucgagagaaccagaaagcagcugagagagaacgccgaggacaugggcaacggcugcuucaagaucuaccacaagugcgacaacgccugcaucggcagcaucagaaacggcaccuacgaccacgacguguacagagacgaggcccugaacaacagauuccagaucaagggcguggagcugaagagcggcuacaaggacuggauccuguggaucagcuucgccaucagcugcuuccugcugugcguggugcugcugggcuucaucaugugggccugccagaagggcaacaucagaugcaacaucugcaucuga

SEQ ID NO: 160353 - RNA, 1701 nt, Artificial Sequence; identical to SEQ ID NO: 160342
  derived and/or modified CDS sequence (opt4) from hemagglutinin__InfluenzaA__AAZ83371

SEQ ID NO: 160354 - RNA, 1701 nt, Artificial Sequence; identical to SEQ ID NO: 160315
  derived and/or modified CDS sequence (opt4) from hemagglutinin__InfluenzaA__AAZ83688

SEQ ID NO: 160355 - RNA, 1698 nt, Artificial Sequence
  derived and/or modified CDS sequence (opt4) from hemagglutinin__InfluenzaA__ABA06510
augaaggugaagcugcugauccugcugugcaccuucaccgccaccuacgccgacaccaucugcaucggcuaccacgccaacaacagcaccgacaccguggacaccgugcuggagaagaacgugaccgugacccacagcgugaaccugcuggaggacagccacaacggcaagcugugccugcugaagggcaucgccccccugcagcugggcaacugcagcguggccggcuggauccugggcaaccccgagugcgagcugcugaucgccaaggagagcuggagcuacaucguggagacccccaaccccgagaacggcgccugcuaccccggcuacuucgccgacuacgaggagcugagagagcagcugagcagcgugagcagcuucgagagauucgagaucuuccccaaggagagcagcuggcccaaccacaccgugaccggcgugagcgccagcugcagccacaacggcaagagcagcuucuacagaaaccugcuguggcugaccggcaagaacggccuguaccccaaccugagcaagagcuacgccaacaacaaggagaaggaggugcugauccuguggggcgugcaccacccccccaacaucggcgaccagagaacccuguaccacaccgagaacgccuacgugagcguggugagcagccacuacagcagaagauucacccccgagaucaccaagagacccaaggugagagaccaggagggcagaaucaacuacuacuggacccugcuggagcccggcgacaccaucaucuucgaggccaacggcaaccugaucgcccccugguacgccuucgcccugagcagaggcuucggcagcggcaucaucaccagcaacgcccccauggacgagugcgacgccaagugccagaccccccagggcgccaucaacagcagccugcccuuccagaacgugcaccccgugaccaucggcgagugccccaaguacgugagaagcgccaagcugagaauggugaccggccugagaaacauccccagcauccagagcagaggccuguucggcgccaucgccggcuucaucgagggcggcuggaccggcaugguggacggcugguacggcuaccaccaccagaacgagcagggcagcggcuacgccgccgaccagaagagcacccagaacgccaucaacggcaucaccaacaaggugaacagcgugaucgagaagaugaacacccaguucaccgccgugggcaaggaguucaacaagcuggagagaagaauggagaaccugaacaagaagguggacgacggcuuccuggacaucuggaccuacaacgccgagcugcuggugcugcuggagaacgagagaacccuggacuuccacgacagcaacgugaagaaccuguacgagaaggugaagagccagcugaagaacaacgccaaggagaucggcaacggcugcuucgaguucuaccacaagugcaacaacgagugcauggagagcgugaagaacggcaccuacgacuaccccaaguacagcgaggagagcaagcugaacagagagaagaucgacggcgugaagcuggacagcaugggcguguaccagauccuggccaucuacagcaccguggccagcagccuggugcugcuggugagccugggcgccaucagcuucuggaugugcagcaacggcagccugcagugcagaaucugcaucuga

SEQ ID NO: 160356 - RNA, 1698 nt, Artificial Sequence
  derived and/or modified CDS sequence (opt4) from hemagglutinin__InfluenzaA__ABA08464
augaaggccaagcugcuggugcugcugugcaccuucaccgccaccuacgccgacaccaucugcaucggcuaccacgccaacaacagcaccgacaccguggacaccgugcuggagaagaacgugaccgugacccacagcgugaaccugcuggaggacagccacaacggcaagcugugccugcugaagggcaucgccccccugcagcugggcaacugcagcguggccggcuggauccugggcaaccccgagugcgagcugcugaucagcaaggagagcuggagcuacaucguggagacccccaaccccgagaacggcaccugcuaccccggcuacuucgccgacuacgaggagcugagagagcagcugagcagcgugagcagcuucgagagauucgagaucuuccccaagggcagcagcuggcccaaccacaccgugaccggcgugagcgccagcugcagccacaacggcaagagcagcuucuacagaaaccugcuguggcugaccggcaagaacggccuguaccccaaccugagcaugagcuacgugaacaacaaggagaaggaggugcuggugcuguggggcgugcaccacccccccaacaucggcgaccagagagcccuguaccacaccgagaacgccuacgugagcguggugagcagccacuacagcagaagauucacccccgagaucgccaagagacccaaggugagagaccaggagggcagaaucaacuacuacuggacccugcuggagcccggcgacaccaucaucuucgaggccaacggcaaccugaucgcccccugguacgccuucgcccugagcagaggcuucggcagcggcaucaucaccagcaacgcccccauggacgagugcgacgccaagugccagaccccccagggcgccaucaacagcagccugcccuuccagaacgugcaccccgugaccaucggcgagugccccaaguacgugagaagcgccaagcugagaauggugaccggccugagaaacauccccagcauccagagcagaggccuguucggcgccaucgccggcuucaucgagggcggcuggaccggcaugguggacggcugguacggcuaccaccaccagaacgagcagggcagcggcuacgccgccgaccagaagagcacccagaacgccaucaacggcaucaccaacaaggugaacagcgugaucgagaagaugaacacccaguucaccgccgugggcaaggaguucaacaagcuggagagaagaauggagaaccugaacaagaagguggacgacggcuuccuggacaucuggaccuacaacgccgagcugcuggugcugcuggagaacgagagaacccuggacuuccacgacagcaacgugaagaaccuguacgagaaggugaagagccagcugaagaacaacgccaaggagaucggcaacggcugcuucgaguucuaccacaagugcaacaacgagugcauggagagcgugaagaacggcaccuacgacuaccccaaguacagcgaggagagcaagcugaacagagagaagaucgacggcgugaagcuggagagcaugggcguguaccagauccuggccaucuacagcaccguggccagcagccuggugcugcuggugagccugggcgccaucagcuucuggaugugcagcaacggcagccugcagugcagaaucugcaucuga

SEQ ID NO: 160357 - RNA, 1698 nt, Artificial Sequence; identical to SEQ ID NO: 160356
  derived and/or modified CDS sequence (opt4) from hemagglutinin__InfluenzaA__ABA08486

SEQ ID NO: 160358 - RNA, 1698 nt, Artificial Sequence
  derived and/or modified CDS sequence (opt4) from hemagglutinin__InfluenzaA__ABA08508
augaaggugaagcugcugauccugcugugcaccuucaccgccaccuacgccgacaccaucugcaucggcuaccacgccaacaacagcaccgacaccguggacaccgugcuggagaagaacgugaccgugacccacagcgugaaccugcuggaggacagccacaacggcaagcugugccugcugaagggcaucgccccccugcagcugggcaacugcagcguggccggcuggauccugggcaaccccgagugcgagcugcugaucagcaaggagagcuggagcuacaucguggagacccccaaccccgagaacggcgccugcuaccccggcuacuucgccgacuacgaggagcugagagagcagcugagcagcgugagcagcuucgagagauucgagaucuuccccaaggagagcagcuggcccaaccacaccgugaccggcgugagcgccagcugcagccacaacggcaagagcagcuucuacagaaaccugcuguggcugaccggcaagaacggccuguaccccaaccugagcaagagcuacgccaacaacaagaagaaggaggugcugauccuguggggcgugcaccacccccccaacaucggcgugcagagaacccuguacuacaccgagaacgccuacgugagcguggugagcagccacuacagcagaagauucacccccgagaucaccaagagacccaaggugagagaccaggagggcagaaucaacuacuacuggacccugcuggagcccggcgacaccaucaucuucgaggccaacggcaaccugaucgcccccugguacgccuucgcccugagcagaggcuucggcagcggcaucaucaccagcaacgcccccauggacgagugcgacgccaagugccagaccccccagggcgccaucaacagcagccugcccuuccagaacgugcaccccgugaccaucggcgagugccccaaguacgugagaagcgccaagcugagaauggugaccggccugagaaacauccccagcauccagagcagaggccuguucggcgccaucgccggcuucaucgagggcggcuggaccggcaugguggacggcugguacggcuaccaccaccagaacgagcagggcagcggcuacgccgccgaccagaagagcacccagaacgccaucaacggcaucaccaacaaggugaacagcgugaucgagaagaugaacacccaguucaccgccgugggcaaggaguucaacaagcuggagagaagaauggagaaccugaacaagaagguggacgacggcuuccuggacaucuggaccuacaacgccgagcugcuggugcugcuggagaacgagagaacccuggacuuccacgacagcaacgugaagaaccuguacgagaaggugaagagccagcugaagaacaacgccaaggagaucggcaacggcugcuucgaguucuaccacaagugcaacaacgagugcauggagagcgugaagaacggcaccuacgacuaccccaaguacagcgaggagagcaagcugaacagagagaagaucgacggcgugaagcuggacagcaugggcguguaccagauccuggccaucuacagcaccguggccagcagccuggugcugcuggugagccugggcgccaucagcuucuggaugugcagcaacggcagccugcagugcagaaucugcaucuga

SEQ ID NO: 160359 - RNA, 1698 nt, Artificial Sequence
  derived and/or modified CDS sequence (opt4) from hemagglutinin__InfluenzaA__ABA12707
augaaggugaagcugcuggugcugcugugcaccuucaccgccaccuacgccgacaccaucugcaucggcuaccacgccaacaacagcaccgacaccguggacaccgugcuggagaagaacgugaccgugacccacagcgugaaccugcuggaggacagccacaacggcaagcugugccugcugaagggcaucgccccccugcagcugggcaacugcagcguggccggcuggauccugggcaaccccgagugcgagcugcugaucagcaaggagagcuggagcuacaucguggagacccccaaccccgagaacggcaccugcuaccccggcuacuucgccgacuacgaggagcugagagagcagcugagcagcgugagcagcuucgagagauucgagaucuuccccaaggagagcagcuggcccaaccacaccgugaccggcgugagcgccagcugcagccacaacggcaagagcagcuucuacagaaaccugcuguggcugaccggcaagaacggccuguaccccaaccugagcaagagcuacgccaacaacaaggagaaggaggugcuggugcuguggggcgugcaccacccccccaacaucggcgaccagagagcccuguaccacaccgagaacgccuacgugagcguggugagcagccacuacagcagaagauucacccccgagaucgccaagagacccaaggugagagaccaggagggcagaaucaacuacuacuggacccugcuggagcccggcgacaccaucaucuucgaggccaacggcaaccugaucgcccccagauacgccuucgcccugagcagaggcuucggcagcggcaucaucaccagcaacgcccccauggacgagugcgacgccaagugccagaccccccagggcgccaucaacagcagccugcccuuccagaacgugcaccccgugaccaucggcgagugccccaaguacgugagaagcgccaagcugagaauggugaccggccugagaaacauccccagcauccagagcagaggccuguucggcgccaucgccggcuucaucgagggcggcuggaccggcaugguggacggcugguacggcuaccaccaccagaacgagcagggcagcggcuacgccgccgaccagaagagcacccagaacgccaucaacggcaucaccaacaaggugaacagcgugaucgagaagaugaacacccaguucaccgccgugggcaaggaguucaacaagcuggagagaagaauggagaaccugaacaagaagguggacgacggcuuccuggacaucuggaccuacaacgccgagcugcuggugcugcuggagaacgagagaacccuggacuuccacgacagcaacgugaagaaccuguacgagaaggugaagagccagcugaagaacaacgccaaggagaucggcaacggcugcuucgaguucuaccacaagugcaacgacgagugcauggagagcgugaagaacggcaccuacgacuaccccaaguacagcgaggagagcaagcugaacagagagaagaucgacggcgugaagcuggagagcaugggcguguaccagauccuggccaucuacagcaccguggccagcagccuggugcugcuggugagccugggcgccaucagcuucuggaugugcagcaacggcagccugcagugcagaaucugcaucuga

SEQ ID NO: 160360 - RNA, 1698 nt, Artificial Sequence
  derived and/or modified CDS sequence (opt4) from hemagglutinin__InfluenzaA__ABA12715
augaaggccaagcugcuggugcugcugugcaccuucaccgccaccuacgccgacaccaucugcaucggcuaccacgccaacaacagcaccgacaccguggacaccgugcuggagaagaacgugaccgugacccacagcgugaaccugcuggaggacagccacaacggcaagcugugccugcugaagggcaucgccccccugcagcugggcaacugcagcguggccggcuggauccugggcaaccccgagugcgagcugcugaucagcaaggagagcuggagcuacaucguggagacccccaaccccgagaacggcaccugcuaccccggcuacuucgccgacuacgaggagcugagagagcagcugagcagcgugagcagcuucgagagauucgagaucuuccccaagggcagcagcuggcccaaccacaccgugaccggcgugagcgccagcugcagccacaacggcaagagcagcuucuacagaaaccugcuguggcugaccggcaagaacggccuguaccccaaccugagcaugagcuacgugaacaacaaggagaaggaggugcuggugcuguggggcgugcaccacccccccaacaucggcgaccagagagcccuguaccacaccgagaacgccuacgugagcguggugagcagccacuacagcagaagauucacccccgagaucgccaagagacccaaggugagagaccaggagggcagaaucaacuacuacuggacccugcuggagcccggcgacaccaucaucuucgaggccaacggcaaccugaucgcccccugguacgccuucgcccugagcagaggcuucggcagcggcaucaucaccagcaacgcccccauggacgagugcgacgccaagugccagaccccccagggcgccaucaacagcagccugcccuuccagaacgugcaccccgugaccaucggcgagugccccaaguacgugagaagcaccaagcugagaauggugaccggccugagaaacauccccagcauccagagcagaggccuguucggcgccaucgccggcuucaucgagggcggcuggaccggcaugguggacggcugguacggcuaccaccaccagaacgagcagggcagcggcuacgccgccgaccagaagagcacccagaacgccaucaacggcaucaccaacaaggugaacagcgugaucgagaagaugaacacccaguucaccgccgugggcaaggaguucaacaagcuggagagaagaauggagaaccugaacaagaagguggacgacggcuuccuggacaucuggaccuacaacgccgagcugcuggugcugcuggagaacgagagaacccuggacuuccacgacagcaacgugaagaaccuguacgagaaggugaagagccagcugaagaacaacgccaaggagaucggcaacggcugcuucgaguucuaccacaagugcgacaacgagugcauggagagcgugaagaacggcaccuacgacuaccccaaguacagcgaggagagcaagcugaacagagagaagaucgacggcgugaagcuggagagcaugggcguguaccagauccuggccaucuacagcaccguggccagcagccugguguuccuggugagccugggcgccaucagcuucuggaugugcagcaacggcagccugcagugcagaaucugcaucuga

SEQ ID NO: 160361 - RNA, 1698 nt, Artificial Sequence
  derived and/or modified CDS sequence (opt4) from hemagglutinin__InfluenzaA__ABA12729
augaaggugaagcugcuggugcugcugugcaccuucaccgccaccuacgccgacaccaucugcaucggcuaccacgccaacaacagcaccgacaccguggacaccgugcuggagaagaacgugaccgugacccacagcgugaaccugcuggaggacagccacaacggcaagcugugccugcugaagggcaucgccccccugcagcugggcaacugcagcguggccggcuggauccugggcaaccccgagugcgagcugcugaucagcaaggagagcuggagcuacaucguggagacccccaaccccgagaacggcaccugcuaccccggcuacuucgccgacuacgaggagcugagagagcagcugagcagcgugagcagcuucgagagauucgagaucuuccccaaggagagcagcuggcccaaccacaccgugaccggcgugagcgccagcugcagccacaacggcaagagcagcuucuacagaaaccugcuguggcugaccggcaagaacggccuguaccccaaccugagcaagagcuacgccaacaacaaggagaaggaggugcuggugcuguggggcgugcaccacccccccaacaucggcgaccagagagcccuguaccacaccgagaacgccuacaucagcguggugagcagccacuacagcagaagauucacccccgagaucgccaagagacccaaggugagagaccaggagggcagaaucaacuacuacuggacccugcuggagcccggcgacaccaucaucuucgaggccaacggcaaccugaucgcccccagauacgccuucgcccugagcagaggcuucggcagcggcaucaucaccagcaacgcccccauggacgagugcgacgccaagugccagaccccccagggcgccaucaacagcagccugcccuuccagaacgugcaccccgugaccaucggcgagugccccaaguacgugagaagcgccaagcugagaauggugaccggccugagaaacauccccagcauccagagcagaggccuguucggcgccaucgccggcuucaucgagggcggcuggaccggcaugguggacggcugguacggcuaccaccaccagaacgagcagggcagcggcuacgccgccgaccagaagagcacccagaacgccaucaacggcaucaccaacaaggugaacagcgugaucgagaagaugaacacccaguucaccgccgugggcaaggaguucaacaagcuggagagaagaauggagaaccugaacaagaagguggacgacggcuuccuggacaucuggaccuacaacgccgagcugcuggugcugcuggagaacgagagaacccuggacuuccacgacagcaacgugaagaaccuguacgagaaggugaagagccagcugaagaacaacgccaaggagaucggcaacggcugcuucgaguucuaccacaagugcaacgacgagugcauggagagcgugaagaacggcaccuacgacuaccccagauacagcgaggagagcaagcugaacagagagaagaucgacggcgugaagcuggagagcaugggcguguaccagauccuggccaucuacagcaccguggccagcagccuggugcugcuggugagccugggcgccaucagcuucuggaugugcagcaacggcagccugcagugcagaaucugcaucuga

SEQ ID NO: 160362 - RNA, 1701 nt, Artificial Sequence; identical to SEQ ID NO: 160346
  derived and/or modified CDS sequence (opt4) from hemagglutinin__InfluenzaA__ABA12740

SEQ ID NO: 160363 - RNA, 1701 nt, Artificial Sequence; identical to SEQ ID NO: 160315
  derived and/or modified CDS sequence (opt4) from hemagglutinin__InfluenzaA__ABA12751

SEQ ID NO: 160364 - RNA, 1701 nt, Artificial Sequence
  derived and/or modified CDS sequence (opt4) from hemagglutinin__InfluenzaA__ABA12762
augaagaccaucaucgcccugagcuacauccugugccugguguucgcccagaaguuccccggcaacgacaacagcaccgccacccugugccugggccaccacgccgugcccaacggcaccaucgugaagaccaucaccaacgaccagaucgaggugaccaacgccaccgagcuggugcagagcagcagcaccggcggcaucugcgacagcccccaccagauccuggacggcgagaacugcacccugaucgacgcccugcugggcgacccccagugcgacggcuuccagaacaagaagugggaccuguucguggagagaagcaaggccuacagcaacugcuaccccuacgacgugcccgacuacgccagccugagaagccugguggccagcagcggcacccuggaguucaacaacgagagcuucaacuggaccggcgugacccagaacggcaccagcagcgccugcaagagaagaagcaacaacagcuucuucagcagacugaacuggcugacccaccugaaguucaaguaccccgcccugaacgugaccaugcccaacaacgagaaguucgacaagcuguacaucuggggcgugcaccaccccggcaccgacaacgaccagaucagccuguacgcccaggccagcggcagaaucaccgugagcaccaagagaagccagcagaccgugauccccaacaucggcagcagacccagagugagagacauccccagcagaaucagcaucuacuggaccaucgugaagcccggcgacauccugcugaucaacagcaccggcaaccugaucgcccccagaggcuacuucaagaucagaagcggcaagagcagcaucaugagaagcgacgcccccaucggcaagugcaacagcgagugcaucacccccaacggcagcauccccaacgacaagcccuuccagaacgugaacagaaucaccuacggcgccugccccagauacgugaagcagaacacccugaagcuggccaccggcaugagaaacgugcccgagaagcagaccagaggcaucuucggcgccaucgccggcuucaucgagaacggcugggagggcaugguggacggcugguacggcuucagacaccagaacagcgagggcaucggccaggccgccgaccugaagagcacccaggccgccaucaaccagaucaacggcaagcugaacagacugaucggcaagaccaacgagaaguuccaccagaucgagaaggaguucagcgagguggagggcagaauccaggaccuggagaaguacguggaggacaccaagaucgaccuguggagcuacaacgccgagcugcugguggcccuggagaaccagcacaccaucgaccugaccgacagcgagaugaacaagcuguucgagagaaccaagaagcagcugagagagaacgccgaggacaugggcaacggcugcuucaagaucuaccacaagugcgacaacgccugcaucggcagcaucagaaacggcaccuacgaccacgacguguacagagacgaggcccugaacaacagauuccagaucaagggcguggagcugaagagcggcuacaaggacuggauccuguggaucagcuucgccaucagcugcuuccugcugugcguggugcugcugggcuucaucaugugggccugccagaagggcaacaucagaugcaacaucugcaucuga

SEQ ID NO: 160365 - RNA, 1701 nt, Artificial Sequence
  derived and/or modified CDS sequence (opt4) from hemagglutinin__InfluenzaA__ABA12773
augaagaccaucaucgcccugagcuacaucuucugccuggugcugggccaggacuuccccggcaacgacaacagcaccgccacccugugccugggccaccacgccgugcccaacggcacccuggugaagaccaucaccaacgaccagaucgaggugaccaacgccaccgagcuggugcagagcagcagcaccggcaagaucugcaacaacccccacagaauccuggacggcaucgacugcacccugaucgacgcccugcugggcgacccccacugcgacggcuuccagaacgagaccugggaccuguucguggagagaagcaaggccuucagcaacugcuaccccuacgacgugcccgacuacgccagccugagaagccugguggccagcagcggcacccuggaguucaucaacgagggcuucaccuggaccggcgugacccagaacggcggcagcaacgccugcaagagaggccccgacagcggcuucuucagcagacugaacuggcuguacaagagcggcagcaccuaccccgugcugaacgugaccaugcccaacaacgacaacuucgacaagcuguacaucuggggcgugcaccaccccagcaccgaccaggagcagaccagccuguacgugcaggccagcggcagagugaccgugagcaccaagagaagccagcagaccaucauccccaacaucggcagcagacccugggugagaggccugagcagcagaaucagcaucuacuggaccaucgugaagcccggcgacauccuggugaucaacagcaacggcaaccugaucgcccccagaggcuacuucaagaugagaaccggcaagagcagcaucaugagaagcgacgcccccaucggcaccugcaucagcgagugcaucacccccaacggcagcauccccaacgacaagcccuuccagaacgugaacaagaucaccuacggcgccugccccaaguacgugaagcagaacacccugaagcuggccaccggcaugagaaacgugcccgagaagcagaccagaggccuguucggcgccaucgccggcuucaucgagaacggcugggagggcaugaucgacggcugguacggcuucagacaccagaacagcgagggcaccggccaggccgccgaccugaagagcacccaggccgccaucgaccagaucaacggcaagcugaacagagugaucgagaagaccaacgagaaguuccaccagaucgagaaggaguucagcgagguggagggcagaauccaggaccuggagaaguacguggaggacaccaagaucgaccuguggagcuacaacgccgagcugcugguggcccuggagaaccagcacaccaucgaccugaccgacagcgagaugaacaagcuguucgagaagaccagaagacagcugagagagaacgccgaggacaugggcaacggcugcuucaagaucuaccacaagugcgacaacgccugcaucggcagcaucagaaacggcaccuacgaccacgacguguacagagacgaggcccugaacaacagauuccagaucaagggcguggagcugaagagcggcuacaaggacuggauccuguggaucagcuucgccaucagcugcuuccugcugugcguggugcugcugggcuucaucaugugggccugccagaagggcaacaucagaugcaacaucugcaucuga

SEQ ID NO: 160366 - RNA, 1701 nt, Artificial Sequence
  derived and/or modified CDS sequence (opt4) from hemagglutinin__InfluenzaA__ABA12780
augaagaccaucaucgcccugagcuacauccugugccugguguucgcccagaagcugcccggcaacgacaacagcaccgccacccugugccugggccaccacgccgugcccaacggcaccaucgugaagaccaucaccaacgaccagaucgaggugaccaacgccaccgagcuggugcagagcagcagcaccggcggcaucugcgacagcccccaccagauccuggacggcgagaacugcacccugaucgacgcccugcugggcgacccccagugcgacggcuuccagaacaagaagugggaccuguucguggagagaagcaaggccuacagcaacugcuaccccuacgacgugcccgacuacgccagccugagaagccugguggccagcagcggcacccuggaguucaacaacgagagcuucaacuggaccggcgugacccagaacggcaccagcagcgccugcaagagaagaagcaacaacagcuucuucagcagacugaacuggcugacccaccugaaguucaaguaccccgcccugaacgugaccaugcccaacaacgagaaguucgacaagcuguacaucuggggcgugcaccaccccggcaccaacaacgaccagaucagccuguacgcccaggccagcggcagaaucaccgugagcaccaagagaagccagcagaccgugauccccaacaucgagagcagacccagagugagagacauccccagcagaaucagcaucuacuggaccaucgugaagcccggcgacauccugcugaucaacagcaccggcaaccugaucgcccccagaggcuacuucaagaucagaagcggcaagagcagcaucaugagaagcgacgcccccaucggcaagugcaacagcgagugcaucacccccaacggcagcauccccaacgacaagcccuuccagaacgugaacagaaucaccuacggcgccugccccagauacgugaagcagaacacccugaagcuggccaccggcaugagaaacgugcccgagaagcagaccagaggcaucuucggcgccaucgccggcuucaucgagaacggcugggagggcaugguggacggcugguacggcuucagacaccagaacagcgagggcaucggccaggccgccgaccugaagagcacccaggccgccaucaaccagaucaacggcaagcugaacagacugaucggcaagaccaacgagaaguuccaccagaucgagaaggaguucagcgagguggagggcagaauccaggaccuggagaaguacguggaggacaccaagaucgaccuguggagcuacaacgccgagcugcugguggcccuggagaaccagcacaccaucgaccugaccgacagcgagaugaacaagcuguucgagagaaccaagaagcagcugagagagaacgccgaggacaugggcaacggcugcuucaagaucuaccacaagugcgacaacgccugcaucggcagcaucagaaacggcaccuacgaccacgacguguacagagacgaggcccugaacaacagauuccagaucaagggcguggagcugaagagcggcuacaaggacuggauccuguggaucagcuucgccaucagcugcuuccugcugugcguggcccugcugggcuucaucaugugggccugccagaagggcaacaucagaugcaacaucugcaucuga

SEQ ID NO: 160367 - RNA, 1701 nt, Artificial Sequence
  derived and/or modified CDS sequence (opt4) from hemagglutinin__InfluenzaA__ABA16214
augaagaccaucaucgcccugagcuacaucagcugccugguguucgcccagaagcugcccggcaacgacaacagcaccgccacccugugccugggccaccacgccgugcccaacggcacccuggugaagaccaucaccaacgaccagaucgaggugaccaacgccaccgagcuggugcagagcagcagcaccggcagaaucugcgacagcccccacagaauccuggacggcaagaacugcacccugaucgacgcccugcugggcgacccccacugcgacggcuuccagaacgagaagugggaccuguucguggagagaagcaaggccuucagcaacugcuaccccuacgacgugcccgacuacgccagccugagaagccugguggccagcagcggcacccuggaguucaucaacgagggcuucaacuggaccggcgugacccagagcggcggcagcuacgccugcaagagaggcagcgugaagagcuucuucagcagacugaacuggcuguacgagagcgagagcaaguaccccgcccugaacgugaccaugcccaacaacggcaaguucgacaagcuguacaucuggggcgugcaccaccccagcaccgacaaggagcagaccaaccuguacgugagagccagcggcagagugaccgugagcaccaagagaagccagcagaccgugauccccaacaucggccccagacccugggugagaggccugagcagcagaaucagcaucuacuggaccaucgugaagcccggcgacauccugcugaucaacagcaccggcaaccugaucgcccccagaggcuacuucaagaucagaaccggcaagagcagcaucaugagaagcgacgcccccaucggcaccugcagcagcggcugcaucacccccaacggcagcauccccaacgacaagcccuuccagaacgugaacaagaucaccuacggcgccugccccagauacgugaagcagaacacccugaagcuggccaccggcaugagaaacgugcccgagaagcagaccagaggcaucuucggcgccaucgccggcuucaucgagaacggcugggagggcaugguggacggcugguacggcuucagacaccagaacagcgagggcaccggccaggccgccgaccugaagagcacccaggccgccaucgaccagaucaacggcaagcugaacagacugaucgagaagaccaacgagaaguuccaccagaucgagaaggaguucagcgagguggagggcagaauccaggaccuggagaaguacguggaggacaccaagaucgaccuguggagcuacaacgccgagcugcugguggcccuggagaaccagcacaccaucgacaugaccgacagcgagaugaacaagcuguucgagaagaccagaaagcagcugagagagaacgccgaggacaugggcaacggcugcuucaagaucuaccacaagugcgacaacgccugcaucggcagcaucagaaacggcaccuacgaccacgacguguacagagacgaggcccugaacaacagauuccagaucaagggcguggagcugaagagcggcuacaaggacuggauccuguggaucagcuucgccaucagcugcuuccugcugugcguggugcugcugggcuucaucaugugggccugccagaagggcaacaucagaugcaacaucugcaucuga

SEQ ID NO: 160368 - RNA, 1701 nt, Artificial Sequence; identical to SEQ ID NO: 160316
  derived and/or modified CDS sequence (opt4) from hemagglutinin__InfluenzaA__ABA18026

SEQ ID NO: 160369 - RNA, 1698 nt, Artificial Sequence
  derived and/or modified CDS sequence (opt4) from hemagglutinin__InfluenzaA__ABA18037
augaaggccaagcugcuggugcugcugugcaccuucaccgccaccuacgccgacaccaucugcaucggcuaccacgccaacaacagcaccgacaccguggacaccgugcuggagaagaacgugaccgugacccacagcgugaaccugcuggaggacagccacaacggcaagcugugccugcugaagggcaucgccccccugcagcugggcaacugcagcguggccggcuggauccugggcaaccccgagugcgagcugcugaucagcaaggagagcuggagcuacaucguggagacccccaaccccgagaacggcaccugcuaccccggcuacuucgccgacuacgaggagcugaaggagcagcugagcagcgugagcagcuucgagagauucgagaucuuccccaagggcagcagcuggcccaaccacaccgugaccggcgugagcgccagcugcagccacaacggcaagagcagcuucuacagaaaccugcuguggcugaccggcaagaacggccuguaccccaaccugagcaugagcuacgugaacaacaaggagaaggaggugcuggugcuguggggcgugcaccacccccccaacaucggcgaccagagagcccuguaccacaccgagaacgccuacgugagcguggugagcagccacuacagcagaagauucacccccgagaucgccaagagacccaaggugagagaccaggagggcagaaucaacuacuacuggacccugcuggagcccggcgacaccaucaucuucgaggccaacggcaaccugaucgcccccugguacgccuucgcccugagcagaggcuucggcagcggcaucaucaccagcaacgcccccauggacgagugcgacgccaagugccagaccccccagggcgccaucaacagcagccugcccuuccagaacgugcaccccgugaccaucggcgagugccccaaguacgugagaagcgccaagcugagaauggugaccggccugagaaacauccccagcauccagagcagaggccuguucggcgccaucgccggcuucaucgagggcggcuggaccggcaugguggacggcugguacggcuaccaccaccagaacgagcagggcagcggcuacgccgccgaccagaagagcacccagaacgccaucaacggcaucaccaacaaggugaacagcgugaucgagaagaugaacacccaguucaccgccgugggcaaggaguucaacaagcuggagagaagaauggagaaccugaacaagaagguggacgacggcuuccuggacaucuggaccuacaacgccgagcugcuggugcugcuggagaacgagagaacccuggacuuccacgacagcaacgugaagaaccuguacgagaaggugaagagccagcugaagaacaacgccaaggagaucggcaacggcugcuucgaguucuaccacaagugcaacaacgagugcauggagagcgugaagaacggcaccuacgacuaccccaaguacagcgaggagagcaagcugaacagagagaagaucgacggcgugaagcuggagagcaugggcguguaccagauccuggccaucuacagcaccguggccagcagccuggugcugcuggugagccugggcgccaucagcuucuggaugugcagcaacggcagccugcagugcagaaucugcaucuga

SEQ ID NO: 160370 - RNA, 1701 nt, Artificial Sequence; identical to SEQ ID NO: 160315
  derived and/or modified CDS sequence (opt4) from hemagglutinin__InfluenzaA__ABA18048

SEQ ID NO: 160371 - RNA, 1701 nt, Artificial Sequence
  derived and/or modified CDS sequence (opt4) from hemagglutinin__InfluenzaA__ABA18123
augaagaccaucaucgcccugagcuacauccugugccugguguucgcccagaagcugcccggcaacgacaacagcaccgccacccugugccugggccaccacgccgugcccaacggcacccuggugaagaccaucaccaacgaccagaucgaggugaccaacgccaccgagcuggugcagagcagcagcaccggcagaaucugcgacagcccccaccagauccuggacggcgagaacugcacccugaucgacgcccugcugggcgacccccacugcgacggcuuccagaacaaggagugggaccuguucguggagagaagcaaggccuacagcaacugcuaccccuacgacgugcccgacuacgugagccugagaagccugguggccagcagcggcacccuggaguucaacaacgagagcuucaacuggaccggcguggcccagaacggcaccagcagcgccugcaagagaagaagcaacaagagcuucuucagcagacugaacuggcugcaccagcugaaguacaaguaccccgcccugaacgugaccaugcccaacaacgagaaguucgacaagcuguacaucuggggcgugcaccaccccggcaccgacagcgaccagaucagccuguacgcccaggccagcggcagagugaccgugagcaccaagagaagccagcagaccgugauccccaacaucggcagcggccccugggugagaggcgugagcagcagaaucagcaucuacuggaccaucgugaagcccggcgacauccugcugaucaacagcaccggcaaccugaucgcccccagaggcuacuucaagaucagaagcggcaagagcagcaucaugagaagcgacgcccccaucggcaagugcaacagcgagugcaucacccccaacggcagcauccccaacgacaagcccuuccagaacgugaacagaaucaccuacggcgccugccccagauacgugaagcagaacacccugaagcuggccaccggcaugagaaacgugcccgagaagcagaccagaggcaucuucggcgccaucgccggcuucaucgagaacggcugggagggcaugauggacggcugguacggcuucagacaccagaacagcgagggcaccggccaggccgccgaccugaagagcacccaggccgccaucaaccagaucaacggcaagcugaacagacugaucgagaagaccaacgagaaguuccaccagaucgagaaggaguucagcgagguggagggcagaauccaggaccuggagaaguacguggaggacaccaagaucgaccuguggagcuacaacgccgagcugcugguggcccuggagaaccagcacaccaucgaccugaccgacagcgagaugaacaagcuguucgagagaaccaagaagcagcugagagagaacgccgaggacaugggcaacggcugcuucaagaucuaccacaagugcgacaacgccugcaucggcagcaucagaaacggcaccuacgaccacgacguguacagagacgaggcccugaacaacagauuccagaucaagggcguggagcugaagagcggcuacaaggacuggauccuguggaucagcuucgccaucagcugcuuccugcugugcaucgugcugcugggcuucaucaugugggccugccagaagggcaacaucagaugcaacaucugcaucuga

SEQ ID NO: 160372 - RNA, 1701 nt, Artificial Sequence; identical to SEQ ID NO: 160315
  derived and/or modified CDS sequence (opt4) from hemagglutinin__InfluenzaA__ABA18134

SEQ ID NO: 160373 - RNA, 1698 nt, Artificial Sequence; identical to SEQ ID NO: 160359
  derived and/or modified CDS sequence (opt4) from hemagglutinin__InfluenzaA__ABA18145

SEQ ID NO: 160374 - RNA, 1701 nt, Artificial Sequence; identical to SEQ ID NO: 160316
  derived and/or modified CDS sequence (opt4) from hemagglutinin__InfluenzaA__ABA18156

SEQ ID NO: 160375 - RNA, 1701 nt, Artificial Sequence
  derived and/or modified CDS sequence (opt4) from hemagglutinin__InfluenzaA__ABA26700
augaagaccaucaucgcccugagcuacauccugugccugguguucgcccagaagcugcccggcaacgacaacagcaccgccacccugugccugggccaccacgccgugcccaacggcaccaucgugaagaccaucaccaacgaccagaucgaggugaccaacgccaccgagcuggugcagagcagcagcaccggcggcaucugcaacagcccccaccagauccuggacggcgagaacugcacccugaucgacgcccugcugggcgacccccagugcgacggcuuccagaacaagaagugggaccuguucguggagagaagcaaggccuacagcaacugcuaccccuacgacgugcccgacuacgccagccugagaagccugguggccagcagcggcacccuggaguucaacaacgagagcuucaacuggaccggcgugacccagaacggcaccagcagcgccugcaagagaagaagcaacaacagcuucuucagcagacugaacuggcugacccaccugaaguucaaguaccccgcccugaacgugaccaugcccaacaacgagaaguucgacaagcuguacaucuggggcgugcaccaccccggcaccgacaacgaccagaucagccuguacgcccaggcccccggcagaaucaccgugagcaccaagagaagccagcagaccgugauccccaacaucggcagcagacccagagugagagacauccccagcagaaucagcaucuacuggaccaucgugaagcccggcgacauccugcugaucaacagcaccggcaaccugaucgcccccagaggcuacuucaagaucagaagcggcaagagcagcaucaugagaagcgacgcccccaucggcaagugcaacagcgagugcaucacccccaacggcagcauccccaacgacaagcccuuccagaacgugaacagaaucaccuacggcgccugccccagauacgugaagcagaacacccugaagcuggccaccggcaugagaaacgugcccgagaagcagaccagaggcaucuucggcgccaucgccggcuucaucgagaacggcugggagggcaugguggacggcugguacggcuucagacaccagaacagcgagggcaucggccaggccgccgaccugaagagcacccaggccgccaucaaccagaucaacggcaagcugaacagacugaucggcaagaccaacgagaaguuccaccagaucgagaaggaguucagcgagguggagggcagaauccaggaccuggagaaguacguggaggacaccaagaucgaccuguggagcuacaacgccgagcugcugguggcccuggagaaccagcacaccaucgaccugaccgacagcgagaugaacaagcuguucgagagaaccaagaagcagcugagagagaacgccgaggacaugggcaacggcugcuucaagaucuaccacaagugcgacaacgccugcaucggcagcaucagaaacggcaccuacgaccacgacguguacagagacgaggcccugaacaacagauuccagaucaagggcguggagcugaagagcggcuacaaggacuggauccuguggaucagcuucgccaucagcugcuuccugcugugcguggcccugcugggcuucaucaugugggccugccagaagggcaacaucagaugcaacaucugcaucuga

SEQ ID NO: 160376 - RNA, 1701 nt, Artificial Sequence
  derived and/or modified CDS sequence (opt4) from hemagglutinin__InfluenzaA__ABA26711
augaagaccaucaucgcccugagcuacauccugugccugguguucgcccagaagcugcccggcaacgacaacagcaccgccacccugugccugggccaccacgccgugcccaacggcaccaucgugaagaccaucaccaacgaccagaucgaggugaccaacgccaccgagcuggugcagagcagcagcaccggcggcaucugcgacagcccccaccagauccuggacggcgagaacugcacccugaucgacgcccugcugggcgacccccagugcgacggcuuccagaacaagaagugggaccuguucguggagagaagcaaggccuacagcaacugcuaccccuacgacgugcccgacuacgccagccugagaagccugguggccagcagcggcacccuggaguucaacaacgagagcuucaacuggaccggcgugacccagaacggcaccagcagcgccugcaagagaagaagcaacaacagcuucuucagcagacugaacuggcugacccaccugaaguucaaguaccccgcccugaacgugaccaugcccaacaacgagaaguucgacaagcuguacaucuggggcgugcaccaccccggcaccgacaacgaccagaucagccuguacgcccaggccagcggcagaaucaccgugagcaccaagagaagccagcagaccgugauccccaacaucggcagcagacccagagugagagacauccccagcagaaucagcaucuacuggaccaucgugaagcccggcgacauccugcugaucaacagcaccggcaaccugaucgcccccagaggcuacuucaagaucagaagcggcaagagcagcaucaugagaagcgacgcccccaucggcaagugcaagagcgagugcaucacccccaacggcagcauccccaacgacaagcccuuccagaacgugaacagaaucaccuacggcgccugccccagauacgugaagcagaacacccugaagcuggccaccggcaugagaaacgugcccgagaagcagaccagaggcaucuucggcgccaucgccggcuucaucgagaacggcugggagggcaugguggacggcugguacggcuucagacaccagaacagcgagggcaucggccaggccgccgaccugaagagcacccaggccgccaucaaccagaucaacggcaagcugaacagacugaucggcaagaccaacgagaaguuccaccagaucgagaaggaguucagcgagguggagggcagaauccaggaccuggagaaguacguggaggacaccaagaucgaccuguggagcuacaacgccgagcugcugguggcccuggagaaccagcacaccaucgaccugaccgacagcgagaugaacaagcuguucgagagaaccaagaagcagcugagagagaacgccgaggacaugggcaacggcugcuucaagaucuaccacaagugcgacaacgccugcaucggcagcaucagaaacggcaccuacgaccacgacguguacagagacgaggcccugaacaacagauuccagaucaagggcguggagcugaagagcggcuacaaggacuggauccuguggaucagcuucgccaucagcugcuuccugcugugcguggcccugcugggcuucaucaugugggccugccagaagggcaacaucagaugcaacaucugcaucuga

SEQ ID NO: 160377 - RNA, 1701 nt, Artificial Sequence
  derived and/or modified CDS sequence (opt4) from hemagglutinin__InfluenzaA__ABA26722
augaagaccaucaucgcccugagcuacauccugugccugguguucgcccagaagcugcccggcaacgacaacagcaccgccacccugugccugggccaccacgccgugcccaacggcaccaucgugaagaccaucaccaacgaccagaucgaggugaccaacgccaccgagcuggugcagagcagccccaccggcggcaucugcgacagcccccaccagauccuggacggcgagaacugcacccugaucgacgcccugcugggcgacccccagugcgacggcuuccagaacaagaagugggaccuguucguggagagaagcaaggcccacagcaacugcuaccccuacgacgugcccgacuacgccagccugagaagccugguggccagcagcggcacccuggaguucaacaacgagagcuucaacuggaccggcgugacccagaacggcaccagcagcgccugcaagagaagaagcaacaagagcuucuucagcagacugaacuggcugacccaccugaaguucaaguaccccgcccugaacgugaccaugcccaacaacgagaaguucgacaagcuguacaucuggggcgugcaccaccccggcaccgacaacgaccagaucagccuguacgcccaggccagcggcagaaucaccgugagcaccaagagaagccagcagaccgugauccccaacaucggcagcagacccagagugagagacgugcccagcagaaucagcaucuacuggaccaucgugaagcccggcgacauccugcugaucaacagcaccggcaaccugaucgcccccagaggcuacuucaagaucagaagcggcaagagcagcaucaugagaagcgacgcccccaucggcaagugcaacagcggcugcaucacccccaacggcagcauccccaacgacaagcccuuccagaacgugaacagaaucaccuacggcgccugccccagauacgugaagcagaacacccugaagcuggccaccggcaugagaaacgugcccgagaagcagaccagaggcaucuucggcgccaucgccggcuucaucgagaacggcugggagggcaugguggacggcugguacggcuucagacaccagaacagcgagggcaccggccaggccgccgaccugaagagcacccaggccgccaucaaccagaucaacggcaagcugaacagacugaucggcaagaccaacgagaaguuccaccagaucgagaaggaguucagcgagguggagggcagaauccaggaccuggagaaguacguggaggacaccaagaucgaccuguggagcuacaacgccgagcugcugguggcccuggagaaccagcacaccaucgaccugaccgacagcgagaugaacaagcuguucgagagaaccaagaagcagcugagagagaacgccgaggacaugggcaacggcugcuucaagaucuaccacaagugcgacaacgccugcaucggcagcaucagaaacggcaccuacgaccacgacguguacagagacgaggcccugaacaacagauuccagaucaagggcguggagcugaagagcggcuacaaggacuggauccuguggaucagcuucgccaucagcugcuuccugcugugcguggcccugcugggcuucaucaugugggccugccagaagggcaacaucagaugcaacaucugcaucuga

SEQ ID NO: 160378 - RNA, 1701 nt, Artificial Sequence; identical to SEQ ID NO: 160303
  derived and/or modified CDS sequence (opt4) from hemagglutinin__InfluenzaA__ABA26733

SEQ ID NO: 160379 - RNA, 1701 nt, Artificial Sequence; identical to SEQ ID NO: 160303
  derived and/or modified CDS sequence (opt4) from hemagglutinin__InfluenzaA__ABA26755

SEQ ID NO: 160380 - RNA, 1701 nt, Artificial Sequence; identical to SEQ ID NO: 160342
  derived and/or modified CDS sequence (opt4) from hemagglutinin__InfluenzaA__ABA26766

SEQ ID NO: 160381 - RNA, 1701 nt, Artificial Sequence; identical to SEQ ID NO: 160342
  derived and/or modified CDS sequence (opt4) from hemagglutinin__InfluenzaA__ABA26788

SEQ ID NO: 160382 - RNA, 1701 nt, Artificial Sequence; identical to SEQ ID NO: 160342
  derived and/or modified CDS sequence (opt4) from hemagglutinin__InfluenzaA__ABA26799

SEQ ID NO: 160383 - RNA, 1698 nt, Artificial Sequence
  derived and/or modified CDS sequence (opt4) from hemagglutinin__InfluenzaA__ABA42247
augaaggugaagcugcuggugcugcugugcaccuucaccgccaccuacgccgacaccaucugcaucggcuaccacgccaacaacagcaccgacaccguggacaccgugcuggagaagaacgugaccgugacccacagcgugaaccugcuggaggacagccacaacggcaagcugugccugcugaagggcaucgccccccugcagcugggcaacugcagcguggccggcuggauccugggcaaccccgagugcgagcugcugaucagcaaggagagcuggagcuacaucguggagacccccaaccccgagaacggcaccugcuaccccggcuacuucgccgacuacgaggagcugagagagcagcugagcagcgugagcagcuucgagagauucgagaucuuccccaaggagagcagcuggcccaaccacaccgugaccggcgugagcgccagcugcagccacaacggcaagagcagcuucuacaagaaccugcuguggcugaccggcaagaacggccuguaccccaaccugagcaagagcuacgccaacaacaaggagaaggaggugcuggugcuguggggcgugcaccacccccccaacaucggcgaccagagagcccuguaccacaccgagaacgccuacgugagcguggugagcagccacuacagcagaagauucacccccgagaucgccaagagacccaaggugagagaccaggagggcagaaucaacuacuacuggacccugcuggagcccggcgacaccaucaucuucgaggccaacggcaaccugaucgcccccagauacgccuucgcccugagcagaggcuucggcagcggcaucaucaccagcaacgcccccauggacgagugcgacgccaagugccagaccccccagggcgccaucaacagcagccugcccuuccagaacgugcaccccgugaccaucggcgagugccccaaguacgugagaagcgccaagcugagaauggugaccggccugagaaacauccccagcauccagagcagaggccuguucggcgccaucgccggcuucaucgagggcggcuggaccggcaugguggacggcugguacggcuaccaccaccagaacgagcagggcagcggcuacgccgccgaccagaagagcacccagaacgccaucaacggcaucaccaacaaggugaacagcgugaucgagaagaugaacacccaguucaccgccgugggcaaggaguucaacaagcuggagagaagaauggagaaccugaacaagaagguggacgacggcuuccuggacaucuggaccuacaacgccgagcugcuggugcugcuggagaacgagagaacccuggacuuccacgacagcaacgugaagaaccuguacgagaaggugaagagccagcugaagaacaacgccaaggagaucggcaacggcugcuucgaguucuaccacaagugcaacgacgagugcauggagagcgugaagaacggcaccuacgacuaccccaaguacagcgaggagagcaagcugaacagagagaagaucgacggcgugaagcuggagagcaugggcguguaccagauccuggccaucuacagcaccguggccagcagccuggugcugcuggugagccugggcgccaucagcuucuggaugugcagcaacggcagccugcagugcagaaucugcaucuga

SEQ ID NO: 160384 - RNA, 1698 nt, Artificial Sequence; identical to SEQ ID NO: 160356
  derived and/or modified CDS sequence (opt4) from hemagglutinin__InfluenzaA__ABA42258

SEQ ID NO: 160385 - RNA, 1701 nt, Artificial Sequence; identical to SEQ ID NO: 160315
  derived and/or modified CDS sequence (opt4) from hemagglutinin__InfluenzaA__ABA42269

SEQ ID NO: 160386 - RNA, 1698 nt, Artificial Sequence
  derived and/or modified CDS sequence (opt4) from hemagglutinin__InfluenzaA__ABA42280
augaaggugaagcugcugauccugcugugcaccuucaccgccaccuacgccgacaccaucugcaucggcuaccacgccaacaacagcaccgacaccguggacaccgugcuggagaagaacgugaccgugacccacagcgugaaccugcuggaggacagccacaacggcaagcugugccugcugaagggcaucgccccccugcagcugggcaacugcagcguggccggcuggauccugggcaaccccgagugcgagcugcugaucagcaaggagagcuggagcuacaucguggagacccccaaccccgagaacggcgccugcuaccccggcuacuucgccgacuacgaggagcugagagagcagcugagcagcgugagcagcuucgagagauucgagaucuuccccaaggagagcagcuggcccaaccacaccgugaccggcgugagcgccagcugcagccacaacggcaagagcagcuucuacagaaaccugcuguggcugaccggcaagaacggccuguaccccaaccugagcaagagcuacgccaacaacaaggagaaggaggugcugauccuguggggcgugcaccacccccccaacaucggcgaccagagaacccuguaccacaccgagaacgccuacgugagcguggugagcagccacuacagcagaagauucacccccgagaucaccaagagacccaaggugagagaccaggagggcagaaucaacuacuacuggacccugcuggagcccggcgacaccaucaucuucgaggccaacggcaaccugaucgcccccugguacgccuucgcccugagcagaggcuucggcagcggcaucaucaccagcaacgcccccauggacgagugcgacgccaagugccagaccccccagggcgccaucaacagcagccugcccuuccagaacgugcaccccgugaccaucggcgagugccccaaguacgugagaagcgccaagcugagaauggugaccggccugagaaacauccccagcauccagagcagaggccuguucggcgccaucgccggcuucaucgagggcggcuggaccggcaugguggacggcugguacggcuaccaccaccagaacgagcagggcagcggcuacgccgccgaccagaagagcacccagaacgccaucaacggcaucaccaacaaggugaacagcgugaucgagaagaugaacacccaguucaccgccgugggcaaggaguucaacaagcuggagagaagaauggagaaccugaacaagaagguggacgacggcuuccuggacaucuggaccuacaacgccgagcugcuggugcugcuggagaacgagagaacccuggacuuccacgacagcaacgugaagaaccuguacgagaaggugaagagccagcugaagaacaacgccaaggagaucggcaacggcugcuucgaguucuaccacaagugcaacaacgagugcauggagagcgugaagaacggcaccuacgacuaccccaaguacagcgaggagagcaagcugaacagagagaagaucgacggcgugaagcuggacagcaugggcguguaccagauccuggccaucuacagcaccguggccagcagccuggugcugcuggugagccugggcgccaucagcuucuggaugugcagcaacggcagccugcagugcagaaucugcaucuga

SEQ ID NO: 160387 - RNA, 1701 nt, Artificial Sequence
  derived and/or modified CDS sequence (opt4) from hemagglutinin__InfluenzaA__ABA42291
augaagaccaucaucgcccugagcuacauccugugccugguguucgcccagaagcugcccggcaacgacaacagcaccgccacccugugccugggccaccacgccgugcccaacggcaccaucgugaagaccaucaccaacgaccagaucgaggugaccaacgccaccgagcuggugcagagcagcagcaccggcggcaucugcgacagcccccaccagauccuggacggcgagaacugcacccugaucgacgcccugcugggcgacccccagugcgacggcuuccagaacaagaagugggaccuguucguggagagaagcaaggccuacagcaacugcuaccccuacgacgugcccgacuacgccagccugagaagccugguggccagcagcggcacccuggaguucaacaacgagagcuucaacuggaccggcgugacccagaacggcaccagcagcgccugcaagagaagaagcaacaacagcuucuucagcagacugaacuggcugacccaccugaaguucaaguaccccgcccugaacgugaccaugcccaacaacgagaaguucgacaagcuguacaucuggggcgugcaccaccccggcaccgacaacgaccagaucagccuguacgcccaggccagcggcagaaucaccgugagcaccaagagaagccagcagaccgugauccccaacaucggcagcagacccagagugagagacauccccagcagaaucagcaucuacuggaccaucgugaagcccggcgacauccugcugaucaacagcaccggcaaccugaucgcccccagaggcuacuucaagaucagaagcggcaagagcagcaucaugagaagcgacgcccccaucggcaagugcaagagcgagugcaucacccccaacggcagcauccccaacgacaagcccuuccagaacgugaacagaaucaccuacggcgccugccccagauacgugaagcagaacacccugaagcuggccaccggcaugagaaacgugcccgagaagcagaccagaggcaucuucggcgccaucgccggcuucaucgagaacggcugggagggcaugguggacggcugguacggcuucagacaccagaacagcgagggcaucggccaggccgccgaccugaagagcacccaggccgccaucaaccagaucaacggcaagcugaacagacugaucggcaagaccaacgagaaguuccaccagaucgagaaggaguucagcgagguggagggcagaauccaggaccuggagaaguacguggaggacaccaagaccgaccuguggagcuacaacgccgagcugcugguggcccuggagaaccagcacaccaucgaccugaccgacagcgagaugaacaagcuguucgagagaaccaagaagcagcugagagagaacgccgaggacaugggcaacggcugcuucaagaucuaccacaagugcgacaacgccugcaucggcagcaucagaaacggcaccuacgaccacgacguguacagagacgaggcccugaacaacagauuccagaucaagggcguggagcugaagagcggcuacaaggacuggauccuguggaucagcuucgccaucagcugcuuccugcugugcguggcccugcugggcuucaucaugugggccugccagaagggcaacaucagaugcaacaucugcaucuga

SEQ ID NO: 160388 - RNA, 1701 nt, Artificial Sequence; identical to SEQ ID NO: 160111
  derived and/or modified CDS sequence (opt4) from hemagglutinin__InfluenzaA__ABA42302

SEQ ID NO: 160389 - RNA, 1701 nt, Artificial Sequence; identical to SEQ ID NO: 160165
  derived and/or modified CDS sequence (opt4) from hemagglutinin__InfluenzaA__ABA42313

SEQ ID NO: 160390 - RNA, 1701 nt, Artificial Sequence; identical to SEQ ID NO: 160111
  derived and/or modified CDS sequence (opt4) from hemagglutinin__InfluenzaA__ABA42346

SEQ ID NO: 160391 - RNA, 1701 nt, Artificial Sequence; identical to SEQ ID NO: 160165
  derived and/or modified CDS sequence (opt4) from hemagglutinin__InfluenzaA__ABA42357

SEQ ID NO: 160392 - RNA, 1701 nt, Artificial Sequence
  derived and/or modified CDS sequence (opt4) from hemagglutinin__InfluenzaA__ABA42379
augaagaccaucaucgcccugagcuacauccugugccugguguucgcccagaagcugcccggcaacgacaacagcaccgccacccugugccugggccaccacgccgugcccaacggcacccuggugaagaccaucaccaacgaccagaucgaggugaccaacgccaccgagcuggugcagagcagcagcaccggcagaaucugcgacagcccccaccagauccuggacggcgagaacugcacccugaucgacgcccugcugggcgacccccacugcgacggcuuccagaacaaggagugggaccuguucguggagagaagcaaggccuacagcaacugcuaccccuacgacgugcccgacuacgugagccugagaagccugguggccagcagcggcacccuggaguucaacaacgagagcuucaacuggaccggcguggcccagaacggcaccagcagcgccugcaagagaagaagcgacaagagcuucuucagcagacugaacuggcugcaccagcugaaguacaaguaccccgcccugaacgugaccaugcccaacaacgagaaguucgacaagcuguacaucuggggcgugcaccaccccggcaccgacagcgaccagaucagccuguacgcccaggccagcggcagagugaccgugagcaccaagagaagccagcagaccgugauccccaacaucggcagcagacccugggugagaggcgugagcagcaagaucagcaucuacuggaccaucgugaagcccggcgacauccugcugaucaacagcaccggcaaccugaucgcccccagaggcuacuucaagaucagaagcggcaagagcagcaucaugagaagcgacgcccccaucggcaagugcaacagcgagugcaucacccccaacggcagcauccccaacgacaagcccuuccagaacgugaacagaaucaccuacggccccugccccagauacgugaagcagaacacccugaagcuggccaccggcaugagaaacgugcccgagaagcagaccagaggcaucuucggcgccaucgccggcuucaucgagaacggcugggagggcaugauggacggcugguacggcuucagacaccagaacagcgagggcaccggccaggccgccgaccugaagagcacccaggccgccaucaaccagaucaacggcaagcugaacagacugaucgagaagaccaacgagaaguuccaccagaucgagaaggaguucagcgagguggagggcagaauccaggaccuggagaaguacguggaggacaccaagaucgaccuguggagcuacaacgccgagcugcugguggcccuggagaaccagcacaccaucgaccugaccgacagcgagaugaacaagcuguucgagagaaccaagaagcagcugagagagaacgccgaggacaugggcaacggcugcuucaagaucuaccacaagugcgacaacgccugcaucggcagcaucagaaacggcaccuacgaccacgacguguacagagacgaggcccugaacaacagauuccagaucaagggcguggagcugaagagcggcuacaaggacuggauccuguggaucagcuucgccaucagcugcuucgugcugugcaucgugcugcugggcuucaucaugugggccugccagaagggcaacaucagaugcaacaucugcaucuga

SEQ ID NO: 160393 - RNA, 1701 nt, Artificial Sequence; identical to SEQ ID NO: 160140
  derived and/or modified CDS sequence (opt4) from hemagglutinin__InfluenzaA__ABA42390

SEQ ID NO: 160394 - RNA, 1701 nt, Artificial Sequence
  derived and/or modified CDS sequence (opt4) from hemagglutinin__InfluenzaA__ABA42401
augaagaccaucaucgcccugagcuacauccugugccugguguucgcccagaagcugcccggcaacgacaacagcaccgccacccugugccugggccaccacgccgugcccaacggcacccuggugaagaccaucaccaacgaccagaucgaggugaccaacgccaccgagcuggugcagagcagcagcaccagcagaaucugcgacagcccccaccagauccuggacggcgagaacugcacccugaucgacgcccugcugggcgacccccacugcgacggcuuccagaacaaggagugggaccuguucguggagagaagcaaggccuacagcaacugcuaccccuacgacgugcccgacuacgugagccugagaagccugguggccagcagcggcacccuggaguucaacaacgagagcuucaacuggaccggcguggcccagaacggcaccagcagcgccugcaagagaagaagcgacaagagcuucuucagcagacugaacuggcugcaccagcugaaguacaaguaccccgcccugaacgugaccaugcccaacaacgagaaguucgacaagcuguacaucuggggcgugcaccaccccggcaccgacagcgaccagaucagccuguacgcccagagcagcggcagagugaccgugagcaccaagagaagccagcagaccgugauccccaacaucggcagcggccccugggugagaggcgugagcagcagaaucagcaucuacuggaccaucgugaagcccggcgacauccugcugaucaacagcaccggcaaccugaucgcccccagaggcuacuucaagaucagaagcggcaagagcagcaucaugagaagcgacgcccccaucggcaagugcaacagcaagugcaucacccccaacggcagcauccccaacgacaagcccuuccagaacgugaacagaaucaccuacggcgccugccccagauacgugaagcagaacacccugaagcuggccaccggcaugagaaacgugcccgagaagcagaccagaggcaucuucggcgccaucgccggcuucaucgagaacggcugggagggcaugauggacggcugguacggcuucagacaccagaacagcgagggcaccggccaggccgccgaccugaagagcacccaggccgccaucaaccagaucaacggcaagcugaacagacugaucgagaagaccaacgagaaguuccaccagaucgagaaggaguucagcgagguggagggcagaauccaggaccuggagaaguacguggaggacaccaagaucgaccuguggagcuacaacgccgagcugcugguggcccuggagaaccagcacaccaucgaccugaccgacagcgagaugaacaagcuguucgagagaaccaagaagcagcugagagagaacgccgaggacaugggcaacggcugcuucaagaucuaccacaagugcgacaacgccugcaucggcagcaucagaaacggcaccuacgaccacgacguguacagagacgaggcccugaacaacagauuccagaucaagggcguggagcugaagagcggcuacaaggacuggauccuguggaucagcuucgccaucagcugcuuccugcugugcaucgugcugcugggcuucaucaugugggccugccagaagggcaacaucagaugcaacaucugcaucuga

SEQ ID NO: 160395 - RNA, 1701 nt, Artificial Sequence
  derived and/or modified CDS sequence (opt4) from hemagglutinin__InfluenzaA__ABA42412
augaagaccaucaucgcccugagcuacauccugugccugguguucgcccagaagcugcccggcaacgacaacagcaccgccacccugugccugggccaccacgccgugcccaacggcacccuggugaagaccaucaccaacgaccagaucgaggugaccaacgccaccgagcuggugcagagcagcagcaccggcagaaucugcgacagcccccaccagauccuggacggcgagaacugcacccugaucgacgcccugcugggcgacccccacugcgacggcuuccagaacaaggagugggaccuguucguggagagaagcaaggccuacagcaacugcuaccccuacgacgugcccgacuacgugagccugagaagccugguggccagcagcggcacccuggaguucaacaacgagagcuucaacuggaccggcguggcccagaacggcaccagcagcgccugcaagagaagaagcgacaagagcuucuucagcagacugaacuggcugcaccagcugaaguacaaguaccccgcccugaacgugaccaugcccaacaacgagaaguucgacaagcuguacaucuggggcgugcaccaccccggcaccgacagcgaccagaucagccuguacgcccaggccagcggcagagugaccgugagcaccaagagaagccagcagaccgugauccccaacaucggcagcagacccugggugagaggcgugagcagcaagaucagcaucuacuggaccaucgugaagcccggcgacauccugcugaucaacagcaccggcaaccugaucgcccccagaggcuacuucaagaucagaagcggcaagagcagcaucaugagaagcgacgcccccaucggcaagugcaacagcgagugcaucacccccagcggcagcauccccaacgacaagcccuuccagaacgugaacagaaucaccuacggccccugccccagauacgugaagcagaacacccugaagcuggccaccggcaugagaaacgugcccgagaagcagaccagaggcaucuucggcgccaucgccggcuucaucgagaacggcugggagggcaugauggacggcugguacggcuucagacaccagaacagcgagggcaccggccaggccgccgaccugaagagcacccaggccgccaucaaccagaucaacggcaagcugaacagacugaucgagaagaccaacgagaaguuccaccagaucgagaaggaguucagcgagguggagggcagaauccaggaccuggagaaguacguggaggacaccaagaucgaccuguggagcuacaacgccgagcugcugguggcccuggagaaccagcacaccaucgaccugaccgacagcgagaugaacaagcuguucgagagaaccaagaagcagcugagagagaacgccgaggacaugggcaacggcugcuucaagaucuaccacaagugcgacaacgccugcaucggcagcaucagaaacggcaccuacgaccacgacguguacagagacgaggcccugaacaacagauuccagaucaagggcguggagcugaagagcggcuacaaggacuggauccuguggaucagcuucgccaucagcugcuuccugcugugcaucgugcugcugggcuucaucaugugggccugccagaagggcaacaucagaugcaacaucugcaucuga

SEQ ID NO: 160396 - RNA, 1701 nt, Artificial Sequence; identical to SEQ ID NO: 160107
  derived and/or modified CDS sequence (opt4) from hemagglutinin__InfluenzaA__ABA42443

SEQ ID NO: 160397 - RNA, 1701 nt, Artificial Sequence; identical to SEQ ID NO: 160111
  derived and/or modified CDS sequence (opt4) from hemagglutinin__InfluenzaA__ABA42454

SEQ ID NO: 160398 - RNA, 1701 nt, Artificial Sequence
  derived and/or modified CDS sequence (opt4) from hemagglutinin__InfluenzaA__ABA42465
augaagaccaucaucgcccugagcuacauccugugccugguguucgcccagaagcugcccggcaacgacaacagcaccgccacccugugccugggccaccacgccgugcccaacggcacccuggugaagaccaucaccaacgaccagaucgaggugaccaacgccaccgagcuggugcagagcagcagcaccagcagaaucugcgacagcccccaccagauccuggacggcgagaacugcacccugaucgacgcccugcugggcgacccccacugcgacggcuuccagaacaaggagugggaccuguucguggagagaagcaaggccuacagcaacugcuaccccuacgacgugcccgacuacgugagccugagaagccugguggccagcagcggcacccuggaguucaacaacgagagcuucaacuggaccggcguggcccagaacggcaccagcagcgccugcaagagaagaagcgacaagagcuucuucagcagacugaacuggcugcaccagcugaaguacaaguaccccgcccugaacgugaccaugcccaacaacgagaaguucgacaagcuguacaucuggggcgugcaccaccccggcaccgacagcgaccagaucagccuguacgcccaggccagcggcagagugaccgugagcaccaagagaagccagcagaccgugauccccaacaucggcagcagacccuggggcagaggcgugagcagcagaaucagcaucuacuggaccaucgugaagcccggcgacauccugcugaucaacagcaccggcaaccugaucgcccccagaggcuacuucaagaucagaagcggcaagagcagcaucaugagaagcgacgcccccaucggcaagugcaacagcgagugcaucacccccaacggcagcauccccaacgacaagcccuuccagaacgugaacagaaucaccuacggcgccugccccagauacgugaagcagaacacccugaagcuggccaccggcaugagaaacgugcccgagaagcagaccagaggcaucuucggcgccaucgccggcuucaucgagaacggcugggagggcaugauggacggcugguacggcuucagacaccagaacagcgagggcaccggccaggccgccgaccugaagagcacccaggccgccaucaaccagaucaacggcaagcugaacagacugaucgagaagaccaacgagaaguuccaccagaucgagaaggaguucagcgagguggagggcagaauccaggaccuggagaaguacguggaggacaccaagaucgaccuguggagcuacaacgccgagcugcugguggcccuggagaaccagcacaccaucgaccugaccgacagcgagaugaacaagcuguucgagagaaccaagaagcagcugagagagaacgccgaggacaugggcaacggcugcuucaagaucuaccacaagugcgacaacgccugcaucggcagcaucagaaacggcaccuacgaccacgacguguacagagacgaggcccugaacaacagauuccagaucaagggcguggagcugaagagcggcuacaaggacuggauccuguggaucagcuucgccaucagcugcuuccugcugugcaucgugcugcugggcuucaucaugugggccugccagaagggcaacaucagaugcaacaucugcaucuga

SEQ ID NO: 160399 - RNA, 1701 nt, Artificial Sequence
  derived and/or modified CDS sequence (opt4) from hemagglutinin__InfluenzaA__ABA42476
augaagaccaucaucgcccugagcuacauccugugccugguguucgcccagaagcugcccggcaacgacaacagcaccgccacccugugccugggccaccacgccgugcccaacggcacccuggugaagaccaucaccaacgaccagaucgaggugaccaacgccaccgagcuggugcagagcagcagcaccggcagaaucugcgacagcccccaccagauccuggacggcgagaacugcacccugaucgacgcccugcugggcgacccccacugcgacggcuuccagaacaaggagugggaccuguucguggagagaagcaaggccuacagcaacugcuaccccuacgacgugcccgacuacgugagccugagaagccugguggccagcagcggcacccuggaguucaacaacgagagcuucaacuggaccggcguggcccagaacggcaccagcagcgccugcaagagaagaagcgacaagagcuucuucagcagacugaacuggcugcaccagcugaaguacaaguaccccgcccugaacgugaccaugcccaacaacgagaaguucgacaagcuguacaucuggggcgugcaccaccccggcaccgacagcgaccagaucagccuguacgcccaggccagcggcagagugaccgugagcaccaagagaagccagcagaccgugauccccaacaucggcagcagacccugggugagaggcgugagcagcagaaucagcaucuacuggaccaucgugaagcccggcgacauccugcugaucaacagcaccggcaaccugaucgcccccagaggcuacuucaagaucagaagcggcaagagcagcaucaugagaagcgacgcccccaucggcaagugcaacagcgagugcaucacccccaacggcagcauccccaacgacaagcccuuccagaacgugaacagaaucaccuacggccccugccccagauacgugaagcagaacacccugaagcuggccaccggcaugagaaacgugcccgagaagcagaccagaggcaucuucggcgccaucgccggcuucaucgagaacggcugggagggcaugauggacggcugguacggcuucagacaccagaacagcgagggcaccggccaggccgccgaccugaagagcacccaggccgccaucaaccagaucaacggcaagcugaacagacugaucgagaagaccaacgagaaguuccaccagaucgagaaggaguucagcgagguggagggcagaauccaggaccuggagaaguacguggaggacaccaagaucgaccuguggagcuacaacgccgagcugcugguggcccuggagaaccagcacaccaucgaccugaccgacagcgagaugaacaagcuguucgagagaaccaagaagcagcugagagagaacgccgaggacaugggcaacggcugcuucaagaucuaccacaagugcgacaacgccugcaucggcagcaucagaaacggcaccuacgaccacgacguguacagaaacgaggcccugaacaacagauuccagaucaagggcguggagcugaagagcggcuacaaggacuggauccuguggaucagcuucgccaucagcugcuuccugcugugcaucgugcugcugggcuucaucaugugggccugccagaagggcaacaucagaugcaacaucugcaucuga

SEQ ID NO: 160400 - RNA, 1701 nt, Artificial Sequence
  derived and/or modified CDS sequence (opt4) from hemagglutinin__InfluenzaA__ABA42498
augaagaccaucaucgcccugagcuacauccugugccugguguucgcccagaagcugcccggcaacgacaacagcaccgccacccugugccugggccaccacgccgugcccaacggcacccuggugaagaccaucaccaacgaccagaucgaggugaccaacgccaccgagcuggugcagagcagcagcaccagcagaaucugcgacagcccccaccagauccuggacggcgagaacugcacccugaucgacgcccugcugggcgacccccacugcgacggcuuccagaacaaggagugggaccuguucguggagagaagcaaggccuacagcaacugcuaccccuacgacgugcccgacuacgugagccugagaagccugguggccagcagcggcacccuggaguucaacaacgagagcuucaacuggaccggcguggcccagaacggcaccagcagcgccugcaagagaagaagcgacaagagcuucuucagcagacugaacuggcugcaccagcugaaguacaaguaccccgcccugaacgugaccaugcccaacaacgagaaguucgacaagcuguacaucuggggcgugcaccaccccggcaccgacagcgaccagaucagccuguacgcccaggccagcggcagagugaccgugagcaccaagagaagccagcagaccgugauccccaacaucggcagcagacccugggugagaggcgugagcagcaucaucagcaucuacuggaccaucgugaagcccggcgacauccugcugaucaacagcaccggcaaccugaucgcccccagaggcuacuucaagaucagaagcggcaagagcagcaucaugagaagcgacgcccccaucggcaagugcaacagcgagugcaucacccccaacggcagcauccccaacgacaagcccuuccagaacgugaacagaaucaccuacggcgccugccccagauacgugaagcagaacacccugaagcuggccaccggcaugagaaacgugcccgagaagcagaccagaggcaucuucggcgccaucgccggcuucaucgagaacggcugggagggcaugauggacggcugguacggcuucagacaccagaacagcgagggcaccggccaggccgccgaccugaagagcacccaggccgccaucaaccagaucaacggcaagcugaacagacugaucgagaagaccaacgagaaguuccaccagaucgagaaggaguucagcgagguggagggcagaauccaggaccuggagaaguacguggaggacaccaagaucgaccuguggagcuacaacgccgagcugcugguggcccuggagaaccagcacaccaucgaccugaccgacagcgagaugaacaagcuguucgagagaaccaagaagcagcugagagagaacgccgaggacaugggcaacggcugcuucaagaucuaccacaagugcgacaacgccugcaucggcagcaucagaaacggcaccuacgaccacgacguguacagagacgaggcccugaacaacagauuccagaucaagggcguggagcugaagagcggcuacaaggacuggauccuguggaucagcuucgccaucagcugcuuccugcugugcaucgugcugcugggcuucaucaugugggccugccagaagggcaacaucagaugcaacaucugcaucuga

SEQ ID NO: 160401 - RNA, 1701 nt, Artificial Sequence; identical to SEQ ID NO: 160132
  derived and/or modified CDS sequence (opt4) from hemagglutinin__InfluenzaA__ABA42509

SEQ ID NO: 160402 - RNA, 1701 nt, Artificial Sequence
  derived and/or modified CDS sequence (opt4) from hemagglutinin__InfluenzaA__ABA42520
augaagaccaucaucgcccugagcuacauccugugccugguguucgcccagaagcugcccgugaacgacaacagcaccgccacccugugccugggccaccacgccgugcccaacggcacccuggugaagaccaucaccaacgacuacaucgaggugaccaacgccaccgagcuggugcagagcagcagcaccggcagaaucugcgacagcccccaccagauccuggacggcgagaacugcacccugaucgacgcccugcugggcgacccccacugcgacggcuuccagaacaaggagugggaccuguucguggagagaagcaccgccuacagcaacugcuaccccuacgacgugcccgacuacgccagccugagaagccugguggccagcagcggcacccuggaguucaacaacgagagcuucaacuggaccggcguggcccagaacggcaccagcagcgccugcaagagaagaagcaucaagagcuucuucagcagacugaacuggcugcaccagcugaaguacaaguaccccgcccugaacgugaccaugcccaacaacgagaaguucgacaagcuguacaucuggggcgugcaccaccccagcaccgacagcgaccagaucagccuguacgcccaggccagcggcagagugaccgugagcaccaagagaagccagcagaccgugauccccaacaucggcagcagacccugggugagaggcgugagcagcaucaucagcaucuacuggaccaucgugaagcccggcgacauccugcugaucaacagcaccggcaaccugaucgcccccagaggcuacuucaagaucagaagcggcaagagcagcaucaugagaagcaacgcccccaucggcaagugcaacagcgagugcaucacccccaacggcagcauccccaacgacaagcccuuccagaacgugaacagaaucaccuacggcgccugccccagauacgugaagcagaacacccugaagcuggccaccggcaugagaaacgugcccgagaagcagaccagaggcaucuucggcgccaucgccggcuucaucgagaacggcugggagggcaugguggacggcugguacggcuucagacaccagaacagcgagggcaccggccaggccgccgaccugaagagcacccaggccgccaucaaccagaucaacggcaagcugaacagacugaucgagaagaccaacgagaaguuccaccagaucgagaaggaguucagcgagguggagggcagaauccaggaccuggagaaguacguggaggacaccaagaucgaccuguggagcuacaacgccgagcugcugguggcccuggagaaccagcacaccaucgaccugaccgacagcgagaugaacaagcuguucgagagaaccagaaagcagcugagagagaacgccgaggacaugggcaacggcugcuucaagaucuaccacaagugcgacaacgccugcaucggcagcaucagaaacggcaccuacgaccacgacguguacagagacgaggcccugaacaacagauuccagaucaagggcguggagcugaagagcggcuacaaggacuggauccuguggaucagcuucgccaucagcugcuuccugcugugcguggugcugcugggcuucaucaugugggccugccagaagggcaacaucagaugcaacaucugcaucuga

SEQ ID NO: 160403 - RNA, 1701 nt, Artificial Sequence
  derived and/or modified CDS sequence (opt4) from hemagglutinin__InfluenzaA__ABA42531
augaagaccaucaucgcccugagcuacauccugugccugguguucgcccagaagcugcccgugaacgacaacagcaccgccacccugugccugggccaccacgccgugcccaacggcacccuggugaagaccaucaccaacgaccacaucgaggugaccaacgccaccgagcuggugcagagcagcagcaccggcagaaucugcgacagcccccaccagauccuggacggcgagaacugcacccugaucgacgcccugcugggcgacccccacugcgacggcuuccagaacaaggagugggaccuguucguggagagaagcaccgccuacagcaacugcuaccuguacgacgugcccgacuacgccagccugagaagccugguggccagcagcggcacccuggaguucaacaacgagagcuucaacuggaccggcguggcccagaacggcaccagcagcgccugcaagagaagaagcaucaagagcuucuucagcagacugaacuggcugcaccagcugaaguacaaguaccccgcccugaacgugaccaugcccaacaacgagaaguucgacaagcuguacaucuggggcgugcaccaccccagcaccgacagcgaccagaucagccuguacgcccaggccagcggcagagugaccgugagcaccaagagaagccagcagaccgugauccccaacaucggcagcagacccugggugagaggcgugagcagcagaaucagcaucuacuggaccaucgugaagcccggcgacauccugcugaucaacagcaccggcaaccugaucgcccccagaggcuacuucaagaucagaagcggcaagagcagcaucaugagaagcaacgcccccaucggcaagugcaacagcgagugcaucacccccaacggcagcauccccaacgacaagcccuuccagaacgugaacagaaucaccuacggcgccugccccagauacgugaagcagaacacccugaagcuggccaccggcaugagaaacgugcccgagaagcagaccagaggcaucuucggcgccaucgccggcuucaucgagaacggcugggagggcaugguggacggcugguacggcuucagacaccagaacagcgagggcaccggccaggccgccgaccugaagagcacccaggccgccaucaaccagaucaacggcaagcugaacagacugaucgagaagaccaacgagaaguuccaccagaucgagaaggaguucagcgagguggagggcagaauccaggaccuggagaaguacguggaggacaccaagaucgaccuguggagcuacaacgccgagcugcugguggcccuggagaaccagcacaccaucgaccugaccgacagcgagaugaacaagcuguucgagagaaccagaaagcagcugagagagaacgccgaggacaugggcaacggcugcuucaagaucuaccacaagugcgacaacgccugcaucggcagcaucagaaacggcaccuacgaccacgacguguacagagacgaggcccugaacaacagauuccagaucaagggcguggagcugaagagcggcuacaaggacuggauccuguggaucagcuucgccaucagcugcuuccugcugugcguggugcugcugggcuucaucaugugggccugccagaagggcaacaucagaugcaacaucugcaucuga

SEQ ID NO: 160404 - RNA, 1701 nt, Artificial Sequence; identical to SEQ ID NO: 160132
  derived and/or modified CDS sequence (opt4) from hemagglutinin__InfluenzaA__ABA42542

SEQ ID NO: 160405 - RNA, 1701 nt, Artificial Sequence
  derived and/or modified CDS sequence (opt4) from hemagglutinin__InfluenzaA__ABA42553
augaagaccaucaucgcccugagcuacauccugugccugguguucgcccagaagcugcccgugaacgacaacagcaccgccacccugugccugggccaccacgccgugcccaacggcacccuggugaagaccaucaccaacgaccacaucgaggugaccaacgccaccgagcuggugcagagcagcagcaccggcagaaucugcgacagcccccaccagauccuggacggcgagaacugcacccugaucgacgcccugcugggcgacccccacugcgacggcuuccagaacaaggagugggaccuguucguggagagaagcaccgcccacagcaacugcuaccccuacgacgugcccgacuacgccagccugagaagccugguggccagcagcggcacccuggaguucaacaacgagagcuucaacuggaccggcguggcccagaacggcaccagcagcgccugcaagagaagaagcaucaagagcuucuucagcagacugaacuggcugcaccagcugaaguacaaguaccccgcccugaacgugaccaugcccaacaacgagaaguucgacaagcuguacaucuggggcgugcaccaccccagcaccgacagcgaccagaucagccuguacgcccaggccagcggcagagugaccgugagcaccaagagaagccagcagaccgugauccccaacaucggcagcagacccugggugagaggcgugagcagcagaaucagcaucuacuggaccaucgugaagcccggcgacauccugcugaucaacagcaccggcaaccugaucgcccccagaggcuacuucaagaucagaagcggcaagagcagcaucaugagaagcaacgcccccaucggcaagugcaacagcgagugcaucacccccaacggcagcauccccaacgacaagcccuuccagaacgugaacagaaucaccuacggcgccugccccagauacgugaagcagaacacccugaagcuggccaccggcaugagaaacgugcccgagaagcagaccagaggcaucuucggcgccaucgccggcuucaucgagaacggcugggagggcaugguggacggcugguacggcuucagacaccagaacagcgagggcaccggccaggccgccgaccugaagagcacccaggccgccaucaaccagaucaacggcaagcugaacagacugaucgagaagaccaacgagaaguuccaccagaucgagaaggaguucagcgagguggagggcagaauccaggaccuggagaaguacguggaggacaccaagaucgaccuguggagcuacaacgccgagcugcugguggcccuggagaaccagcacaccaucgaccugaccgacagcgagaugaacaagcuguucgagagaaccagaaagcagcugagagagaacgccgaggacaugggcaacggcugcuucaagaucuaccacaagugcgacaacgccugcaucggcagcaucagaaacggcaccuacgaccacgacguguacagagacgaggcccugaacaacagauuccagaucaagggcguggagcugaagagcggcuacaaggacuggauccuguggaucagcuucgccaucagcugcuuccugcugugcguggugcugcugggcuucaucaugugggccugccagaagggcaacaucagaugcaacaucugcaucuga

SEQ ID NO: 160406 - RNA, 1701 nt, Artificial Sequence; identical to SEQ ID NO: 160132
  derived and/or modified CDS sequence (opt4) from hemagglutinin__InfluenzaA__ABA42564

SEQ ID NO: 160407 - RNA, 1701 nt, Artificial Sequence
  derived and/or modified CDS sequence (opt4) from hemagglutinin__InfluenzaA__ABA42928
augaagaccaucaucgcccugagcuacauccugugccugguguucgcccagaagcugcccgugaacgacaacagcaccgccacccugugccugggccaccacgccgugcccaacggcacccuggugaagaccaucaccaacgaccacaucgaggugaccaacgccaccgagcuggugcagagcagcagcaccggcagaaucugcgacagcccccaccagauccuggacggcgagaacugcacccugaucgacgcccugcugggcgacccccacugcgacggcuuccagaacaaggagugggaccuguucguggagagaagcaccgccuacagcaacugcuaccccuacgacgugcccgacuacgccagccugagaagccugguggccagcagcggcacccuggaguucaacaacgagagcuucaacuggaccggcguggcccagaacggcaccagcagcgccugcaagagaagaagcaucaagagcuucuucagcagacugaacuggcugcaccagcugaaguacaaguaccccgcccugaacgugaccaugcccaacaacgagaaguucgacaagcuguacaucuggggcgugcaccaccccagcaccgacagcgaccagaucagccuguacgcccaggccagcggcagagugaccgugagcaccaagagaagccagcagaccgugauccccaacaucggcagcagacccugggugagaggcgugagcagcaagaucagcaucuacuggaccaucgugaagcccggcgacauccugcugaucaacagcaccggcaaccugaucgcccccagaggcuacuucaagaucagaagcggcaagagcagcaucaugagaagcaacgcccccaucggcaagugcaacagcgagugcaucacccccaacggcagcauccccaacgacaagcccuuccagaacgugaacagaaucaccuacggcgccugccccagauacgugaagcagaacacccugaagcuggccaccggcaugagaaacgugcccgagaagcagaccagaggcaucuucggcgccaucgccggcuucaucgagaacggcugggagggcauggugaacggcugguacggcuucagacaccagaacagcgagggcaccggccaggccgccgaccugaagagcacccaggccgccaucaaccagaucaacggcaagcugaacagacugaucgagaagaccaacgagaaguuccaccagaucgagaaggaguucagcgagguggagggcagaauccaggaccuggagaaguacguggaggacaccaagaucgaccuguggagcuacaacgccgagcugcugguggcccuggagaaccagcacaccaucgaccugaccgacagcgagaugaacaagcuguucgagagaaccagaaagcagcugagagagaacgccgaggacaugggcaacggcugcuucaagaucuaccacaagugcgacaacgccugcaucggcagcaucagaaacggcaccuacgaccacgacguguacagagacgaggcccugaacaacagauuccagaucaagggcguggagcugaagagcggcuacaaggacuggauccuguggaucagcuucgccaucagcugcuuccugcugugcguggugcugcugggcuucaucaugugggccugccagaagggcaacaucagaugcaacaucugcaucuga

SEQ ID NO: 160408 - RNA, 1701 nt, Artificial Sequence; identical to SEQ ID NO: 160132
  derived and/or modified CDS sequence (opt4) from hemagglutinin__InfluenzaA__ABA42939

SEQ ID NO: 160409 - RNA, 1701 nt, Artificial Sequence
  derived and/or modified CDS sequence (opt4) from hemagglutinin__InfluenzaA__ABA42978
augaagaccaucaucgcccugagcuacauccugugccugguguucgcccagaagcugcccgugaacgacaacagcaccgccacccugugccugggccaccacgccgugcccaacggcacccuggugaagaccaucaccaacgaccacaucgaggugaccaacgccaccgagcuggugcagagcagcagcaccggcagaaucugcgacagcccccaccagauccuggacggcgagaacugcacccugaucgacgcccugcugggcgacccccacugcgacggcuuccagaacaaggagugggaccuguucguggagagaagcaccgccuacagcaacugcuaccccuacgacgugcccgacuacgccagccugagaagccugguggccagcagcggcacccuggaguucaacaacgagagcuucaacuggaccggcguggcccagaacggcaccagcagcgccugcaagagaagaagcaucaagagcuucuucagcagacugaacuggcugcaccagcugaaguacaaguaccccgcccugaacgugaccauccccaacaacgagaaguucgacaagcuguacaucuggggcgugcaccaccccagcaccgacagcgaccagaucagccuguacgcccaggccagcggcagagugaccgugagcaccaagagaagccagcagaccgugauccccaacaucggcagcagacccugggugagaggcgugagcagcagaaucagcaucuacuggaccaucgugaagcccggcgacauccugcugaucaacagcaccggcaaccugaucgcccccagaggcuacuucaagaucagaagcggcaagagcagcaucaugagaagcaacgcccccaucggcaagugcaacagcgagugcaucacccccaacggcagcauccccaacgacaagcccuuccagaacgugaacagaaucaccuacggcgccugccccagauacgugaagcagaacacccugaagcuggccaccggcaugagaaacgugcccgagaagcagaccagaggcaucuucggcgccaucgccggcuucaucgagaacggcugggagggcaugguggacggcugguacggcuucagacaccagaacagcgagggcaccggccaggccgccgaccugaagagcacccaggccgccaucaaccagaucaacggcaagcugaacagacugaucgagaagaccaacgagaaguuccaccagaucgagaaggaguucagcgagguggagggcagaauccaggaccuggagaaguacguggaggacaccaagaucgaccuguggagcuacaacgccgagcugcugguggcccuggagaaccagcacaccaucgaccugaccgacagcgagaugaacaagcuguucgagagaaccagaaagcagcugagagagaacgccgaggacaugggcaacggcugcuucaagaucuaccacaagugcgacaacgccugcaucggcagcaucagaaacggcaccuacgaccacgacguguacagagacgaggcccugaacaacagauuccagaucaagggcguggagcugaagagcggcuacaaggacuggauccuguggaucagcuucgccaucagcugcuuccugcugugcguggugcugcugggcuucaucaugugggccugccagaagggcaacaucagaugcaacaucugcaucuga

SEQ ID NO: 160410 - RNA, 1701 nt, Artificial Sequence; identical to SEQ ID NO: 160303
  derived and/or modified CDS sequence (opt4) from hemagglutinin__InfluenzaA__ABA43167

SEQ ID NO: 160411 - RNA, 1701 nt, Artificial Sequence
  derived and/or modified CDS sequence (opt4) from hemagglutinin__InfluenzaA__ABA43178
augaagaccaucaucgcccugagcuacauccugugccugguguucgcccagaagcugcccggcaacgacaacagcaccgccacccugugccugggccaccacgccgugcccaacggcaccaucgugaagaccaucaccaacgaccagaucgaggugaccaacgccaccgagcuggugcagagcagcagcaccggcggcaucugcgacagcccccaccagauccuggacggcgagaacugcacccugaucgacgcccugcugggcgacccccagugcgacggcuuccagaacaagaagugggaccuguucguggagagaagcaaggccuacagcaacugcuaccccuacgacgugcccgacuacgccagccugagaagccugguggccagcagcggcacccuggaguucaacaacgagagcuucaacuggaccggcgugacccagaacggcaccagcagcgccugcaagagaagaagcaacaacagcuucuucagcagacugaacuggcugacccaccugaaguucaaguaccccgcccugaacgugaccaugcccaacaacgagaaguucgacaagcuguacaucuggggcgugcaccaccccggcaccgacaacgaccagaucagccuguacgcccaggccagcggcagaaucaccgugagcaccaagagaagccagcagaccgugauccccaacaucggcagcagacccagagugagagacauccccagcagaaucagcaucuacuggaccaucgugaagcccggcgacauccugcugaucaacagcaccggcaaccugaucgcccccagaggcuacuucaagaucagaagcggcaagagcagcaucaugagaagcgacgcccccaucggcaagugcaacagcgagugcaucacccccaacggcagcauccccaacgacaagcccuuccagaacgugaacagaaucaccuacggcgccugccccagauacgugaagcagaacacccugaagcuggccaccggcaugagaaacgugcccgagaagcagaccagaggcaucuucggcgccaucgccggcuucaucgagaacggcugggagggcaugguggacggcugguacggcuucagacaccagaacagcgagggcaucggccaggccgccgaccugaagagcacccaggccgccaucaaccagaucaacggcaagcugaacagacugaucggcaagaccaacgagaaguuccaccagaucgagaaggaguucagcgagguggagggcagaauccaggaccuggagaaguacguggaggacaccaagaucgaccuguggagcuacaacgccgagcugcugguggcccuggagaaccagcacaccaucgaccugaccgacagcgagaugaacaagcuguucgagagaaccaagaagcagcugagagagaacgccgaggacaugggcaacggcugcuucaagaucuaccacaagugcgacaacgccugcaucggcagcaucagaaacggcaccuacgaccacgacguguacagagacgaggcccugaacaacagauuccagaucaagggcguggagcugaagagcggcuacaaggacuggauccuguggaucagcuucgccaucagcugcuuccugcugugcaucgcccugcugggcuucaucaugugggccugccagaagggcaacaucagaugcaacaucugcaucuga

SEQ ID NO: 160412 - RNA, 1698 nt, Artificial Sequence
  derived and/or modified CDS sequence (opt4) from hemagglutinin__InfluenzaA__ABA43189
augaaggccaagcugcuggugcugcugugcaccuucaccgccaccuacgccgacaccaucugcgugggcuaccacgccaacaacagcaccgacaccguggacaccgugcuggagaagaacgugaccgugacccacagcgugaaccugcuggaggacagccacaacggcaagcugugccugcugaagggcaucgccccccugcagcugggcaacugcagcguggccggcuggauccugggcaaccccgagugcgagcugcugaucagcaaggagagcuggagcuacaucguggagacccccaaccccgagaacggcaccugcuaccccggcuacuucgccgacuacgaggagcugagagagcagcugagcagcgugagcagcuucgagagauucgagaucuuccccaagggcagcagcuggcccaaccacaccgugaccggcgugagcgccagcugcagccacaacggcaagagcagcuucuacagaaaccugcuguggcugaccggcaagaacggccuguaccccaaccugagcaugagcuacgugaacaacaaggagaaggaggugcuggugcuguggggcgugcaccacccccccaacaucggcgaccagagagcccuguaccacaccgagaacgccuacgugagcguggugagcagccacuacagcagaagauucacccccgagaucgccaagagacccaaggugagagaccaggagggcagaaucaacuacuacuggacccugcuggagcccggcgacaccaucaucuucgaggccaacggcaaccugaucgcccccugguacgccuucgcccugagcagaggcuucggcagcggcaucaucaccagcaacgcccccauggacgagugcgacgccaagugccagaccccccagggcgccaucaacagcagccugcccuuccagaacgugcaccccgugaccaucggcgagugccccaaguacgugagaagcgccaagcugagaauggugaccggccugagaaacauccccagcauccagagcagaggccuguucggcgccaucgccggcuucaucgagggcggcuggaccggcaugguggacggcugguacggcuaccaccaccagaacgagcagggcagcggcuacgccgccgaccagaagagcacccagaacgccaucaacggcaucaccaacaaggugaacagcgugaucgagaagaugaacacccaguucaccgccgugggcaaggaguucaacaagcuggagagaagaauggagaaccugaacaagaagguggacgacggcuuccuggacaucuggaccuacaacgccgagcugcuggugcugcuggagaacgagagaacccuggacuuccacgacagcaacgugaagaaccuguacgagaaggugaagagccagcugaagaacaacgccaaggagaucggcaacggcugcuucgaguucuaccacaagugcaacaacgagugcauggagagcgugaagaacggcaccuacgacuaccccaaguacagcgaggagagcaagcugaacagagagaagaucgacggcgugaagcuggagagcaugggcguguaccagauccuggccaucuacagcaccguggccagcagccuggugcugcuggugagccugggcgccaucagcuucuggaugugcagcaacggcagccugcagugcagaaucugcaucuga

SEQ ID NO: 160413 - RNA, 1701 nt, Artificial Sequence
  derived and/or modified CDS sequence (opt4) from hemagglutinin__InfluenzaA__ABA43200
augaagaccaucaucgcccugagcuacauccugugccugguguucgcccagaagcugcccggcaacgacaacagcaccgccacccugugccugggccaccacgccgugcccaacggcaccaucgugaagaccaucaccaacgaccagaucgaggugaccaacgccaccgagcuggugcagagcagcagcaccggcggcaucugcgacagcccccaccagauccuggacggcgagaacugcacccugaucgacgcccugcugggcgacccccagugcgacggcuuccagaacaagaagugggaccuguucguggagagaagcaaggccuacagcaacugcuaccccuacgacgugcccgacuacgccagccugagaagccugguggccagcagcggcacccuggaguucaacaacgagagcuucaacuggaccggcgugacccagaacggcaccagcagcgccugcaagagaagaagcaacaacagcuucuucagcagacugaacuggcugacccaccugaaguucaaguaccccgcccugaacgugaccaugcccaacaacgagaaguucgacaagcuguacaucuggggcgugcaccaccccggcaccgacaacgaccagaucagccuguacgcccaggccagcggcagaaucaccgugagcaccaagagaagccagcagaccgugauccccaacaucggcagcagacccagagugagagacauccccagcagaaucagcaucuacuggaccaucgugaagcccggcgacauccugcugaucaacagcaccggcaaccugaucgcccccagaggcuacuucaagaucagaagcggcaagagcagcaucaugagaagcgacgcccccaucggcaagugcaacagcgagugcaucacccccaacggcagcauccccaacgacaagcccuuccagaacgugaacagaaucaccuacggcgccugccccagauacgugaagcagaacacccugaagcuggccaccggcaugagaaacgugcccgagaagcagaccagaggcaucuucggcgccaucgccggcuucaucgagaacggcugggagggcaugguggacggcugguacggcuucagacaccagaacagcgagggcaucggccaggccgccgaccugaagagcacccaggccgccaucaaccagaucaacggcaagcugaacagacugaucggcaagaccaacgagaaguuccaccagaucgagaaggaguucagcgagguggagggcagaauccaggaccuggagaaguacguggaggacaccaagaucgaccuguggagcuacaacgccgagcugcugguggugcuggagaaccagcacaccaucgaccugaccgacagcgagaugaacaagcuguucgagagaaccaagaagcagcugagagagaacgccgaggacaugggcaacggcugcuucaagaucuaccacaagugcgacaacgccugcaucggcagcaucagaaacggcaccuacgaccacgacguguacagagacgaggcccugaacaacagauuccagaucaagggcguggagcugaagagcggcuacaaggacuggauccuguggaucagcuucgccaucagcugcuuccugcugugcguggugcugcugggcuucaucaugugggccugccagaagggcaacaucagaugcaacaucugcaucuga

SEQ ID NO: 160414 - RNA, 1701 nt, Artificial Sequence
  derived and/or modified CDS sequence (opt4) from hemagglutinin__InfluenzaA__ABA43336
augaagaccaucaucgcccugagcuacaucuucugccugguguucgcccagaagcugcccggcaacgacaacagcaccgccacccugugccugggccaccacgccgugcccaacggcacccuggugaagaccaucaccaacgaccagaucgaggugaccaacgccaccgagcuggugcagaacagcagcaccggcagaaucugcgacagcccccacagaauccuggacggcaagaacugcacccugaucgacgcccugcugggcgacccccacugcgacggcuuccagaacaaggagugggaccuguucguggagagaagcaaggccuacagcaacugcuaccccuacgacgugcccgacuacgccagccugagaagccugguggccagcagcggcacccuggaguucaucaacgaggacuucaacuggaccggcguggcccagagcggcggcagcuacgccugcaagagaggcagcgugaacagcuucuucagcagacugaacuggcugcacgagagcgaguacaaguaccccgcccugaacgugaccaugcccaacaacggcaaguucgacaagcuguacguguggggcgugcaccaccccaucaccgacagagagcagaccaagcuguacgugagagccagcggcagagugaccgugagcaccaagagaagccagcagaccgugauccccaacaucggcagcagacccugggugagaggccugagcagcagaaucagcaucuacuggaccaucgugaagcccggcgacauccugcugaucaacagcaccggcaaccugaucgcccccagaggcuacuucaagaucagaaccggcaagagcagcaucaugagaagcgacgcccccaucggcaccugcagcagcgagugcaucacccccaacggcagcauccccaacgacaagcccuuccagaacgugaacagaaucaccuacggcgccugccccagauacgugaagcagaacacccugaagcuggccaccggcaugagaaacgugcccgagaagcagaccagaggcaucuucggcgccaucgccggcuucaucgagaacggcugggagggcaugguggacggcugguacggcuucagacaccagaacagcgagggcaccggccaggccgccgaccugaagagcacccaggccgccaucgaccagaucaacggcaagcugaacagacugaucgagaagaccaacgagaaguuccaccagaucgagaaggaguucagcgagguggagggcagaauccaggaccuggagaaguacguggaggacaccaagaucgaccuguggagcuacaacgccgagcugcugguggcccuggagaaccagcacaccaucgaccugaccgacagcgagaugaacaagcuguucgagaagaccagaaagcagcugagagagaacgccgaggacaugggcaacggcugcuucaagaucuaccacaagugcgacaacgccugcaucggcagcaucagaaacggcaccuacgaccacgacguguacagagacgaggcccugaacaacagauuccagaucaagggcguggagcugaagagcggcuacaaggacuggauccuguggaucagcuucgccaucagcugcuuccugcugugcguggugcugcugggcuucaucaugugggccugccagaagggcaacaucagaugcaacaucugcaucuga

SEQ ID NO: 160415 - RNA, 1707 nt, Artificial Sequence
  derived and/or modified CDS sequence (opt4) from hemagglutinin__InfluenzaA__ABA54915
auggagaagguggugcugcugcuggccaccgccagccuggugaagagcgaccagaucugcaucggcuaccacgccaacaacagcaccgagcagguggacaccaucauggagaagaacgugaccgugacccacgcccaggacauccuggagaagacccacaacggcaagcugugcgaccuggacggcgugaagccccugauccugagagacugcagcguggccggcuggcugcugggcaaccccaugugcgacgaguucaucaacgugcccgaguggagcuacaucguggagaaggccagccccgccaacgaccugugcuaccccggcgacuucaacgacuacgaggagcugaagcaccugcugagcagaaucaaccacuucgagaagauccagaucauccccaagagcagcuggagcaaccacgaggccagcagcggcgugagcgccgccugccccuaccacggcaagcccagcuucuucagaaacgugguguggcugaucaagaagaacagcgccuaccccaccaucaagagaagcuacaacaacaccaaccaggaggaccugcuggugcuguggggcauccaccaccccaacgacgccgccgagcagaccaagcuguaccagaaccccaccaccuacaucagcgugggcaccagcacccugaaccagagacuggugcccaagaucgccaccagaagcaaggugaacggccagagcggcagaauggaguucuucuggaccauccugaagcccaacgacgccaucaacuucgagagcaacggcaacuucaucgcccccgaguacgccuacaagaucgugaagaagggcgacagcgccaucaugaagagcgagcuggaguacggcaacugcaacaccaagugccagacccccaugggcgccaucaacagcagcaugcccuuccacaacauccacccccugaccaucggcgagugccccaaguacgugaagagcaacagacuggugcuggccaccggccugagaaacaccccccagagagagagaagaagaaagaagagaggccuguucggcgccaucgccggcuucaucgagggcggcuggcagggcaugguggacggcugguacggcuaccaccacagcaacgagcagggcagcggcuacgccgccgacaaggagagcacccagaaggccaucgacggcgugaccaacaaggugaacagcaucaucgacaagaugaacacccaguucgaggccgugggcagagaguucaacaaccuggagagaagaaucgagaaccugaacaagaagauggaggacggcuuccuggacguguggaccuacaacgccgagcugcuggugcugauggagaacgagagaacccuggacuuccacgacagcaacgugaagaaccuguacaacaaggugagacugcagcugagagacaacgccaaggagcugggcaacggcugcuucgaguucuaccacaagugcgacaacgagugcauggagagcgugaagaacggcaccuacgacuacccccaguacagcgaggaggccagacugaacagagaggagaucagcggcgugaagcuggagagcaugggcaccuaccagauccugagcaucuacagcaccguggccagcagccuggcccuggccaucaugguggccggccugagccuguggaugugcagcaacggcagccugcagugcagaaucugcaucuga

SEQ ID NO: 160416 - RNA, 1698 nt, Artificial Sequence
  derived and/or modified CDS sequence (opt4) from hemagglutinin__InfluenzaA__ABA87080
augaaggugaagcugcuggugcugcugugcaccuucaccgccaccuacgccgacaccaucugcaucggcuaccacgccaacaacagcaccgacaccguggacaccgugcuggagaagaacgugaccgugacccacagcgugaaccugcuggaggacagccacaacggcaagcugugccugcugaagggcaucgccccccugcagcugggcaacugcagcguggccggcuggauccugggcaaccccgagugcgagcugcugaucagcaaggagagcuggagcuacaucaucgagacccccaaccccgagaacggcaccugcuaccccggcuacuucgccgacuacgaggagcugagagagcagcugagcagcgugagcagcuucgagagauucgagaucuuccccaaggagagcagcuggcccaaccacaccgugaccggcgugagcgccagcugcagccacaacggcaagagcagcuucuacagaaaccugcuguggcugaccggcaagaacggccuguaccccaaccugagcaagagcuacgccaacaacaaggagaaggaggugcuggugcuguggggcgugcaccacccccccaacaugggcgaccagagagcccuguaccacaccgagaacgccuacgugagcguggugagcagccacuacagcagaagauucacccccgagaucgccaagagacccaaggugagagaccaggagggcagaaucaacuacuacuggacccugcuggagcccggcgacaccaucaucuucgaggccaacggcaaccugaucgcccccagauacgccuucgcccugagcagaggcuucggcagcggcaucaucaccagcaacgcccccauggacgagugcgacgccaagugccagaccccccagggcgccaucaacagcagccugcccuuccagaacgugcaccccgugaccaucggcgagugccccaaguacgugagaagcgccaagcugagaauggugaccggccugagaaacauccccagcauccagagcagaggccuguucggcgccaucgccggcuucaucgagggcggcuggaccggcaugguggacggcugguacggcuaccaccaccagaacgagcagggcagcggcuacgccgccgaccagaagagcacccagaacgccaucaacggcaucaccaacaaggugaacagcgugaucgagaagaugaacacccaguucaccgccgugggcaaggaguucaacaagcuggagagaagaauggagaaccugaacaagaagguggacgacggcuuccuggacaucuggaccuacaacgccgagcugcuggugcugcuggagaacgagagaacccuggacuuccacgacagcaacgugaagaaccuguacgagaaggugaagagccagcugaagaacaacgccaaggagaucggcaacggcugcuucgaguucuaccacaagugcaacgacgagugcauggagagcgugaagaacggcaccuacgacuaccccaaguacagcgaggagagcaagcugaacagagagaagaucgacggcgugaagcuggagagcaugggcguguaccagauccuggccaucuacagcaccguggccagcagccuggugcugcuggugagccugggcgccaucagcuucuggaugugcagcaacggcagccugcagugcagaaucugcaucuga

SEQ ID NO: 160417 - RNA, 1698 nt, Artificial Sequence; identical to SEQ ID NO: 160356
  derived and/or modified CDS sequence (opt4) from hemagglutinin__InfluenzaA__ABA87091

SEQ ID NO: 160418 - RNA, 1698 nt, Artificial Sequence; identical to SEQ ID NO: 160356
  derived and/or modified CDS sequence (opt4) from hemagglutinin__InfluenzaA__ABA87231

SEQ ID NO: 160419 - RNA, 1701 nt, Artificial Sequence; identical to SEQ ID NO: 160315
  derived and/or modified CDS sequence (opt4) from hemagglutinin__InfluenzaA__ABA87242

SEQ ID NO: 160420 - RNA, 1701 nt, Artificial Sequence; identical to SEQ ID NO: 160316
  derived and/or modified CDS sequence (opt4) from hemagglutinin__InfluenzaA__ABA87253

SEQ ID NO: 160421 - RNA, 1698 nt, Artificial Sequence
  derived and/or modified CDS sequence (opt4) from hemagglutinin__InfluenzaA__ABB02781
augaaggugaagcugcugauccugcugugcaccuucaccgccaccuacgccgacaccaucugcaucggcuaccacgccaacaacagcaccgacaccguggacaccgugcuggagaagaacgugaccgugacccacagcgugaaccugcuggaggacagccacaacggcaagcugugccugcugaagggcaucgccccccugcagcugggcaacugcagcguggccggcuggauccugggcaaccccgagugcgagcugcugaucagcaaggagagcuggagcuacaucguggagacccccaaccccgagaacggcgccugcuaccccggcuacuucgccgacuacgaggagcugagagagcagcugagcagcgugagcagcuucgagagauucgagaucuuccccaaggagagcagcuggcccaaccacaccgugaccggcgugagcgccagcugcagccacaacggcaagagcagcuucuacagaaaccugcuguggcugaccggcaagaacggccuguaccccaaccugagcaagagcuacgccaacaacaaggagaaggaggugcugauccuguggggcgugcaccacccccccaacaucggcgaccagagaacccuguaccacaccgagaacgccuacgugagcguggugagcagccacuacagcagaagauucacccccgagaucaccaagagacccaaggugagagaccaggagggcagaaucaacuacuacuggacccugcuggagcccggcgacaccaucaucuucgaggccaacggcaaccugaucgcccccugguacgccuucgcccugagcagaggcuucggcagcggcaucaucaccagcaacgcccccauggacgagugcgacgccaagugccagaccccccagggcgccaucaacagcagccugcccuuccagaacgugcaccccgugaccaucggcgagugccccaaguacgugagaagcgccaagcugagaauggugaccggccugagaaacauccccagcauccagagcagaggccuguucggcgccaucgccggcuucaucgagggcggcuggaccggcaugguggacggcugguacggcuaccaccaccagaacgagcagggcagcggcuacgccgccgaccagaagagcacccagaacgccaucaacggcaucaccaacaaggugaacagcgugaucgagaagaugaacacccaguucaccgccgugggcaaggaguucaacaagcuggagagaagaauggagaaccugaacaagaagguggacgacggcuuccuggacaucuggaccuacaacgccgagcugcuggugcugcuggagaacgagagaacccuggacuuccacgacagcaacgugaagaaccuguacgagaaggugaagagccagcugaagaacaacgccaaggagaucggcaacggcugcuucgaguucuaccacaagugcaacaacgagugcauggagagcgugaagaacggcaccuacgacuaccccaaguacagcgaggagagcaagcugaacagagagaagaucgacggcgugaagcuggacagcaugggcguguaccagauccuggccaucuacagcaccguggccagcagccuggugcugcuggugagccugggcgccaucagcuucuggaugugcagcaacggcagccugcagugcagagugugcaucuga

SEQ ID NO: 160422 - RNA, 1698 nt, Artificial Sequence; identical to SEQ ID NO: 160361
  derived and/or modified CDS sequence (opt4) from hemagglutinin__InfluenzaA__ABB02792

SEQ ID NO: 160423 - RNA, 1698 nt, Artificial Sequence; identical to SEQ ID NO: 160359
  derived and/or modified CDS sequence (opt4) from hemagglutinin__InfluenzaA__ABB02803

SEQ ID NO: 160424 - RNA, 1698 nt, Artificial Sequence
  derived and/or modified CDS sequence (opt4) from hemagglutinin__InfluenzaA__ABB02814
augaaggccaagcugcuggugcugcugugcaccuucaccgccaccuacgccgacaccaucugcaucggcuaccacgccaacaacagcaccgacaccguggacaccgugcuggagaagaacgugaccgugacccacagcgugaaccugcuggaggacagccacaacggcaagcugugccugcugaagggcaucgccccccugcagcugggcaacugcagcguggccggcuggauccugggcaaccccgagugcgagcugcugaucagcaaggagagcuggagcuacaucguggagacccccaaccccgagaacggcaccugcuaccccggcuacuucgccgacuacgaggagcugagagagcagcugagcagcgugagcagcuucgagagauucgagaucuuccccaagggcagcagcuggcccaaccacaccgugaccggcgugagcgccagcugcagccacaacggcaagagcagcuucuacagaaaccugcuguggcugaccggcaagaacggccuguaccccaaccugagcaugagcuacgugaacaacaaggagaaggaggugcuggugcuguggggcgugcaccacccccccaacaucggcgaccagagagcccuguaccacaccgagaacgccuacgugagcguggugagcagccacuacagcagaagauucacccccgagaucgccaagagacccaaggugagagaccaggagggcagaaucaacuacuacuggacccugcuggagcccggcgacaccaucaucuucgaggccaacggcaaccugaucgcccccugguacgccuucgcccugagcagaggcuucggcagcggcaucaucaccagcaacgcccccauggacgagugcgacgccaagugccagaccccccagggcgccaucaacagcagccugcccuuccagaacgugcaccccgugaccaucggcgagugccccaaguacgugagaagcgccaagcugagaauggugaccggccugagaaacauccccagcauccagagcagaggccuguucggcgccaucgccggcuucaucgagggcggcuggaccggcaugguggacggcugguacggcuaccaccaccagaacgagcagggcagcggcuacgccgccgaccagaagagcacccagaacgccaucaacggcaucaccaacaaggugaacagcgugaucgagaagaugaacacccaguucaccgccgugggcaaggaguucaacaagcuggagagaagaauggagaaccugaacaagaagguggacgacggcuuccuggacaucuggaccuacaacgccgagcugcuggugcugcuggagaacgagagaacccuggacuuccacgacagcaacgugaagaaccuguacgagaaggugaagagccagcugaagaacaacgccaaggagaucggcaacggcugcuucgaguucuaccacaagugcgacaacgagugcauggagagcgugaagaacggcaccuacgacuaccccaaguacagcgaggagagcaagcugaacagagagaagaucgacggcgugaagcuggagagcaugggcguguaccagauccuggccaucuacagcaccguggccagcagccuggugcugcuggugagccugggcgccaucagcuucuggaugugcagcaacggcagccugcagugcagaaucugcaucuga

SEQ ID NO: 160425 - RNA, 1698 nt, Artificial Sequence
  derived and/or modified CDS sequence (opt4) from hemagglutinin__InfluenzaA__ABB02825
augaaggccaagcugcuggugcugcugugcaccuucaccgccaccuacgccgacaccaucugcaucggcuaccacgccaacaacagcaccgacaccguggacaccgugcuggagaagaacgugaccgugacccacagcgugaaccugcuggaggacagccacaacggcaagcugugccugcugaagggcaucgccccccugcagcugggcaacugcagcguggccggcuggauccugggcaaccccgagugcgagcugcugaucagcaaggagagcuggagcuacaucguggagacccccaaccccgagaacggcaccugcuaccccggcuacuucgccgacuacgaggagcugagagagcagcugagcagcgugagcagcuucgagagauucgagaucuuccccaagggcagcagcuggcccaaccacaccgugaccggcgugagcgccagcugcagccacaacggcaagagcagcuucuacagaaaccugcuguggcugaccggcaagaacggccuguaccccaaccugagcaugagcuacgugaacaacaaggagaaggaggugcuggugcuguggggcgugcaccacccccccaacaucggcgaccagagagcccuguaccacaccgagaacgccuacgugagcguggugagcagccacuacagcagaagauucacccccgagaucgccaagagacccaaggugagagaccaggagggcagaaucaacuacuacuggacccugcuggagcccggcgacaccaucaucuucgaggccaacggcaaccugaucgcccccugguacgccuucgcccugagcagaggcuucggcagcggcaucaucaccagcaacgcccccauggacgagugcgacgccaagugccagaccccccagggcgccaucaacagcagccugcccuuccagaacgugcaccccgugaccaucggcgagugccccaaguacgugagaagcgccaagcugagaauggugaccggccugagaaacauccccagcauccagagcagaggccuguucggcgccaucgccggcuucaucgagggcggcuggaccggcaugguggacggcugguacggcuaccaccaccagaacgagcagggcagcggcuacgccgccgaccagaagagcacccagaacgccaucaacggcaucaccaacaaggugaacagcgugaucgagaagaugaacacccaguucaccgccgugggcaaggaguucaacaagcuggagagaagaauggagaaccugaacaagaagguggacgacggcuuccuggacaucuggaccuacaacgccgagcugcuggugcugcuggagaacgagagaacccuggacuuccacgacagcaacgugaagaaccuguacgagaaggugaagagccagcugaagaacaacgccaaggagaucggcaacggcugcuucgaguucuaccacaagugcgacaacgagugcauggagagcgugaagaacggcaccuacgacuaccccaaguacagcgaggagagcaagcugaacagagagagaaucgacggcgugaagcuggagagcaugggcguguaccagauccuggccaucuacagcaccguggccagcagccuggugcugcuggugagccugggcgccaucagcuucuggaugugcagcaacggcagccugcagugcagaaucugcaucuga

SEQ ID NO: 160426 - RNA, 1701 nt, Artificial Sequence
  derived and/or modified CDS sequence (opt4) from hemagglutinin__InfluenzaA__ABB02836
augaagaccaucaucgcccugagcuacauccugugccugguguucgcccagaagcugcccggcaacgacaacagcaccgccacccugugccugggccaccacgccgugcccaacggcaccaucgugaagaccaucaccaacgaccagaucgaggugaccaacgccaccgagcuggugcagagcagcagcaccggcggcaucugcgacagcccccaccagauccuggacggcgagaacugcacccugaucgacgcccugcugggcgacccccagugcgacggcuuccagaacaagaagugggaccuguucguggagagaagcaaggccuacagcaacugcuaccccuacgacgugcccgacuacgccagccugagaagccugguggccagcagcggcacccuggaguucaacaacgagagcuucaacuggaccggcgugacccagaacggcaccagcagcgccugcaagagaagaagcaacaacagcuucuucagcagacugaacuggcugacccaccugaaguucaaguaccccgcccugaacgugaccaugcccaacaacgagaaguucgacaagcuguacaucuggggcgugcaccaccccggcaccgacaacgaccagaucagccuguacgcccaggccagcggcagaaucaccgugagcaccaagagaaaccagcagaccgugauccccaacaucggcagcagacccagagugagagacauccccagcagaaucagcaucuacuggaccaucgugaagcccggcgacauccugcugaucaacagcaccggcaaccugaucgcccccagaggcuacuucaagaucagaagcggcaagagcagcaucaugagaagcgacgcccccaucggcaagugcaagagcgagugcaucacccccaacggcagcauccccaacgacaagcccuuccagaacgugaacagaaucaccuacggcgccugccccagauacgugaagcagaacacccugaagcuggccaccggcaugagaaacgugcccgagaagcagaccagaggcaucuucggcgccaucgccggcuucaucgagaacggcugggagggcaugguggacggcugguacggcuucagacaccagaacagcgagggcaucggccaggccgccgaccugaagagcacccaggccgccaucaaccagaucaacggcaagcugaacagacugaucggcaagaccaacgagaaguuccaccagaucgagaaggaguucagcgagguggagggcagaauccaggaccuggagaaguacguggaggacaccaagaucgaccuguggagcuacaacgccgagcugcugguggcccuggagaaccagcacaccaucgaccugaccgacagcgagaugaacaagcuguucgagagaaccaagaagcagcugagagagaacgccgaggacaugggcaacggcugcuucaagaucuaccacaagugcgacaacgccugcaucggcagcaucagaaacggcaccuacgaccacgacguguacagagacgaggcccugaacaacagauuccagaucaagggcguggagcugaagagcggcuacaaggacuggauccuguggaucagcuucgccaucagcugcuuccugcugugcguggcccugcugggcuucaucaugugggccugccagaagggcaacaucagaugcaacaucugcaucuga

SEQ ID NO: 160427 - RNA, 1701 nt, Artificial Sequence
  derived and/or modified CDS sequence (opt4) from hemagglutinin__InfluenzaA__ABB02847
augaagaccaucaucgcccugagcuacauccugugccugguguucgcccagaagcugcccggcaacgacaacagcaccgccacccugugccugggccaccacgccgugcccaacggcaccaucgugaagaccaucaccaacgaccagaucgaggugaccaacgccaccgagcuggugcagagcagcagcaccggcggcaucugcgacagcccccaccagauccuggacggcgagaacugcacccugaucgacgcccugcugggcgacccccagugcgacggcuuccagaacaagaagugggaccuguucguggagagaagcaaggccuacagcaacugcuaccccuacgacgugcccgacuacgccagccugagaagccugguggccagcagcggcacccuggaguucaacaacgagagcuucaacuggaucggcgugacccagaacggcaccagcagcgccugcaagagaagaagcaacaacagcuucuucagcagacugaacuggcugacccaccugaaguucaaguaccccgcccugaacgugaccaugcccaacaacgagaaguucgacaagcuguacaucuggggcgugcaccaccccggcaccgacaacgaccagaucagccuguacgcccaggccagcggcagaaucaccgugagcaccaagagaagccagcagaccgugauccccaacaucggcagcagacccagagugagagacauccccagcagaaucagcaucuacuggaccaucgugaagcccggcgacauccugcugaucaacagcaccggcaaccugaucgcccccagaggcuacuucaagaucagaagcggcaagagcagcaucaugagaagcgacgcccccaucggcaagugcaacagcgagugcaucacccccaacggcagcauccccaacgacaagcccuuccagaacgugaacagaaucaccuacggcgccugccccagauacgugaagcagaacacccugaagcuggccaccggcaugagaaacgugcccgagaagcagaccagaggcaucuucggcgccaucgccggcuucaucgagaacggcugggagggcaugguggacggcugguacggcuucagacaccagaacagcgagggcaucggccaggccgccgaccugaagagcacccaggccgccaucaaccagaucaacggcaagcugaacagacugaucggcaagaccaacgagaaguuccaccagaucgagaaggaguucagcgagguggagggcagaauccaggaccuggagaaguacguggaggacaccaagaucgaccuguggagcuacaacgccgagcugcugguggcccuggagaaccagcacaccaucgaccugaccgacagcgagaugaacaagcuguucgagagaaccaagaagcagcugagagagaacgccgaggacaugggcaacggcugcuucaagaucuaccacaagugcgacaacgccugcaucggcagcaucagaaacggcaccuacgaccacgacguguacagagacgaggcccugaacaacagauuccagaucaagggcguggagcugaagagcggcuacaaggacuggauccuguggaucagcuucgccaucagcugcuuccugcugugcguggugcugcugggcuucaucaugugggccugccagaagggcaacaucagaugcaacaucugcaucuga

SEQ ID NO: 160428 - RNA, 1701 nt, Artificial Sequence; identical to SEQ ID NO: 160107
  derived and/or modified CDS sequence (opt4) from hemagglutinin__InfluenzaA__ABB02858

SEQ ID NO: 160429 - RNA, 1701 nt, Artificial Sequence
  derived and/or modified CDS sequence (opt4) from hemagglutinin__InfluenzaA__ABB02869
augaagaccaucaucgcccugagcuacauccugugccugguguucgcccagaagcugcccgugaacgacaacagcaccgccacccugugccugggccaccacgccgugcccaacggcacccuggugaagaccaucaccaacgaccacaucgaggugaccaacgccaccgagcuggugcagagcagcagcaccggcagaaucugcgacagcccccaccagauccuggacggcgagaacugcacccugaucgacgcccugcugggcgacccccacugcgacggcuuccagaacaaggagugggaccuguucguggagagaagcaccgccuacagcaacugcuaccccuacgacgugcccgacuacgccagccugagaagccugguggccagcagcggcacccuggaguucaacaacgagagcuucaacuggaccggcguggcccagaacggcaccagcagcgccugcaagagaagaagcaucaagagcuucuucagcagacugaacuggcugcaccagcugaaguacaaguaccccgcccugaacgugaccaugcccaacaacgagaaguucgacaagcuguacaucuggggcgugcaccaccccagcaccgacagcgaccagaucagccuguacgcccaggccagcggcagagugaccgugagcaccaagagaagccagcagaccgugauccccaacaucggcagcagacccugggugagaggcgugagcagcagaaucagcaucuacuggaccaucgugaagcccggcgacauccugcugaucaacagcaccggcaaccugaucgcccccagaggcuacuucaagaucagaagcggcaagagcagcaucaugagaagcaacgcccccaucggcaagugcaacagcgagugcaucacccccaacggcagcauccccaacgacaagcccuuccagaacgugaacagaaucaccuacggcgccugccccagauacgugaagcagaacacccugaagcuggccaccggcaugagaaacgugcccgagaagcagaccagaggcaucuucggcgccaucgccggcuucguggagaacggcugggagggcaugguggacggcugguacggcuucagacaccagaacagcgagggcaccggccaggccgccgaccugaagagcacccaggccgccaucaaccagaucaacggcaagcugaacagacugaucgagaagaccaacgagaaguuccaccagaucgagaaggaguucagcgagguggagggcagaauccaggaccuggagaaguacguggaggacaccaagaucgaccuguggagcuacaacgccgagcugcugguggcccuggagaaccagcacaccaucgaccugaccgacagcgagaugaacaagcuguucgagagaaccagaaagcagcugagagagaacgccgaggacaugggcaacggcugcuucaagaucuaccacaagugcgacaacgccugcaucggcagcaucagaaacggcaccuacgaccacgacguguacagagacgaggcccugaacaacagauuccagaucaagggcguggagcugaagagcggcuacaaggacuggauccuguggaucagcuucgccaucagcugcuuccugcugugcguggugcugcugggcuucaucaugugggccugccagaagggcaacaucagaugcaacaucugcaucuga

SEQ ID NO: 160430 - RNA, 1701 nt, Artificial Sequence
  derived and/or modified CDS sequence (opt4) from hemagglutinin__InfluenzaA__ABB02880
augaagaccaucaucgcccugagcuacauccugugccugguguucgcccagaagcugcccgugaacgacaacagcaccgccacccugugccugggccaccacgccgugcccaacggcacccuggugaagaccaucaccaacgaccacaucgaggugaccaacgccaccgagcuggugcagagcagcagcaccggcagaaucugcgacagcccccaccagauccuggacggcgagaacugcacccugaucgacgcccugcugggcgacccccacugcgacggcuuccagaacaaggagugggaccuguucguggagagaagcaccgccuacagcaacugcuaccccuacgacgugcccgacuacgccagccugagaagccugguggccagcagcggcacccuggaguucaacaacgagagcuucaacuggaccggcguggcccagaacggcaccagcagcgccugcaagagaagaagcaucaagagcuucuucagcagacugaacuggcugcaccagcugaaguacaaguaccccgcccugaacgugaccaugcccaacaacgagaaguucgacaagcuguacaucuggggcgugcaccaccccagcaccgacagcgaccagaucagccuguacgcccaggccagcggcagagugaccgugagcaccaagagaagccagcagaccgugauccccaacaucggcagcagacccugggugagaggcgugagcagcagaaucagcaucuacuggaccaucgugaagcccggcgacauccugcugaucaacagcaccggcaaccugaucgcccccagaggcuacuucaagaucagaagcggcaagagcagcaucaugagaagcaacgcccccaucggcaagugcaacagcgagugcaucacccccaacggcagcauccccaacgacaagcccuuccagaacgugaacagaaucaccuacggcgccugccccagauacgugaagcagaacacccugaagcuggccaccggcaugagaaacgugcccgagaagcagaccagaggcaucuucggcgccaucgccggcuucaucgagaacggcugggagggcaugguggacggcugguacggcuucagacaccagaacagcgagggcaccggccaggccgccgaccugaagagcacccaggccgccaucaaccagaucaacagaaagcugaacagacugaucgagaagaccaacgagaaguuccaccagaucgagaaggaguucagcgagguggagggcagaauccaggaccuggagaaguacguggaggacaccaagaucgaccuguggagcuacaacgccgagcugcugguggcccuggagaaccagcacaccaucgaccugaccgacagcgagaugaacaagcuguucgagagaaccagaaagcagcugagagagaacgccgaggacaugggcaacggcugcuucaagaucuaccacaagugcgacaacgccugcaucggcagcaucagaaacggcaccuacgaccacgacguguacagagacgaggcccugaacaacagauuccagaucaagggcguggagcugaagagcggcuacaaggacuggauccuguggaucagcuucgccaucagcugcuuccugcugugcguggugcugcugggcuucaucaugugggccugccagaagggcaacaucagaugcaacaucugcaucuga

SEQ ID NO: 160431 - RNA, 1701 nt, Artificial Sequence
  derived and/or modified CDS sequence (opt4) from hemagglutinin__InfluenzaA__ABB02891
augaagaccaucaucgcccugagcuacauccugugccugguguucgcccagaagcugcccgugaacgacaacagcaccgccacccugugccugggccaccacgccgugcccaacggcacccuggugaagaccaucaccaacgaccacaucgaggugaccaacgccaccgagcuggugcagagcagcagcaccggcagaaucugcgacagcccccaccagauccuggacggcgagaacugcacccugaucgacgcccugcugggcgacccccacugcgacggcuuccagaacaaggagugggaccuguucguggagagaagcaccgccuacagcaacugcuaccccuacgacgugcccgacuacgccagccugagaagccugguggccagcagcggcacccuggaguucaacaacgagagcuucaacuggaccggcguggcccagaacggcaccagcagcgccugcaagagaagaagcaucaagagcuucuucagcagacugaacuggcugcaccagcugaaguacaaguaccccgcccugaacgugaccaugcccaacaacgagaaguucgacaagcuguacaucuggggcgugcaccaccccagcaccgacagcgaccagaucagccuguacgcccaggccagcggcagagugaccgugagcaccaagagaagccagcagaccgugauccccaacaucggcagcagacccugggugagaggcgugagcagcaucaucagcaucuacuggaccaucgugaagcccggcgacauccugcugaucaacagcaccggcaaccugaucgcccccagaggcuacuucaagaucagaagcggcaagagcagcaucaugagaagcaacgcccccaucggcgagugcaacagcgagugcaucacccccaacggcagcauccccaacgacaagcccuuccagaacgugaacagaaucaccuacggcgccugccccagauacgugaagcagaacacccugaagcuggccaccggcaugagaaacgugcccgagaagcagaccagaggcaucuucggcgccaucgccggcuucaucgagaacggcugggagggcaugguggacggcugguacggcuucagacaccagaacagcgagggcaccggccaggccgccgaccugaagagcacccaggccgccaucaaccagaucaacggcaagcugaacagacugaucgagaagaccaacgagaaguuccaccagaucgagaaggaguucagcgagguggagggcagaauccaggaccuggagaaguacguggaggacaccaagaucgaccuguggagcuacaacgccgagcugcugguggcccuggagaaccagcacaccaucgaccugaccgacagcgagaugaacaagcuguucgagagaaccagaaagcagcugagagagaacgccgaggacaugggcaacggcugcuucaagaucuaccacaagugcgacaacgccugcaucggcagcaucagaaacggcaccuacgaccacgacguguacagagacgaggcccugaacaacagauuccagaucaagggcguggagcugaagagcggcuacaaggacuggauccuguggaucagcuucgccaucagcugcuuccugcugugcguggugcugcugggcuucaucaugugggccugccagaagggcaacaucagaugcaacaucugcaucuga

SEQ ID NO: 160432 - RNA, 1701 nt, Artificial Sequence
  derived and/or modified CDS sequence (opt4) from hemagglutinin__InfluenzaA__ABB02902
augaagaccaucaucgcccugagcuacauccugugccugguguucgcccagaagcugcccgugaacgacaacagcaccgccacccugugccugggccaccacgccgugcccaacggcacccuggugaagaccaucaccaacgaccacaucgaggugaccaacgccaccgagcuggugcagagcagcagcaccggcagaaucugcgacagcccccaccagauccuggacggcgagaacugcacccugaucgacgcccugcugggcgacccccacugcgacggcuuccagaacaaggagugggaccuguucguggagagaagcaccgccuacagcaacugcuaccccuacgacgugcccgacuacgccagccugagaagccugguggccagcagcggcacccuggaguucaacaacgagagcuucaacuggaccggcguggcccagaacggcaccagcagcgccugcaagagaagaagcaucaagagcuucuucagcagacugaacuggcugcaccagcugaaguacaaguaccccgcccugaacgugaccaugcccaacaacgagaaguucgacaagcuguacaucuggggcgugcaccaccccagcaccgacagcgaccagaucagccuguacgcccaggccagcggcagagugaccgugagcaccaagagaagccagcagaccgugauccccaacaucggcagcagacccugggugagaggcgugagcagcagaaucagcaucuacuggaccaucgugaagcccggcgacauccugcugaucaacagcaccggcaaccugaucgcccccagaggcuacuucaagaucagaagcggcaagagcagcaucaugagaagcaacgcccccaucggcaagugcaacagcgagugcaucacccccaacggcagcauccccaacgacaagcccuuccagaacgugaacagaaucaccuacggcgccugccccagauacgugaagcagaacacccugaagcuggccaccggcaugagaaacgugcccgagaagcagaccagaggcaucuucggcgccaucgccggcuucaucgagaacggcugggagggcaugauggacggcugguacggcuucagacaccagaacagcgagggcaccggccaggccgccgaccugaagagcacccaggccgccaucaaccagaucaacggcaagcugaacagacugaucgagaagaccaacgagaaguuccaccagaucgagaaggaguucagcgagguggagggcagaauccaggaccuggagaaguacguggaggacaccaagaucgaccuguggagcuacaacgccgagcugcugguggcccuggagaaccagcacaccaucgaccugaccgacagcgagaugaacaagcuguucgagagaaccagaaagcagcugagagagaacgccgaggacaugggcaacggcugcuucaagaucuaccacaagugcgacaacgccugcaucggcagcaucagaaacggcaccuacgaccacgacguguacagagacgaggcccugaacaacagauuccagaucaagggcguggagcugaagagcggcuacaaggacuggauccuguggaucagcuucgccaucagcugcuuccugcugugcguggugcugcugggcuucaucaugugggccugccagaagggcaacaucagaugcaacaucugcaucuga

SEQ ID NO: 160433 - RNA, 1698 nt, Artificial Sequence
  derived and/or modified CDS sequence (opt4) from hemagglutinin__InfluenzaA__ABB02913
augaaggccaagcugcuggugcugcugugcaccuucaccgccaccuacgccgacaccaucugcaucggcuaccacgccaacaacagcaccgacaccguggacaccgugcuggagaagaacgugaccgugacccacagcgugaaccugcuggaggacagccacaacggcaagcugugccugcugaagggcaucgccccccugcagcugggcaacugcagcguggccggcuggauccugggcaaccccgagugcgagcugcugaucagcaaggagagcuggagcuacaucguggagacccccaaccccgagaacggcaccugcuaccccggcuacuucgccgacuacgaggagcugagagagcagcugagcagcgugagcagcuucgagagauucgagaucuuccccaagggcagcagcuggcccaaccacaccgugaccggcgugagcgccagcugcagccacaacggcaagagcagcuucuacagaaaccugcuguggcugaccggcaagaacggccuguaccccaaccugagcaugagcuacgugaacaacaaggagaaggaggugcuggugcuguggggcgugcacagaccccccaacaucggcgaccagagagcccuguaccacaccgagaacgccuacgugagcguggugagcagccacuacagcagaagauucacccccgagaucgccaagagacccaaggugagagaccaggagggcagaaucaacuacuacuggacccugcuggagcccggcgacaccaucaucuucgaggccaacggcaaccugaucgcccccugguacgccuucgcccugagcagaggcuucggcagcggcaucaucaccagcaacgcccccauggacgagugcgacgccaagugccagaccccccagggcgccaucaacagcagccugcccuuccagaacgugcaccccgugaccaucggcgagugccccaaguacgugagaagcgccaagcugagaauggugaccggccugagaaacauccccagcauccagagcagaggccuguucggcgccaucgccggcuucaucgagggcggcuggaccggcaugguggacggcugguacggcuaccaccaccagaacgagcagggcagcggcuacgccgccgaccagaagagcacccagaacgccaucaacagaaucaccaacaaggugaacagcgugaucgagaagaugaacacccaguucaccgccgugggcaaggaguucaacaagcuggagagaagaauggagaaccugaacaagaagguggacgacggcuuccuggacaucuggaccuacaacgccgagcugcuggugcugcuggagaacgagagaacccuggacuuccacgacagcaacgugaagaaccuguacgagaaggugaagagccagcugaagaacaacgccaaggagaucggcaacggcugcuucgaguucuaccacaagugcaacaacgagugcauggagagcgugaagaacggcaccuacgacuaccccaaguacagcgaggagagcaagcugaacagagagaagaucgacggcgugaagcuggagagcaugggcguguaccagauccuggccaucuacagcaccguggccagcagccuggugcugcuggugagccugggcgccaucagcuucuggaugugcagcaacggcagccugcagugcagaaucugcaucuga

SEQ ID NO: 160434 - RNA, 1698 nt, Artificial Sequence
  derived and/or modified CDS sequence (opt4) from hemagglutinin__InfluenzaA__ABB02924
augaaggugaagcugcuggugcugcugugcaccuucaccgccaccuacgccgacaccaucugcaucggcuaccacgccaacaacagcaccgacaccguggacaccgugcuggagaagaacgugaccgugacccacagcgugaaccugcuggaggacagccacaacggcaagcugugccugcugaagggcaucgccccccugcagcugggcaacugcagcguggccggcuggauccugggcaaccccgagugcgagcugcugaucagcaaggagagcuggagcuacaucguggagacccccaaccccgagaacggcaccugcuaccccggcuacuucgccgacuacgaggagcugagagagcagcugagcagcgugagcagcuucgagagauucgagaucuuccccaaggagagcagcuggcccaaccacaccgugaccggcgugagcgccagcugcagccacaacggcaagagcagcuucuacagaaaccugcuguggcugaccggcaagaacggccuguaccccaaccugagcaagagcuacgccaacaacaaggagaaggaggugcuggugcuguggggcgugcaccacccccccaacaucggcgaccagagagcccuguaccacaccgagaacgccuacgugagcguggugagcagccacuacagcagaagauucacccccgagaucgccaagagacccaaggugagagaccaggagggcagaaucaacuacuacuggacccugcuggagcccggcgacaccaucaucuucgaggccaacggcaaccugaucgcccccagauacgccuucgcccugagcagaggcuucggcagcggcaucaucaccagcaacgcccccauggacgagugcgacgccaagugccagaccccccagggcgccaucaacagcagccugcccuuccagaacgugcaccccgugaccaucggcgagugccccaaguacgugagaagcgccaagcugagaauggugaccggccugagaaacauccccagcauccagagcagaggccuguucggcgccaucgccggcuucaucgagggcggcuggaccggcaugguggacggcugguacggcuaccaccaccagaacgagcagggcagcggcuacgccgccgaccagaagagcacccagaacgccaucaacggcaucaccaacaaggugaacgccgugaucgagaagaugaacacccaguucaccgccgugggcaaggaguucaacaagcuggagagaagaauggagaaccugaacaagaagguggacgacggcuuccuggacaucuggaccuacaacgccgagcugcuggugcugcuggagaacgagagaacccuggacuuccacgacagcaacgugaagaaccuguacgagaaggugaagagccagcugaagaacaacgccaaggagaucggcaacggcugcuucgaguucuaccacaagugcaacgacgagugcauggagagcgugaagaacggcaccuacgacuaccccaaguacagcgaggagagcaagcugaacagagagaagaucgacggcgugaagcuggagagcaugggcguguaccagauccuggccaucuacagcaccguggccagcagccuggugcugcuggugagccugggcgccaucagcuucuggaugugcagcaacggcagccugcagugcagaaucugcaucuga

SEQ ID NO: 160435 - RNA, 1698 nt, Artificial Sequence
  derived and/or modified CDS sequence (opt4) from hemagglutinin__InfluenzaA__ABB02936
augaaggccaagcugcuggugcugcugugcaccuucaccgccaccuacgccgacaccaucugcaucggcuaccacgccaacaacagcaccgacaccguggacaccgugcuggagaagaacgugaccgugacccacagcgugaaccugcuggaggacagccacaacggcaagcugugccugcugaagggcaucgccccccugcagcugggcaacugcagcguggccggcuggauccugggcaaccccgagugcgagcugcugaucagcaaggagagcuggagcuacaucguggagacccccaaccccgagaacggcaccugcuaccccggccacuucgccgacuacgaggagcugagagagcagcugagcagcgugagcagcuucgagagauucgagaucuuccccaagggcagcagcuggcccaaccacaccgugaccggcgugagcgccagcugcagccacaacggcaagagcagcuucuacagaaaccugcuguggcugaccggcaagaacggccuguaccccaaccugagcaugagcuacgugaacaacaaggagaaggaggugcuggugcuguggggcgugcaccacccccccaacaucggcgaccagagagcccuguaccacaccgagaacgccuacgugagcguggugagcagccacuacagcagaagauucacccccgagaucgccaagagacccaaggugagagaccaggagggcagaaucaacuacuacuggacccugcuggagcccggcgacaccaucaucuucgaggccaacggcaaccugaucgcccccugguacgccuucgcccugagcagaggcuucggcagcggcaucaucaccagcaacgcccccauggacgagugcgacgccaagugccagaccccccagggcgccaucaacagcagccugcccuuccagaacgugcaccccgugaccaucggcgagugccccaaguacgugagaagcgccaagcugagaauggugaccggccugagaaacauccccagcauccagagcagaggccuguucggcgccaucgccggcuucaucgagggcggcuggaccggcaugguggacggcugguacggcuaccaccaccagaacgagcagggcagcggcuacgccgccgaccagaagagcacccagaacgccaucaacggcaucaccaacaaggugaacagcgugaucgagaagaugaacacccaguucaccgccgugggcaaggaguucaacaagcuggagagaagaauggagaaccugaacaagaagguggacgacggcuuccuggacaucuggaccuacaacgccgagcugcuggugcugcuggagaacgagagaacccuggacuuccacgacagcaacgugaagaaccuguacgagaaggugaagagccagcugaagaacaacgccaaggagaucggcaacggcugcuucgaguucuaccacaagugcaacaacgagugcauggagagcgugaagaacggcaccuacgacuaccccaaguacagcgaggagagcaagcugaacagagagaagaucgacggcgugaagcuggagagcaugggcguguaccagauccuggccaucuacagcaccguggccagcagccuggugcugcuggugagccugggcgccaucagcuucuggaugugcagcaacggcagccugcagugcagaaucugcaucuga

SEQ ID NO: 160436 - RNA, 1701 nt, Artificial Sequence
  derived and/or modified CDS sequence (opt4) from hemagglutinin__InfluenzaA__ABB02947
augaagaccaucaucgcccugagcuacauccugugccugguguucgcccagaagauccccggcaacgacaacagcaccgccacccugugccugggccaccacgccgugcccaacggcacccuggugaagaccaucaccaacgaccagaucgaggugaccaacgccaccgagcuggugcagagcagcagcaccggcagaaucugcgacagcccccacagaauccuggacggcgagaacugcacccugaucgacgcccugcugggcgacccccacugcgacggcuuccagaacaaggagugggaccuguucguggagagaagcaaggccuacagcaacugcuaccccuacgacgugcaggacuacgccagccugagaagccugguggccagcagcggcacccuggaguucaacaacgagagcuucaacuggaccggcguggcccagaacggcaccagcuacgccugcaagagaagaagcaucaagagcuucuucagcagacugaacuggcugcaccagcugaaguacaaguaccccgcccugaacgugaccaugcccaacaacgacaaguucgacaagcuguacaucuggggcgugcaccaccccagcaccgacagcgaccagaccagccuguacgcccaggccagcggcagagugaccgugagcaccaagagaagccagcagaccgugauccccaacaucggcagcagacccugggugagaggcgugagcagcagaaucagcaucuacuggaccaucgugaagcccggcgacauccugcugaucaacagcaccggcaaccugaucgcccccagaggcuacuucaagaucagaagcggcaagagcagcaucaugagaagcgacgcccccaucggcaagugcaacagcgagugcaucacccccaacggcagcauccccaacgacaagcccuuccagaacgugaacagaaucaccuacggcgccugccccagauacgugaagcagaacacccugaagcuggccaccggcaugagaaacgugcccgagaagcagaccagaggcaucuucggcgccaucgccggcuucaucgagaacggcugggagggcaugguggacggcugguacggcuucagacaccagaacagcgagggcaccggccaggccgccgaccugaagagcacccaggccgccaucaaccagaucaacggcaagcugaacagacugaucgagaagaccaacgagaaguuccaccagaucgagaaggaguucagcgagguggagggcagaauccaggaccuggagaaguacguggaggacaccaagaucgaccuguggagcuacaacgccgagcugcugguggcccuggagaaccagcacaccaucgaccugaccgacagcgagaugaacaagcuguucgagagaaccagaaagcagcugagagagaacgccgaggacaugggcaacggcugcuucaagaucuaccacaagugcgacaacgccugcaucggcagcaucagaaacggcaccuacgaccacgacguguacagagacgaggcccugaacaacagauuccagaucaagggcguggagcugaagagcggcuacaaggacuggauccuguggaucagcuucgccaucagcugcuuccugcugugcguggugcugcugggcuucaucaugugggccugccagaagggcaacaucagaugcaacaucugcaucuga

SEQ ID NO: 160437 - RNA, 1701 nt, Artificial Sequence; identical to SEQ ID NO: 160246
  derived and/or modified CDS sequence (opt4) from hemagglutinin__InfluenzaA__ABB02958

SEQ ID NO: 160438 - RNA, 1701 nt, Artificial Sequence; identical to SEQ ID NO: 160246
  derived and/or modified CDS sequence (opt4) from hemagglutinin__InfluenzaA__ABB02969

SEQ ID NO: 160439 - RNA, 1701 nt, Artificial Sequence
  derived and/or modified CDS sequence (opt4) from hemagglutinin__InfluenzaA__ABB02980
augaagaccaucaucgcccugagcuacauccugugccugguguucgcccagaagcugcccggcaacgacaacagcaccgccacccugugccugggccaccacgccgugcccaacggcacccuggugaagaccaucaccaacgaccagaucgaggugaccaacgccaccgagcuggugcagagcagcagcaccggcagaaucugcgacagcccccaccagauccuggacggcgagaacugcacccugaucgacgcccugcugggcgacccccacugcgacggcuuccagaacaaggagugggaccuguucguggagagaagcaaggccuacagcaacugcuaccccuacgacgugcccgacuacgccagccugagaagccugguggccagcagcggcacccuggaguucaacaacgagagcuucaacuggaccggcguggcccagaacggcaccagcagcgccugcaagagaagaagcaacaagagcuucuucagcagacugaacuggcugcaccagcugaaguacaaguaccccgcccugaacgugaccaugcccaacaacgagaaguucgacaagcuguacaucuggggcgugcaccaccccagcaccgacagcgaccagaucagccuguacgcccaggccagcggcagagugaccgugagcaccaagagaagccagcagaccgugauccccaacaucggcagcagacccugggugagaggcgugagcagcaucaucagcaucuacuggaccaucgugaagcccggcgacauccugcugaucaacagcaccggcaaccugaucgcccccagaggcuacuucaagaucagaagcggcaagagcagcaucaugagaagcgacgcccccaucggcaagugcaacagcgagugcaucacccccaacggcagcauccccaacgacaagcccuuccagaacgugaacagaaucaccuacggcgccugccccagauacgugaagcagaacacccugaagcuggccaccggcaugagaaacgugcccgagaagcagaccagaggcaucuucggcgccaucgccggcuucaucgagaacggcugggagggcaugguggacggcugguacggcuucagacaccagaacagcgagggcaccggccaggccgccgaccugaagagcacccaggccgccaucaaccagaucaacggcaagcugaacagacugaucgagaagaccaacgagaaguuccaccagaucgagaaggaguucagcgagguggagggcagaauccaggaccuggagaaguacguggaggacaccaagaucgaccuguggagcuacaacgccgagcugcugguggcccuggagaaccagcacaccaucgaccugaccgacagcgagaugaacaagcuguucgagagaaccaagaagcagcugagagagaacgccgaggacaugggcaacggcugcuucaagaucuaccacaagugcgacaacgccugcaucggcagcaucagaaacggcaccuacgaccacgacguguacagagacgaggcccugaacaacagauuccagaucaagggcguggagcugaagagcggcuacaaggacuggauccuguggaucagcuucgccaucagcugcuuccugcugugcguggugcugcugggcuucaucaugugggccugccagaagggcaacaucagaugcaacaucugcaucuga

SEQ ID NO: 160440 - RNA, 1701 nt, Artificial Sequence
  derived and/or modified CDS sequence (opt4) from hemagglutinin__InfluenzaA__ABB02991
augaagaccaucaucgcccugagcuacauccugugccugguguucgcccagaagcugcccggcaacgacaacagcaccgccacccugugccugggccaccacgccgugcccaacggcacccuggugaagaccaucaccaacgaccagaucgaggugaccaacgccaccgagcuggugcagagcagcagcaccggcagaaucugcgacaacccccaccagauccuggacggcgagaacugcacccugaucgacgcccugcugggcgacccccacugcgacggcuuccagaacaaggagugggaccuguucguggagagaagcaaggccuacagcaacugcuaccccuacgacgugcccgacuacgccagccugagaagccugguggccagcagcggcacccuggaguucaacaacgagagcuucaacuggaccggcguggcccagaacggcaccagcagcgccugcaagagaagaagcaacaagagcuucuucagcagacugaacuggcugcaccagcugaaguacaaguaccccgcccugaacgugaccaugcccaacaacgagaaguucgacaagcuguacaucuggggcgugcaccaccccagcaccgacagcgaccagaucagccuguacgcccaggccagcggcagagugaccgugagcaccaagagaagccagcagaccgugauccccaacaucggcagcagacccugggugagaggcgugagcagcaucaucagcaucuacuggaccaucgugaagcccggcgacauccugcugaucaacagcaccggcaaccugaucgcccccagaggcuacuucaagaucagaagcggcaagagcagcaucaugagaagcgacgcccccaucggcaagugcaacagcgagugcaucacccccaacggcagcauccccaacgacaagcccuuccagaacgugaacagaaucaccuacggcgccugccccagauacgugaagcagaacacccugaagcuggccaccggcaugagaaacgugcccgagaagcagaccagaggcaucuucggcgccaucgccggcuucaucgagaacggcugggagggcaugguggacggcugguacggcuucagacaccagaacagcgagggcaccggccaggccgccgaccugaagagcacccaggccgccaucaaccagaucaacggcaagcugaacagacugaucgagaagaccaacgagaaguuccaccagaucgagaaggaguucagcgagguggagggcagaauccaggaccuggagaaguacguggaggacaccaagaucgaccuguggagcuacaacgccgagcugcugguggcccuggagaaccagcacaccaucgaccugaccgacagcgagaugaacaagcuguucgagagaaccaagaagcagcugagagagaacgccgaggacaugggcaacggcugcuucaagaucuaccacaagugcgacaacgccugcaucggcagcaucagaaacggcaccuacgaccacgacguguacagagacgaggcccugaacaacagauuccagaucaagggcguggagcugaagagcggcuacaaggacuggauccuguggaucagcuucgccaucagcugcuuccugcugugcguggugcugcugggcuucaucaugugggccugccagaagggcaacaucagaugcaacaucugcaucuga

SEQ ID NO: 160441 - RNA, 1701 nt, Artificial Sequence
  derived and/or modified CDS sequence (opt4) from hemagglutinin__InfluenzaA__ABB03002
augaagaccaucaucgcccugagcuacauccugugccugguguucgcccagaagcugcccggcaacgacaacagcaccgccacccugugccugggccaccacgccgugcccaacggcacccuggugaagaccaucaccaacgaccagaucgaggugaccaacgccaccgagcuggugcagagcagcagcaccggcagaaucugcaacagcccccaccagauccuggacggcgagaacugcacccugaucgacgcccugcugggcgacccccacugcgacggcuuccagaacaaggagugggaccuguucguggagagaagcaaggccuacagcaacugcuaccccuacgacgugcccgacuacgccagccugagaagccugguggccagcagcggcacccuggaguucaacaacgagagcuucaacuggaccggcguggcccagaacggcaccagcagcgccugcaagagaagaagcaacaagagcuucuucagcagacugaacuggcugcaccagcugaaguacaaguaccccgcccugaacgugaccaugcccaacaacgagaaguucgacaagcuguacaucuggggcgugcaccaccccagcaccgacagcgaccagaucagccuguacgcccaggccagcggcagagugaccgugagcaccaagagaagccagcagaccgugauccccaacaucggcagcggccccugggugagaggcgugagcagcagaaucagcaucuacuggaccaucgugaagcccggcgacauccugcugaucaacagcaccggcaaccugaucgcccccagaggcuacuucaagaucagaagcggcaagagcagcaucaugagaagcgacgcccccaucggcaagugcaacagcgagugcaucacccccaacggcagcauccccaacgacaagcccuuccagaacgugaacagaaucaccuacggcgccugccccagauacgugaagcagaacacccugaagcuggccaccggcaugagaaacgugcccgagaagcagaccagaggcaucuucggcgccaucgccggcuucaucgagaacggcugggagggcaugguggacggcugguacggcuucagacaccagaacagcgagggcaccggccaggccgccgaccugaagagcacccaggccgccaucaaccagaucaacggcaagcugaacagacugaucgagaagaccaacgagaaguuccaccagaucgagaaggaguucagcgagguggagggcagaauccaggaccuggagaaguacguggaggacaccaagaucgaccuguggagcuacaacgccgagcugcugguggcccuggagaaccagcacaccaucgaccugaccgacagcgagaugaacaagcuguucgagagaaccaagaagcagcugagagagaacgccgaggacaugggcaacggcugcuucaagaucuaccacaagugcgacaacgccugcaucggcagcaucagaaacggcaccuacgaccacgacguguacagagacgaggcccugaacaacagauuccagaucaagggcguggagcugaagagcggcuacaaggacuggauccuguggaucagcuucgccaucagcugcuuccugcugugcguggugcugcugggcuucaucaugugggccugccagaagggcaacaucagaugcaacaucugcaucuga

SEQ ID NO: 160442 - RNA, 1701 nt, Artificial Sequence
  derived and/or modified CDS sequence (opt4) from hemagglutinin__InfluenzaA__ABB03013
augaagaccaucaucgcccugagcuacauccugugccugguguucgcccagaagcugcccggcaacgacaacagcaccgccacccugugccugggccaccacgccgugcccaacggcacccuggugaagaccaucaccagcgaccagaucgaggugaccaacgccaccgagcuggugcagagcagcagcaccggcagaaucugcgacagcccccacagaauccuggacggcgagaacugcacccugaucgacgcccugcugggcgacccccacugcgacggcuuccagaacaaggagugggaccuguucguggagagaagcaaggccuacagcaacugcuaccccuacgacgugcccgacuacgccagccugagaagccugguggccagcagcggcacccuggaguucaacaacgagagcuucaacuggaccggcguggcccagaacggcaccagcuucgccugcaagagaagaagcaucaagagcuucuucagcagacugaacuggcugcaccagcugaaguacaaguaccccgcccugaacgugaccaugcccaacaacgacaaguucgacaagcuguacaucuggggcgugcaccaccccggcaccgacagcgaccagaccagccuguacgcccaggccagcggcagagugaccgugagcaccaagagaagccagcagaccgugauccccaacaucggcagcggccccugggugagaggcgugagcagcagaaucagcaucuacuggaccaucgugaagcccggcgacauccugcugaucaacagcaccggcaaccugaucgcccccagaggcuacuucaagaucagaagcggcaagagcagcaucaugagaagcgacgcccccaucggcaagugcaacagcgagugcaucacccccaacggcagcauccccaacgacaagcccuuccagaacgugaacagaaucaccuacggcgccugccccagauacgugaagcagaacacccugaagcuggccaccggcaugagaaacgugcccgagaagcagaccagaggcaucuucggcgccaucgccggcuucaucgagaacggcugggagggcaugguggacggcugguacggcuucagacaccagaacagcgagggcaccggccaggccgccgaccugaagagcacccaggccgccaucaaccagaucaacggcaagcugaacagacugaucgagaagaccaacgagaaguuccaccagaucgagaaggaguucaccgagguggagggcagaauccaggaccuggagaaguacguggaggacaccaagaucgaccuguggagcuacaacgccgagcugcugguggcccuggagaaccagcacaccaucgaccugaccgacagcgagaugaacaagcuguucgagagaaccagaaagcagcugagagagaacgccgaggacaugggcaacggcugcuucaagaucuaccacaagugcgacaacgccugcaucggcagcaucagaaacggcaccuacgaccacgacguguacagagacgaggcccugaacaacagauuccagaucaagggcguggagcugaagagcggcuacaaggacuggauccuguggaucagcuucgccaccagcugcuuccugcugugcguggugcugcugggcuucaucaugugggccugccagaagggcaacaucagaugcaacaucugcaucuga

SEQ ID NO: 160443 - RNA, 1701 nt, Artificial Sequence
  derived and/or modified CDS sequence (opt4) from hemagglutinin__InfluenzaA__ABB03024
augaagaccaucaucgcccugagcuacauccugugccugguguucgcccagaagcugcccggcaacgacaacagcaccgccacccugugccugggccaccacgccgugcccaacggcacccuggugaagaccaucaccaacgaccagaucgaggugaccaacgccaccgagcuggugcagagcagcagcaccggcagaaucugcgacagcccccaccagauccuggacggcgagaacugcacccugaucgacgcccugcugggcgacccccacugcgacggcuuccagaacaaggagugggaccuguucguggagagaagcaaggccuacagcaacugcuaccccuacgacgugcccgacuacgccagccugagaagccugguggccagcagcggcacccuggaguucaacaacgagagcuucaacuggaccggcguggcccagaacggcaccagcagcgccugcaagagaagaagcaacaagagcuucuucagcagacugaacuggcugcaccagcugaaguacaaguaccccgcccugaacgugaccaugcccaacaacgagaaguucgacaagcuguacaucuggggcgugcaccaccccagcaccgacagcgaccagaucagccuguacgcccaggccagcggcagagugaccgugagcaccaagagaagccagcagaccgugauccccaacaucggcagcagacccuggaucagaggcgugagcagcagaaucagcaucuacuggaccaucgugaagcccggcgacauccugcugaucaacagcaccggcaaccugaucgcccccagaggcuacuucaagaucagaagcggcaagagcagcaucaugagaagcgacgcccccaucggcaagugcaacagcgagugcaucacccccaacggcagcauccccaacgacaagcccuuccagaacgugaacagaaucaccuacggcgccugccccagauacgugaagcagaacacccugaagcuggccaccggcaugagaaacgugcccgagaagcagaccagaggcaucuucggcgccaucgccggcuucaucgagaacggcugggagggcaugguggacggcugguacggcuucagacaccagaacagcgagggcaccggccaggccgccgaccugaagagcacccaggccgccaucaaccagaucaacggcaagcugaacagacugaucgagaagaccaacgagaaguuccaccagaucgagaaggaguucagcgagguggagggcagaauccaggaccuggagaaguacguggaggacaccaagaucgaccuguggagcuacaacgccgagcugcugguggcccuggagaaccagcacaccaucgaccugaccgacagcgagaugaacaagcuguucgagagaaccaagaagcagcugagagagaacgccgaggacaugggcaacggcugcuucaagaucuaccacaagugcgacaacgccugcaucggcagcaucagaaacggcaccuacgaccacgacguguacagagacgaggcccugaacaacagauuccagaucaagggcguggagcugaagagcggcuacaaggacuggauccuguggaucagcuucgccaucagcugcuuccugcugugcguggugcugcugggcuucaucaugugggccugccagaagggcaacaucagaugcaacaucugcaucuga

SEQ ID NO: 160444 - RNA, 1701 nt, Artificial Sequence
  derived and/or modified CDS sequence (opt4) from hemagglutinin__InfluenzaA__ABB03035
augaagaccaucaucgcccugagcuacauccugugccugguguucgcccagaagcugcccggcaacgacaacagcaccgccacccugugccugggccaccacgccgugcccaacggcacccuggugaagaccaucaccagcgaccagaucgaggugaccaacgccaccgagcuggugcagagcagcagcaccggcagaaucugcgacagcccccacagaauccuggacggcgagaacugcacccugaucgacgcccugcugggcgacccccacugcgacggcuuccagaacaaggagugggaccuguucguggagagaagcaaggccuacagcaacugcuaccccuacgacgugcccgacuacgccagccugagaagccugguggccagcagcggcacccuggaguucaacaacgagagcuucaacuggaccggcguggcccagaacggcaccagcuucgccugcaagagaagaagcaucaagagcuucuucagcagacugaacuggcugcaccagcugaaguacaaguaccccgcccugaacguggccaugcccaacaacgacaaguucgacaagcuguacaucuggggcgugcaccaccccggcaccgacagcgaccagaccagccuguacgcccaggccagcggcagagugaccgugagcaccaagagaagccagcagaccgugauccccaacaucggcagcagacccugggugagaggcgugagcagcagaaucagcaucuacuggaccaucgugaagcccggcgacauccugcugaucaacagcaccggcaaccugaucgcccccagaggcuacuucaagaucagaagcggcaagagcagcaucaugagaagcgacgcccccaucggcaagugcaacagcgagugcaucacccccaacggcagcauccccaacgacaagcccuuccagaacgugaacagaaucaccuacggcgccugccccagauacgugaagcagaacacccugaagcuggccaccggcaugagaaacgugcccgagaagcagaccagaggcaucuucggcgccaucgccggcuucaucgagaacggcugggagggcaugguggacggcugguacggcuucagacaccagaacagcgagggcaccggccaggccgccgaccugaagagcacccaggccgccaucaaccagaucaacggcaagcugaacagacugaucgagaagaccaacgagaaguuccaccagaucgagaaggaguucaccgagguggagggcagaauccaggaccuggagaaguacguggaggacaccaagaucgaccuguggagcuacaacgccgagcugcugguggcccuggagaaccagcacaccaucgaccugaccgacagcgagaugaacaagcuguucgagagaaccagaaagcagcugagagagaacgccgaggacaugggcaacggcugcuucaagaucuaccacaagugcgacaacgccugcaucggcagcaucagaaacggcaccuacgaccacgacguguacagagacgaggcccugaacaacagauuccagaucaagggcguggagcugaagagcggcuacaaggacuggauccuguggaucagcuucgccaccagcugcuuccugcugugcguggugcugcugggcuucaucaugugggccugccagaagggcaacaucagaugcaacaucugcaucuga

SEQ ID NO: 160445 - RNA, 1701 nt, Artificial Sequence
  derived and/or modified CDS sequence (opt4) from hemagglutinin__InfluenzaA__ABB03046
augaagaccaucaucgcccugagcuacauccugugccugguguucgcccagaagcugcccggcaacgacaacagcaccgccacccugugccugggccaccacgccgugcccaacggcacccuggugaagaccaucaccaacgaccagaucgaggugaccaacgccaccgagcuggugcagagcagcagcaccggcagaaucugcgacagcccccaccagauccuggacggcgagaacugcacccugaucgacgcccugcugggcgacccccacugcgacggcuuccagaacaaggagugggaccuguucguggagagaagcaaggccuacagcaacugcuaccccuacgacgugcccgacuacgccagccugagaagccugguggccagcagcggcacccuggaguucaacaacgagagcuucaacuggaccggcguggcccagaacggcaccagcagcgccugcaagagaagaagcaacaagagcuucuucagcagacugaacuggcugcaccagcugaaguacaaguaccccgcccugaacgugaccaugcccaacaacgagaaguucgacaagcuguacaucuggggcgugcaccaccccagcaccgacagcgaccagaucagccuguacgcccaggccagcggcagagugaccgugagcaccaagagaagccagcagaccgugauccccaacaucggcagcagacccugggugagaggcgugagcagcggcaucagcaucuacuggaccaucgugaagcccggcgacauccugcugaucaacagcaccggcaaccugaucgcccccagaggcuacuucaagaucagaagcggcaagagcagcaucaugagaagcgacgcccccaucggcaagugcaacagcgagugcaucacccccaacggcagcauccccaacgacaagcccuuccagaacgugaacagaaucaccuacggcgccugccccagauacgugaagcagaacacccugaagcuggccaccggcaugagaaacgugcccgagaagcagaccagaggcaucuucggcgccaucgccggcuucaucgagaacggcugggagggcaugguggacggcugguacggcuucagacaccagaacagcgagggcaccggccaggccgccgaccugaagagcacccaggccgccaucaaccagaucaacggcaagcugaacagacugaucgagaagaccaacgagaaguuccaccagaucgagaaggaguucagcgagguggagggcagaauccaggaccuggagaaguacguggaggacaccaagaucgaccuguggagcuacaacgccgagcugcugguggcccuggagaaccagcacaccaucgaccugaccgacagcgagaugaacaagcuguucgagagaaccaagaagcagcugagagagaacgccgaggacaugggcaacggcugcuucaagaucuaccacaagugcgacaacgccugcaucggcagcaucagaaacggcaccuacgaccacgacguguacagagacgaggcccugaacaacagauuccagaucaagggcguggagcugaagagcggcuacaaggacuggauccuguggaucagcuucgccaucagcugcuuccugcugugcguggcccugcugggcuucaucaugugggccugccagaagggcaacaucagaugcaacaucugcaucuga

SEQ ID NO: 160446 - RNA, 1701 nt, Artificial Sequence
  derived and/or modified CDS sequence (opt4) from hemagglutinin__InfluenzaA__ABB03057
augaagaccaucaucgcccugagcuacauccugugccugguguucgcccaggagcugcccggcaacgacaacagcaccgccacccugugccugggccaccacgccgugcccaacggcaccaucgugaagaccaucaccaacgaccagaucgaggugaccaacgccaccgagcuggugcagagcagcagcaccggcggcaucugcgacagcccccaccagauccuggacggcgagaacugcacccugaucgacgcccugcugggcgacccccagugcgacggcuuccagaacaagaagugggaccuguucguggagagaagcaaggccuacagcaacugcuaccccuacgacgugcccgacuacgccagccugagaagccugguggccagcagcggcacccuggaguucaacaacgagagcuucaacuggaccggcgugacccagaacggcaccagcagcgccugcaagagaagaagcaacaacagcuucuucagcagacugaacuggcugacccaccugaaguucaaguaccccgcccugaacgugaccaugcccaacaacgagaaguucgacaagcuguacaucuggggcgugcaccaccccggcaccgacaacgaccagaccagccuguacgcccaggccagcggcagaaucaccgugagcaccaagagaagccagcagaccgugauccccaacaucggcagcagacccagagugagagacauccccagcagaaucagcaucuacuggaccaucgugaagcccggcgacauccugcugaucaacagcaccggcaaccugaucgcccccagaggcuacuucaagaucagaagcggcaagagcagcaucaugagaagcgacgcccccaucggcaagugcaacagcgagugcaucacccccaacggcagcauccccaacgacaagcccuuccagaacgugaacagaaucaccuacggcgccugccccagauacgugaagcagaacacccugaagcuggccaccggcaugagaaacgugcccgagaagcagaccagaggcaucuucggcgccaucgccggcuucaucgagaacggcugggagggcaugguggacggcugguacggcuucagacaccagaacagcgagggcaucggccaggccgccgaccugaagagcacccaggccgccaucaaccagaucaacggcaagcugaacagacugaucggcaagaccaacgagaaguuccaccagaucgagaaggaguucagcgagguggagggcagaauccaggaccuggagaaguacguggaggacaccaagaucgaccuguggagcuacaacgccgagcugcugguggcccuggagaaccagcacaccaucgaccugaccgacagcgagaugaacaagcuguucgagagaaccaagaagcagcugagagagaacgccgaggacaugggcaacggcugcuucaagaucuaccacaagugcgacaacgccugcaucggcagcaucagaaacggcaccuacgaccacgacguguacagagacgaggcccugaacaacagauuccagaucaagggcguggagcugaagcugggcuacaaggacuggauccuguggaucagcuucgccaucagcugcuuccugcugugcguggcccugcugggcuucaucaugugggccugccagaagggcaacaucagaugcaacaucugcaucuga

SEQ ID NO: 160447 - RNA, 1701 nt, Artificial Sequence; identical to SEQ ID NO: 160346
  derived and/or modified CDS sequence (opt4) from hemagglutinin__InfluenzaA__ABB03068

SEQ ID NO: 160448 - RNA, 1701 nt, Artificial Sequence; identical to SEQ ID NO: 160303
  derived and/or modified CDS sequence (opt4) from hemagglutinin__InfluenzaA__ABB03079

SEQ ID NO: 160449 - RNA, 1701 nt, Artificial Sequence; identical to SEQ ID NO: 160303
  derived and/or modified CDS sequence (opt4) from hemagglutinin__InfluenzaA__ABB03090

SEQ ID NO: 160450 - RNA, 1698 nt, Artificial Sequence
  derived and/or modified CDS sequence (opt4) from hemagglutinin__InfluenzaA__ABB03101
augaaggugaagcugcugauccugcugugcaccuucaccgccaccuacgccgacaccaucugcaucggcuaccacgccaacaacagcaccgacaccguggacaccgugcuggagaagaacgugaccgugacccacagcgugaaccugcuggaggacagccacaacggcaagcugugccugcugaagggcaucgccccccugcagcugggcaacugcagcguggccggcuggauccugggcaaccccgagugcgagcugcugaucagcaaggagagcuggagcuacaucguggagacccccaaccccgagaacggcgccugcuaccccggcuacuucgccgacuacgaggagcugagagagcagcugagcagcgugagcagcuucgagagauucgagaucuuccccaagaagagcagcuggcccaaccacaccgugaccggcgugagcgccagcugcagccacaacggcaagagcagcuucuacagaaaccugcuguggcugaccggcaagaacggccuguaccccaaccugagcaagagcuacgccaacaacaaggagaaggaggugcugauccuguggggcgugcaccacccccccaacaucggcgaccagagaacccuguaccacaccgagaacgccuacgugagcguggugagcagccacuacagcagaagauucacccccgagaucaccaagagacccaaggugagagaccaggagggcagaaucaacuacuacuggacccugcuggagcccggcgacaccaucaucuucgagaccaacggcaaccugaucgcccccugguacgccuucgcccugagcagaggcuucggcagcggcaucaucaccagcaacgcccccauggacgagugcgacgccaagugccagaccccccagggcgccaucaacagcagccugcccuuccagaacgugcaccccgugaccaucggcgagugccccaaguacgugagaagcgccaagcugagaauggugaccggccugagaaacauccccagcauccagagcagaggccuguucggcgccaucgccggcuucaucgagggcggcuggaccggcaugguggacggcugguacggcuaccaccaccagaacgagcagggcagcggcuacgccgccgaccagaagagcacccagaacgccaucaacggcaucaccaacaaggugaacagcgugaucgagaagaugaacacccaguucaccgccgugggcaaggaguucaacaagcuggagagaagaauggagaaccugaacaagaagguggacgacggcuuccuggacaucuggaccuacaacgccgagcugcuggugcugcuggagaacgagagaacccuggacuuccacgacagcaacgugaagaaccuguacgagaaggugaagagccagcugaagaacaacgccaaggagaucggcaacggcugcuucgaguucuaccacaagugcaacaacgagugcauggagagcgugaagaacggcaccuacgacuaccccaaguacagcgaggagagcaagcugaacagagagaagaucgacggcgugaagcuggacagcaugggcguguaccagauccuggccaucuacagcaccguggccagcagccuggugcugcuggugagccugggcgccaucagcuucuggaugugcagcaacggcagccugcagugcagaaucugcaucuga

SEQ ID NO: 160451 - RNA, 1701 nt, Artificial Sequence
  derived and/or modified CDS sequence (opt4) from hemagglutinin__InfluenzaA__ABB03112
augaagaccaucaucgcccugagcuacauccugugccugguguucgcccagaagcugcccggcaacgacaacagcaccgccacccugugccugggccaccacgccgugcccaacggcaccaucgugaagaccaucaccaacgaccagaucgaggugaccaacgccaccgagcuggugcagagcagcagcaccggcggcaucugcgacagcccccaccagauccuggacggcgagaacugcacccugaucgacgcccugcugggcgacccccagugcgacggcuuccagaacaagaagugggaccuguucguggagagaagcaaggccuacagcaacugcuaccccuacgacgugcccgacuacgccagccugagaagccugguggccagcagcggcacccuggaguucaacaacgagagcuucaacuggaccggcgugacccagaacggcaccagcagcgccugcaagagaagaagcaacaagagcuucuucagcagacugaacuggcugacccaccugaaguacaaguaccccgcccugaacgugaccaugcccaacaacgagaaguucgacaagcuguacaucuggggcgugcaccaccccggcaccgacagcgaccagaucagccuguacgcccaggccagcggcagaaucaccgugagcaccaagagaagccagcagaccgugauccccaacaucggcagcagacccagagugagagacgugagcagcagaaucagcaucuacuggaccaucgugaagcccggcgacauccugcugaucaacagcaccggcaaccugaucgcccccagaggcuacuucaagaucagaagcggcaagagcagcaucaugagaagcgacgcccccaucggcaagugcaacagcgagugcaucacccccaacggcagcauccccaacgacaagcccuuccagaacgugaacaagaucaccuacggcgccugccccagauacgugaagcagaacacccugaagcuggccaccggcaugagaaacgugcccgagaagcagaccagaggcaucuucggcgccaucgccggcuucaucgagaacggcugggagggcaugguggacggcugguacggcuucagacaccagaacagcgagggcaccggccaggccgccgaccugaagagcacccaggccgccaucaaccagaucaacggcaagcugaacagacugaucggcaagaccaacgagaaguuccaccagaucgagaaggaguucagcgagguggagggcagaauccaggaccuggagaaguacguggaggacaccaagaucgaccuguggagcuacaacgccgagcugcugguggcccuggagaaccagcacaccaucgaccugaccgacagcgagaugaacaagcuguucgagagaaccaagaagcagcugagagagaacgccgaggacaugggcaacggcugcuucaagaucuaccacaagugcgacaacaccugcaucgagagcaucagaaacggcaccuacgaccacgacguguacagagacgaggcccugaacaacagauuccagaucaagggcguggagcugaagagcggcuacaaggacuggauccuguggaucagcuucgccaucagcugcuuccugcugugcguggcccugcugggcuucaucaugugggccugccagaagggcaacaucagaugcaacaucugcaucuga

SEQ ID NO: 160452 - RNA, 1698 nt, Artificial Sequence
  derived and/or modified CDS sequence (opt4) from hemagglutinin__InfluenzaA__ABB03123
augaaggugaagcugcuggugcugcugugcaccuucaccgccaccuacgccgacaccaucugcaucggcuaccacgccaacaacagcaccgacaccguggacaccgugcuggagaagaacgugaccgugacccacuucgugaaccugcuggaggacagccacaacggcaagcugugccugcugaagggcaucgccccccugcagcugggcaacugcagcguggccggcuggauccugggcaaccccgagugcgagcugcugaucagcaaggagagcuggagcuacaucguggagacccccaaccccgagaacggcaccugcuaccccggcuacuucgccgacuacgaggagcugagagagcagcugagcagcgugagcagcuucgagagauucgagaucuuccccaaggagagcagcuggcccaaccacaccgugaccggcgugagcgccagcugcagccacaacggcaagagcagcuucuacagaaaccugcuguggcugaccggcaagaacggccuguaccccaaccugagcaagagcuacgccaacaacaaggagaaggaggugcuggugcuguggggcgugcaccacccccccaacaucggcgaccagagagcccuguaccacaccgagaacgccuacgugagcguggugagcagccacuacagcagaagauucacccccgagaucgccaagagacccaaggugagagaccaggagggcagaaucaacuacuacuggacccugcuggagcccggcgacaccaucaucuucgaggccaacggcaaccugaucgcccccagauacgccuucgcccugagcagaggcuucggcagcggcaucaucaccagcaacgcccccauggacgagugcgacgccaagugccagaccccccagggcgccaucaacagcagccugcccuuccagaacgugcaccccgugaccaucggcgagugccccaaguacgugagaagcgccaagcugagaauggugaccggccugagaaacauccccagcauccagagcagaggccuguucggcgccaucgccggcuucaucgagggcggcuggaccggcaugguggacggcugguacggcuaccaccaccagaacgagcagggcagcggcuacgccgccgaccagaagagcacccagaacgccaucaacggcaucaccaacaaggugaacagcgugaucgagaagaugaacacccaguucaccgccgugggcaaggaguucaacaagcuggagagaagaauggagaaccugaacaagaagguggacgacggcuuccuggacaucuggaccuacaacgccgagcugcuggugcugcuggagaacgagagaacccuggacuuccacgacagcaacgugaagaaccuguacgagaaggugaagagccagcugaagaacaacgccaaggagaucggcaacggcugcuucgaguucuaccacaagugcaacgacgagugcauggagagcgugaagaacggcaccuacgacuaccccaaguacagcgaggagagcaagcugaacagagagaagaucgacggcgugaagcuggagagcaugggcguguaccagauccuggccaucuacagcaccguggccagcagccuggugcugcuggugagccugggcgccaucagcuucuggaugugcagcaacggcagccugcagugcagaaucugcaucuga

SEQ ID NO: 160453 - RNA, 1698 nt, Artificial Sequence
  derived and/or modified CDS sequence (opt4) from hemagglutinin__InfluenzaA__ABB03134
augaaggugaagcugcugauccugcugugcaccuucaccgccaccuacgccgacaccaucugcaucggcuaccacgccaacaacagcaccgacaccguggacaccgugcuggagaagaacgugaccgugacccacagcgugaaccugcuggaggacagccacaacggcaagcugugccugcugaagggcaucgccccccugcagcugggcaacugcagcguggccggcuggauccugggcaaccccgagugcgagcugcugaucagcaaggagagcuggagcuacaucguggagacccccaaccccgagaacggcaccugcuaccccggcuacuucgccgacuacgaggagcugagagagcagcugagcagcgugagcagcuucgagagauucgagaucuuccccaaggagagcagcuggcccaaccacaccgugaccggcgugagcgccagcugcagccacaacggcaagagcagcuucuacagaaaccugcuguggcugaccgagaagaacggccuguaccccacccugagcaagagcuacgccaacaacaaggagaaggaggugcugauccuguggggcgugcaccacccccccaacaucggcgaccagagaacccuguaccacaccgagaacgccuacgugagcguggugagcagccacuacagcagaagauucacccccgagaucaccaagagacccaaggugagagaccaggagggcagaaucaacuacuacuggacccugcuggagcccggcgacaccaucaucuucgaggccaacggcaaccugaucgcccccugguacgccuucgcccugagcagaggcuucggcagcggcaucaucaccagcaacgcccccauggacgagugcgacgccaagugccagaccccccagggcgccaucaacagcagccugcccuuccagaacgugcaccccgugaccaucggcgagugccccaaguacgugagaagcgccaagcugagaauggugaccggccugagaaacauccccagcauccagagcagaggccuguucggcgccaucgccggcuucaucgagggcggcuggaccggcaugguggacggcugguacggcuaccaccaccagaacgagcagggcagcggcuacgccgccgaccagaagagcacccagaacgccaucaacggcaucaccaacaaggugaacagcgugaucgagaagaugaacacccaguucaccgccgugggcaaggaguucaacaagcuggagagaagaauggagaaccugaacaagaagguggacgacggcuuccuggacaucuggaccuacaacgccgagcugcuggugcugcuggagaacgagagaacccuggacuuccacgacagcaacgugaagaaccuguacgagaaggugaagagccagcugaagaacaacgccaaggagaucggcaacggcugcuucgaguucuaccacaagugcaacaacgagugcauggagagcgugaagaacggcaccuacgacuaccccaaguacagcgaggagagcaagcugaacagagagaagaucgacggcgugaagcuggagagcaugggcguguaccagauccuggccaucuacagcaccguggccagcagccuggugcugcuggugagccugggcgccaucagcuucuggaugugcagcaacggcagccugcagugcagaaucugcaucuga

SEQ ID NO: 160454 - RNA, 1698 nt, Artificial Sequence; identical to SEQ ID NO: 160359
  derived and/or modified CDS sequence (opt4) from hemagglutinin__InfluenzaA__ABB03145

SEQ ID NO: 160455 - RNA, 1701 nt, Artificial Sequence
  derived and/or modified CDS sequence (opt4) from hemagglutinin__InfluenzaA__ABB04283
augaagaccaucaucgcccugagcuacaucuucugccugguguucgcccagaaccugcccggcaacgacaacagcaccgccacccugugccugggccaccacgccgugcccaacggcacccuggugaagaccaucaccaacgaccagaucgaggugaccaacgccaccgagcuggugcagagcagcagcaccggcagaaucugcgacagcccccacagaauccuggacggcaagaacugcacccugaucgacgcccugcugggcgacccccacugcgacggcuuccagaacgagaagugggaccuguucguggagagaagcaaggccuucagcaacugcuaccccuacgacgugcccgacuacgccagccugagaagccugguggccagcagcggcacccuggaguucaucaacgagggcuucaacuggaccggcgugacccagagcggcggcagcuacgccugcaagagaggcagcgacaagagcuucuucagcagacugaacuggcuguacgagagcgagagcaaguaccccgcccugaacgugaccaugcccaacaacggcaacuucgacaagcuguacaucuggggcgugcaccaccccagcaccgacaaggagcagaccaaccuguacgugagagccagcggcagagugaccgugagcaccaagagaagccagcagaccaucauccccaacaucggccccagacccugggugagaggccugagcagcagaaucagcaucuacuggaccaucgugaagcccggcgacauccugcugaucaacagcagcggcaaccugaucgcccccagaggcuacuucaagaucagaaccggcaagagcagcaucaugagaagcgacgcccccaucggcaccugcagcagcgagugcaucacccccaacggcagcauccccaacgacaagcccuuccagaacgugaacaagaucaccuacggcgccugccccaaguacgugaagcagaacacccugaagcuggccaccggcaugagaaacauccccgagaagcagaccagaggcaucuucggcgccaucgccggcuucaucgagaacggcugggagggcaugguggacggcugguacggcuucagacaccagaacagcgagggcaccggccaggccgccgaccugaagagcacccaggccgccaucgaccagaucaacggcaagcugaacagagugaucgagaagaccaacgagaaguuccaccagaucgagaaggaguucagcgagguggagggcagaauccaggaccuggagaaguacguggaggacaccaagaucgaccuguggagcuacaacgccgagcugcugguggcccuggagaaccagcacaccaucgaccugaccgacagcgagaugaacaagcuguucgagaagaccagaagacagcugagagagaacgccgaggacaugggcaacggcugcuucaagaucuaccacaagugcgacaacgccugcaucggcagcaucagaaacggcaccuacgaccacgacguguacagagacgaggcccugaacaacagauuccagaucaagggcguggagcugaagagcggcuacaaggacuggauccuguggaucagcuucgccaucagcugcuuccugcugugcguggugcugcugggcuucaucaugugggccugccagaagggcaacaucagaugcaacaucugcaucuga

SEQ ID NO: 160456 - RNA, 1701 nt, Artificial Sequence
  derived and/or modified CDS sequence (opt4) from hemagglutinin__InfluenzaA__ABB04294
augaagaccaucaucgcccugagcuacaucuucugccuggugcugggccaggaccugcccggcaacgacaacagcaccgccacccugugccugggccaccacgccgugcccaacggcacccuggugaagaccaucaccaacgaccagaucgaggugaccaacgccaccgagcuggugcagagcagcagcaccggcaagaucugcaacaacccccacagaauccuggacggcaucaacugcacccugaucgacgcccugcugggcgacccccacugcgacggcuuccagaacgagaagugggaccuguucguggagagaagcaaggccuucagcaacugcuaccccuacgacgugcccgacuacgccagccugagaagccugguggccagcagcggcacccuggaguucaucaacgagggcuucaacuggaccggcgugacccagaacggcggcagcaacgccugcaagagaggccccgacagcggcuucuucagcagacugaacuggcuguacaagagcggcagcaccuaccccgugcugaacgugaccaugcccaacaacgacaacuucgacaagcuguacaucuggggcgugcaccaccccagcaccgaccaggagcagaccaaccuguacgugcaggccagcggcagagugaccgugagcaccaagagaagccagcagaccaucauccccaacaucggcagcagacccugggugagaggccugagcagcagaaucagcaucuacuggaccaucgugaagcccggcgacauccuggugaucaacagcaacggcaaccugaucgcccccagaggcuacuucaagaugagaaccggcaagagcagcaucaugagaagcgacgcccccaucggcaccugcaucagcgagugcaucacccccaacggcagcauccccaacgacaagcccuuccagaacgugaacaagaucaccuacggcgccugccccaaguacgugaagcagaacacccugaagcuggccaccggcaugagaaacgugcccgagaagcagaccagaggcaucuucggcgccaucgccggcuucaucgagaacggcugggagggcaugaucgacggcugguacggcuucagacaccagaacagcgagggcaccggccaggccgccgaccugaagagcacccaggccgccaucgaccagaucaacggcaagcugaacagagugaucgagaagaccaacgagaaguuccaccagaucgagaaggaguucagcgagguggagggcagaauccaggaccuggagaaguacguggaggacaccaagaucgaccuguggagcuacaacgccgagcugcugguggcccuggagaaccagcacaccaucgaccugaccgacagcgagaugaacaagcuguucgagaagaccagaagacagcugagagagaacgccgaggacaugggcaacggcugcuucaagaucuaccacaagugcgacaacgccugcaucggcagcaucagaaacggcaccuacgaccacgacguguacagagacgaggcccugaacaacagauuccagaucaagggcguggagcugaagagcggcuacaaggacuggauccuguggaucagcuucgccaucagcugcuuccugcugugcguggugcugcugggcuucaucaugugggccugccagaagggcaacaucagaugcaacaucugcaucuga

SEQ ID NO: 160457 - RNA, 1701 nt, Artificial Sequence
  derived and/or modified CDS sequence (opt4) from hemagglutinin__InfluenzaA__ABB04305
augaagaccaucaucgcccugagcuacaucuucugccugguguucgcccagaagcugcccgagaacgacaacagcaccgccacccugugccugggccaccacgccgugcccaacggcacccuggugaagaccaucaccaacgaccagaucgaggugaccaacgccaccgagcuggugcagagcagcagcaccggcagaaucugcgacagcccccacagaauccuggacggcaagaacugcacccugaucgacgcccugcugggcgacccccacugcgacggcuuccagaacgagaagugggaccuguucguggagagaagcaaggccuucagcaacugcuaccccuacgacgugcccgacuacgccagccugagaagccugguggccagcagcggcacccuggaguucaucaacgagggcuucaacuggaccggcgugacccagagcggcggcagcuacgccugcaagagaggcagcgugaacagcuucuucagcagacugaacuggcuguacaagagcgagagcaaguaccccgugcugaacgugaccaugcccaacaacggcaaguucgacaagcuguacaucuggggcgugcaccaccccagcaccgacaaggagcagaccaaccuguacgugagagccagcggcaaggugaccgugagcaccaagagaagccagcagaccgugauccccaacaucggcagcagacccugggugagaggccugagcagcagaaucagcaucuacuggaccaucgugaagcccggcgacauccugcugaucaacagcaccggcaaccugaucgcccccagaggcuacuucaagaucagaaccggcaagagcagcaucaugagaagcgacgcccccaucggcaccugcagcagcgagugcaucacccccaacggcagcauccccaacgacaagcccuuccagaacgugaacaagaucaccuacggcgccugccccagauacgugaagcagaacacccugaagcuggccaccggcaugagaaacgugcccgagaagcagaccagaggcaucuucggcgccaucgccggcuucaucgagaacggcugggagggcaugguggacggcugguacggcuucagacaccagaacagcgagggcaccggccaggccgccgaccugaagagcacccaggccgccaucgaccagaucaacggcaagcugaacagacugaucgagaagaccaacgagaaguuccaccagaucgagaaggaguucagcgagguggagggcagaauccaggaccuggagaaguacguggaggacaccaagaucgaccuguggagcuacaacgccgagcugcugguggcccuggagaaccagcacaccaucgaccugaccgacagcgagaugaacaagcuguucgagaagaccagaaagcagcugagagagaacgccgaggacaugggcaacggcugcuucaagaucuaccacaagugcgacaacgccugcaucggcagcaucagaaacggcaccuacgaccacgacguguacagagacgaggcccugaacaacagauuccagaucaagggcguggagcugaagagcggcuacaaggacuggauccuguggaucagcuucgccaucagcugcuuccugcugugcguggugcugcugggcuucaucaugugggccugccagaagggcaacaucagaugcaacaucugcaucuga

SEQ ID NO: 160458 - RNA, 1701 nt, Artificial Sequence
  derived and/or modified CDS sequence (opt4) from hemagglutinin__InfluenzaA__ABB04316
augaagaccaucaucgcccugagcuacaucuucugccugguguucgcccagaagcugcccggcaacgacaacagcaccgccacccugugccugggccaccacgccgugcccaacggcacccuggugaagaccaucaccaacgaccagaucgaggugaccaacgccaccgagcuggugcagagcagcagcaccggcagaaucugcgacagcccccacagaauccuggacggcaagaacugcacccugaucgacgcccugcugggcgacccccacugcgacggcuuccagaacgagaagugggaccuguucguggagagaagcaaggccuacagcaacugcuaccccuacgacgugcccgacuacgccagccugagaagccugguggccagcagcggcacccuggaguucaucaacgaggacuucaacuggaccggcgugacccagagcggcggcagcuacgccugcaagagaggcagcgugaagagcuucuucagcagacugaacuggcugcacgagagcgaguacaaguaccccgcccugaacgugaccaugcccaacaacggcaaguucgacaagcuguacaucuggggcgugcaccaccccagcaccgacagagagcagaccaaccuguacgugagagccagcggcagagugaccgugagcaccaagagaagccagcagaccgugauccccaacaucggcagcagacccugggugagaggccugagcagcagaaucagcaucuacuggaccaucgugaagcccggcgacauccugcugaucaacagcaccggcaaccugaucgcccccagaggcuacuucaagaucagaaccggcaagagcagcaucaugagaagcgacgcccccaucggcaccugcagcagcgagugcaucacccccaacggcagcauccccaacgacaagcccuuccagaacgugaacaagaucaccuacggcgccugccccagauacgugaagcagaacacccugaagcuggccaccggcaugagaaacgugcccgagaagcagaccagaggcaucuucggcgccaucgccggcuucaucgagaacggcugggagggcaugguggacggcugguacggcuucagacaccagaacagcgagggcaccggccaggccgccgaccugaagagcacccaggccgccaucgaccagaucaacggcaagcugaacagacugaucgagaagaccaacgagaaguuccaccagaucgagaaggaguucagcgagguggagggcagaauccaggaccuggagaaguacguggaggacaccaagaucgaccuguggagcuacaacgccgagcugcugguggcccuggagaaccagcacaccaucgaccugaccgacagcgagaugaacaagcuguucgagaagaccagaaagcagcugagagagaacgccgaggacaugggcaacggcugcuucaagaucuaccacaagugcgacaacgccugcaucggcagcaucagaaacggcaccuacgaccacgacguguacagagacgaggcccugaacaacagauuccagaucaagggcguggagcugaagagcggcuacaagaacuggauccuguggaucagcuucgccaucagcugcuuccugcugugcguggugcugcugggcuucaucaugugggccugccagaagggcaacaucagaugcaacaucugcaucuga

SEQ ID NO: 160459 - RNA, 1701 nt, Artificial Sequence
  derived and/or modified CDS sequence (opt4) from hemagglutinin__InfluenzaA__ABB04327
augaagaccaucaucgcccugagcuacaucuucugccugguguucgcccagaagcugcccggcaacgacaacagcaccgccacccugugccugggccaccacgccgugcccaacggcacccuggugaagaccaucaccaacgaccagaucgaggugaccaacgccaccgagcuggugcagagcagcagcaccggcagaaucugcgacagcccccacagaauccuggacggcaagaacugcacccugaucgacgcccugcugggcgacccccacugcgacggcuuccagaacgagaagugggaccuguucguggagagaagcaaggccuucagcaacugcuaccccuacgacgugcccgacuacgccagccugagaagccugguggccagcagcggcacccuggaguucaucaacgagggcuucaacuggaccggcgugacccagagcggcggcagcuacgccugcaagagaggcagcgugaacagcuucuucagcagacugaacuggcuguacaagagcgaguacaaguaccccgcccugaacgugaccaugcccaacaacggcaaguucgacaagcuguacaucuggggcgugcaccaccccagcaccgagaaggagcagaccaaccuguacgugagagccagcggcagagugaccgugagcaccaagagaagccagcagaccgugauccccaacaucggcagcauccccugggugagaggccugagcagcagaaucagcaucuacuggaccaucgugaagcccggcgacauccugcugaucaacagcaccggcaaccugaucgcccccagaggcuacuucaagaucagaaccggcaagagcagcaucaugagaagcgacgcccccaucggcaccugcagcagcgagugcaucacccccaacggcagcauccccaacgacaagcccuuccagaacgugaacaagaucaccuacggcgccugccccagauacgugaagcagaacacccugaagcuggccaccggcaugagaaacgugcccgagaagcagaccagaggcaucuucggcgccaucgccggcuucaucgagaacggcugggagggcaugguggacggcugguacggcuucagacaccagaacagcgagggcaccggccaggccgccgaccugaagagcacccaggccgccaucgaccagaucaacggcaagcugaacagacugaucgagaagaccaacgagaaguuccaccagaucgagaaggaguucagcgagguggagggcagaauccaggaccuggagaaguacguggaggacaccaagaucgaccuguggagcuacaacgccgagcugcugguggcccuggagaaccagcacaccaucgaccugaccgacagcgagaugaacaagcuguucgagaagaccagaaagcagcugagagagaacgccgaggacaugggcaacggcugcuucaagaucuaccacaagugcgacaacgccugcaucggcagcaucagaaacggcaccuacgaccacgacguguacagagacgaggcccugaacaacagauuccagaucaagggcguggagcugaagagcggcuacaaggacuggauccuguggaucagcuucgccaucagcugcuuccugcugugcguggugcugcugggcuucaucaugugggccugccagaagggcaacaucagaugcaacaucugcaucuga

SEQ ID NO: 160460 - RNA, 1701 nt, Artificial Sequence
  derived and/or modified CDS sequence (opt4) from hemagglutinin__InfluenzaA__ABB04338
augaagaccaucaucgcccugagcuacaucuucugccuggugcugggccaggacuuccccggcaacgacaacagcaccgccacccugugccugggccaccacgccgugcccaacggcacccuggugaagaccaucaccaacgaccagaucgaggugaccaacgccaccgagcuggugcagagcagcagcaccggcaagaucugcaacaacccccacagaauccuggacggcaucgacugcacccugaucgacgcccugcugggcgacccccacugcgacggcuuccagaacgagaccugggaccuguucguggagagaagcaaggccuucagcaacugcuaccccuacgacgugcccgacuacgccagccugagaagccugguggccagcagcggcacccuggaguucaucaacgagggcuucaccuggaccggcgugacccagaacggcggcagcaacgccugcaagagaggccccgacagcggcuucuucagcagacugaacuggcuguacaagagcggcagcaccuaccccgugcugaacgugaccaugcccaacaacgacaacuucgacaagcuguacaucuggggcgugcaccaccccagcaccgaccaggagcagaccagccuguacgugcaggccagcggcagagugaccgugagcaccaagagaagccagcagaccaucauccccaacaucggcagcagacccugggugagaggccugagcagcagaaucagcaucuacuggaccaucgugaagcccggcgacauccuggugcugaacagcaacggcaaccugaucgcccccagaggcuacuucaagaugagaaccggcaagagcagcaucaugagaagcgacgcccccaucggcaccugcaucagcgagugcaucacccccaacggcagcauccccaacgacaagcccuuccagaacgugaacaagaucaccuacggcgccugccccaaguacgugaagcagaacacccugaagcuggccaccggcaugagaaacgugcccgagaagcagaccagaggccuguucggcgccaucgccggcuucaucgagaacggcugggagggcaugaucgacggcugguacggcuucagacaccagaacagcgagggcaccggccaggccgccgaccugaagagcacccaggccgccaucgaccagaucaacggcaagcugaacagagugaucgagaagaccaacgagaaguuccaccagaucgagaaggaguucagcgagguggagggcagaauccaggaccuggagaaguacguggaggacaccaagaucgaccuguggagcuacaacgccgagcugcugguggcccuggagaaccagcacaccaucgaccugaccgacagcgagaugaacaagcuguucgagaagaccagaagacagcugagagagaacgccgaggacaugggcaacggcugcuucaagaucuaccacaagugcgacaacgccugcaucggcagcaucagaaacggcaccuacgaccacgacguguacagagacgaggcccugaacaacagauuccagaucaagggcguggagcugaagagcggcuacaaggacuggauccuguggaucagcuucgccaucagcugcuuccugcugugcguggugcugcugggcuucaucaugugggccugccagaagggcaacaucagaugcaacaucugcaucuga

SEQ ID NO: 160461 - RNA, 1701 nt, Artificial Sequence
  derived and/or modified CDS sequence (opt4) from hemagglutinin__InfluenzaA__ABB04349
augaagaccaucaucgcccugagcuacaucuucugccugguguucgcccagaagcugcccggcaacgacaacagcaccgccacccugugccugggccaccacgccgugcccaacggcacccuggugaagaccaucaccaacgaccagaucgaggugaccaacgccaccgagcuggugcagagcagcagcaccggcagaaucugcgacagcccccacagaauccuggacggcaagaacugcacccugaucgacgcccugcugggcgacccccacugcgacggcuuccagaacgagaagugggaccuguucguggagagaagcaaggccuucagcaacugcuaccccuacgacgugcccgacuacgccagccugagaagccugguggccagcagcggcacccuggaguucaucaacgagggcuucaacuggaccggcgugacccagagcggcggcagcuacgccugcaagagaggcagcgugaacagcuucuucagcagacugaacuggcuguacaagagcgagagcaaguaccccgugcugaacgugaccaugcccaacaacggcaaguucgacaagcuguacaucuggggcgugcaccaccccagcaccgacaaggagcagaccaaccuguacgugagagccagcggcaaggugaccgugagcaccaagagaagccagcagaccgugauccccaacaucggcagcagacccugggugagaggccugagcagcagaaucagcaucuacuggaccaucgugaagcccggcgacauccugcugaucaacagcaccggcaaccugaucgcccccagaggcuacuucaagaucagaaccggcaagagcagcaucaugagaagcgacgcccccaucggcaccugcaacagcgagugcaucacccccaacggcagcauccccaacgacaagcccuuccagaacgugaacaagaucaccuacggcgccugccccagauacgugaagcagaacacccugaagcuggccaccggcaugagaaacgugcccgagaagcagaccagaggcaucuucggcgccaucgccggcuucaucgagaacggcugggagggcaugguggacggcugguacggcuucagacaccagaacagcgagggcaccggccaggccgccgaccugaagagcacccaggccgccaucgaccagaucaacggcaagcugaacagacugaucgagaagaccaacgagaaguuccaccagaucgagaaggaguucagcgagguggagggcagaauccaggaccuggagaaguacguggaggacaccaagaucgaccuguggagcuacaacgccgagcugcugguggcccuggagaaccagcacaccaucgaccugaccgacagcgagaugaacaagcuguucgagaagaccagaaagcagcugagagagaacgccgaggacaugggcaacggcugcuucaagaucuaccacaagugcgacaacgccugcaucggcagcaucagaaacggcaccuacgaccacgacguguacagagacgaggcccugaacaacagauuccagaucaagggcguggagcugaagagcggcuacaaggacuggauccuguggaucagcuucgccaucagcugcuuccugcugugcguggugcugcugggcuucaucaugugggccugccagaagggcaacaucagaugcaacaucugcaucuga

SEQ ID NO: 160462 - RNA, 1701 nt, Artificial Sequence
  derived and/or modified CDS sequence (opt4) from hemagglutinin__InfluenzaA__ABB04360
augaagaccaucaucgcccugagcuacaucuucugccugguguucgcccagaagcugcccggcaacgacaacagcaccgccacccugugccugggccaccacgccgugcccaacggcacccuggugaagaccaucaccaacgaccagaucgaggugaccaacgccaccgagcuggugcagagcagcagcaccggcagaaucugcgacagcccccacagaauccuggacggcaagaacugcacccugaucgacgcccugcugggcgacccccacugcgacggcuuccagaacgagaagugggaccuguucguggagagaagcaaggccuacagcaacugcuaccccuacgacgugcccgacuacgccagccugagaagccugguggccagcagcggcacccuggaguucaucaacgaggacuucaacuggaccggcgugacccagagcggcggcagcuacgccugcaagagaggcagcgugaacagcuucuucagcagacugaacuggcugcacaagagcgaguacaaguaccccgcccugaacgugaccaugcccaacaacggcaaguucgacaagcuguacaucuggggcgugcaccaccccagcaccgacagagagcagaccaaccuguacgugagagccagcggcagagugaccgugagcaccaagagaagccagcagaccgugauccccaacaucggcagcagacccugggugagaggccugagcagcagaaucagcaucuacuggaccaucgugaagcccggcgacauccugcugaucaacagcaccggcaaccugaucgcccccagaggcuacuucaagaucagaaccggcaagagcagcaucaugagaagcgacgcccccaucggcaccugcagcagcgagugcaucacccccaacggcagcauccccaacgacaagcccuuccagaacgugaacaagaucaccuacggcgccugccccagauacgugaagcagaacacccugaagcuggccaccggcaugagaaacgugcccgagaagcagaccagaggcaucuucggcgccaucgccggcuucaucgagaacggcugggagggcaugguggacggcugguacggcuucagacaccagaacagcgagggcaccggccaggccgccgaccugaagagcacccaggccgccaucgaccagaucaacggcaagcugaacagacugaucgagaagaccaacgagaaguuccaccagaucgagaaggaguucagcgagguggagggcagaauccaggaccuggagaaguacguggaggacaccaagaucgaccuguggagcuacaacgccgagcugcugguggcccuggagaaccagcacaccaucgaccugaccgacagcgagaugaacaagcuguucgagaagaccagaaagcagcugagagagaacgccgaggacaugggcaacggcugcuucaagaucuaccacaagugcgacaacgccugcaucggcagcaucagaaacggcaccuacgaccacgacguguacagagacgaggcccugaacaacagauuccagaucaagggcguggagcugaagagcggcuacaaggacuggauccuguggaucagcuucgccaucagcugcuuccugcugugcguggugcugcugggcuucaucaugugggccugccagaagggcaacaucagaugcaacaucugcaucuga

SEQ ID NO: 160463 - RNA, 1701 nt, Artificial Sequence
  derived and/or modified CDS sequence (opt4) from hemagglutinin__InfluenzaA__ABB04371
augaagaccaucaucgcccugagcuacaucuucuaccuggcccugggccaggaccugcccggcaacgacaacagcaaggccacccugugccugggccaccacgccgugcccaacggcacccuggugaagaccaucaccgacgaccagaccgaggugaccaacgccaccgagcuggugcagagcagcagcaccggcaagaucugcaacaacccccacagaauccuggacggcauggacugcacccugaucgacgcccugcugggcgacccccacugcgacguguuccagaacgagaccugggaccuguucguggagagaagcaaggccuucagcaacugcuaccccuacgacgugcccgacuacgccagccugagaagccugguggccagcagcggcaccauggaguucaucaccgagggcuucaccuggaccgaggugacccagaacggcggcagcaacgccugcaagagaggccccgacagcggcuucuucagcagacugaacuggcugaccaagagcggcagaaccuaccccgugcugaacgugaccaugcccaacaacgacaacuucgacaagcuguacaucuggggcgugcaccaccccagcaccgaccaggagcagaccaaccuguacgugcagaccagcggcagagugaccgugagcaccagaagaagccagcagaccaucauccccaacaucggcagcagacccugggugagaggccugagcagcagaaucagcaucuacuggaccaucgugaagcccggcgacgugcuggugaucaacagcaacggcaaccugaucgcccccagaggcuacuucaagaugagaaccggcaagagcagcaucaugagaagcgacgcccccaucgacaccugcaucagcgagugcaucacccccaacggcagcauccccaacgacaagcccuuccagaacgugaacaagaucaccuacggcgccugccccaaguacgugaagcagaacacccugaagcuggccaccggcaugagaaacgugcccgagaagcagaccagaggccuguucggcgccaucgccggcuucaucgagaacggcugggagggcaugaucgacggcugguacggcuucagacaccagaacagcgagggcaccggccaggccgccgaccugaagagcacccaggccgccaucgaccagaucaacggcaagcugaacagaaucaucgagaagaccaacgagaaguuccaccagaucgagaaggaguucagcgagguggagggcagaauccaggaccuggagaaguacguggaggacaccaagaucgaccuguggagcuacaacgccgagcugcugguggcccuggagaaccagcacaccaucgaccugaccgacagcgagaugaacaagcuguucgagaagaccagaagacagcugagagagaacgccgaggacaugggcaacggcugcuucaagaucuaccacaagugcgacaacgccugcaucgagagcaucagaaacggcaccuacgaccacgacguguacagagacgaggcccugaacaacagauuccagaucaagggcguggagcugaagagcggcuacaaggacuggauccuguggaucagcuucgccaucagcugcuuccugcugugcguggugcugcugggcuucaucaugugggccugccagagaggcaacaucagaugcaacaucugcaucuga

SEQ ID NO: 160464 - RNA, 1701 nt, Artificial Sequence
  derived and/or modified CDS sequence (opt4) from hemagglutinin__InfluenzaA__ABB04906
augaagaccaucaucgcccugagcuacauccugugccugguguucgcccagaagcugcccggcaacgacaacagcaccgccacccugugccugggccaccacgccgugcccaacggcacccuggugaagaccaucaccaacgaccagaucgaggugaccaacgccaccgagcuggugcagagcagcagcaccggcagaaucugcgacagcccccacagaauccuggacggcaagaacugcacccugaucgacgcccugcugggcgacccccacugcgacggcuuccagaacaaggagugggaccuguucguggagagaagcaaggccuacagcaacugcuaccccuacgacgugcccgacuacgccagccugagaagccugguggccagcagcggcacccuggaguucaucaacgaggacuucaacuggaccggcguggcccagaacggcgacagcuacgccugcaagagaggcagcgugaagagcuucuucagcagacugaacuggcugcacaagagcgaguacaaguaccccgcccugaacgugaccaugcccaacaacgacaaguucgacaagcuguacaucuggggcgugcaccaccccagcaccgacagagagcagaccagccuguacaucagagccagcggcaaggugaccgugagcaccaagagaagccagcagaccgugauccccaacaucggcagcagacccugggugagaggccugagcagcagaaucagcaucuacuggaccaucgugaagcccggcgacauccugcugaucaacagcaccggcaaccugaucgcccccagaggcuacuucaagaucagaaccggcaagagcagcaucaugagaagcgacgcccccaucggcaccugcagcagcgagugcaucacccccaacggcagcauccccaacgacaagcccuuccagaacgugaacagaaucaccuacggcgccugccccagauacgugaagcagaacacccugaagcuggccaccggcaugagaaacgugcccgagaagcagaccagaggcaucuucggcgccaucgccggcuucaucgagaacggcugggagggcaugguggacggcugguacggcuucagacaccagaacagcgagggcaccggccaggccgccgaccugaagagcacccaggccgccaucgaccagaucaacggcaagcugaacagacugaucgagaagaccaacgagaaguuccaccagaucgagaaggaguucagcgagguggagggcagaauccaggaccuggagaaguacguggaggacaccaagaucgaccuguggagcuacaacgccgagcugcugguggcccuggagaaccagcacaccaucgaccugaccgacagcgagaugaacaagcuguucgagaagaccagaaagcagcugagagagaacgccgaggacaugggcaacggcugcuucaagaucuaccacaagugcgacaacgccugcaucggcagcaucagaaacggcaccuacgaccacgacguguacagagacgaggcccugaacaacagauuccagaucaagggcguggagcugaagagcggcuacaaggacuggauccuguggaucagcuucgccaucagcugcuuccugcugugcguggugcugcugggcuucaucaugugggccugccagaagggcaacaucagaugcaacaucugcaucuga

SEQ ID NO: 160465 - RNA, 1701 nt, Artificial Sequence
  derived and/or modified CDS sequence (opt4) from hemagglutinin__InfluenzaA__ABB04917
augaagaccaucaucgcccugagcuacaucuucugccugguguucgcccagaagcugcccggcaacgacaacagcaccgccacccugugccugggccaccacgccgugcccaacggcacccuggugaagaccaucaccaacgaccagaucgaggugaccaacgccaccgagcuggugcagaucagcagcaccggcagaaucugcgacagcccccacagaauccuggacggcaagaacugcacccugaucgacgcccugcugggcgacccccacugcgacggcuuccagaacgagaagugggaccuguucguggagagaagcaaggccuucagcaacugcuaccccuacgacgugcccgacuacgccagccugagaagccugguggccagcagcggcacccuggaguucaucaacgagggcuucaacuggaccggcgugacccagagcggcggcagcuacaccugcaagagaggcagcgugaacagcuucuucagcagacugaacuggcuguacgagagcgagagcaaguaccccgugcugaacgugaccaugcccaacaacggcaaguucgacaagcuguacaucuggggcgugcaccaccccagcaccgacaaggagcagaccaaccuguacgugagagccagcggcagagugaccgugagcaccaagagaagccagcagaccgugauccccaacaucggcagcagacccugggugagaggccugagcagcagaaucagcaucuacuggaccaucgugaagcccggcgacauccugcugaucaacagcaccggcaaccugaucgcccccagaggcuacuucaagaucagaaccggcaagagcagcaucaugagaagcgacgcccccaucggcaccugcagcagcgagugcaucacccccaacggcagcauccccaacgacaagcccuuccagaacgugaacaagaucaccuacggcgccugccccagauacgugaagcagaacacccugaagcuggccaccggcaugagaaacgugcccgagaagcagaccagaggcaucuucggcgccaucgccggcuucaucgagaacggcugggagggcaugguggacggcugguacggcuucagacaccagaacagcgagggcaccggccaggccgccgaccugaagagcacccaggccgccaucgaccagaucaacggcaagcugaacagacugaucgagaagaccaacgagaaguuccaccagaucgagaaggaguucagcgagguggagggcagaauccaggaccuggagaaguacguggaggacaccaagaucgaccuguggagcuacaacgccgagcugcugguggcccuggagaaccagcacaccaucgaccugaccgacagcgagaugaacaagcuguucgagaagaccagaaagcagcugagagagaacgccgaggacaugggcaacggcugcuucaagaucuaccacaagugcgacaacgccugcaucggcagcaucagaaacggcaccuacgaccacgacguguacagagacgaggcccugaacaacagauuccagaucaagggcguggagcugaagagcggcuacaaggacuggauccuguggaucagcuucgccaucagcugcuuccugcugugcguggugcugcugggcuucaucaugugggccugccagaagggcaacaucagaugcaacaucugcaucuga

SEQ ID NO: 160466 - RNA, 1701 nt, Artificial Sequence
  derived and/or modified CDS sequence (opt4) from hemagglutinin__InfluenzaA__ABB04928
augaagaccaucaucgcccugagcuacaucuucugccugguguucgcccaggaccugcccggcaacgacaacagcaccgccacccugugccugggccaccacgccgugcccaacggcacccuggugaagaccaucaccaacgaccagaucgaggugaccaacgccaccgagcuggugcagagcagcagcaccggcaagaucugcaacaacccccacagaauccuggacggcaucaacugcacccugaucgacgcccugcugggcgacccccacugcgacggcuuccagaacgagaagugggaccuguucguggagagaagcaaggccuucagcaacugcuaccccuacgacgugcccgacuacgccagccugagaagccugguggccagcagcggcacccuggaguucaucaacgagggcuucaacuggaucggcgugacccagaacggcggcagcaacgccugcaagagaggcaccgacagcggcuucuucagcagacugaacuggcuguacaagagcggcagcaccuaccccgugcagaacgugaccaugcccaacaacgacaacagcgacaagcuguacaucuggggcgugcaccaccccagcaccgacaaggagcagaccgaccuguacgugcaggccagcggcaaggugaccgugagcaccaagagaagccagcagaccaucauccccaacgugggcagcagacccugggugagaggccugagcagcagaaucagcaucuacuggaccaucgugaagcccggcgacauccuggugaucaacagcaacggcaaccugaucgcccccagaggcuacuucaagaugagaaccggcaagagcagcaucaugagaagcgacgcccccaucggcaccugcagcagcgagugcaucacccccaacggcagcauccccaacgacaagcccuuccagaacgugaacaagaucaccuacggcgccugccccaaguacgugaagcagaacacccugaagcuggccaccggcaugagaaacgugcccgagaagcagaccagaggcaucuucggcgccaucgccggcuucaucgagaacggcugggagggcaugaucgacggcugguacggcuucagacaccagaacagcgagggcaccggccaggccgccgaccugaagagcacccaggccgccaucgaccagaucaacggcaagcugaacagagugaucgagaagaccaacgagaaguuccaccagaucgagaaggaguucagcgagguggagggcagaauccaggaccuggagaaguacguggaggacaccaagaucgaccuguggagcuacaacgccgagcugcugguggcccuggagaaccagcacaccaucgaccugaccgacagcgagaugaacaagcuguucgagaagaccagaagacagcugagagagaacgccgaggacaugggcaacggcugcuucaagaucuaccacaagugcgacaacgccugcaucggcagcaucagaaacggcaccuacgaccacgacguguacagagacgaggcccugaacaacagauuccagaucaagggcguggagcugaagagcggcuacaaggacuggauccuguggaucagcuucgccaucagcugcuuccugcugugcguggugcugcugggcuucaucaugugggccugccagaagggcaacaucagaugcaacaucugcaucuga

SEQ ID NO: 160467 - RNA, 1701 nt, Artificial Sequence
  derived and/or modified CDS sequence (opt4) from hemagglutinin__InfluenzaA__ABB04939
augaagaccaucaucgcccugagcuacaucuucugccugguguucgcccagaagcugcccggcaacgacaacagcaccgccacccugugccugggccaccacgccgugcccaacggcacccuggugaagaccaucaccaacgaccagaucgaggugaccaacgccaccgagcuggugcagagcagcagcaccggcagaaucugcgacagcccccacagaauccuggacggcaagaacugcacccugaucgacgcccugcugggcgacccccacugcgacggcuuccagaacgagaagugggaccuguucguggagagaagcaaggccuucagcaacugcuaccccuacgacgugcccgacuacgccagccugagaagccugguggccagcagcggcacccuggaguucaucaacgagggcuucaacuggaccggcgugacccagagcggcggcagcuacaccugcaagagaggcagcgugaacagcuucuucagcagacugaacuggcuguacgagagcgagagcaaguaccccgugcugaacgugaccaugcccaacaacggcaaguucgacaagcuguacaucuggggcgugcaccaccccagcaccgacaaggagcagaccaaccuguacgugagagccagcggcagagugaccgugagcaccaagagaagccagcagaccgugauccccaacaucggcagcagacccugggugagaggccugagcagcagaaucagcaucuacuggaccaucgugaagcccggcgacauccugcugaucaacagcaucggcaaccugaucgcccccagaggcuacuucaagaucagaaccggcaagagcagcaucaugagaagcgacgcccccaucggcaucugcagcagcgagugcaucacccccaacggcagcauccccaacgacaagcccuuccagaacgugaacaagaucaccuacggcgccugccccagauacgugaagcagaacacccugaagcuggccaccggcaugagaaacgugcccgagaagcagaccagaggcaucuucggcgccaucgccggcuucaucgagaacggcugggagggcaugguggacggcugguacggcuucagacaccagaacagcgagggcaccggccaggccgccgaccugaagagcacccaggccgccguggaccagaucaacggcaagcugaacagacugaucgagaagaccaacgagaaguuccaccagaucgagaaggaguucagcgagguggagggcagaauccaggaccuggagaaguacguggaggacaccaagaucgaccuguggagcuacaacgccgagcugcugguggcccuggagaaccagcacaccaucgaccugaccgacagcgagaugaacaagcuguucgagaagaccagaaagcagcugagagagaacgccgaggacaugggcaacggcugcuucaagaucuaccacaagugcgacaacgccugcaucggcagcaucagaaacggcaccuacgaccacgacguguacagagacgaggcccugaacaacagauuccagaucaagggcguggagcugaagagcggcuacaaggacuggauccuguggaucagcuucgccaucagcugcuuccugcugugcguggugcugcugggcuucaucaugugggccugccagaagggcaacaucagaugcaacaucugcaucuga

SEQ ID NO: 160468 - RNA, 1701 nt, Artificial Sequence
  derived and/or modified CDS sequence (opt4) from hemagglutinin__InfluenzaA__ABB04950
augaagaccaucaucgcccugagcuacaucuucugccugguguucgcccagaagcugcccggcaacgacaacagcaccgccacccugugccugggccaccacgccgugcccaacggcacccuggugaagaccaucaccaacgaccagaucgaggugaccaacgccaccgagcuggugcagagcagcagcaccggcagaaucugcgacagcccccacagaauccuggacggcaagaacugcacccugaucgacgcccugcugggcgacccccacugcgacggcuuccagaacgagaagugggaccuguucguggagagaagcaaggccuucagcaacugcuaccccuacgacgugcccgacuacgccagccugagaagccugguggccagcagcggcacccuggaguucaucaacgagggcuucaacuggaccggcgugacccagagcggcggcagcuacaccugcaagagaggcagcgugaacagcuucuucagcagacugaacuggcuguacgagagcgagagcaaguaccccgugcugaacgugaccaugcccaacaacggcaaguucgacaagcuguacaucuggggcgugcaccaccccagcaccgacaaggagcagaccaaccuguacgugagagccagcggcaaggugaccgugagcaccaagagaagccagcagaccgugauccccaacaucggcagcagacccugggugagaggccugagcagcagaaucagcaucuacuggaccaucgugaagcccggcgacauccugcugaucaacagcaccggcaaccugaucgcccccagaggcuacuucaagaucagaaccggcaagagcagcaucaugagaagcgacgcccccaucggcaccugcagcagcgagugcaucacccccaacggcagcauccccaacgacaagcccuuccagaacgugaacaagaucaccuacggcgccugccccagauacgugaagcagaacacccugaagcuggccaccggcaugagaaacgugcccgagaagcagaccagaggcaucuucggcgccaucgccggcuucaucgagaacggcugggagggcaugguggacggcugguacggcuucagacaccagaacagcgagggcaccggccaggccgccgaccugaagagcacccaggccgccaucgaccagaucaacggcaagcugaacagacugaucgagaagaccaacgagaaguuccaccagaucgagaaggaguucagcgagguggagggcagaauccaggaccuggagaaguacguggaggacaccaagaucgaccuguggagcuacaacgccgagcugcugguggcccuggagaaccagcacaccaucgaccugaccgacagcgagaugaacaagcuguucgagaagaccagaaagcagcugagagagaacgccgaggacaugggcaacggcugcuucaagaucuaccacaagugcgacaacgccugcaucggcagcaucagaaacggcaccuacgaccacgacguguacagagacgaggcccugaacaacagauuccagaucaagggcguggagcugaagagcggcuacaaggacuggauccuguggaucagcuucgccaucagcugcuuccugcugugcguggugcugcugggcuucaucaugugggccugccagaagggcaacaucagaugcaacaucugcaucuga

SEQ ID NO: 160469 - RNA, 1701 nt, Artificial Sequence
  derived and/or modified CDS sequence (opt4) from hemagglutinin__InfluenzaA__ABB04983
augaagaccaucaucgcccugagcuacauccugugccugguguucgcccagaagcugcccggcaacgacaacagcaccgccacccugugccugggccaccacgccgugcccaacggcacccuggugaagaccaucaccaacgaccagaucgaggugaccaacgccaccgagcuggugcagagcagcagcaccgacagaaucugcgacagcccccaccagauccuggacggcgagaacugcacccugaucgacgcccugcugggcgacccccacugcgacggcuuccagaacaaggagugggaccuguucguggagagaagcaaggccuacagcaacugcuaccccuacgacgugcccgacuacgugagccugagaagccugguggccagcagcggcacccuggaguucaacaacgagagcuucaacuggaccggcguggcccagaacggcaccagcagcgccugcaagagaagaagcgacaagagcuucuucagcagacugaacuggcugcaccagcugaaguacaaguaccccgcccugaacgugaccaugcccaacaacgagaaguucgacaagcuguacaucuggggcgugcaccaccccggcaccgacagcgaccagaucagccuguacgcccaggccagcggcagagugaccgugagcaccaagagaagccagcagaccgugauccccaacaucggcagcagacccugggugagaggcgugagcagcagaaucagcaucuacuggaccaucgugaagcccggcgacauccugcugaucaacagcaccggcaaccugaucgcccccagaggcuacuucaagaucagaagcggcaagagcagcaucaugagaagcgacgcccccaucggcaagugcaacagcgagugcaucacccccaacggcagcauccccaacgacaagcccuuccagaacgugaacagaaucaccuacggccccugccccagauacgugaagcagaacacccugaagcuggccaccggcaugagaaacgugcccgagaagcagaccagaggcaucuucggcgccaucgccggcuucaucgagaacggcugggagggcaugauggacggcugguacggcuucagacaccagaacagcgagggcaccggccaggccgccgaccugaagagcacccaggccgccaucaaccagaucaacggcaagcugaacagacugaucgagaagaccaacgagaaguuccaccagaucgagaaggaguucagcgagguggagggcagaauccaggaccuggagaaguacguggaggacaccaagaucgaccuguggagcuacaacgccgagcugcugguggcccuggagaaccagcacaccaucgaccugaccgacagcgagaugaacaagcuguucgagagaaccaagaagcagcugagagagaacgccgaggacaugggcaacggcugcuucaagaucuaccacaagugcgacaacgccugcaucggcagcaucagaaacggcaccuacgaccacgacguguacagagacgaggcccugaacaacagauuccagaucaagggcguggagcugaagagcggcuacaaggacuggauccuguggaucagcuucgccaucagcugcuuccugcugugcaucgugcugcugggcuucaucaugugggccugccagaagggcaacaucagaugcaacaucugcaucuga

SEQ ID NO: 160470 - RNA, 1701 nt, Artificial Sequence; identical to SEQ ID NO: 160232
  derived and/or modified CDS sequence (opt4) from hemagglutinin__InfluenzaA__ABB04994

SEQ ID NO: 160471 - RNA, 1701 nt, Artificial Sequence
  derived and/or modified CDS sequence (opt4) from hemagglutinin__InfluenzaA__ABB05005
augaagaccaucaucgcccugagccacauccugugccugguguucgcccagaagcugcccgugaacgacaacagcaccgccacccugugccugggccaccacgccgugcccaacggcacccuggugaagaccaucaccaacgaccacaucgaggugaccaacgccaccgagcuggugcagagcagcagcaccggcagaaucugcgacagcccccaccagauccuggacggcgagaacugcacccugaucgacgcccugcugggcgacccccacugcgacggcuuccagaacaaggagugggaccuguucguggagagaagcaccgccuacagcaacugcuaccccuacgacgugcccgacuacgccagccugagaagccugguggccagcagcggcacccuggaguucaacaacgagagcuucaacuggaccggcguggcccagaacggcaccagcagcgccugcaagagaagaagcaucaagagcuucuucagcagacugaacuggcugcaccagcugaaguacaaguaccccgcccugaacgugaccaugcccaacaacgagaaguucgacaagcuguacaucuggggcgugcaccaccccagcaccgacagcgaccagaucagccuguacgcccaggccagcggcagagugaccgugagcaccaagagaagccagcagaccgugauccccgacaucggcagcagacccugggugagaggcgugagcagcagaaucagcaucuacuggaccaucgugaagcccggcgacauccugcugaucaacagcaccggcaaccugaucgcccccagaggcuacuucaagaucagaagcggcaagagcagcaucaugagaagcaacgcccccaucggcaagugcaacagcgagugcaucacccccaacggcagcgugcccaacgacaagcccuuccagaacgugaacagaaucaccuacggcgccugccccagauacgugaagcagaacacccugaagcuggccaccggcaugagaaacgugcccgagaagcagaccagaggcaucuucggcgccaucgccggcuucaucgagaacggcugggagggcaugguggacggcugguacggcuucagacaccagaacagcgagggcaccggccaggccgccgaccugaagagcacccaggccgccaucaaccagaucaacggcaagcugaacagacugaucgagaagaccaacgagaaguuccaccagaucgagaaggaguucagcgagguggagggcagaauccaggaccuggagaaguacguggaggacaccaagaucgaccuguggagcuacaacgccgagcugcugguggcccuggagaaccagcacaccaucgaccugaccgacagcgagaugaacaagcuguucgagagaaccagaaagcagcugagagagaacgccgaggacaugggcaacggcugcuucaagaucuaccacaagugcgacaacgccugcaucggcagcaucagaaacggcaccuacgaccacgacguguacagagacgaggcccugaacaacagauuccagaucaagggcguggagcugaagagcggcuacaaggacuggauccuguggaucagcuucgccaucagcugcuuccugcugugcguggugcugcugggcuucaucaugugggccugccagaagggcaacaucagaugcaacaucugcaucuga

SEQ ID NO: 160472 - RNA, 1701 nt, Artificial Sequence
  derived and/or modified CDS sequence (opt4) from hemagglutinin__InfluenzaA__ABB05183
augaagaccaucaucgcccugagcuacauccugugccugguguucgcccagaagcugcccgugaacgacaacagcaccgccacccugugccugggccaccacgccgugcccaacggcacccuggugaagaccaucaccaacgagcacaucgaggugaccaacgccaccgagcuggugcagagcagcagcaccggcagaaucugcgacagcccccaccagauccuggacggcgagaacugcacccugaucgacgcccugcugggcgacccccacugcgacggcuuccagaacaaggagugggaccuguucguggagagaagcaccgccuacagcaacugcuaccccuacgacgugcccgacuacgccagccugagaagccugguggccagcagcggcacccuggaguucaacaacgagagcuucaacuggaccggcguggcccagaacggcaccagcagcgccugcaagagaagaagcaucaagagcuucuucagcagacugaacuggcugcaccagcugaaguacaaguaccccgcccugaacgugaccaugcccaacaacgagaaguucgacaagcuguacaucuggggcgugcaccaccccagcaccgacagcgaccagaucagccuguacgcccaggccagcggcagagugaccgugagcaccaagagaagccagcagaccgugauccccaacaucggcagcagacccugggugagaggcgugagcagcagaaucagcaucuacuggaccaucgugaagcccggcgacauccugcugaucaacagcaccggcaaccugaucgcccccagaggcuacuucaagaucagaagcggcaagagcagcaucaugagaagcaacgcccccaucggcaagugcaacagcgagugcaucacccccaacggcagcauccccaacgacaagcccuuccagaacgugaacagaaucaccuacggcgccugccccagauacgugaagcagaacacccugaagcuggccaccggcaugagaaacgugcccgagaagcagaccagaggcaucuucggcgccaucgccggcuucaucgagaacggcugggagggcaugguggacggcugguacggcuucagacaccagaacagcgagggcaccggccaggccgccgaccugaagagcacccaggccgccaucaaccagaucaacggcaagcugaacagacugaucgagaagaccaacgagaaguuccaccagaucgagaaggaguucagcgagguggagggcagaauccaggaccuggagaaguacguggaggacaccaagaucgaccuguggagcuacaacgccgagcugcugguggcccuggagaaccagcacaccaucgaccugaccgacagcgagaugaacaagcuguucgagagaaccagaaagcagcugagagagaacgccgaggacaugggcaacggcugcuucaagguguaccacaagugcgacaacgccugcaucggcagcaucagaaacggcaccuacgaccacgacguguacagagacgaggcccugaacaacagauuccagaucaagggcguggagcugaagagcggcuacaaggacuggauccuguggaucagcuucgccaucagcugcuuccugcugugcguggugcugcugggcuucaucaugugggccugccagaagggcaacaucagaugcaacaucugcaucuga

SEQ ID NO: 160473 - RNA, 1701 nt, Artificial Sequence
  derived and/or modified CDS sequence (opt4) from hemagglutinin__InfluenzaA__ABB05194
augaagaccaucaucgcccugagcuacauccugugccugguguucgcccagaagcugcccggcaacgacaacagcaccgccacccugugccugggccaccacgccgugcccaacggcacccuggugaagaccaucaccaacgaccagaucgaggugaccaacgccaccgagcuggugcagagcagcagcaccggcagaaucugcgacagcccccaccagauccuggacggcgagaacugcacccugaucgacgcccugcugggcgacccccacugcgacggcuuccagaacaaggagugggaccuguucguggagagaagcaaggccuacagcaacugcuaccccuacgacgugcccgacuacgccagccugagaagccugguggccagcagcggcacccuggaguucaacaacgagagcuucaacuggaccggcguggcccagaacggcaccagcagcgccugcaagagaagaagcaacaagagcuucuucagcagacugaacuggcugcaccagcugaaguacaaguaccccgcccugaacgugaucaugcccaacaacgagaaguucgacaagcuguacaucuggggcgugcaccaccccagcaccgacagcgaccagaucagccuguacgcccaggccagcggcagagugaccgugagcaccaagagaagccagcagaccgugauccccaacaucggcagcagacccugggugagaggcgugagcagcagaaucagcaucuacuggaccaucgugaagcccggcgacauccugcugaucaacagcaccggcaaccugaucgcccccagaggcuacuucaagaucagaagcggcaagagcagcgugaugagaagcgacgccagcaucggcaagugcaacagcgagugcaucacccccaacggcagcauccccaacgacaagcccuuccagaacgugaacagaaucaccuacggcgccugccccagauacgugaagcagaacacccugaagcuggccaccggcaugagaaacgugcccgagaagcagaccagaggcaucuucggcgccaucgccggcuucaucgagaacggcugggagggcaugguggacggcugguacggcuucagacaccagaacagcgagggcaccggccaggccgccgaccugaagagcacccaggccgccaucaaccagaucaacggcaagcugaacagacugaucgagaagaccaacgagaaguuccaccagaucgagaaggaguucagcgagguggagggcagaauccagaaccuggagaaguacguggaggacaccaagaucgaccuguggagcuacaacgccgagcugcugguggcccuggagaaccagcacaccaucgaccugaccgacagcgagaugaacaagcuguucgagagaaccaagaagcagcugagagagaacgccgaggacaugggcaacggcugcuucaagaucuaccacaagugcgacaacgccugcaucggcagcaucagaaacggcaccuacgaccacgacguguacagagacgaggcccugaacaacagauuccagaucaagggcguggagcugaagagcggcuacaaggacuggauccuguggaucagcuucgccaucagcugcuuccugcugugcguggugcugcugggcuucaucaugugggccugccagaagggcaacaucagaugcaacaucugcaucuga

SEQ ID NO: 160474 - RNA, 1701 nt, Artificial Sequence
  derived and/or modified CDS sequence (opt4) from hemagglutinin__InfluenzaA__ABB05205
augaagaccaucaucgcccugagcuacauccugugccugguguucgcccagaagcugcccggcaacgacaacagcaccgccacccugugccugggccaccacgccgugcccaacggcacccuggugaagaccaucaccaacgaccagaucgaggugaccaacgccaccgagcuggugcagagcagcagcaccggcagaaucugcgacagcccccaccagauccuggacggcgagaacugcacccugaucgacgcccugcugggcgacccccacugcgacggcuuccagaacaaggagugggaccuguucguggagagaagcaacgccuacagcaacugcuaccccuacgacgugcccgacuacgccagccugagaagccugguggccagcagcggcacccuggaguucaacagcgagagcuucaacuggaccggcguggcccagaacggcaccagcagcgccugcaagagaagaagcaacaagagcuucuucagcagacugaacuggcugcaccagcugaaguacaaguaccccgcccugaacgugaccaugcccaacaacgagaaguucgacaagcuguacaucuggggcgugcaccaccccggcaccgacagcgaccagaucagccuguacgcccaggccagcggcagagugaccgugagcaccaagagaagccagcagaccgugauccccaacaucggcagcagacccugggugagaggcgugagcagcagaaucagcaucuacuggaccaucgugaagcccggcgacauccugcugaucaacagcaccggcaaccugaucgcccccagaggcuacuucaagaucagaagcggcaagagcagcaucaugagaagcgacgcccccaucggcaagugcaacagcgagugcaucacccccaacggcagcauccccaacaacaagcccuuccagaacgugaacagaaucaccuacggcgccugccccagauacgugaagcagaacacccugaagcuggccaccggcaugagaaacgugcccgagaagcagaccagaggcaucuucggcgccaucgccggcuucaucgagaacggcugggagggcaugguggacggcugguacggcuucagacaccagaacagcgagggcaccggccaggccgccgaccugaagagcacccaggccgccaucaaccagaucaacggcaagcugaacagacugaucgagaagaccaacgagaaguuccaccagaucgagaaggaguucagcgagguggagggcagaauccaggaccuggagaaguacguggaggacaccaagaucgaccuguggagcuacaacgccgagcugcugguggcccuggagaaccagcacaccaucgaccugaccgacagcgagaugaacaagcuguucgagagaaccaagaagcagcugagagagaacgccgaggacaugggcaacggcugcuucaagaucuaccacaagugcgacaacgccugcaucggcagcaucagaaacggcaccuacgaccacgacguguacagagacgaggcccugaacaacagauuccagaucaagggcguggagcugaagagcggcuacaaggacuggauccuguggaucagcuucgccaucagcugcuuccugcugugcguggugcugcugggcuucaucaugugggccugccagaagggcaacaucagaugcaacaucugcaucuga

SEQ ID NO: 160475 - RNA, 1701 nt, Artificial Sequence; identical to SEQ ID NO: 160132
  derived and/or modified CDS sequence (opt4) from hemagglutinin__InfluenzaA__ABB05216

SEQ ID NO: 160476 - RNA, 1701 nt, Artificial Sequence
  derived and/or modified CDS sequence (opt4) from hemagglutinin__InfluenzaA__ABB46392
augaagaccaucaucgcccugagcuacaucuucugccuggccuucgcccaggaccugcccggcaacgacaacagcaccgccacccugugccugggccaccacgccgugcccaacggcacccuggugaagaccaucaccaacgaccagaucgaggugaccaacgccaccgagcuggugcagagcagcagcaccggcaagaucugcgacaacccccacagaauccuggacggcaucaacugcacccugaucgacgcccugcugggcgacccccacugcgacggcuuccagaacgagaagugggaccuguucguggagagaagcaaggccuucagcaacugcuaccccuacgacgugcccgacuacgccagccugagaagccugguggccagcagcggcacccuggaguucaucaacgagggcuucaacuggaccggcgugacccagaacggcggcagcagcgccugcaagagaggccccgacaacggcuucuucagcagacugaacuggcuguacaagagcggcagcaccuaccccgugcagaacgugaccaugcccaacaacgacaacagcgacaagcuguacaucuggggcgugcaccaccccaacaccgacaaggagcagaccgaccuguacgugcaggccagcggcaaggugaccgugagcaccaagagaagccagcagaccaucauccccaacgugggcagcagacccugggugagaggccugagcagcagagugagcaucuacuggaccaucgugaagcccggcgacauccuggugaucaacagcaacggcaaccugaucgcccccagaggcuacuucaagaugagaaccggcaagagcagcaucaugagaagcgacgcccccaucggcaccugcagcagcgagugcaucacccccaacggcagcauccccaacgacaagcccuuccagaacgugaacaagaucaccuacggcgccugccccaaguacgugaagcagaacacccugaagcuggccaccggcaugagaaacgugcccgagaagcagaccagaggcaucuucggcgccaucgccggcuucaucgagaacggcugggagggcaugaucgacggcugguacggcuucagacaccagaacagcgagggcaccggccaggccgccgaccugaagagcacccagaccgccaucgaccagaucaacggcaagcugaacagagugaucgagaagaccaacgagaaguuccaccagaucgagaaggaguucagcgagguggagggcagaauccaggaccuggagaaguacguggaggacaccaagaucgaccuguggagcuacaacgccgagcugcugguggcccuggagaaccagcacaccaucgaccugaccgacagcgagaugaacaagcuguucgagaagaccagaagacagcugagagagaacgccgaggacaugggcaacggcugcuucaagaucuaccacaagugcgacaacgccugcaucggcagcaucagaaacggcaccuacgaccacgacguguacagagacgaggcccugaacaacagauuccagaucaagggcguggagcugaagagcggcuacaaggacuggauccuguggaucagcuucgccaucagcugcuuccugcugugcguggugcugcugggcuucaucaugugggccugccagaagggcaacaucagaugcaacaucugcaucuga

SEQ ID NO: 160477 - RNA, 1701 nt, Artificial Sequence
  derived and/or modified CDS sequence (opt4) from hemagglutinin__InfluenzaA__ABB46414
augaagaccaucaucgcccugagcuacauccugugccugguguucgcccagaagcugcccggcaacgacaacagcaccgccacccugugccugggccaccacgccgugcccaacggcacccuggugaagaccaucaccaacgaccagaucgaggugaccaacgccaccgagcuggugcagagcagcagcaccggcagaaucugcgacagcccccacagaauccuggacggcgagaacugcacccugaucgacgcccugcugggcgacccccacugcgacggcuuccagaacaaggagugggaccuguucguggagagaagcaaggccuacagcaacugcuaccccuacgacgugcccgacuacgccagccugagaagccugguggccagcagcggcacccuggaguucaacaacgagagcuucaacuggaccggcguggcccagaacggcaccagcagcgccugcaagagaagaagcaucaagagcuucuucagcagacugaacuggcugcaccagcugaaguacaaguaccccgcccugaacgugaccaugcccaacaacgacaaguucgacaagcuguacaucuggggcgugcaccaccccagcaccgacagcgaccagaccagccuguacgcccaggccagcggcagagugaccgugagcaccaagagaagccagcagaccgugauccccaacaucggcagcagacccugggugagaggcgugagcagcagaaucagcaucuacuggaccaucgugaagcccggcgacauccugcugaucaacagcaccggcaaccugaucgcccccagaggcuacuucaagaucagaagcggcaagagcagcaucaugagaagcgacgcccccaucggcaagugcaacagcgagugcaucacccccaacggcagcauccccaacgacaagcccuuccagaacgugaacagaaucaccuacggcgccugccccagauacgugaagcagaacacccugaagcuggccaccggcaugagaaacgugcccgagaagcagaccagaggcaucuucggcgccaucgccggcuucaucgagaacggcugggagggcaugguggacggcugguacggcuucagacaccagaacagcgagggcaccggccaggccgccgaccugaagagcacccaggccgccaucaaccagaucaacggcaagcugaacagacugaucgagaagaccaacgagaaguuccaccagaucgagaaggaguucagcgagguggagggcagaauccaggaccuggagaaguacguggaggacaccaagaucgaccuguggagcuacaacgccgagcugcugguggcccuggagaaccagcacaccaucgaccugaccgacagcgagaugaacaagcuguucgagagaaccagaaagcagcugagagagaacgccgaggacaugggcaacggcugcuucaagaucuaccacaagugcgacaacgccugcaucggcagcaucagaaacggcaccuacgaccacgacguguacagagacgaggcccugaacaacagauuccagaucaagggcguggagcugaagagcggcuacaaggacuggauccuguggaucagcuucgccaucagcugcuuccuguucugcguggugcugcugggcuucaucaugugggccugccagaagggcaacaucagaugcaacaucugcaucuga

SEQ ID NO: 160478 - RNA, 1701 nt, Artificial Sequence
  derived and/or modified CDS sequence (opt4) from hemagglutinin__InfluenzaA__ABB46425
augaagaccaucaucgcccugagcuacauccugugccugguguucgcccagaagcugcccggcaacgacaacagcaccgccacccugugccugggccaccacgccgugcccaacggcacccuggugaagaccaucaccagcgaccagaucgaggugaccaacgccaccgagcuggugcagagcagcagcaccggcaagaucugcgacagcccccacagaauccuggacggcgagaacugcacccugaucgacgcccugcugggcgacccccacugcgacggcuuccagaacaaggagugggaccuguucguggagagaagcaaggccuacagcaacugcuaccccuacgacgugcccgacuacgccagccugagaagccugguggccagcagcggcacccuggaguucaacaacgagagcuucaacuggaccggcguggcccagaacggcaccagcuucgccugcaagagaagaagcaucaagagcuucuucagcagacugaacuggcugcaccagcugaaguacaaguaccccgcccugaacgugaccaugcccaacaacgacaaguucgacaagcuguacaucuggggcgugcaccaccccagcaccgacagcgaccagaccagccuguacgcccaggccagcggcagagugaccgugagcaccaagagaagccagcagaccgugauccccaacaucggcagcagacccugggugagaggcgugagcagcagaaucagcaucuacuggaccaucgugaagcccggcgacauccugcugaucaacagcaccggcaaccugaucgcccccagaggcuacuucaagaucagaagcggcaagagcagcaucaugagaagcgacgcccccaucggcaagugcaacagcgagugcaucacccccaacggcagcauccccaacgacaagcccuuccagaacgugaacagaaucaccuacggcgccugccccagauacgugaagcagaacacccugaagcuggccaccggcaugagaaacgugcccgagaagcagaccagaggcaucuucggcgccaucgccggcuucaucgagaacggcugggagggcaugguggacggcugguacggcuucagacaccagaacagcgagggcaccggccaggccgccgaccugaagagcacccaggccgccaucaaccagaucaacggcaagcugaacagacugaucgagaagaccaacgagaaguuccaccagaucgagaaggaguucagcgagguggagggcagaauccaggaccuggagaaguacguggaggacaccaagaucgaccuguggagcuacaacgccgagcugcugguggcccuggagaaccagcacaccaucgaccugaccgacagcgagaugaacaagcuguucgagagaaccagaaagcagcugagagagaacgccgaggacaugggcaacggcugcuucaagaucuaccacaagugcgacaacgccugcaucggcagcaucagaaacggcaccuacgaccacgacguguacagagacgaggcccugaacaacagauuccagaucaagggcguggagcugaagagcggcuacaaggacuggauccuguggaucagcuucgccaucagcugcuuccugcugugcguggugcugcugggcuucaucaugugggccugccagaagggcaacaucagaugcaacaucugcaucuga

SEQ ID NO: 160479 - RNA, 1701 nt, Artificial Sequence
  derived and/or modified CDS sequence (opt4) from hemagglutinin__InfluenzaA__ABB46436
augaagaccaucaucgcccugagcuacauccugugccugguguucgcccagaagcugcccggcaacgacaacagcaccgccacccugugccugggccaccacgccgugcccaacggcaccaucgugaagaccaucaccaacgaccagaucgaggugaccaacgccaccgagcuggugcagagcagcagcaccggcggcaucugcgacagcccccaccagauccuggacggcgagaacugcacccugaucgacgcccugcugggcgacccccagugcgacggcuuccagaacaagaagugggaccuguucguggagagaagcaaggccuacagcaacugcuaccccuacgacgugcccgacuacgccagccugagaagccugguggccagcagcggcacccuggaguucaacaacgagagcuucaacuggaccggcgugacccagaacggcaccagcagcgccugcaagagaagaagcaacaacagcuucuucagcagacugaacuggcugacccaccugaaguucaaguaccccgcccugaacgugaccaugcccaacaacgagaaguacgacaagcuguacaucuggggcgugcaccaccccggcaccgacaacgaccagaucagccuguacgcccaggccagcggcagaaucaccgugagcaccaagagaagccagcagaccgugauccccaacaucggcagcagacccagagugagagacauccccagcagaaucagcaucuacuggaccaucgugaagcccggcgacauccugcugaucaacagcaccggcaaccugaucgcccccagaggcuacuucaagaucagaagcggcaagagcagcaucaugagaagcgacgcccccaucggcaagugcaacagcgagugcaucacccccaacggcagcauccccaacgacaagcccuuccagaacgugaacagaaucaccuacggcgccugccccagauacgugaagcagaacacccugaagcuggccaccggcaugagaaacgugcccgagaagcagaccagaggcaucuucggcgccaucgccggcuucaucgagaacggcugggagggcaugguggacggcugguacggcuucagacaccagaacagcgagggcaucggccaggccgccgaccugaagagcacccaggccgccaucaaccagaucaacggcaagcugaacagacugaucggcaagaccaacgagaaguuccaccagaucgagaaggaguucagcgagguggagggcagaauccaggaccuggagaaguacguggaggacaccaagaucgaccuguggagcuacaacgccgagcugcugguggcccuggagaaccagcacaccaucgaccugaccgacagcgagaugaacaagcuguucgagagaaccaagaagcagcugagagagaacgccgaggacaugggcaacggcugcuucaagaucuaccacaagugcgacaacgccugcaucggcagcaucagaaacggcaccuacgaccacgacguguacagagacgaggcccugaacaacagauuccagaucaagggcguggagcugaagagcggcuacaaggacuggauccuguggaucagcuucgccaucagcugcuuccugcugugcguggcccugcugggcuucaucaugugggccugccagaagggcaacaucagaugcaacaucugcaucuga

SEQ ID NO: 160480 - RNA, 1701 nt, Artificial Sequence; identical to SEQ ID NO: 160413
  derived and/or modified CDS sequence (opt4) from hemagglutinin__InfluenzaA__ABB46447

SEQ ID NO: 160481 - RNA, 1701 nt, Artificial Sequence
  derived and/or modified CDS sequence (opt4) from hemagglutinin__InfluenzaA__ABB46458
augaagaccaucaucgcccugagcuacauccugugccugguguucgcccagaagcugcccggcaacgacaacagcaccgccacccugugccugggccaccacgccgugcccaacggcaccaucgugaagaccaucaccaacgaccagaucgaggugaccaacgccaccgagcuggugcagagcagcagcaccggcggcaucugcgacagcccccaccagauccuggacggcgagaacugcacccugaucgacgcccugcugggcgacccccagugcgacggcuuccagaacaagaagugggaccuguucguggagagaagcaaggccuacagcaacugcuaccccuacgacgugcccgacuacgccagccugagaagccugguggccagcagcggcacccuggaguucaacaacgagagcuucaacuggaccggcgugacccagaacggcaccagcagcgccugcaagagaagaagcaacaacagcuucuucagcagacugaacuggcugacccaccugaaguucaaguaccccgcccugaacgugaccaugcccaacaacgagaaguucgacaagcuguacaucuggggcgugcaccaccccggcaccgacaacgaccagaucagccuguacgcccaggccagcggcagaaucaccgugagcaccaagagaaaccagcagaccgugauccccaacaucggcagcagacccagagugagagacauccccagcagaaucagcaucuacuggaccaucgugaagcccggcgacauccugcugaucaacagcaccggcaaccugaucgcccccagaggcuacuucaagaucagaagcggcaagagcagcaucaugagaagcgacgcccccaucggcaagugcaagagcgagugcaucacccccaacggcagcauccccaacgacaagcccuuccagaacgugaacagaaucaccuacggcgccugccccagauacgugaagcagaacacccugaagcuggccaccggcaugagaaacgugcccgagaagcagaccagaggcaucuucggcgccaucgccggcuucaucgagaacggcugggagggcaugguggacggcugguacggcuucagacaccagaacagcgagggcaucggccaggccgccgaccugaagagcacccaggccgccaucaaccagaucaacggcaagcugaacagacugaucggcaagaccaacgagaaguuccaccagaucgagaaggaguucagcgagguggagggcagaauccaggaccuggagaaguacguggaggacaccaagaucgaccuguggagcuacaacgccgagcugcugguggcccuggagaaccagcacaccaucgaccugaccgacagcgagaugaacaagcuguucgagagaaccaagaagcagcugagagagaacgccgaggacaugggcaacggcugcuucaagaucuaccacaagugcgacaacgccugcaucggcagcaucagaaacggcaccuacgaccacgacguguacagagacgaggcccugaacaacagauuccagaucaagggcguggagcugaagagcggcuacaaggacuggauccuguggaucagcuucgccaucagcugcuuccugcugugcguggcccugcugggcuucaucauguggggcugccagaagggcaacaucagaugcaacaucugcaucuga

SEQ ID NO: 160482 - RNA, 1701 nt, Artificial Sequence
  derived and/or modified CDS sequence (opt4) from hemagglutinin__InfluenzaA__ABB51961
augaagaccaucaucgcccugagcuacauccugugccugguguucgcccagaagcugcccggcaacgacaacagcaccgccacccugugccugggccaccacgccgugcccaacggcaccaucgugaagaccaucaccaacgaccagaucgaggugaccaacgccaccgagcuggugcagagcuucagcaccggcggcaucugcgacagcccccaccagauccuggacggcgagaacugcacccugaucgacgcccugcugggcgacccccagugcgacggcuuccagaacaagaagugggaccuguucguggagagaagcaaggccuacagcaacugcuaccccuacgacgugcccgacuacgccugcgugagaagccugguggccagcagcggcacccuggaguucaacaacgagagcuucaacugggccggcgugacccagaacggcaccagcagcgccugcaagagaagaagcaacaagagcuucuucagcagacugaacuggcugacccaccugaaguacaaguaccccgcccugaacgugaccaugcccaacaacgagaaguucgacaagcuguacaucuggggcgugcaccaccccggcaccgacagcgaccagaucagccuguacgcccaggccagcggcagaaucaccgugagcacccagagaugcaagcagcuggugauccccaacaucggcagcagacccagagugagagacgugagcagcagaaucagcaucuacuggaccaucgugaaccccggcgacauccugcugaucaacagcaccggcaaccugaucgcccccagaggcuacuucaagaucagaagcggcaagagcagcaucaugagaagcgacgcccccaucggcaagugcaacagcgagugcaucacccccaacggcagcauccccaacgacaagcccuuccagaacgugaacagaaucaccuacggcgccugccccagauacgugaagcagaacacccugaagcuggccaccggcaugagaaacgugcccgagaagcagaccagaggcaucuucggcgccaucgccggcuucaucgagaacggcugggagggcaugguggacggcugguacggcuucagacaccagaacagcgagggcaccggccaggccgccgaccugaagagcacccaggccgccaucaaccagaucaacggcaagcugaacagacugaucggcaagaccaacgagaaguuccaccagaucgagaaggaguucagcgagguggagggcagaauccaggaccuggagaaguacguggaggacaccaagaucgaccuguggagcuacaacgccgagcugcugguggcccuggagaaccagcacaccaucgaccugaccgacagcgagaugaacaagcuguucgagagaaccaagaagcagcugagagagaacgccgaggacaugggcaacggcugcuucaagaucuaccacaagugcgacaacgccugcaucgagagcaucagaaacggcaccuacgaccacgacguguacagagacgaggcccugaacaacagauuccagaucaagggcguggagcugaagagcggcuacaaggacuggauccuguggaucagcuucgccaucagcugcuuccugcugugcguggcccugcugggcuucaucaugugggccugccagaagggcaacaucagaugcaacaucugcaucuga

SEQ ID NO: 160483 - RNA, 1698 nt, Artificial Sequence
  derived and/or modified CDS sequence (opt4) from hemagglutinin__InfluenzaA__ABB51962
augaaggccaagcugcuggugcugcugugcaccuucaccgccaccuacgccgacaccaucugcaucggcuaccacgccaacaacagcaccgacaccguggacaccgugcuggagaagaacgugaccgugacccacagcgugaaccugcuggaggacagccacaacggcaagcugugccugcugaagggcaucgccccccugcagcugggcaacugcagcguggccggcuggauccugggcaaccccgagugcgagcugcugaucagcaaggagagcuggagcuacaucguggagacccccaaccccgagaacggcaccugcuaccccggcuacuucgccgacuacgaggagcugagagagcagcugagcagcgugagcagcuucgagagauucgagaucuuccccaagggcagcagcuggcccaaccacaccgugaccggcgugagcgccagcugcagccacaacggcaagagcagcuucuacagaaaccugcuguggcugaccggcaagaacggccuguaccccaaccugagcaugagcuacgugaacaacaaggagaaggaggugcuggugcuguggggcgugcaccacccccccaacaucggcaaccagagagcccuguaccacaccgagaacgccuacgugagcguggugagcagccacuacagcagaagauucacccccgagaucgccaagagacccaaggugagagaccaggagggcagaaucaacuacuacuggacccugcuggagcccggcgacaccaucaucuucgaggccaacggcaaccugaucgcccccugguacgccuucgccaugagcagaggcuucggcagcggcaucagcaccagcaacgcccccaugggcgagugcgacgccaaguuccagaccccccagggcggcaucaacaucagccugcccuuccagaacgugcaccccgugaccaucggcgagugccccaacuacgugagaagcgccaagcugagaauggugaccggccugagaaacauccccagcauccagagcagaggccuguucggcgccaucgccggcuucaucgagggcggcuggaccggcaugguggacggcugguacggcuaccaccaccagaacgagcagggcagcggcuacgccgccgaccagaagagcacccagaacgccaucaacggcaucaccaacaaggugaacagcgugaucgagaagaugaacacccaguucaccgccgugggcaaggaguucaacaagcuggagagaagaauggagaaccugaacaagaagguggacgacggcuuccuggacaucuggaccuacaacgccgagcugcuggugcugcuggagaacgagagaacccuggacuuccacgacagcaacgugaagaaccuguacgagaaggugaagagccagcugaagaacaacgccaaggagaucggcaacggcugcagcgaguucuaccacaagugcaacaacgagugcauggagagcgugaagaacggcaccuacgacuaccccaaguacagcgaggagagcaagcugaacagagagaagaucgacggcgugaagcuggagagcaugggcguguaccagauccuggccaucuacagcaccguggccagcagccuggugcugcuggugagccugggcgccaucagcuucuggaugugcagcaacggcagccugcagugcagaaucugcaucuga

SEQ ID NO: 160484 - RNA, 1701 nt, Artificial Sequence
  derived and/or modified CDS sequence (opt4) from hemagglutinin__InfluenzaA__ABB51963
augaagaccaucaucgcccugagcuacauccugugccugguguucgcccagaagcugcccggcaacgacaacagcaccgccacccugugccugggccaccacgccgugcccaacggcaccaucgugaagaccaucaccaacgacagaaucgaggugaccaacgccaccgagcuggugcagagcagcagcaccggcggcaucugcgacagcccccaccagauccuggacggcgagaacugcacccugaucgacgcccugcugggcgacccccagugcgacggcuuccagaacaagaagugggaccuguucguggagagaagcaaggccuacagcaacugcuaccccuacgacgugcccgacuacgccagccugagaagccugguggccagcagcggcacccuggaguucaacaacgagagcuucaacuggaccggcgugacccagaacggcaccagcagcgccugcaagagaagaagcaacaacagcuucuucagcagacugaacuggcugacccaccugaaguucaaguaccccgcccugaacgugaccaugcccaacaacgagaaguucgacaagcuguacaucuggggcgugcaccaccccggcaccgacaacgaccagaucagccuguacgcccaggccagcggcagaaucaccgugagcaccaagagaagccagcagaccgugauccccaacaucggcagcagacccagagugagacacauccccagcagaaucagcaucuacuggaccaucgugaaccccggcgacauccugcugaucaacagcaccggcaaccugaucgcccccagaggcuacuucaagaucagaagcggcaagagcagcaucaugagaagcgacgcccccaucggcaagugcaacagcgagugcaucacccccaacggcagcauccccaacgacaagcccuuccagaacgugaacagaaucaccuacggcgccugccccagauacgugaagcagaacacccugaagcuggccaccggcaugagaaacgugcccgagaagcagaacagaggcaucuucggcgccaucgccggcuucaucgagaacggcugggagggcaugguggacggcugguacggcuucagacaccagaacagcgagggcaucggccaggccgccgaccugaagagcacccaggccgccaucaaccagaucaacgagaagcugaacagacugaucggcaagaccaacgagaaguuccaccagaucgagaaggaguucagcgagguggagggcagaauccaggaccuggagaaguacguggaggacaccaagaucgaccuguggagcuacaacgccgagcugcugguggcccuggagaaccagcacaccaucgaccugaccgacagcgagaugaacaagcuguucgagagaaccaagaagcagcugagagagaacgccgaggacaugggcaacggcugcuucaagguguaccacaagugcgacaacgccugcaucggcagcaucagaaacggcaccuacgaccacaacguguacagagacgaggcccugaacaacagauuccagaucaagggcguggagcugaagagcggcuacaaggacuggauccuguggaucagcuucgccaucagcugcuuccugcugugcguggcccugcugggcuucaucaugugggccugccagaagggcaacaucagaugcaacaucugcaucuga

SEQ ID NO: 160485 - RNA, 1701 nt, Artificial Sequence; identical to SEQ ID NO: 160342
  derived and/or modified CDS sequence (opt4) from Hemagglutinin__InfluenzaA__ABB51964

SEQ ID NO: 160486 - RNA, 1698 nt, Artificial Sequence
  derived and/or modified CDS sequence (opt4) from hemagglutinin__InfluenzaA__ABB53603
augaaggugaagcugcugauccugcugugcaccuucaccgccaccuacgccgacaccaucugcaucggcuaccacgccaacaacagcaccgacaccguggacaccgugcuggagaagaacgugaccgugacccacagcgugaaccugcuggaggacagccacaacggcaagcugugccugcugaagggcaucgccccccugcagcugggcaacugcagcguggccggcuggauccugggcaaccccgagugcgagcugcugaucagcaaggagagcuggagcuacaucguggagacccccaaccccgagaacggcgccugcuaccccggcuacuucgccgacuacgaggagcugagagagcagcugagcagcgugagcagcuucgagagauucgagaucuuccccaaggagagcagcuggcccaaccacaccgugaccggcgugagcgccagcugcagccacaacggcaagagcagcuucuacagaaaccugcuguggcugaccggcaagaacggccuguaccccaaccugagcaagagcuacgccaacaacaagaagaaggaggugcugauccuguggggcgugcaccacccccccaacaucggcaaccagagaacccuguacuacaccgagaacgccuacgugagcguggugagcagccacuacagcagaagauucacccccgagaucaccaagagacccaaggugagagaccaggagggcagaaucaacuacuacuggacccugcuggagcccggcgacaccaucaucuucgaggccaacggcaaccugaucgcccccugguacgccuucgcccugagcagaggcuucggcagcggcaucaucaccagcaacgcccccauggacgagugcgacgccaagugccagaccccccagggcgccaucaacagcagccugcccuuccagaacgugcaccccgugaccaucggcgagugccccaaguacgugagaagcgccaagcugagaauggugaccggccugagaaacauccccagcauccagagcagaggccuguucggcgccaucgccggcuucaucgagggcggcuggaccggcaugguggacggcugguacggcuaccaccaccagaacgagcagggcagcggcuacgccgccgaccagaagagcacccagaacgccaucaacggcaucaccaacaaggugaacagcgugaucgagaagaugaacacccaguucaccgccgugggcaaggaguucaacaagcuggagagaagaauggagaaccugaacaagaagguggacgacggcuuccuggacaucuggaccuacaacgccgagcugcuggugcugcuggagaacgagagaacccuggacuuccacgacagcaacgugaagaaccuguacgagaaggugaagagccagcugaagaacaacgccaaggagaucggcaacggcugcuucgaguucuaccacaagugcaacaacgagugcauggagagcgugaagaacggcaccuacgacuaccccaaguacagcgaggagagcaagcugaacagagagaagaucgacggcgugaagcuggacagcaugggcguguaccagauccuggccaucuacagcaccguggccagcagccuggugcugcuggugagccugggcgccaucagcuucuggaugugcagcaacggcagccugcagugcagaaucugcaucuga

SEQ ID NO: 160487 - RNA, 1701 nt, Artificial Sequence; identical to SEQ ID NO: 160315
  derived and/or modified CDS sequence (opt4) from hemagglutinin__InfluenzaA__ABB53614

SEQ ID NO: 160488 - RNA, 1701 nt, Artificial Sequence; identical to SEQ ID NO: 160315
  derived and/or modified CDS sequence (opt4) from hemagglutinin__InfluenzaA__ABB53625

SEQ ID NO: 160489 - RNA, 1701 nt, Artificial Sequence; identical to SEQ ID NO: 160342
  derived and/or modified CDS sequence (opt4) from hemagglutinin__InfluenzaA__ABB53652

SEQ ID NO: 160490 - RNA, 1701 nt, Artificial Sequence
  derived and/or modified CDS sequence (opt4) from hemagglutinin__InfluenzaA__ABB53663
augaagaccaucuucgcccugagcuacauccugugccugguguucgcccagaagcugcccggcaacgacaacagcaccgccacccugugccugggccaccacgccgugcccaacggcaccaucgugaagaccaucaccaacgaccagaucgaggugaccaacgccaccgagcuggugcagagcagcagcaccggcggcaucugcgacagcccccaccagauccuggacggcgagaacugcacccugaucgacgcccugcugggcgacccccagugcgacggcuuccagaacaagaagugggaccuguucguggagagaagcaaggcccacagcaacugcuaccccuacgacgugcccgacuacgccagccugagaagccugguggccagcagcggcacccuggaguucaacaacgagagcuucaacuggaccggcgugacccagaacggcaccagcagcgccugcaagagaagaagcaacaacagcuucuucagcagacugaacuggcugacccaccugaaguucaaguaccccgcccugaacgugaccaugcccaacaacgagaacuucgacaagcuguacaucuggggcgugcaccaccccggcaccgacaacgaccagaucagccuguacgcccaggccagcggcagaaucaccgugagcaccaagagaagccagcagaccgugauccccaacaucggcagcagacccagagugagagacauccccagcagaaucagcaucuacuggaccaucgugaagcccggcgacauccugcugaucaacagcaccggcaaccugaucgcccccagaggcuacuucaagaucagaagcggcaagagcagcaucaugagaagcgacgcccccaucggcaagugcaacagcgagugcaucacccccaacggcagcauccccaacgacaagcccuuccagaacgugaacagaaucaccuacggcgccugccccagauacgugaagcagaacacccugaagcuggccaccggcaugagaaacgugcccgagaagcagaccagaggcaucuucggcgccaucgccggcuucaucgagaacggcugggagggcaugguggacggcugguacggcuucagacaccagaacagcgagggcaucggccaggccgccgaccugaagagcacccaggccgccaucaaccagaucaacggcaagcugaacagacugaucggcaagaccaacgagaaguuccaccagaucgagaaggaguucagcgagguggagggcagaauccaggaccuggagaaguacguggaggacaccaagaucgaccuguggagcuacaacgccgagcugcugguggcccuggagaaccagcacaccaucgaccugaccgacagcgagaugaacaagcuguucgagagaaccaagaagcagcugagagagaacgccgaggacaugggcaacggcugcuucaagaucuaccacaagugcgacaacgccugcaucggcagcaucagaaacggcaccuacgaccacgacguguacagagacgaggcccugaacaacagauuccagaucaagggcguggagcugaagagcggcuacaaggacuggauccuguggaucagcuucgccaucagcugcuuccugcugugcguggcccugcugggcuucaucaugugggccugccagaagggcaacaucagaugcaacaucugcaucuga

SEQ ID NO: 160491 - RNA, 1701 nt, Artificial Sequence; identical to SEQ ID NO: 160315
  derived and/or modified CDS sequence (opt4) from hemagglutinin__InfluenzaA__ABB53685

SEQ ID NO: 160492 - RNA, 1701 nt, Artificial Sequence
  derived and/or modified CDS sequence (opt4) from hemagglutinin__InfluenzaA__ABB53696
augaagaccaucaucgcccugagcuacauccugugccugguguucgcccagaagcugcccggcaacgacaacagcaccgccacccugugccugggccaccacgccgugcccaacggcacccuggugaagaccaucaccaacgaccagaucgaggugaccaacgccaccgagcuggugcagagcagcagcaccggcagaaucugcgacagcccccaccagauccuggacggcgagaacugcacccugaucgacgcccugcugggcgacccccacugcgacggcuuccagaacaaggagugggaccuguucguggagagaagcaaggccuacagcaacugcuaccccuacgacgugcccgacuacgccagccugagaagccugguggccagcagcggcacccuggaguucaacaacgagagcuucaacuggaccggcguggcccagaacggcaccagcagcgccugcaagagaagaagcaacaagagcuucuucagcagacugaacuggcugcaccagcugaaguacaaguaccccgcccugaacgugaccaugcccaacaacgagaaguucgacaagcuguacaucuggggcgugcaccaccccagcaccgacagcgaccagaucagccuguacgcccaggccagcggcagagugaccgugagcaccaagagaagccagcagaccgugauccccaacaucggcagcagacccugggugagaggcgugagcagcagaaucagcaucuacuggaccaucgugaagcccggcgacauccugcugaucaacagcaccggcaaccugaucgcccccagaggcuacuucaagaucagaagcggcaagagcagcaucaugagaagcgacgcccccaucggcaagugcaacagcgagugcaucacccccaacggcagcauccccaacgacaagcccuuccagaacgugaacagaaucaccuacggcgccugccccagauacgugaagcagaacacccugaagcuggccaccggcaugagaaacgugcccgagaagcagaccagaggcaucuucggcgccaucgccggcuucaucgagaacggcugggagggcaugguggacggcugguacggcuucagacaccagaacagcgagggcaccggccaggccgccgaccugaagagcacccaggccgccaucaaccagaucaacggcaagcugaacagacugaucgagaagaccaacgagaaguuccaccagaucgagaaggaguucagcgagguggagggcagaauccaggaccuggagaaguacguggaggacaccaagaucgaccuguggagcuacaacgccgagcugcugguggcccuggagaaccagcacaccaucgaccugaccgacagcgagaugaacaagcuguucgagagaaccaagaagcagcugagagagaacgccgaggacaugggcaacggcugcuucaagaucuaccacaagugcgacaacgccugcaucggcagcaucagaaacggcaccuacgaccacgacguguacagagacgaggcccugaacaacagauuccagaucaagggcguggagcugaagagcggcuacaaggacuggauccuguggaucagcuucgccaucagcugcuuccugcugugcaucgcccugcugggcuucaucaugugggccugccagaagggcaacaucagaugcaacgugugcaucuga

SEQ ID NO: 160493 - RNA, 1698 nt, Artificial Sequence; identical to SEQ ID NO: 160356
  derived and/or modified CDS sequence (opt4) from hemagglutinin__InfluenzaA__ABB53707

SEQ ID NO: 160494 - RNA, 1701 nt, Artificial Sequence; identical to SEQ ID NO: 160303
  derived and/or modified CDS sequence (opt4) from hemagglutinin__InfluenzaA__ABB53718

SEQ ID NO: 160495 - RNA, 1698 nt, Artificial Sequence
  derived and/or modified CDS sequence (opt4) from hemagglutinin__InfluenzaA__ABB53740
augaaggugaagcugcuggugcugcugugcaccuucaccgccaccuacgccgacaccaucugcaucggcuaccacgccaacaacagcaccgacaccguggacaccgugcuggagaagaacgugaccgugacccacagcgugaaccugcuggaggacagccacaacggcaagcugugccugcugaagggcaucgccccccugcagcugggcaacugcagcguggccggcuggauccugggcaaccccgagugcgagcugcugaucagcaaggagagcuggagcuacaucguggagacccccaaccccgagaacggcaccugcuaccccggcuacuucgccgacuacgaggagcugagagagcagcugagcagcgugagcagcuucgagagauucgagaucuuccccaaggagagcagcuggcccaaccacaccgugaccggcgugagcgccagcugcagccacaacggcaagagcagcuucuacagaaaccugcuguggcugaccggcaagaacggccuguaccccaaccugagcaagagcuacgccaacaacaaggagaaggaggugcuggugcuguggggcgugcaccacccccccaacaugggcgaccagagagcccuguaccacaccgagaacgccuacgugagcguggugagcagccacuacagcagaagauucacccccgagaucgccaagagacccaaggugagagaccaggagggcagaaucaacuacuacuggacccugcuggagcccggcgagaccaucaucuucgaggccaacggcaaccugaucgcccccagauacgccuucgcccugagcagaggcuucggcagcggcaucaucaccagcaacgcccccauggacgagugcgacgccaagugccagaccccccagggcgccaucaacagcagccugcccuuccagaacgugcaccccgugaccaucggcgagugccccaaguacgugagaagcaccaagcugagaauggugaccggccugagaaacauccccagcauccagagcagaggccuguucggcgccaucgccggcuucaucgagggcggcuggaccggcaugguggacggcugguacggcuaccaccaccagaacgagcagggcagcggcuacgccgccgaccagaagagcacccagaacgccaucaacggcaucaccaacaaggugaacagcgugaucgagaagaugaacacccaguucaccgccgugggcaaggaguucaacaagcuggagagaagaauggagaaccugaacaagaagguggacgacggcuuccuggacaucuggaccuacaacgccgagcugcuggugcugcuggagaacgagagaacccuggacuuccacgacagcaacgugaagaaccuguacgagaaggugaagagccagcugaagaacaacgccaaggagaucggcaacggcugcuucgaguucuaccacaagugcaacgacgagugcauggagagcgugaagaacggcaccuacgacuaccccaaguacagcgaggagagcaagcugaacagagagaagaucgacggcgugaagcuggagagcaugggcguguaccagauccuggccaucuacagcaccguggccagcagccuggugcugcuggugagccugggcgccaucagcuucuggaugugcagcaacggcagccugcagugcagaaucugcaucuga

SEQ ID NO: 160496 - RNA, 1701 nt, Artificial Sequence
  derived and/or modified CDS sequence (opt4) from hemagglutinin__InfluenzaA__ABB53751
augaagaccaucaucgcccugagcuacaucagcugccugguguucgcccagaaccugcccggcaacgacaacagcaccgccacccugugccugggccaccacgccgugcccaacggcacccuggugaagaccaucaccaacgaccagaucgaggugaccaacgccaccgagcuggugcagagcagcagcaccggcagaaucugcgacagcccccacagaauccuggacggcaagaacugcacccugaucgacgcccugcugggcgacccccacugcgacggcuuccagaacgagaagugggaccuguucguggagagaagcaaggccuucagcaacugcuaccccuacgacgugcccgacuacgccagccugagaagccugguggccagcagcggcacccuggaguucaucaacgagggcuucaacuggaccggcgugacccagagcggcggcagcuacgccugcaagagaggcagcgacaacagcuucuucagcagacugaacuggcuguacaagagcgagagcaaguaccccgugcugaacgugaccaugcccaacaacggcaacuucgacaagcuguacaucuggggcgugcaccaccccagcaccgacaaggagcagaccaaccuguacgugagagccagcggcagagugaccgugagcaccaagagaagccagcagaccaucauccccaacaucggcagcagacccugggugagaggccugagcagcggcaucagcaucuacuggaccaucgugaagcccggcgacauccugcugaucaacagcaacggcaaccugaucgcccccagaggcuacuucaagaucagaaccggcaagagcagcauccugagaagcgacgcccccaucggcaccugcagcagcgagugcaucacccccaacggcagcauccccaacgacaagcccuuccagaacgugaacaagaucaccuacggcgccugccccaaguacgugaagcagaacacccugaagcuggccaccggcaugagaaacgugcccgagaagcagaccagaggcaucuucggcgccaucgccggcuucaucgagaacggcugggagggcaugguggacggcugguacggcuucagacaccagaacagcgagggcaccggccaggccgccgaccugaagagcacccaggccgccaucgaccagaucaacggcaagcugaacagagugaucgagaagaccaacgagaaguuccaccagaucgagaaggaguucagcgagguggagggcagaauccaggaccuggagaaguacguggaggacaccaagaucgaccuguggagcuacaacgccgagcugcugguggcccuggagaaccagcacaccaucgaccugaccgacagcgagaugaacaagcuguucgagaagaccagaagacagcugagagagaacgccgaggacaugggcaacggcugcuucaagaucuaccacaagugcgacaacgccugcaucggcagcaucagaaacggcaccuacgaccacgacguguacagagacgaggcccugaacaacagauuccagaucaagggcguggagcugaagagcggcuacaaggacuggauccuguggaucagcuucgccaucagcugcuuccugcugugcguggugcugcugggcuucaucaugugggccugccagaagggcaacaucagaugcaacaucugcaucuga

SEQ ID NO: 160497 - RNA, 1701 nt, Artificial Sequence
  derived and/or modified CDS sequence (opt4) from hemagglutinin__InfluenzaA__ABB60007
augaagaccaucaucgcccugagcuacauccugugccugguguucgcccagaagcugcccggcaacgacaacagcaccgccacccugugccugggccaccacgccgugcccaacggcacccuggugaagaccaucaccaacgaccagaucgaggugaccaacgccaccgagcuggugcagagcagcagcaccgacagaaucugcgacagcccccacagaauccuggacggcgagaacugcacccugaucgacgcccugcugggcgacccccacugcgacggcuuccagaacaaggagugggaccuguucguggagagaagcaaggccuacagcaacugcuaccccuacgacgugcccgacuacgccagccugagaagccugguggccagcagcggcacccuggaguucaacaacgagagcuucaacuggaccggcguggcccagaacggcaccagcuacgccugcaagagaagaagcaucaagagcuucuucagcagacugaacuggcugcaccagcugaaguacaaguaccccgcccugaacgugaccaugcccaacaacgacaaguucgacaagcuguacaucuggggcgugcaccaccccagcaccgacagcgaccagaccagccuguacgcccaggccagcggcagagugaccgugagcaccaagagaagccagcagaccgugauccccaacaucggcagcagacccugggugagaggcgugagcagcagaaucagcaucuacuggaccaucgugaagcccggcgacauccugcugaucaacagcaccggcaaccugaucgcccccagaggcuacuucaagaucagaagcggcaagagcagcaucaugagaagcgacgcccccaucggcaagugcaacagcgagugcaucacccccaacggcagcauccccaacgacaagcccuuccagaacgugaacagaaucaccuacggcgccugccccagauacgugaagcagaacacccugaagcuggccaccggcaugagaaacgugcccgagaagcagaccagaggcaucuucggcgccaucgccggcuucaucgagaacggcugggagggcaugguggacggcugguacggcuucagacaccagaacagcgagggcaccggccaggccgccgaccugaagagcacccaggccgccaucaaccagaucaacggcaagcugaacagacugaucgagaagaccaacgagaaguuccaccagaucgagaaggaguucagcgagguggagggcagaauccaggaccuggagaaguacguggaggacaccaagaucgaccuguggagcuacaacgccgagcugcugguggcccuggagaaccagcacaccaucgaccugaccgacagcgagaugaacaagcuguucgagagaaccagaaagcagcugagagagaacgccgaggacaugggcaacggcugcuucaagaucuaccacaagugcgacaacgccugcaucggcagcaucagaaacggcaccuacgaccacgacguguacagagacgaggcccugaacaacagauuccagaucaagggcguggagcugaagagcggcuacaaggacuggauccuguggaucagcuucgccaucagcugcuuccugcugugcguggugcugcugggcuucaucaugugggccugccagaagggcaacaucagaugcaacaucugcaucuga

SEQ ID NO: 160498 - RNA, 1701 nt, Artificial Sequence
  derived and/or modified CDS sequence (opt4) from hemagglutinin__InfluenzaA__ABB77853
augaagaccaucaucgcccugagcuacaucagcugccugguguucgcccagaagcugcccggcaacgacaacagcaccgccacccugugccugggccaccacgccgugcccaacggcacccuggugaagaccaucaccaacgaccagaucgaggugaccaacgccaccgagcuggugcagagcagcagcaccggcagaaucugcgacagcccccacagaauccuggacggcgagaacugcacccugaucgacgcccugcugggcgacccccacugcgacggcuuccagaacaaggagugggaccuguucguggagagaagcaaggccuacagcaacugcuaccccuacgacgugcccgacuacgccagccugagaagccugguggccagcagcggcacccuggaguucaacaacgagagcuucaacuggaccggcguggcccagaacggcaccagcuacgccugcaagagaagaagcaucaagagcuucuucagcagacugaacuggcugcaccagcugaaguacaaguaccccgcccugaacgugaccaugcccaacaacgacaaguucgacaagcuguacaucuggggcgugcaccaccccagcaccgacagcgaccagaccagccuguacgcccaggccagcggcagagugaccgugagcaccaagagaagccagcagaccgugauccccaacaucggcagcagacccugggugagaggcgugagcagcagaaucagcaucuacuggaccaucgugaagcccggcgacauccugcugaucaacagcaccggcaaccugaucgcccccagaggcuacuucaagaucagaagcggcaagagcagcaucaugagaagcgacgcccccaucggcaagugcaacagcgagugcaucacccccgacggcagcauccccaacgacaagcccuuccagaacgugaacagaaucaccuacggcgccugccccagauacgugaagcagaacacccugaagcuggccaccggcaugagaaacgugcccgagaagcagaccagaggcaucuucggcgccaucgccggcuucaucgagaacggcugggagggcaugguggacggcugguacggcuucagacaccagaacagcgagggcaccggccaggccgccgaccugaagagcacccaggccgccaucaaccagaucaacggcaagcugaacagacugaucgagaagaccaacgagaaguuccaccagaucgagaaggaguucagcgagguggagggcagaauccaggaccuggagaaguacguggaggacaccaagaucgaccuguggagcuacaacgccgagcugcugguggcccuggagaaccagcacaccaucgaccugaccgacagcgagaugaacaagcuguucgagagaaccagaaagcagcugagagagaacgccgaggacaugggcaacggcugcuucaagaucuaccacaagugcgacaacgccugcaucggcagcaucagaaacggcaccuacgaccacgacguguacagagacgaggcccugaacaacagauuccagaucaagggcguggagcugaagagcggcuacaaggacuggauccuguggaucagcuucgccaucagcugcuuccugcugugcguggugcugcugggcuucaucaugugggccugccagaagggcaacaucagaugcaacaucugcaucuga

SEQ ID NO: 160499 - RNA, 1701 nt, Artificial Sequence
  derived and/or modified CDS sequence (opt4) from hemagglutinin__InfluenzaA__ABB79731
augaagaccaucaucgcccugagcuacauccugugccugguguucgcccaggagcugcccggcaacgacaacagcaccgccacccugugccugggccaccacgccgugcccaacggcaccaucgugaagaccaucaccaacgaccagaucgaggugaccaacgccaccgagcuggugcagaacagcagcaccggcggcaucugcgacagcccccaccagauccuggacggcgagaacugcacccugaucgacgcccugcugggcgacccccagugcgacggcuuccagaacaagaagugggaccuguucguggagagaagcaaggccuacagcaacugcuaccccuacgacgugcccgacuacgccagccugagaagccugguggccagcagcggcacccuggaguucaacaacgagagcuucaacuggaccggcgugacccagaacggcaccagcagcgccugcaagagaagaagcaacaacagcuucuucagcagacugaacuggcugacccaccugaaguucaaguaccccgcccugaacgugaccaugcccaacaacgagaaguucgacaagcuguacaucuggggcgugcaccaccccggcaccgacaacgaccagaccagccuguacgcccaggccagcggcagaaucaccgugagcaccaagagaagccagcagaccgugauccccaacaucggcagcagacccagagugagagacauccccagcagaaucagcaucuacuggaccaucgugaagcccggcgacauccugcugaucaacagcaccggcaaccugaucgcccccagaggcuacuucaagaucagaagcggcaagagcagcaucaugagaagcgacgcccccaucggcaagugcaacagcgagugcaucacccccaacggcagcauccccaacgacaagcccuuccagaacgugaacagaaucaccuacggcgccugccccagauacgugaagcagaacacccugaagcuggccaccggcaugagaaacgugcccgagaagcagaccagaggcaucuucggcgccaucgccggcuucaucgagaacggcugggagggcaugguggacggcugguacggcuucagacaccagaacagcgagggcaucggccaggccgccgaccugaagagcacccaggccgccaucaaccagaucaacggcaagcugaacagacugaucggcaagaccaacgagaaguuccaccagaucgagaaggaguucagcgagguggagggcagaauccaggaccuggagaaguacguggaggacaccaagaucgaccuguggagcuacaacgccgagcugcugguggcccuggagaaccagcacaccaucgaccugaccgacagcgagaugaacaagcuguucgagagaaccaagaagcagcugagagagaacgccgaggacaugggcaacggcugcuucaagaucuaccacaagugcgacaacgccugcaucggcagcaucagaaacggcaccuacgaccacgacguguacagagacgaggcccugaacaacagauuccagaucaagggcguggagcugaagagcggcuacaaggacuggauccuguggaucagcuucgccaucagcugcuuccugcugugcguggcccugcugggcuucaucaugugggccugccagaagggcaacaucagaugcaacaucugcaucuga

SEQ ID NO: 160500 - RNA, 1701 nt, Artificial Sequence
  derived and/or modified CDS sequence (opt4) from hemagglutinin__InfluenzaA__ABB79788
augaagaccaucaucgcccugagcuacaucuucugccugguguucgcccagaagcugcccggcaacgacaacagcaccgccacccugugccugggccaccacgccgugcccaacggcacccuggugaagaccaucaccaacgaccagaucgaggugaccaacgccaccgagcuggugcagagcagcagcaccggcagaaucugcgacagcccccacagaauccuggacggcaagaacugcacccugaucgacgcccugcugggcgacccccacugcgacggcuuccagaacgagaagugggaccuguucguggagagaagcaaggccuucagcaacugcuaccccuacgacgugcccgacuacgccagccugagaagccugguggccagcagcggcacccuggaguucaucaacgagggcuucaacuggaccggcgugacccagagcggcggcagcuacgccugcaagagaggcagcgugaacagcuucuucagcagacugaacuggcuguacgagagcgagagcaaguaccccgugcugaacgugaccaugcccaacaacggcaaguucgacaagcuguacaucuggggcgugcaccaccccaucaccgacaaggagcagaccaaccuguacgugagagccagcggcagagugaccgugagcaccaagagaagccagcagaccgugauccccaacaucggcagcagacccugggugagaggccugagcagcagaaucagcaucuacuggaccaucgugaagcccggcgacauccugcugaucaacagcaccggcaaccugaucgcccccagaggcuacuucaagaucagaaccggcaagagcagcaucaugagaagcgacgcccccaucggcaccugcagcagcgagugcaucacccccaacggcagcauccccaacgacaagcccuuccagaacgugaacaagaucaccuacggcgccugccccagauacgugaagcagaacacccugaagcuggccaccggcaugagaaacgugcccgagaagcagaccagaggcaucuucggcgccaucgccggcuucaucgagaacggcugggagggcaugguggacggcugguacggcuucagacaccagaacagcgagggcaccggccaggccgccgaccugaagagcacccaggccgccaucgaccagaucaacggcaagcugaacagacugaucgagaagaccaacgagaaguuccaccagaucgagaaggaguucagcgagguggagggcagaauccaggaccuggagaaguacguggaggacaccaagaucgaccuguggagcuacaacgccgagcugcugguggcccuggagaaccagcacaccaucgaccugaccgacagcgagaugaacaagcuguucgagaagaccagaaagcagcugagagagaacgccgaggacaugggcaacggcugcuucaagaucuaccacaagugcgacaacgccugcaucggcagcaucagaaacggcaccuacgaccacgacguguacagagacgaggcccugaacaacagauuccagaucaagggcguggagcugaagagcggcuacaaggacuggauccuguggaucagcuucgccaucagcugcuuccugcugugcguggugcugcugggcuucaucaugugggccugccagaagggcaacaucagaugcaacaucugcaucuga

SEQ ID NO: 160501 - RNA, 1701 nt, Artificial Sequence
  derived and/or modified CDS sequence (opt4) from hemagglutinin__InfluenzaA__ABB79799
augaagaccaucaucgcccugagcuacaucuucugccugguguucgcccagaagcugcccggcaacgacaacagcaccgccacccugugccugggccaccacgccgugcccaacggcacccuggugaagaccaucaccaacgaccagaucgaggugaccaacgccaccgagcuggugcagagcagcagcaccggcagaaucugcgacagcccccacagaauccuggacggcaagaacugcacccugaucgacgcccugcugggcgacccccacugcgacggcuuccagaacgagaagugggaccuguucguggagagaagcaaggccuucagcaacugcuaccccuacgacgugcccgacuacgccagccugagaagccugguggccagcagcggcacccuggaguucaucaacgagggcuucaacuggaccggcgugacccagagcggcggcagcuacgccugcaagagaggcagcgugaacagcuucuucagcagacugaacuggcuguacgagagcgagagcaaguaccccgugcugaacgugaccaugcccaacaacggcaaguucgacaagcuguacaucuggggcgugcaccaccccagcaccgacaaggagcagaccaaccuguacgugagagccagcggcaaggugaccgugagcaccaagagaagccagcagaccgugauccccaacaucggcagcagacccugggugagaggccugagcagcagaaucagcaucuacuggaccaucgugaagcccggcgacauccugcugaucaacagcaccggcaaccugaucgcccccagaggcuacuucaagaucagaaccggcaagagcagcaucaugagaagcgacgcccccaucggcaccugcagcagcgagugcaucacccccaacggcagcauccccaacgacaagcccuuccagaacgugaacaagaucaccuacggcgccugccccagauacgugaagcagaacacccugaagcuggccaccggcaugagaaacgugcccgagaagcagaccagaggcaucuucggcgccaucgccggcuucaucgagaacggcugggagggcaugguggacggcugguacggcuucagacaccagaacagcgagggcaccggccaggccgccgaccugaagagcacccaggccgccaucgaccagaucaacggcaagcugaacagacugaucgagaagaccaacgagaaguuccaccagaucgagaaggaguucagcgagguggagggcagaauccaggaccuggagaaguacguggaggacaccaagaucgaccuguggagcuacaacgccgagcugcugguggcccuggagaaccagcacaccaucgaccugaccgacagcgagaugaacaagcuguucgagaagaccagaaagcagcugagagagaacgccgaggacaugggcaacggcugcuucaagaucuaccacaagugcgacaacgccugcaucggcagcaucagaaacggcaccuacgaccacgacguguacagagacgaggcccugaacaacagauuccagaucaagggcguggagcugaagagcggcuacaaggacuggauccuguggaucagcuucgccaucagcugcuuccugcugugcguggugcugcugggcuucaucaugugggccugccagaagggcaacaucagaugcaacaucugcaucuga

SEQ ID NO: 160502 - RNA, 1701 nt, Artificial Sequence
  derived and/or modified CDS sequence (opt4) from hemagglutinin__InfluenzaA__ABB79810
augaagaccaucaucgcccugagcuacauccugugccugguguucgcccagaagcugcccggcaacgacaacagcaccgccacccugugccugggccaccacgccgugcccaacggcacccuggugaagaccaucaccaacgaccagaucgaggugaccaacgccaccgagcuggugcagagcagcagcaccggcagacugugcgacagcccccacagaauccuggacggcaagaacugcacccugaucgacgcccugcugggcgacccccacugcgacggcuuccagaacaaggagugggaccuguucguggagagaagcaaggccuacagcaacugcuaccccuacgacgugcccgacuacgccagccugagaagccugguggccagcagcggcacccuggaguucaucaacgaggacuucaacuggaccggcguggcccaggacggcggcagcuacgccugcagaagaggcagcgugaacagcuucuucagcagacugaacuggcugcacaagcuggaguacaaguaccccgcccugaacgugaccaugcccaacaacggcaaguucgacaagcuguacaucuggggcgugcaccaccccagcaccgacagcgaccagaccagccuguacgugagagccagcggcagagugaccgugagcaccaagagaagccagcagaccgugauccccaacaucggcagcagacccugggugagaggccagagcagcagaaucagcaucuacuggaccaucgugaagcccggcgacauccugcugaucgacagcaccggcaaccugaucgcccccagaggcuacuucaagaucagaaacggcaagagcagcaucaugagaagcgacgcccccaucggcaacugcagcagcgagugcaucacccccaacggcagcauccccaacgacaagcccuuccagaacgugaacagaaucaccuacggcgccugccccagauacgugaagcagcacacccugaagcuggccaccggcaugagaaacgugcccgagaagcagaccagaggcaucuucggcgccaucgccggcuucaucgagaacggcugggagggcaugguggacggcugguacggcuucagacaccagaacagcgagggcaccggccaggccgccgaccugaagagcacccaggccgccaucgaccagaucaacggcaagcugaacagacugaucgagaagaccaacgagaaguuccaccagaucgagaaggaguucagcgagguggagggcagaauccaggaccuggagaaguacguggaggacaccaagaucgaccuguggagcuacaacgccgagcugcugguggcccuggagaaccagcacaccaucgaccugaccgacagcgagaugaacaagcuguucgagagaaccagaaagcagcugagagagaacgccgaggacaugggcaacggcugcuucaagaucuaccacaagugcgacaacgccugcaucggcagcaucagaaacggcaccuacgaccacgacguguacagagacgaggcccugaacaacagauuccagaucaagggcguggagcugaagagcggcuacaaggacuggauccuguggaucagcuucgccaucagcugcuuccugcugugcguggugcugcugggcuucaucaugugggccugccagaagggcaacaucagaugcaacaucugcaucuga

SEQ ID NO: 160503 - RNA, 1701 nt, Artificial Sequence
  derived and/or modified CDS sequence (opt4) from hemagglutinin__InfluenzaA__ABB79957
augaagaccaucaucgcccugagcuacauccugugccugguguucgcccagaagcugcccggcaacgacaacagcaccgccacccugugccugggccaccacgccgugcccaacggcacccuggugaagaccaucaccaacgaccagaucgaggugaccaacgccaccgagcuggugcagagcagcagcaccggcagacugugcgacagcccccacagaauccuggacggcaagaacugcacccugaucgacgcccugcugggcgacccccacugcgacggcuuccagaacaaggagugggaccuguucguggagagaagcaaggccuacagcaacugcuaccccuacgacgugcccgacuacgccagccugagaagccugguggccagcagcggcacccuggaguucaucaacgaggacuucaacuggaccggcguggcccaggacggcggcagcuacgccugcagaagaggcagcgugaacagcuucuucagcagacugaacuggcugcacaagcuggaguacaaguaccccgcccugaacgugaccaugcccaacaacggcaaguucgacaagcuguacaucuggggcgugcaccaccccagcaccgacagcgaccagaccagccuguacgugagagccagcggcagagugaccgugagcaccaagagaagccagcagaccgugauccccaacaucggcagcagacccugggugagaggccagagcagcagaaucggcaucuacuggaccaucgugaagcccggcgacauccugcugaucaacagcaccggcaaccugaucgcccccagaggcuacuucaagaucagaaacggcaagagcagcaucaugagaagcgacgcccccaucggcaacugcagcagcgagugcaucacccccaacggcagcauccccaacgacaagcccuuccagaacgugaacagaaucaccuacggcgccugccccagauacgugaagcagcacacccugaagcuggccaccggcaugagaaacgugcccgagaagcagaccagaggcaucuucggcgccaucgccggcuucaucgagaacggcugggagggcaugguggacggcugguacggcuucagacaccagaacagcgagggcaccggccaggccgccgaccugaagagcacccaggccgccaucgaccagaucaacggcaagcugaacagacugaucgagaagaccaacgagaaguuccaccagaucgagaaggaguucagcgagguggagggcagaauccaggaccuggagaaguacguggaggacaccaagaucgaccuguggagcuacaacgccgagcugcugguggcccuggagaaccagcacaccaucgaccugaccgacagcgagaugaacaagcuguucgagagaaccagaaagcagcugagagagaacgccgaggacaugggcaacggcugcuucaagaucuaccacaagugcgacaacgccugcaucggcagcaucagaaacggcaccuacgaccacgacguguacagagacgaggcccugaacaacagauuccagaucaagggcguggagcugaagagcggcuacaaggacuggauccuguggaucagcuucgccaucagcugcuuccugcugugcguggugcugcugggcuucaucaugugggccugccagaagggcaacaucagaugcaacaucugcaucuga

SEQ ID NO: 160504 - RNA, 1701 nt, Artificial Sequence
  derived and/or modified CDS sequence (opt4) from hemagglutinin__InfluenzaA__ABB79968
augaagaccaucaucgcccugagcuacauccugugccugguguucgcccagaagcugcccggcaacgacaacagcaccgccacccugugccugggccaccacgccgugcccaacggcacccuggugaagaccaucaccaacgaccagaucgaggugaccaacgccaccgagcuggugcagagcagcagcaccggcagacugugcgacagcccccacagaauccuggacggcaagaacugcacccugaucgacgcccugcugggcgacccccacugcgacggcuuccagaacaaggagugggaccuguucguggagagaagcaaggccuacagcaacugcuaccccuacgacgugcccgacuacgccagccugagaagccugguggccagcagcggcacccuggaguucaucaacgaggacuucaacuggaccggcguggcccaggacggcggcagcuacgccugcagaagaggcagcgugaacagcuucuucagcagacugaacuggcugcacaagcuggaguacaaguaccccgcccugaacgugaccaugcccaacaacggcaaguucgacaagcuguacaucuggggcgugcaccaccccagcaccgacagcgaccagaccagccuguacgugagagccagcggcagagugaccgugagcaccaagagaagccagcagaccgugauccccaacaucggcagcagacccugggugagaggccagagcagcagaaucagcaucuacuggaccaucgugaagcccggcgacauccugcugaucaacagcaccggcaaccugaucgcccccagaggcuacuucaagaucagaaacggcaagagcagcaucaugagaagcgacgcccccaucggcaacugcagcagcgagugcaucacccccaacggcagcauccccaacgacaagcccuuccagaacgugaacagaaucaccuacggcgccugccccagauacgugaagcagcacacccugaagcuggccaccggcaugagaaacgugcccgagaagcagaccagaggcaucuucggcgccaucgccggcuucaucgagaacggcugggagggcaugguggacggcugguacggcuucagacaccagaacagcgagggcaccggccaggccgccgaccugaagagcacccaggccgccaucgaccagaucaacggcaagcugaacagacugaucgagaagaccaacgagaaguuccaccagaucgagaaggaguucagcgagguggagggcagaauccaggaccuggagaaguacguggaggacaccaagaucgaccuguggagcuacaacgccgagcugcugguggcccuggagaaccagcacaccaucgaccugaccgacagcgagaugaacaagcuguucgagagaaccagaaagcagcugagagagaacgccgaggacaugggcaacggcugcuucaagaucuaccacaagugcgacaacgccugcaucggcagcaucagaaacggcaccuacgaccacgacguguacagagacgaggcccugaacaacagauuccagaucaagggcguggagcugaagagcggcuacaaggacuggauccuguggaucagcuucgccaucagcugcuuccugcugugcguggugcugcugggcuucaucaugugggccugccagaagggcaacaucagaugcaacaucugcaucuga

SEQ ID NO: 160505 - RNA, 1698 nt, Artificial Sequence
  derived and/or modified CDS sequence (opt4) from hemagglutinin__InfluenzaA__ABB79979
augaaggccaagcugcuggugcugcugugcaccuucaccgccaccuacgccgacaccaucugcaucggcuaccacgccaacaacagcaccgacaccguggacaccgugcuggagaagaacgugaccgugacccacagcgugaaccugcuggaggacagccacaacggcaagcugugccugcugaagggcaucgccccccugcagcugggcaacugcagcguggccggcuggauccugggcaaccccgagugcgagcugcugaucagcaaggagagcuggagcuacaucguggagacccccaaccccgagaacggcaccugcuaccccggcuacuucgccgacuacgaggagcugagagagcagcugagcagcgugagcagcuucgagagauucgagaucuuccccaagggcagcagcuggcccaaccacaccgugaccggcgugagcgccagcugcagccacaacggcaagagcagcuucuacagaaaccugcuguggcugaccggcaagaacggccuguaccccaaccugagcaugagcuacgugaacaacaaggagaaggaggugcuggugcuguggggcgugcaccacccccccaacaucggcgaccagagagcccuguaccacaccgagaacgccuacgugagcguggugagcagccacuacagcagaagauucacccccgagaucgccaagagacccaaggugagagaccaggagggcagaaucaacuaccacuggacccugcuggagcccggcgacaccaucaucuucgaggccaacggcaaccugaucgcccccugguacgccuucgcccugagcagaggcuucggcagcggcaucaucaccagcaacgcccccauggacgagugcgacgccaagugccagaccccccagggcgccaucaacagcagccugcccuuccagaacgugcaccccgugaccaucggcgagugccccaaguacgugagaagcgccaagcugagaauggugaccggccugagaaacauccccagcauccagagcagaggccuguucggcgccaucgccggcuucaucgagggcggcuggaccggcaugguggacggcugguacggcuaccaccaccagaacgagcagggcagcggcuacgccgccgaccagaagagcacccagaacgccaucaacggcaucaccaacaaggugaacagcgugaucgagaagaugaacacccaguucaccgccgugggcaaggaguucaacaagcuggagagaagaauggagaaccugaacaagaagguggacgacggcuuccuggacaucuggaccuacaacgccgagcugcuggugcugcuggagaacgagagaacccuggacuuccacgacagcaacgugaagaaccuguacgagaaggugaagagccagcugaagaacaacgccaaggagaucggcaacggcugcuucgaguucuaccacaagugcaacaacgagugcauggagagcgugaagaacggcaccuacgacuaccccaaguacagcgaggagagcaagcugaacagagagaagaucgacggcgugaagcuggagagcaugggcguguaccagauccuggccaucuacagcaccguggccagcagccuggugcugcuggugagccugggcgccaucagcuucuggaugugcagcaacggcagccugcagugcagaaucugcaucuga

SEQ ID NO: 160506 - RNA, 1698 nt, Artificial Sequence
  derived and/or modified CDS sequence (opt4) from hemagglutinin__InfluenzaA__ABB79990
augaaggccaagcugcuggugcugcugugcaccuucaccgccaccuacgccgacaccaucugcaucggcuaccacgccaacaacagcaccgacaccguggacaccgugcuggagaagaacgugaccgugacccacagcgugaaccugcuggaggacagccacaacggcaagcugugccugcugaagggcaucgccccccugcagcugggcaacugcagcguggccggcuggauccugggcaaccccgagugcgagcugcugaucagcaaggagagcuggagcuacaucguggagacccccaaccccgagaacggcaccugcuaccccggcuacuucgccgacuacgaggagcugagagagcagcugagcagcgugagcagcuucgagagauucgagaucuuccccaagggcagcagcuggcccaaccacaccgugaccggcgugagcgccagcugcagccacaacggcaagagcagcuucuacagaaaccugcuguggcugaccggcaagaacggccuguaccccaaccugagcaugagcuacgugaacaacaaggagaaggaggugcuggugcuguggggcgugcaccacccccccaacaucggcgaccagaaggcccuguaccacaccgagaacgccuacgugagcguggugagcagccacuacagcagaagauucacccccgagaucgccaagagacccaaggugagagaccaggagggcagaaucaacuacuacuggacccugcuggagcccggcgacaccaucaucuucgaggccaacggcaaccugaucgcccccugguacgccuucgcccugagcagaggcuucggcagcggcaucaucaccagcaacgcccccauggacgagugcgacgccaagugccagaccccccagggcgccaucaacagcagccugcccuuccagaacgugcaccccgugaccaucggcgagugccccaaguacgugagaagcgccaagcugagaauggugaccggccugagaaacauccccagcauccagagcagaggccuguucggcgccaucgccggcuucaucgagggcggcuggaccggcaugguggacggcugguacggcuaccaccaccagaacgagcagggcagcggcuacgccgccgaccagaagagcacccagaacgccaucaacggcaucaccaacaaggugaacagcgugaucgagaagaugaacacccaguucaccgccgugggcaaggaguucaacaagcuggagagaagaauggagaaccugaacaagaagguggacgacggcuuccuggacaucuggaccuacaacgccgagcugcuggugcugcuggagaacgagagaacccuggacuuccacgacagcaacgugaagaaccuguacgagaaggugaagagccagcugaagaacaacgccaaggagaucggcaacggcugcuucgaguucuaccacaagugcaacaacgagugcauggagagcgugaagaacggcaccuacgacuaccccaaguacagcgaggagagcaagcugaacagagagaagaucgacggcgugaagcuggagagcaugggcguguaccagauccuggccaucuacagcaccguggccagcagccuggugcugcuggugagccugggcgccaucagcuucuggaugugcagcaacggcagccugcagugcagaaucugcaucuga

SEQ ID NO: 160507 - RNA, 1701 nt, Artificial Sequence
  derived and/or modified CDS sequence (opt4) from hemagglutinin__InfluenzaA__ABB80001
augaagaccaucaucgcccugagcuacacccugugccugguguucgcccagaagcugcccggcaacgacaacagcaccgccacccugugccugggccaccacgccgugcccaacggcaccaucgugaagaccaucaccaacgaccagaucgaggugaccaacgccaccgagcuggugcagagcagcagcaccggcggcaucugcgacagcccccaccagauccuggacggcgagaacugcacccugaucgacgcccugcugggcgacccccagugcgacggcuuccagaacaagaagugggaccuguucguggagagaagcaaggccuacagcaacugcuaccccuacgacgugcccgacuacgccagccugagaagccugguggccagcagcggcacccuggaguucaacaacgagagcuucaacuggaccggcgugacccagaacggcaccagcagcgccugcaagagaagaagcaacaacagcuucuucagcagacugaacuggcugacccaccugaaguucaaguaccccgcccugaacgugaccaugcccaacaacgagaaguucgacaagcuguacaucuggggcgugcaccaccccggcaccgacaacgaccagaucagccuguacgcccaggccagcggcagaaucaccgugagcaccaagagaagccagcagaccgugauccccaacaucggcagcagacccagagugagagacauccccagcagaaucagcaucuacuggaccaucgugaagcccggcgacauccugcugaucaacagcaccggcaaccugaucgcccccagaggcuacuucaagaucagaagcggcaagagcagcaucaugagaagcgacgcccccaucggcaagugcaacagcgagugcaucacccccaacggcagcauccccaacgacaagcccuuccagaacgugaacagaaucaccuacggcgccugccccagauacgugaagcagagcacccugaagcuggccaccggcaugagaaacgugcccgagaagcagaccagaggcaucuucggcgccaucgccggcuucaucgagaacggcugggagggcaugguggacggcugguacggcuucagacaccagaacagcgagggcaucggccaggccgccgaccugaagagcacccaggccgccaucaaccagaucaacggcaagcugaacagacugaucggcaagaccaacgagaaguuccaccagaucgagaaggaguucagcgagguggagggcagaauccaggaccuggagaaguacguggaggacaccaagaucgaccuguggagcuacaacgccgagcugcugguggcccuggagaaccagcacaccaucgaccugaccgacagcgagaugaacaagcuguucgagagaaccaagaagcagcugagagagaacgccgaggacaugggcaacggcugcuucaagaucuaccacaagugcgacaacgccugcaucggcagcaucagaaacggcaccuacgaccacgacguguacagagacgaggcccugaacaacagauuccagaucaagggcguggagcugaagagcggcuacaaggacuggauccuguggaucagcuucgccaucagcugcuuccugcugugcguggcccugcugggcuucaucaugugggccugccagaagggcaacaucagaugcaacaucugcaucuga

SEQ ID NO: 160508 - RNA, 1701 nt, Artificial Sequence; identical to SEQ ID NO: 160303
  derived and/or modified CDS sequence (opt4) from hemagglutinin__InfluenzaA__ABB80012

SEQ ID NO: 160509 - RNA, 1701 nt, Artificial Sequence
  derived and/or modified CDS sequence (opt4) from hemagglutinin__InfluenzaA__ABB80023
augaagaccaucaucgcccugagcuacaucuucuaccuggcccugggccaggaccugcccggcaacgacaacagcaaggccacccugugccugggccaccacgccgugcccaacggcacccuggugaagaccaucaccaacgaccagaccgaggugaccaacgccaccgagcuggugcagagcagcagcaccggcaagaucugcaacaacccccacagaauccuggacggcauggacugcacccugaucgacgcccugcugggcgacccccacugcgacguguuccagaacgagaccugggaccuguucguggagagaagcaaggccuucagcaacugcuaccccuacgacgugcccgacuacgccagccugagaagccugguggccagcagcggcacccuggaguucaucaccgagggcuucaccuggaccgaggugacccagaacggcggcagcaacgccugcaagagaggccccgacagcggcuucuucagcagacugaacuggcugaccaagagcggcagaaccuaccccgugcugaacgugaccaugcccaacaacgacaacuucgacaagcuguacaucuggggcgugcaccaccccagcaccgaccaggagcagaccaaccuguacgugcagaccagcggcagagugaccgugagcaccagaagaagccagcagaccaucauccccaacaucggcagcagacccugggugagaggccugagcagcagaaucagcaucuacuggaccaucgugaagcccggcgacgugcuggugaucaacagcaacggcaaccugaucgcccccagaggcuacuucaagaugagaaccggcaagagcagcaucaugagaagcgacgcccccaucgacaccugcaucagcgagugcaucacccccaacggcagcauccccaacgacaagcccuuccagaacgugaacaagaucaccuacggcgccugccccaaguacgugaagcaggacacccugaagcuggccaccggcaugagaaacgugcccgagaagcagaccagaggccuguucggcgccaucgccggcuucaucgagaacggcugggagggcaugaucgacggcugguacggcuucagacaccagaacagcgagggcaccggccaggccgccgaccugaagagcacccaggccgccaucgaccagaucaacggcaagcugaacagaaucaucgagaagaccaacgagaaguuccaccagaucgagaaggaguucagcgagguggagggcagaauccaggaccuggagaaguacguggaggacaccaagaucgaccuguggagcuacaacgccgagcugcugguggcccuggagaaccagcacaccaucgaccugaccgacagcgagaugaacaagcuguucgagaagaccagaagacagcugagagagaacgccgaggacaugggcaacggcugcuucaagaucuaccacaagugcgacaacgccugcaucgagagcaucagaaacggcaccuacgaccacgacguguacagagacgaggcccugaacaacagauuccagaucaagggcguggagcugaagagcggcuacaaggacuggauccuguggaucagcuucgccaucagcugcuuccugcugugcguggugcugcugggcuucaucaugugggccugccagagaggcaacaucagaugcaacaucugcaucuga

SEQ ID NO: 160510 - RNA, 1701 nt, Artificial Sequence
  derived and/or modified CDS sequence (opt4) from hemagglutinin__InfluenzaA__ABB80034
augaagaccaucaucgcccugagcuacaucuucugccuggugcugggccaggaccugcccggcaacgacaacagcaccgccacccugugccugggccaccacgccgugcccaacggcacccuggugaagaccaucaccgacgaccagaucgaggugaccaacgccaccgagcuggugcagagcagcagcaccggcaagaucugcaacaacccccacagaauccuggacggccuggacugcacccugaucgacgcccugcugggcgacccccacugcgacguguuccagaacgagaccugggaccuguucguggagagaagcaaggccuucagcaacugcuaccccuacgacgugcccgacuacgccagccugagaagccugguggccagcagcggcacccuggaguucaucaccgagggcuucaccuggaccggcgugacccagaacggcggcagcaacgccugcaagagaggccccggcagcggcuucuucagcagacugaacuggcugaccaagagcggcagcaccuaccccgugcugaacgugaccaugcccaacaacgacaacuucgacaagcuguacaucuggggcgugcaccaccccagcaccaaccaggagcagaccagccuguacgugcaggccagcggcagagugaccgugagcaccagaagaagccagcagaccaucauccccaacaucggcagcagacccugggugagaggccugagcagcagaaucagcaucuacuggaccaucgugaagcccggcgacgugcuggugaucaacagcaacggcaaccugaucgcccccagaggcuacuucaagaugagaaccggcaagagcagcaucaugagaagcgacgccaccaucgacaccugcaucagcgagugcaucacccccaacggcagcauccccaacgacaagcccuuccagaacgugaacaagaucaccuacggcgccugccccaaguacgugaagcagaacacccugaagcuggccaccggcaugagaaacgugcccgagaagcagaccagaggccuguucggcgccaucgccggcuucaucgagaacggcugggagggcaugaucgacggcugguacggcuucagacaccagaacagcgagggcaccggccaggccgccgaccugaagagcacccaggccgccaucgaccagaucaacggcaagcugaacagagugaucgagaagaccaacgagaaguuccaccagaucgagaaggaguucagcgagguggagggcagaauccaggaccuggagaaguacguggaggacaccaagaucgaccuguggagcuacaacgccgagcugcugguggcccuggagaaccagcacaccaucgaccugaccgacagcgagaugaacaagcuguucgagaagaccagaagacagcugagagagaacgccgaggacaugggcaacggcugcuucaagaucuaccacaagugcgacaacgccugcaucgagagcaucagaaacggcaccuacgaccacgacguguacagagacgaggcccugaacaacagauuccagaucaagggcguggagcugaagagcggcuacaaggacuggauccuguggaucagcuucgccaucagcugcuuccugcugugcguggugcugcugggcuucaucaugugggccugccagagaggcaacaucagaugcaacaucugcaucuga

SEQ ID NO: 160511 - RNA, 1698 nt, Artificial Sequence; identical to SEQ ID NO: 160424
  derived and/or modified CDS sequence (opt4) from hemagglutinin__InfluenzaA__ABB80045

SEQ ID NO: 160512 - RNA, 1701 nt, Artificial Sequence
  derived and/or modified CDS sequence (opt4) from hemagglutinin__InfluenzaA__ABB80081
augaagaccaucaucgcccugagcuacaucagcugccugguguucgcccagaagcugcccggcaacgacaacagcaccgccacccugugccugggccaccacgccgugcccaacggcacccuggugaagaccaucaccaacgaccagaucgaggugaccaacgccaccgagcuggugcagagcagcagcaccggcagaaucugcgacagcccccacagaauccuggacggcgagaacugcacccugaucgacgcccugcugggcgacccccacugcgacggcuuccagaacaaggagugggaccuguucguggagagaagcaaggccuacagcaacugcuaccccuacgacgugcccgacuacgccagccugagaagccugguggccagcagcggcacccuggaguucaacaacgagagcuucaacuggaccggcguggcccagaacggcaccagcuacgccugcaagagaagaagcaucaagagcuucuucagcagacugaacuggcugcaccagcugaaguacaaguaccccgcccugaacgugaccaugcccaacaacgacaaguucgacaagcuguacaucuggggcgugcaccaccccagcaccgacagcgaccagaccagccuguacgcccaggccagcggcagagugaccgugagcaccaagagaagccagcagaccgugauccccaacaucggcagcagacccugggugagaggcgugagcagcagaaucagcaucuacuggaccaucgugaagcccggcgacauccugcugaucaacagcaccggcaaccugaucgcccccagaggcuacuucaagaucagaagcggcaagagcagcaucaugagaagcgacgcccccaucggcaagugcaacagcgagugcaucacccccaacggcagcauccccaacgacaagcccuuccagaacgugaacagaaucaccuacggcgccugccccagauacgugaagcagaacacccugaagcuggccaccggcaugagaaacgugcccgagaagcagaccagaggcaucuucggcgccaucgccggcuucaucgagaacggcugggagggcaugguggacggcugguacggcuucagacaccagaacagcgagggcaccggccaggccgccgaccugaagagcacccaggccgccaucaaccagaucaacggcaagcugaacagacugaucgagaagaccaacgagaaguuccaccagaucgagaaggaguucagcgagguggagggcagaauccaggaccuggagaaguacguggaggacaccaagaucgaccuguggagcuacaacgccgagcugcugguggcccuggagaaccagcacaccaucgaccugaccgacagcgagaugaacaagcuguucgagagaaccagaaagcagcugagagagaacgccgaggacaugggcaacggcugcuucaagaucuaccacaagugcgacaacgccugcaucggcagcaucagaaacggcaccuacgaccacgacguguacagagacgaggcccugaacaacagauuccagaucaagggcguggagcugaagagcggcuacaaggacuggauccuguggaucagcuucgccaucagcugcuuccugcugugcguggugcugcugggcuucaucaugugggccugccagaagggcaacaucagaugcaacaucugcaucuga

SEQ ID NO: 160513 - RNA, 1701 nt, Artificial Sequence
  derived and/or modified CDS sequence (opt4) from hemagglutinin__InfluenzaA__ABB80092
augaagaccaucaucgcccugagcuacaucagcugccugguguucgcccagaagcugcccggcaacgacaacagcaccgccacccugugccugggccaccacgccgugcccaacggcacccuggugaagaccaucaccaacgaccagaucgaggugaccaacgccaccgagcuggugcagagcagcagcaccggcagaaucugcgacagcccccacagaauccuggacggcgagaacugcacccugaucgacgcccugcugggcgacccccacugcgacggcuuccagaacaaggagugggaccuguucguggagagaagcaaggccuacagcaacugcuaccccuacgacgugcccgacuacgccagccugagaagccugguggccagcagcggcacccuggaguucaacaacgagagcuucaacuggaccggcguggcccagaacggcaccagcuacgccugcaagagaagaagcaucaagagcuucuucagcagacugaacuggcugcaccagcugaaguacaaguaccccgcccugaacgugaccaugcccaacaacgacaaguucgacaagcuguacaucuggggcgugcaccaccccagcaccgacagcgaccagaccagccuguacgcccaggccagcggcagagugaccgugagcaccaagagaagccagcagaccgugauccccaacaucggcagcagacccugggugagaggcgugagcagcagaaucagcaucuacuggacccuggugaagcccggcgacauccugcugaucaacagcaccggcaaccugaucgcccccagaggcuacuucaagaucagaagcggcaagagcagcaucaugagaagcgacgcccccaucggcaagugcaacagcgagugcaucacccccaacggcagcauccccaacgacaagcccuuccagaacgugaacagaaucaccuacggcgccugccccagauacgugaagcagaacacccugaagcuggccaccggcaugagaaacgugcccgagaagcagaccagaggcaucuucggcgccaucgccggcuucaucgagaacggcugggagggcaugguggacggcugguacggcuucagacaccagaacagcgagggcaccggccaggccgccgaccugaagagcacccaggccgccaucaaccagaucaacggcaagcugaacagacugaucgagaagaccaacgagaaguuccaccagaucgagaaggaguucagcgagguggagggcagaauccaggaccuggagaaguacguggaggacaccaagaucgaccuguggagcuacaacgccgagcugcugguggcccuggagaaccagcacaccaucgaccugaccgacagcgagaugaacaagcuguucgagagaaccagaaagcagcugagagagaacgccgaggacaugggcaacggcugcuucaagaucuaccacaagugcgacaacgccugcaucggcagcaucagaaacggcaccuacgaccacgacguguacagagacgaggcccugaacaacagauuccagaucaagggcguggagcugaagagcggcuacaaggacuggauccuguggaucagcuucgccaucagcugcuuccugcugugcguggugcugcugggcuucaucaugugggccugccagaagggcaacaucagaugcaacaucugcaucuga

SEQ ID NO: 160514 - RNA, 1701 nt, Artificial Sequence; identical to SEQ ID NO: 160315
  derived and/or modified CDS sequence (opt4) from hemagglutinin__InfluenzaA__ABB80137

SEQ ID NO: 160515 - RNA, 1701 nt, Artificial Sequence; identical to SEQ ID NO: 160512
  derived and/or modified CDS sequence (opt4) from hemagglutinin__InfluenzaA__ABB80159

SEQ ID NO: 160516 - RNA, 1701 nt, Artificial Sequence; identical to SEQ ID NO: 160083
  derived and/or modified CDS sequence (opt4) from hemagglutinin__InfluenzaA__ABB80185

SEQ ID NO: 160517 - RNA, 1701 nt, Artificial Sequence
  derived and/or modified CDS sequence (opt4) from hemagglutinin__InfluenzaA__ABB80207
augaagaccaucaucgcccugagcuacauccugugccugguguucgcccagaagcugcccggcaacgacaacagcaccgccacccugugccugggccaccacgccgugcccaacggcacccuggugaagaccaucaccaacgaccagaucgaggugaccaacgccaccgagcuggugcagagcagcagcaccggcagaaucugcgacagcccccacagaauccuggacggcgagaacugcacccugaucgacgcccugcugggcgacccccacugcgacgacuuccagaacaaggagugggaccuguucguggagagaagcaaggccuacagcaacugcuaccccuacgacgugcccgacuacgccagccugagaagccugguggccagcagcggcacccuggaguucaacaacgagagcuucaacuggaccggcguggcccagaacggcaccagcuacgccugcaagagaagaagcaucaagagcuucuucagcagacugaacuggcugcaccagcugaaguacaaguaccccgcccugaacgugaccaugcccaacaacgacaaguucgacaagcuguacaucuggggcgugcaccaccccagcaccgacagcgaccagaccagccuguacgcccaggccagcggcagagugaccgugagcaccaagagaagccagcagaccgugauccccaacaucggcagcagacccugggugagaggcgugagcagcagaaucagcaucuacuggaccaucgugaagcccggcgacauccugcugaucaacagcaccggcaaccugaucgcccccagaggcuacuucaagaucagaagcggcaagagcagcaucaugagaagcgacgcccccaucggcaagugcaacagcgagugcaucacccccaacggcagcauccccaacgacaagcccuuccagaacgugaacagaaucaccuacggcgccugccccagauacgugaagcagaacacccugaagcuggccaccggcaugagaaacgugcccgagaagcagaccagaggcaucuucggcgccaucgccggcuucaucgagaacggcugggagggcaugguggacggcugguacggcuucagacaccagaacagcgagggcaccggccaggccgccgaccugaagagcacccaggccgccaucaaccagaucaacggcaagcugaacagacugaucgagaagaccaacgagaaguuccaccagaucgagaaggaguucagcgagguggagggcagaauccaggaccuggagaaguacguggaggacaccaagaucgaccuguggagcuacaacgccgagcugcugguggcccuggagaaccagcacaccaucgaccugaccgacagcgagaugaacaagcuguucgagagaaccagaaagcagcugagagagaacgccgaggacaugggcaacggcugcuucaagaucuaccacaagugcgacaacgccugcaucggcagcaucagaaacggcaccuacgaccacgacguguacagagacgaggcccugaacaacagauuccagaucaagggcguggagcugaagagcggcuacaaggacuggauccuguggaucagcuucgccaugagcugcuuccugcugugcguggugcugcugggcuucaucaugugggccugccagaagggcaacaucagaugcaacaucugcaucuga

SEQ ID NO: 160518 - RNA, 1701 nt, Artificial Sequence
  derived and/or modified CDS sequence (opt4) from hemagglutinin__InfluenzaA__ABB80229
augaagaccaucaucgcccugagcuacauccugugccugguguucgcccagaagcugcccggcaacgacaacagcaccgccacccugugccugggccaccacgccgugcccaacggcacccuggugaagaccaucaccaacgaccagaucgaggugaccaacgccaccgagcuggugcagagcagcagcaccggcagaaucugcgacagcccccacagaauccuggacggcgagaacugcacccugaucgacgcccugcugggcgacccccacugcgacggcuuccagaacaaggagugggaccuguucguggagagaagcaaggccuacagcaacugcuaccccuacgacgugcccgacuacgccagccugagaagccugguggccagcagcggcacccuggaguucaacaacgagagcuucaacuggaccggcguggcccagaacggcaccagcuacgccugcaagagaagaagcaucaagagcuucuucagcagacugaacuggcugcaccagcugaaguacaaguaccccgcccugaacgugaccaugcccaacaacgacaaguucgacaagcuguacaucuggggcgugcaccaccccagcaccgacagcgaccagaccagccuguacgcccaggccagcggcagagugaccgugagcaccaagagaagccagcagaccgugauccccaacaucggcagcagacccugggugagaggcgugagcagcagaaucagcaucuacuggaccaucgugaagcccggcgacauccugcugaucaacagcaccggcaaccugaucgcccccagaggcuacuucaagaucagaagcggcaagagcagcaucaugagaagcgacgcccccaucggcaagugcaacagcgagugcaucacccccaacggcagcauccccaacgacaagcccuuccagaacgugaacagaaucaccuacggcgccugccccagauacgugaagcagaacacccugaagcuggccaccggcaugagaaacgugcccgagaagcagaccagaggcaucuucggcgccaucgccggcuucaucgagaacggcugggagggcaugguggacggcugguacggcuucagacaccagaacagcgagggcaccggccaggccgccgaccugaagagcacccaggccgccaucaaccagaucaacggcaagcugaacagacugaucgagaagaccaacgagaaguuccaccagaucgagaaggaguucagcgagguggagggcagaauccaggaccuggagaaguacguggaggacaccaagaucgaccuguggagcuacaacgccgagcugcugguggcccuggagaaccagcacaccaucgaccugaccgacagcgagaugaacaagcuguucgagagaaccagaaagcagcugagagagaacgccgaggacaugggcaacggcugcuucaagaucuaccacaagugcgacaacgccugcaucggcagcaucagaaacggcaccuacgaccacgacguguacagagacgaggcccugaacaacagauuccagaucaagggcguggagcugaagagcggcuacaaggacuggauccuguggaucagcuucgccaugagcugcuuccugcugugcguggugcugcugggcuucaucaugugggccugccagaagggcaacaucagaugcaacaucugcaucuga

SEQ ID NO: 160519 - RNA, 1701 nt, Artificial Sequence; identical to SEQ ID NO: 160512
  derived and/or modified CDS sequence (opt4) from hemagglutinin__InfluenzaA__ABB80240

SEQ ID NO: 160520 - RNA, 1701 nt, Artificial Sequence
  derived and/or modified CDS sequence (opt4) from hemagglutinin__InfluenzaA__ABB80251
augaagaccaucaucgcccugagcuacauccugugccugguguucgcccagaagcugcccggcaacgacaacagcaccgccacccugugccugggccaccacgccgugcccaacggcacccuggugaagaccaucaccaacgaccagaucgaggugaccaacgccaccgagcuggugcagagcagcagcaccggcagaaucugcgacagcccccacagaauccuggacggcgagaacugcacccugaucgacgcccugcugggcgacccccacugcgacggcuuccagaacaaggagugggaccuguucguggagagaagcaaggccuacagcaacugcuaccccuacgacgugcccgacuacgccagccugagaagccugguggccagcagcggcacccuggaguucaacaacgagagcuucaacuggaccggcguggcccagaacggcaccagcagcgccugcaagagaagaagcaucaagagcuucuucagcagacugaacuggcugcaccagcugaaguacaaguaccccgcccugaacgugaccaugcccaacaacgacaaguucgacaagcuguacaucuggggcgugcaccaccccagcaccgacagcgaccagaccagccuguacgcccaggccagcggcagagugaccgugagcaccaagagaagccagcagaccgugauccccaacaucggcagcagacccugggugagaggcgugagcagcagaaucagcaucuacuggaccaucgugaagcccggcgacauccugcugaucaacagcaccggcaaccugaucgcccccagaggcuacuucaagaucagaagcggcaagagcagcaucaugagaagcgacgcccccaucggcaagugcaacagcgagugcaucacccccaacggcagcauccccaacgacaagcccuuccagaacgugaacagaaucaccuacggcgccugccccagauacgugaagcagaacacccugaagcuggccaccggcaugagaaacgugcccgagaagcagaccagaggcaucuucggcgccaucgccggcuucaucgagaacggcugggagggcaugguggacggcugguacggcuucagacaccagaacagcgagggcaccggccaggccgccgaccugaagagcacccaggccgccaucaaccagaucaacggcaagcugaacagacugaucgagaagaccaacgagaaguuccaccagaucgagaaggaguucagcgagguggagggcagaauccaggaccuggagaaguacguggaggacaccaagaucgaccuguggagcuacaacgccgagcugcugguggcccuggagaaccagcacaccaucgaccugaccgacagcgagaugaacaagcuguucgagagaaccagaaagcagcugagagagaacgccgaggacaugggcaacggcugcuucaagaucuaccacaagugcgacaacgccugcaucggcagcaucagaaacggcaccuacgaccacgacguguacagagacgaggcccugaacaacagauuccagaucaagggcguggagcugaagagcggcuacaaggacuggauccuguggaucagcuucgccaucagcugcuuccugcugugcguggugcugcugggccugaucaugugggccugccagaagggcaacaucagaugcaacaucugcaucuga

SEQ ID NO: 160521 - RNA, 1701 nt, Artificial Sequence
  derived and/or modified CDS sequence (opt4) from hemagglutinin__InfluenzaA__ABB80492
augaagaccaucaucgcccugagcuacauccugugccugguguucgcccagaagcugcccggcaacgacaacagcaccgccacccugugccugggccaccacgccgugcccaacggcacccuggugaagaccaucaccaacgaccagaucgaggugaccaacgccaccgagcuggugcagaacagcagcaccggcagaaucugcgacagcccccacagaauccuggacggcgagaacugcacccugaucgacgcccugcugggcgacccccacugcgacggcuuccagaacaaggagugggaccuguucguggagagaagcaaggccuacagcaacugcuaccccuacgacgugcccgacuacgccagccugagaagccugguggccagcagcggcacccuggaguucaacaacgagagcuucaacuggaccggcguggcccagaacggcaccagcuacgccugcaagagaagaagcaucaagagcuucuucagcagacugaacuggcugcaccagcugaaguacaaguaccccgcccugaacgugaccaugcccaacaacgacaaguucgacaagcuguacaucuggggcgugcaccaccccagcaccgacagcgaccagaccagccuguacgcccaggccagcggcagagugaccgugagcaccaagagaagccagcagaccgugauccccaacaucggcagcagacccugggugagaggcgugagcagcagaaucagcaucuacuggaccaucgugaagcccggcgacauccugcugaucaacagcaccggcaaccugaucgcccccagaggcuacuucaagaucagaagcggcaagagcagcaucaugagaagcgacgcccccaucggcaagugcaacagcgagugcaucacccccaacggcagcauccccaacgacaagcccuuccagaacgugaacagaaucaccuacggcgccugccccagauacgugaagcagaacacccugaagcuggccaccggcaugagaaacgugcccgagaagcagaccagaggcaucuucggcgccaucgccggcuucaucgagaacggcugggagggcaugguggacggcugguacggcuucagacaccagaacagcgagggcaccggccaggccgccgaccugaagagcacccaggccgccaucaaccagaucaacggcaagcugaacagacugaucgagaagaccaacgagaaguuccaccagaucgagaaggaguucagcgagguggagggcagaauccaggaccuggagaaguacguggaggacaccaagaucgaccuguggagcuacaacgccgagcugcugguggcccuggagaaccagcacaccaucgaccugaccgacagcgagaugaacaagcuguucgagagaaccagaaagcagcugagagagaacgccgaggacaugggcaacggcugcuucaagaucuaccacaagugcgacaacgccugcaucggcagcaucagaaacggcaccuacgaccacgacguguacagagacgaggcccugaacaacagauuccagaucaagggcguggagcugaagagcggcuacaaggacuggauccuguggaucagcuucgccaugagcugcuuccugcugugcguggugcugcugggcuucaucaugugggccugccagaagggcaacaucagaugcaacaucugcaucuga

SEQ ID NO: 160522 - RNA, 1701 nt, Artificial Sequence
  derived and/or modified CDS sequence (opt4) from hemagglutinin__InfluenzaA__ABB80503
augaagaccaucaucgcccugagcuacaucagcugccugguguucgcccagaagcugcccggcaacgacaacaacaccgccacccugugccugggccaccacgccgugcccaacggcacccuggugaagaccaucaccaacgaccagaucgaggugaccaacgccaccgagcuggugcagagcagcagcaccggcagaaucugcgacagcccccacagaauccuggacggcgagaacugcacccugaucgacgcccugcugggcgacccccacugcgacggcuuccagaacaaggagugggaccuguucguggagagaagcaaggccuacagcaacugcuaccccuacgacgugcccgacuacgccagccugagaagccugguggccagcagcggcacccuggaguucaacaacgagagcuucaacuggaccggcguggcccagaacggcaccagcuacgccugcaagagaagaagcaucaagagcuucuucagcagacugaacuggcugcaccagcugaaguacaaguaccccgcccugaacgugaccaugcccaacaacgacaaguucgacaagcuguacaucuggggcgugcaccaccccagcaccgacagcgaccagaccagccuguacgcccaggccagcggcagagugaccgugagcaccaagagaagccagcagaccgugauccccaacaucggcagcagacccugggugagaggcgugagcagcagaaucagcaucuacuggaccaucgugaagcccggcgacauccugcugaucaacagcaccggcaaccugaucgcccccagaggcuacuucaagaucagaagcggcaagagcagcaucaugagaagcgacgcccccaucggcaagugcaacagcgagugcaucacccccaacggcagcauccccaacgacaagcccuuccagaacgugaacagaaucaccuacggcgccugccccagauacgugaagcagaacacccugaagcuggccaccggcaugagaaacgugcccgagaagcagaccagaggcaucuucggcgccaucgccggcuucaucgagaacggcugggagggcaugguggacggcugguacggcuucagacaccagaacagcgagggcaccggccaggccgccgaccugaagagcacccaggccgccaucaaccagaucaacggcaagcugaacagacugaucgagaagaccaacgagaaguuccaccagaucgagaaggaguucagcgagguggagggcagaauccaggaccuggagaaguacguggaggacaccaagaucgaccuguggagcuacaacgccgagcugcugguggcccuggagaaccagcacaccaucgaccugaccgacagcgagaugaacaagcuguucgagagaaccagaaagcagcugagagagaacgccgaggacaugggcaacggcugcuucaagaucuaccacaagugcgacaacgccugcaucggcagcaucagaaacggcaccuacgaccacgacguguacagagacgaggcccugaacaacagauuccagaucaagggcguggagcugagaagcggcuacaaggacuggauccuguggaucagcuucgccaucagcugcuuccugcugugcguggugcugcugggcuucaucaugugggccugccagaagggcaacaucagaugcaacaucugcaucuga

SEQ ID NO: 160523 - RNA, 1701 nt, Artificial Sequence; identical to SEQ ID NO: 160512
  derived and/or modified CDS sequence (opt4) from hemagglutinin__InfluenzaA__ABB80514

SEQ ID NO: 160524 - RNA, 1701 nt, Artificial Sequence
  derived and/or modified CDS sequence (opt4) from hemagglutinin__InfluenzaA__ABB80529
augaagaccaucaucgcccugagcuacaucagcugccugguguucgcccagaagcugcccggcaacgacaacagcaccgccacccugugccugggccaccacgccgugcccaacggcacccuggugaagaccaucaccaacgaccagaucgaggugaccaacgccaccgagcuggugcagagcagcagcaccggcagaaucugcgacagcccccacagaauccuggacggcgagaacugcacccugaucgacgcccugcugggcgacccccacugcgacggcuuccagaacaaggagugggaccuguucguggagagaagcaaggccuacagcaacugcuaccccuacgacgugcccgacuacgccagccugagaagccugguggccagcagcggcacccuggaguucaacaacgagagcuucaacuggaccggcguggcccagaacggcaccagcuacgccugcaagagaagaagcaucaagagcuucuucagcagacugaacuggcugcaccagcugaaguacaaguaccccgcccugaacgugaccaugcccaacaacgacaaguucgacaagcuguacaucuggggcgugcaccaccccagcaccgacagcgaccagaccagccuguacgcccaggccagcggcagagugaccgugagcaccaagagaagccagcagaccgugauccccaacaucggcagcagacccugggugagaggcgugagcagcagaaucagcaucuacuggaccaucgugaagcccggcgacauccugcugaucaacagcaccggcaaccugaucgcccccagaggcuacuucaagaucagaagcggcaagagcagcaucaugagaagcgacgcccccaucggcaagugcaacagcgagugcaucacccccaacggcagcauccccaacgacaagcccuuccagaacgugaacagaaucaccuacggcgccugccccagauacgugaagcagaacacccugaagcuggccaccggcaugagaaacgugcccgacaagcagaccagaggcaucuucggcgccaucgccggcuucaucgagaacggcugggagggcaugguggacggcugguacggcuucagacaccagaacagcgagggcaccggccaggccgccgaccugaagagcacccaggccgccaucaaccagaucaacggcaagcugaacagacugaucgagaagaccaacgagaaguuccaccagaucgagaaggaguucagcgagguggagggcagaauccaggaccuggagaaguacguggaggacaccaagaucgaccuguggagcuacaacgccgagcugcugguggcccuggagaaccagcacaccaucgaccugaccgacagcgagaugaacaagcuguucgagagaaccagaaagcagcugagagagaacgccgaggacaugggcaacggcugcuucaagaucuaccacaagugcgacaacgccugcaucggcagcaucagaaacggcaccuacgaccacgacguguacagagacgaggcccugaacaacagauuccagaucaagggcguggagcugaagagcggcuacaaggacuggauccuguggaucagcuucgccaucagcugcuuccugcugugcguggugcugcugggcuucaucaugugggccugccagaagggcaacaucagaugcaacaucugcaucuga

SEQ ID NO: 160525 - RNA, 1701 nt, Artificial Sequence
  derived and/or modified CDS sequence (opt4) from hemagglutinin__InfluenzaA__ABB80641
augaagaccaucaucgcccugagcuacauccugugccugguguucgcccagaagauccccggcaacgacaacagcaccgccacccugugccugggccaccacgccgugcccaacggcacccuggugaagaccaucaccaacgaccagaucgaggugaccaacgccaccgagcuggugcagagcagcagcaccggcagaaucugcgacagcccccacagaauccuggacggcgagaacugcacccugaucgacgcccugcugggcgacccccacugcgacggcuuccagaacaaggagugggaccuguucguggagagaagcaaggccuacagcaacugcuaccccuacgacgugagcgacuacgccagccugagaagccugguggccagcagcggcacccuggaguucaacaacgagagcuucaacuggaccggcguggcccagaacggcaccagcuacgccugcaagagaagaagcaucaagagcuucuucagcagacugaacuggcugcaccagcugaaguacaaguaccccgcccugaacgugaccaugcccaacaacgacaaguucgacaagcuguacaucuggggcgugcaccaccccagcaccgacagcgaccagaccagccuguacgcccaggccagcggcagagugaccgugagcaccaagagaagccagcagaccgugauccccaacaucggcagcagacccugggugagaggcgugagcagcagaaucagcaucuacuggaccaucgugaagcccggcgacauccugcugaucaacagcaccggcaaccugaucgcccccagaggcuacuucaagaucagaagcggcaagagcagcaucaugagaagcgacgcccccaucggcaagugcaacagcgagugcaucacccccaacggcagcauccccaacgacaagcccuuccagaacgugaacagaaucaccuacggcgccugccccagauacgugaagcagaacacccugaagcuggccaccggcaugagaaacgugcccgagaagcagaccagaggcaucuucggcgccaucgccggcuucaucgagaacggcugggagggcaugguggacggcugguacggcuucagacaccagaacagcgagggcaccggccaggccgccgaccugaagagcacccaggccgccaucaaccagaucaacggcaagcugaacagacugaucgagaagaccaacgagaaguuccaccagaucgagaaggaguucagcgagguggagggcagaauccaggaccuggagaaguacguggaggacaccaagaucgaccuguggagcuacaacgccgagcugcugguggcccuggagaaccagcacaccaucgaccugaccgacagcgagaugaacaagcuguucgagagaaccagaaagcagcugagagagaacgccgaggacaugggcaacggcugcuucaagaucuaccacaagugcgacaacgccugcaucggcagcaucagaaacggcaccuacgaccacgacguguacagagacgaggcccugaacaacagauuccagaucaagggcguggagcugaagagcggcuacaaggacuggauccuguggaucagcuucgccaucagcugcuuccugcugugcguggugcugcugggcuucaucaugugggccugccagaagggcaacaucagaugcaacaucugcaucuga

SEQ ID NO: 160526 - RNA, 1701 nt, Artificial Sequence
  derived and/or modified CDS sequence (opt4) from hemagglutinin__InfluenzaA__ABB80661
augaagaccaucaucgcccugagcuacauccugugccugguguucgcccagaagauccccggcaacgacaacagcaccgccacccugugccugggccaccacgccgugcccaacggcacccuggugaagaccaucaccaacgaccagaucgaggugaccaacgccaccgagcuggugcagagcagcagcaccggcagaaucugcgacagcccccacagaauccuggacggcgagaacugcacccugaucgacgcccugcugggcgacccccacugcgacggcuuccagaacaaggagugggaccuguucguggagagaagcaaggccuacagcaacugcuaccccuacgacgugcccgacuacgccagccugagaagccugguggccagcagcggcacccuggaguucaacaacgagagcuucaacuggaccggcguggcccagaacggcaccagcuacgccugcaagagaagaagcaucaagagcuucuucagcagacugaacuggcugcaccagcugaaguacaaguaccccgcccugaacgugaccaugcccaacaacgacaaguucgacaagcuguacaucuggggcgugcaccaccccagcaccgacagcgaccaggccagccuguacgcccaggccagcggcagagugaccgugagcaccaagagaagccagcagaccgugauccccaacaucggcagcagacccugggugagaggcgugagcagcagaaucagcaucuacuggaccaucgugaagcccggcgacauccugcugaucaacagcaccggcaaccugaucgcccccagaggcuacuucaagaucagaagcggcaagagcagcaucaugagaagcgacgcccccaucggcaagugcaacagcgagugcaucacccccaacggcagcauccccaacgacaagcccuuccagaacgugaacagaaucaccuacggcgccugccccagauacgugaagcagaacacccugaagcuggccaccggcaugagaaacgugcccgagaagcagaccagaggcaucuucggcgccaucgccggcuucaucgagaacggcugggagggcaugguggacggcugguacggcuucagacaccagaacagcgagggcaccggccaggccgccgaccugaagagcacccaggccgccaucaaccagaucaacggcaagcugaacagacugaucgagaagaccaacgagaaguuccaccagaucgagaaggaguucagcgagguggagggcagaauccaggaccuggagaaguacguggaggacaccaagaucgaccuguggagcuacaacgccgagcugcugguggcccuggagaaccagcacaccaucgaccugaccgacagcgagaugaacaagcuguucgagagaaccagaaagcagcugagagagaacgccgaggacaugggcaacggcugcuucaagaucuaccacaagugcgacaacgccugcaucggcagcaucagaaacggcaccuacgaccacgacguguacagagacgaggcccugaacaacagauuccagaucaagggcguggagcugaagagcggcuacaaggacuggauccuguggaucagcuucgccaucagcugcuuccugcugugcguggugcugcugggcuucaucaugugggccugccagaagggcaacaucagaugcaacaucugcaucuga

SEQ ID NO: 160527 - RNA, 1701 nt, Artificial Sequence
  derived and/or modified CDS sequence (opt4) from hemagglutinin__InfluenzaA__ABB80672
augaagaccaucaucgcccugagcuacauccugugccugguguucgcccagaagcugcccggcaacgacaacagcaccgccacccugugccugggccaccacgccgugcccaacggcacccuggugaagaccaucaccaacgaccagaucgaggugaccaacgccaccgagcuggugcagggcagcagcaccggcagaaucugcgacagcccccaccagauccuggacggcaagaacugcacccugaucgacgcccugcugggcgacccccacugcgacggcuuccagaacaaggagugggaccuguucguggagagaagcaccgccuacagcaacugcuaccccuacgacgugcccgacuacgccagccugagaagccugguggccagcagcggcacccuggaguucaccaaggagggcuucaacuggaccggcguggcccaggacggcaccagcuacgccugcaagagaggcagcgugaagagcuucuucagcagacugaacuggcugcacaagcuggaguacaaguaccccgcccugaacgugaccaugcccaacaacgacaaguucgacaagcuguacaucuggggcgugcaccaccccagcaccgacagcgaccagaccagccuguacgugcaggccagcggcagagugaccgugagcaccaagagaagccagcagaccgugauccccaacaucggcagcagacccugggugagaggcgugagcagcagaaucagcaucuacuggaccaucgugaagcccggcgacauccugcugaucaacagcaccggcaaccugaucgcccccagaggcuacuucaagaucagaagcggcaagagcagcaucaugagaagcgacgcccccaucgacaacugcaacagcgagugcaucacccccaacggcagcauccccaacgacaagcccuuccagaacgugaacagaaucaccuacggcgccugccccagauacgugaagcagaacacccugaagcuggccaccggcaugagaaacgugcccgagaagcagaccagaggcaucuucggcgccaucgccggcuucaucgagaacggcugggagggcaugguggacggcugguacggcuucagacaccagaacagcgagggcaccggccaggccgccgaccugaagagcacccaggccgccaucaaccagaucaacggcaagcugaacagacugaucgagaagaccaacgagaaguuccaccagaucgagaaggaguucagcgagguggagggcagaauccaggaccuggagaaguacguggaggacaccaagaucgaccuguggagcuacaacgccgagcugcugguggcccuggagaaccagcacaccaucgaccugaccgacagcgagaugaacaagcuguucgagagaaccagaaagcagcugagagagaacgccgaggacaugggcaacggcugcuucaagaucuaccacaagugcgacaacgccugcaucggcagcaucagaaacggcaccuacgaccacgacguguacagagacgaggcccugaacaacagauuccagaucaagggcguggagcugaagagcggcuacaaggacuggauccuguggaucagcuucgccaucagcugcuuccugcugugcguggugcugcugggcuucaucaugugggccugccagaagggcaacaucagaugcaacaucugcaucuga

SEQ ID NO: 160528 - RNA, 1701 nt, Artificial Sequence
  derived and/or modified CDS sequence (opt4) from hemagglutinin__InfluenzaA__ABB80682
augaagaccaucaucgcccugagcuacaucagcugccugguguucgcccagaagcugcccggcaacgacaacagcaccgccacccugugccugggccaccacgccgugcccaacggcacccuggugaagaccaucaccaacgaccagaucgaggugaccaacgccaccgagcuggugcagagcagcagcaccggcagaaucugcgacagcccccacagaauccuggacggcgagaacugcacccugaucgacgcccugcugggcgacccccacugcgacggcuuccagaacaaggagugggaccuguucguggagagaagcaaggccuacagcaacugcuaccccuacgacgugcccgacuacgccagccugagaagccugguggccagcagcggcacccuggaguucaacaacgagagcuucaacuggaccggcguggcccagaacggcaccagcuacgccugcaagagaagaagcaucaagagcuucuucagcagacugaacuggcugcaccagcugaaguacaaguaccccgcccugaacgugaccaugcccaacaacgacaaguucgacaagcuguacaucuggggcgugcaccaccccagcaccgacagcgaccagaccagccuguacgcccaggccagcggcagagugaccgugagcaccaagagaagccagcagaccgugauccccaacaucggcagcagacccugggugagaggcgugagcagcagaaucagcaucuacuggaccaucgugaagcccggcgacauccugcugaucaacagcaccggcaaccugaucgcccccagaggcuacuucaagaucagaagcggcaagagcagcaucaugagaagcgacgcccccaucggcaagugcaacagcgagugcaucacccccaacggcagcauccccaacgacaagcccuuccagaacgugaacagaaucaccuacggcgccugccccagauacgugaagcagaacacccugaagcuggccaccggcaugagaaacgugcccgagaagcagaccagaggcaucuucggcgccaucgccggcuucaucgagaacggcugggagggcaugguggacggcugguacggcuucagacaccagaacagcgagggcaccggccaggccgccgaccugaagagcacccaggccgccaucaaccagaucaacggcaagcugaacagacugaucgagaagaccaacgagaaguuccaccagaucgagaaggaguucagcgagguggagggcagaauccaggaccuggagaaguacguggaggacaccaagaucgaccuguggagcuacaacgccgagcugcugguggcccuggagaaccagcacaccaucgaccugaccgacagcgagaugaacaagcugcuggagagaaccagaaagcagcugagagagaacgccgaggacaugggcaacggcugcuucaagaucuaccacaagugcgacaacgccugcaucggcagcaucagaaacggcaccuacgaccacgacguguacagagacgaggcccugaacaacagauuccagaucaagggcguggagcugaagagcggcuacaaggacuggauccuguggaucagcuucgccaucagcugcuuccugcugugcguggugcugcugggcuucaucaugugggccugccagaagggcaacaucagaugcaacaucugcaucuga

SEQ ID NO: 160529 - RNA, 1701 nt, Artificial Sequence
  derived and/or modified CDS sequence (opt4) from hemagglutinin__InfluenzaA__ABB80693
augaagaccaucaucgcccugagcuacaucagcugccugguguucgcccagaagcugcccggcaacgacaacagcaccgccacccugugccugggccaccacgccgugcccaacggcacccuggugaagaccaucaccaacgaccagaucgaggugaccaacgccaccgagcuggugcagagcagcagcaccggcagaaugugcgacagcccccacagaauccuggacggcgagaacugcacccugaucgacgcccugcugggcgacccccacugcgacggcuuccagaacaaggagugggaccuguucguggagagaagcaaggccuacagcaacugcuaccccuacgacgugcccgacuacgccagccugagaagccugguggccagcagcggcacccuggaguucaacaacgagagcuucaacuggaccggcguggcccagaacggcaccagcuacgccugcaagagaagaagcaucaagagcuucuucagcagacugaacuggcugcaccagcugaaguacaaguaccccgcccugaacgugaccaugcccaacaacgacaaguucgacaagcuguacaucuggggcgugcaccaccccagcaccgacagcgaccagaccagccuguacgcccaggccagcggcagagugaccgugagcaccaagagaagccagcagaccgugauccccaacaucggcagcagacccugggugagaggcgugagcagcagaaucagcaucuacuggaccaucgugaagcccggcgacauccugcugaucaacagcaccggcaaccugaucgcccccagaggcuacuucaagaucagaagcggcaagagcagcaucaugagaagcgacgcccccaucggcaagugcaacagcgagugcaucacccccaacggcagcauccccaacgacaagcccuuccagaacgugaacagaaucaccuacggcgccugccccagauacgugaagcagaacacccugaagcuggccaccggcaugagaaacgugcccgagaagcagaccagaggcaucuucggcgccaucgccggcuucaucgagaacggcugggagggcaugguggacggcugguacggcuucagacaccagaacagcgagggcaccggccaggccgccgaccugaagagcacccaggccgccaucaaccagaucaacggcaagcugaacagacugaucgagaagaccaacgagaaguuccaccagaucgagaaggaguucagcgagguggagggcagaauccaggaccuggagaaguacguggaggacaccaagaucgaccuguggagcuacaacgccgagcugcugguggcccuggagaaccagcacaccaucgaccugaccgacagcgagaugaacaagcuguucgagagaaccagaaagcagcugagagagaacgccgaggacaugggcaacggcugcuucaagaucuaccacaagugcgacaacgccugcaucggcagcaucagaaacggcaccuacgaccacgacguguacagagacgaggcccugaacaacagauuccagaucaagggcguggagcugaagagcggcuacaaggacuggauccuguggaucagcuucgccaucagcugcuuccugcugugcguggugcugcugggcuucaucaugugggccugccagaagggcaacaucagaugcaacaucugcaucuga

SEQ ID NO: 160530 - RNA, 1701 nt, Artificial Sequence
  derived and/or modified CDS sequence (opt4) from hemagglutinin__InfluenzaA__ABB80704
augaagaccaucaucgcccugagcuacauccugugccugguguucgcccagaagauccccggcaacgacaacagcaccgccacccugugccugggccaccacgccgugcccaacggcacccuggugaagaccaucaccaacgaccagaucgaggugaccaacgccaccgagcuggugcagagcagcagcaccggcagaaucugcgacagcccccacagaauccuggacggcgagaacugcacccugaucgacgcccugcugggcgacccccacugcgacggcuuccagaacaaggagugggaccuguucguggagagaagcaaggccuacagcaacugcuaccccuacgacgugcccgacuacgccagccugagaagccugguggccagcagcggcacccuggaguucaacaacgagagcuucaacuggaccggcguggcccagaacggcaccagcuacgccugcaagagaagaagcaucaagagcuucuucagcagacugaacuggcugcaccagcugaaguacaaguaccccgcccugaacgugaccaugcccaacaacgacaaguucgacaagcuguacaucuggggcgugcaccaccccagcaccgacagcgaccagaccagccuguacgcccaggccagcggcagagugaccgugagcaccaagagaagccagcagaccgugauccccaacaucggcagcagacccugggugagaggcgugagcagcagaaucagcaucuacuggaccaucgugaagcccggcgacauccugcugaucaacagcaccggcaaccugaucgcccccagaggcuacuucaagaucagaagcggcaagagcagcaucaugagaagcgacgcccccaucggcaagugcaacagcgagugcaucacccccaacggcagcauccccaacgacaagcccuuccagaacgugaacagaaucaccuacggcgccugccccagauacgugaagcagaacacccugaagcuggccaccggcaugagaaacgugcccgagaagcagaccagaggcaucuucggcgccaucgccggcuucaucgagaacggcugggagggcaugguggacggcugguacggcuucagacaccagaacagcgagggcaccggccaggccgccgaccugaagagcacccaggccgccaucaaccagaucaacggcaagcugaacagacugaucgagaagaccaacgagaaguuccaccagaucgagaaggaguucagcgagguggagggcagaauccaggaccuggagaaguacguggaggacaccaagaucgaccuguggagcuacaacgccgagcugcugguggcccuggagaaccagcacaccaucgaccugaccgacagcgagaugaacaagcuguucgagagaaccagaaagcagcugagagagaacgccgaggacaugggcaacggcugcuucaagaucuaccacaagugcgacaacgccugcaucggcagcaucagaaacggcaccuacgaccacgacguguacagagacgaggcccugaacaacagauuccagaucaagggcguggagcugaagagcggcuacaaggacuggauccuguggaucagcuucgccaucagcugcuuccugcugugcguggugcugcugggcuucaucaugugggccugccagaagggcaacaucagaugcaacaucugcaucuga

SEQ ID NO: 160531 - RNA, 1701 nt, Artificial Sequence; identical to SEQ ID NO: 160512
  derived and/or modified CDS sequence (opt4) from hemagglutinin__InfluenzaA__ABB80715

SEQ ID NO: 160532 - RNA, 1701 nt, Artificial Sequence
  derived and/or modified CDS sequence (opt4) from hemagglutinin__InfluenzaA__ABB80724
augaagaccaucaucgcccugagcuacauccugugccugguguucgcccagaagcugcccggcaacgacaacagcaccgccacccugugccugggccaccacgccgugcccaacggcacccuggugaagaccaucaccaacgaccagaucgaggugaccaacgccaccgagcuggugcagagcagcagcaccggcagaaucugcgacagcccccacagaauccuggacggcgagaacugcacccugaucgacgcccugcugggcgacccccacugcgacggcuuccagaacaaggagugggaccuguucguggagagaagcaaggccuacagcaacugcuaccccuacgacgugcccgacuacgccagccugagaagccugguggccagcagcggcacccuggaguucaacaacgagagcuucaacuggaccggcguggcccagaacggcaccagcuacgccugcaagagaagaagcaucaagagcuucuucagcagacugaacuggcugcaccagcugaaguacaaguaccccgcccugaacgugaccaugcccaacaacgacaaguucgacaagcuguacaucuggggcgugcaccaccccagcaccgacagcgaccaggccagccuguacgcccaggccagcggcagagugaccgugagcaccaagagaagccagcagaccgugauccccaacaucggcagcagacccugggugagaggcgugagcagcagaaucagcaucuacuggaccaucgugaagcccggcgacauccugcugaucaacagcaccggcaaccugaucgcccccagaggcuacuucaagaucagaagcggcaagagcagcaucaugagaagcgacgcccccaucggcaagugcaacagcgagugcaucacccccaacggcagcauccccaacgacaagcccuuccagaacgugaacagaaucaccuacggcgccugccccagauacgugaagcagaacacccugaagcuggccaccggcaugagaaacgugcccgagaagcagaccagaggcaucuucggcgccaucgccggcuucaucgagaacggcugggagggcaugguggacggcugguacggcuucagacaccagaacagcgagggcaccggccaggccgccgaccugaagagcacccaggccgccaucaaccagaucaacggcaagcugaacagacugaucgagaagaccaacgagaaguuccaccagaucgagaaggaguucagcgagguggagggcagaauccaggaccuggagaaguacguggaggacaccaagaucgaccuguggagcuacaacgccgagcugcugguggcccuggagaaccagcacaccaucgaccugaccgacagcgagaugaacaagcuguucgagagaaccagaaagcagcugagagagaacgccgaggacaugggcaacggcugcuucaagaucuaccacaagugcgacaacgccugcaucggcagcaucagaaacggcaccuacgaccacgacguguacagagacgaggcccugaacaacagauuccagaucaagggcguggagcugaagagcggcuacaaggacuggauccuguggaucagcuucgccaugagcugcuuccugcugugcguggugcugcugggcuucaucaugugggccugccagaagggcaacaucagaugcaacaucugcaucuga

SEQ ID NO: 160533 - RNA, 1701 nt, Artificial Sequence; identical to SEQ ID NO: 160518
  derived and/or modified CDS sequence (opt4) from hemagglutinin__InfluenzaA__ABB80737

SEQ ID NO: 160534 - RNA, 1701 nt, Artificial Sequence
  derived and/or modified CDS sequence (opt4) from hemagglutinin__InfluenzaA__ABB80748
augaagaccaucaucgcccugagcuacaucagcugccugguguucgcccagaagcugcccggcaacgacaacagcaccgccacccugugccugggccaccacgccgugcccaacggcacccuggugaagaccaucaccaacgaccagaucgaggugaccaacgccaccgagcuggugcagagcagcagcaccggcagaaucugcgacagcccccacagaauccuggacggcgagaacugcacccugaucgacgcccugcugggcgacccccacugcgacggcuuccagaacaaggagugggaccuguucguggagagaagcaaggccuacagcaacugcuaccccuacgacgugcccgacuacgccagccugagaagccugguggccagcagcggcacccuggaguucaacaacgagagcuucaacuggaccggcguggcccagaacggcaccagcuacgccugcaagagaagaagcaucaagagcuucuucagcagacugaacuggcugcaccagcugaaguacaaguaccccgcccugaacgugaccaugcccaacaacgacaaguucgacaagcuguacaucuggggcgugcaccaccccagcaccgacagcgaccagaccagccuguacgcccaggccagcggcagagugaccgugagcacccagagaagccagcagaccgugauccccaacaucggcagcagacccugggugagaggcgugagcagcagaaucagcaucuacuggaccaucgugaagcccggcgacauccugcugaucaacagcaccggcaaccugaucgcccccagaggcuacuucaagaucagaagcggcaagagcagcaucaugagaagcgacgcccccaucggcaagugcaacagcgagugcaucacccccaacggcagcauccccaacgacaagcccuuccagaacgugaacagaaucaccuacggcgccugccccagauacgugaagcagaacacccugaagcuggccaccggcaugagaaacgugcccgagaagcagaccagaggcaucuucggcgccaucgccggcuucaucgagaacggcugggagggcaugguggacggcugguacggcuucagacaccagaacagcgagggcaccggccaggccgccgaccugaagagcacccaggccgccaucaaccagaucaacggcaagcugaacagacugaucgagaagaccaacgagaaguuccaccagaucgagaaggaguucagcgagguggagggcagaauccaggaccuggaggaguacguggaggacaccaagaucgaccuguggagcuacaacgccgagcugcugguggcccuggagaaccagcacaccaucgaccugaccgacagcgagaugaacaagcuguucgagagaaccagaaagcagcugagagagaacgccgaggacaugggcaacggcugcuucaagaucuaccacaagugcgacaacgccugcaucggcagcaucagaaacggcaccuacgaccacgacguguacagagacgaggcccugaacaacagauuccagaucaagggcguggagcugaagagcggcuacaaggacuggauccuguggaucagcuucgccaucagcugcuuccugcugugcguggugcugcugggcuucaucaugugggccugccagaagggcaacaucagaugcaacaucugcaucuga

SEQ ID NO: 160535 - RNA, 1701 nt, Artificial Sequence
  derived and/or modified CDS sequence (opt4) from hemagglutinin__InfluenzaA__ABB82183
augaagaccaucaucgcccugagcuacauccugugccugguguucgcccagaagcugcccggcaacgacaacagcaccgccacccugugccugggccaccacgccgugcccaacggcacccuggugaagaccaucaccaacgaccagaucgaggugaccaacgccaccgagcuggugcagagcagcagcaccggcagaaucugcgacagcccccaccagauccuggacggcgagaacugcacccugaucgacgcccugcugggcgacccccacugcgacggcuuccagaacaaggagugggaccuguucguggagagaagcaaggccuacagcaacugcuaccccuacgacgugcccgacuacgccagccugagaagccugguggccagcagcggcacccuggaguucaacaacgagagcuucaacuggaccggcguggcccagaacggcaccagcagcgccugcaagagaagaagcaacaagagcuucuucagcagacugaacuggcugcaccagcugaaguacaaguaccccgcccugaacgugaccaugcccaacaacgagaaguucgacaagcuguacaucuggggcgugcaccaccccagcaccgacagcgaccagaucagccuguacgcccaggccagcggcagagugaccgugagcaccaagagaagccagcagaccgugauccccaacaucggcagcagacccugggugagaggcgugagcagcagaaucagcaucuacuggaccaucgugaagcccggcgacauccugcugaucaacagcaccggcaaccugaucgcccccagaggcuacuucaagaucagaagcggcaagagcagcgugaugagaagcgacgccagcaucggcagaugcaacagcgagugcaucacccccaacggcagcauccccaacgacaagcccuuccagaacgugaacagaaucaccuacggcgccugccccagauacgugaagcagaacacccugaagcuggccaccggcaugagaaacgugcccgagaagcagaccagaggcaucuucggcgccaucgccggcuucaucgagaacggcugggagggcaugguggacggcugguacggcuucagacaccagaacagcgagggcaccggccaggccgccgaccugaagagcacccaggccgccaucaaccagaucaacggcaagcugaacagacugaucgagaagaccaacgagaaguuccaccagaucgagaaggaguucagcgagguggagggcagaauccaggaccuggagaaguacguggaggacaccaagaucgaccuguggagcuacaacgccgagcugcugguggcccuggagaaccagcacaccaucgaccugaccgacagcgagaugaacaagcuguucgagagaaccaagaagcagcugagagagaacgccgaggacaugggcaacggcugcuucaagaucuaccacaagugcgacaacgccugcaucggcagcaucagaaacggcaccuacgaccacgacguguacagagacgaggcccugaacaacagauuccagaucaagggcguggagcugaagagcggcuacaaggacuggauccuguggaucagcuucgccaucagcugcuuccugcugugcguggugcugcugggcuucaucaugugggccugccagaagggcaacaucagaugcaacaucugcaucuga

SEQ ID NO: 160536 - RNA, 1698 nt, Artificial Sequence; identical to SEQ ID NO: 160356
  derived and/or modified CDS sequence (opt4) from hemagglutinin__InfluenzaA__ABB82194

SEQ ID NO: 160537 - RNA, 1698 nt, Artificial Sequence
  derived and/or modified CDS sequence (opt4) from hemagglutinin__InfluenzaA__ABB82205
augaaggugaagcugcuggugcugcugugcaccuucaccgccaccuacgccgacaccaucugcaucggcuaccacgccaacaacagcaccgacaccguggacaccgugcuggagaagaacgugaccgugacccacagcgugaaccugcuggaggacagccacaacggcaagcugugccugcugaagggcaucgccccccugcagcugggcaacugcagcguggccggcuggauccugggcaaccccgagugcgagcugcugaucagcaaggagagcuggagcuacaucguggagacccccaaccccgagaacggcaccugcuaccccggcuacuucgccgacuacgaggagcugagagagcagcugagcagcgugagcagcuucgagagauucgagaucuuccccaaggagagcagcuggcccaaccacaccgugaccggcgugagcgccagcugcagccacaacggcaagagcagcuucuacaagaaccugcuguggcugaccggcaagaacggccuguaccccaaccugagcaagagcuacgccaacagcaaggagaaggaggugcuggugcuguggggcgugcaccacccccccaacaucggcgaccagagagcccuguaccacaccgagaacgccuacgugagcguggugagcagccacuacagcagaagauucacccccgagaucgccaagagacccaaggugagagaccaggagggcagaaucaacuacuacuggacccugcuggagcccggcgacaccaucaucuucgaggccaacggcaaccugaucgcccccagauacgccuucgcccugagcagaggcuucggcagcggcaucaucaccagcaacgcccccauggacgagugcgacgccaagugccagaccccccagggcgccaucaacagcagccugcccuuccagaacgugcaccccgugaccaucggcgagugccccaaguacgugagaagcgccaagcugagaauggugaccggccugagaaacauccccagcauccagagcagaggccuguucggcgccaucgccggcuucaucgagggcggcuggaccggcaugguggacggcugguacggcuaccaccaccagaacgagcagggcagcggcuacgccgccgaccagaagagcacccagaacgccaucaacggcaucaccaacaaggugaacagcgugaucgagaagaugaacacccaguucaccgccgugggcaaggaguucaacaagcuggagagaagaauggagaaccugaacaagaagguggacgacggcuuccuggacaucuggaccuacaacgccgagcugcuggugcugcuggagaacgagagaacccuggacuuccacgacagcaacgugaagaaccuguacgagaaggugaagagccagcugaagaacaacgccaaggagaucggcaacggcugcuucgaguucuaccacaagugcaacgacgagugcauggagagcgugaagaacggcaccuacgacuaccccaaguacagcgaggagagcaagcugaacagagagaagaucgacggcgugaagcuggagagcaugggcguguaccagauccuggccaucuacagcaccguggccagcagccuggugcugcuggugagccugggcgccaucagcuucuggaugugcagcaacggcagccugcagugcagaaucugcaucuga

SEQ ID NO: 160538 - RNA, 1698 nt, Artificial Sequence
  derived and/or modified CDS sequence (opt4) from hemagglutinin__InfluenzaA__ABB82216
augaaggugaagcugcuggugcugcugugcaccuucaccgccaccuacgccgacaccaucugcaucggcuaccacgccaacaacagcaccgacaccguggacaccgugcuggagaagaacgugaccgugacccacagcgugaaccugcuggaggacagccacaacggcaagcugugccugcugaagggcaucgccccccugcagcugggcaacugcagcguggccggcuggauccugggcaaccccgagugcgagcugcugaucagcaaggagagcuggagcuacaucguggagacccccaaccccgagaacggcaccugcuaccccggcuacuucgccgacuacgaggagcugagagagcagcugagcagcgugagcagcuucgagagauucgagaucuuccccaaggagagcagcuggcccaaccacaccgugaccggcgugagcagcagcugcagccacaacggcaagagcagcuucuacagaaaccugcuguggcugaccggcaagaacggccuguaccccaaccugagcaagagcuacgugaacaacaaggagaaggaggugcuggugcuguggggcgugcaccacccccccaacaucggcgaccagagagcccuguaccacaccgagaacgccuacgugagcguggugagcagccacuacagcagaagauucacccccgagaucgccaagagacccaaggugagagaccaggagggcagaaucaacuacuacuggacccugcuggagcccggcgacaccaucaucuucgaggccaacggcaaccugaucgcccccagauacgccuucgcccugagcagaggcuucggcagcggcaucaucaccagcaacgcccccauggacgagugcgacgccaagugccagaccccccagggcgccaucaacagcagccugcccuuccagaacgugcaccccgugaccaucggcgagugccccaaguacgugagaagcgccaagcugagaauggugaccggccugagaaacauccccagcauccagagcagaggccuguucggcgccaucgccggcuucaucgagggcggcuggaccggcaugguggacggcugguacggcuaccaccaccagaacgagcagggcagcggcuacgccgccgaccagaagagcacccagaacgccaucaacggcaucaccaacaaggugaacagcgugaucgagaagaugaacacccaguucaccgccgugggcaaggaguucaacaagcuggagagaagaauggagaaccugaacaagaagguggacgacggcuuccuggacaucuggaccuacaacgccgagcugcuggugcugcuggagaacgagagaacccuggacuuccacgacagcaacgugaagaaccuguacgagaaggugaagagccagcugaagaacaacgccaaggagaucggcaacggcugcuucgaguucuaccacaagugcaacgacgagugcauggagagcgugaagaacggcaccuacgacuaccccaaguacagcgaggagagcaagcugaacagagagaagaucgacggcgugaagcuggagagcaugggcguguaccagauccuggccaucuacagcaccguggccagcagccuggugcugcuggugagccugggcgccaucagcuucuggaugugcagcaacggcagccugcagugcagaaucugcaucuga

SEQ ID NO: 160539 - RNA, 1701 nt, Artificial Sequence
  derived and/or modified CDS sequence (opt4) from hemagglutinin__InfluenzaA__ABB82227
augaagaccaucaucgcccugagcuacaucuucugccugacccugggccaggaccugcccggcaacgacaacagcaaggccacccugugccugggccaccacgccgugcccaacggcacccuggugaagaccaucaccgacgaccagaccgaggugaccaacgccaccgagcuggugcagagcagcagcaccggcaagaucugcaacaacccccacagaauccuggacggcauggacugcacccugaucgacgcccugcugggcgacccccacugcgacguguuccagaacgagaccugggaccuguucguggagagaagcaaggccuucagcaacugcuaccccuacgacgugcccgacuacgccagccugagaagccuggccgccagcagcggcacccuggaguucaucaccgagggcuucaccuggaccggcgugacccagaacggcggcagcaacgccugcaagagaggccccggcagcggcuucuucagcagacugaacuggcugaccaagagcggcaacaccuaccccgugcugaacgugaccaugcccaacaacgacaacuucgacaagcuguacaucuggggcgugcaccaccccagcaccgaccaggagcagaccagccuguacgugcaggccagcggcagagugaccgugagcaccagaagaagccagcagaccaucauccccaacaucggcagcagacccugggugagaggccugagcagcagaaucagcaucuacuggaccaucgugaagcccggcgacgugcuggugaucaacagcaacggcaaccugaucgcccccagaggcuacuucaagaugagaaccggcaagagcagcaucaugagaagcgacgcccccaucgacaccugcaucagcgagugcaucacccccaacggcagcauccccaacgacaagcccuuccagaacaucaacaagaucaccuacggcgccugccccaaguacgugaagcagaacacccugaagcuggccaccggcaugagaaacgugcccgagaagcagaccagaggccuguucggcgccaucgccggcuucaucgagaacggcugggagggcaugaucgacggcugguacggcuucagacaccagaacagcgagggcaccggccaggccgccgaccugaagagcacccaggccgccaucgaccagaucaacggcaagcugaacagaaucaucgagaagaccaacgagaaguuccaccagaucgagaaggaguucagcgagguggagggcagaauccaggaccuggagaaguacguggaggacaccaagaucgaccuguggagcuacaacgccgagcugcugguggccauggagaaccagcacaccaucgaccugaccgacagcgagaugaacaagcuguucgagaagaccagaagacagcugagagagaacgccgaggacaugggcaacggcugcuucaagaucuaccacaagugcgacaacgccugcaucgagagcaucagaaacggcaccuacgaccacgacguguacagagacgaggcccugaacaacagauuccagaucaagggcguggagcugaagagcggcuacaaggacuggauccuguggaucagcuucgccaucagcugcuuccugcugugcguggugcugcugggcuucaucaugugggccugccagagaggcaacaucagaugcaacaucugcaucuga

SEQ ID NO: 160540 - RNA, 1698 nt, Artificial Sequence
  derived and/or modified CDS sequence (opt4) from hemagglutinin__InfluenzaA__ABB83026
augaaggugaagcugcugauccugcugugcaccuucaccgccaccuacgccgacaccaucugcaucggcuaccacgccaacaacagcaccgacaccguggacaccgugcuggagaagaacgugaccgugacccacagcgugaaccugcuggaggacagccacaacggcaagcugugccugcugaagggcaucgccccccugcagcugggcaacugcagcguggccggcuggauccugggcaaccccgagugcgagcugcugaucagcaaggagagcuggagcuacaucguggagacccccaaccccgagaacggcaccugcuaccccggcuacuucgccgacuacgaggagcugagagagcagcugagcagcgugagcagcuucgagagauucgagaucuuccccaaggagagcagcuggcccaaccacaccgugaccggcgugagcgccagcugcagccacaacggcaagagcagcuucuacagaaaccugcuguggcugaccgagaagaacggccuguaccccaaccugagcaagagcuacgccaacaacaaggagaaggaggugcugauccuguggggcgugcaccacccccccaacaucggcgaccagagaacccuguaccacaccgagaacgccuacgugagcguggugagcagccacuacagcagaagauucacccccgagaucaccaagagacccaaggugagagaccaggagggcagaaucaacuacuacuggacccugcuggagcccggcgacaccaucaucuucgaggccaacggcaaccugaucgcccccugguacgccuucgcccugagcagaggcuucggcagcggcaucaucaccagcaacgcccccauggacgagugcgacgccaagugccagaccccccagggcgccaucaacagcagccugcccuuccagaacgugcaccccgugaccaucggcgagugccccaaguacgugagaagcgccaagcugagaauggugaccggccugagaaacauccccagcauccagagcagaggccuguucggcgccaucgccggcuucaucgagggcggcuggaccggcaugguggacggcugguacggcuaccaccaccagaacgagcagggcagcggcuacgccgccgaccagaagagcacccagaacgccaucaacggcaucaccaacaaggugaacagcgugaucgagaagaugaacacccaguucaccgccgugggcaaggaguucaacaagcuggagagaagaauggagaaccugaacaagaagguggacgacggcuuccuggacaucuggaccuacaacgccgagcugcuggugcugcuggagaacgagagaacccuggacuuccacgacagcaacgugaagaaccuguacgagaaggugaagagccagcugaagaacaacgccaaggagaucggcaacggcugcuucgaguucuaccacaagugcaacaacgagugcauggagagcgugaagaacggcaccuacgacuaccccaaguacagcgaggagagcaagcugaacagagagaagaucgacggcgugaagcuggagagcaugggcguguaccagauccuggccaucuacagcaccguggccagcagccuggugcugcuggugagccugggcgccaucagcuucuggaugugcagcaacggcagccugcagugcagaaucugcaucuga

SEQ ID NO: 160541 - RNA, 1698 nt, Artificial Sequence
  derived and/or modified CDS sequence (opt4) from hemagglutinin__InfluenzaA__ABB83127
augaaggugaagcugcugauccugcugugcaccuucaccgccaccuacgccgacaccaucugcaucggcuaccacgccaacaacagcaccgacaccguggacaccgugcuggagaagaacgugaccgugacccacagcgugaaccugcuggaggacagccacaacggcaagcugugccugcugaagggcaucgccccccugcagcugggcaacugcagcguggccggcuggauccugggcaaccccgagugcgagcugcugaucagcaaggagagcuggagcuacaucguggagacccccaaccccgagaacggcgccugcuaccccggcuacuucgccgacuacgaggagcugagagagcagcugagcagcgugagcagcuucgagagauucgagaucuuccccaaggagagcagcuggcccaaccacaccgugaccggcgugagcgccagcugcagccacaacggcaagagcagcuucuacagaaaccugcuguggcugaccggcaagaacggccuguaccccaaccugagcaagagcuacgccaacaacaaggagaaggaggugcugauccuguggggcgugcaccacccccccaacaucggcgaccagagaacccuguaccacaccgagaacgccuacgugagcguggugagcagccacuacagcagaagauucacccccgagaucaccaagagacccaaggugagagaccaggagggcagaaucaacuacuacuggacccugcuggagcccggcgacaccaucaucuucgaggccaacggcaaccugaucgcccccugguacgccuucgcccugagcagaggcuucggcagcggcaucaucaucagcaacgcccccauggacgagugcgacgccaagugccagaccccccagggcgccaucaacagcagccugcccuuccagaacgugcaccccgugaccaucggcgagugccccaaguacgugagaagcgccaagcugagaauggugaccggccugagaaacauccccagcauccagagcagaggccuguucggcgccaucgccggcuucaucgagggcggcuggaccggcaugguggacggcugguacggcuaccaccaccagaacgagcagggcagcggcuacgccgccgaccagaagagcacccagaacgccaucaacggcaucaccaacaaggugaacagcgugaucgagaagaugaacacccaguucaccgccgugggcaaggaguucaacaagcuggagagaagaauggagaaccugaacaagaagguggacgacggcuuccuggacaucuggaccuacaacgccgagcugcuggugcugcuggagaacgagagaacccuggacuuccacgacagcaacgugaagaaccuguacgagaaggugaagagccagcugaagaacaacgccaaggagaucggcaacggcugcuucgaguucuaccacaagugcaacaacgagugcauggagagcgugaagaacggcaccuacgacuaccccaaguacagcgaggagagcaagcugaacagagagaagaucgacggcgugaagcuggacagcaugggcguguaccagauccuggccaucuacagcaccguggccagcagccuggugcugcuggugagccugggcgccaucagcuucuggaugugcagcaacggcagccugcagugcagaaucugcaucuga

SEQ ID NO: 160542 - RNA, 1698 nt, Artificial Sequence
  derived and/or modified CDS sequence (opt4) from hemagglutinin__InfluenzaA__ABB83138
augaaggugaagcugcugauccugcugugcaccuucaccgccaccuacgccgacaccaucugcaucggcuaccacgccaacaacagcaccgacaccguggacaccgugcuggagaagaacgugaccgugacccacagcgugaaccugcuggaggacagccacaacggcaagcugugccugcugaagggcaucgccccccugcagcugggcaacugcagcguggccggcuggauccugggcaaccccgagugcgagcugcugaucagcaaggagagcuggagcuacaucguggagacccccaaccccgagaacggcgccugcuaccccggcuacuucgccgacuacgaggagcugagagagcagcugagcagcaucagcagcuucgagagauucgagaucuuccccaaggagagcagcuggcccaaccacaccgugaccggcgugagcgccagcugcagccacaacggcaagagcagcuucuacagaaaccugcuguggcugaccggcaagaacggccuguaccccaaccugagcaagagcuacgccaacaacaaggagaaggaggugcugauccuguggggcgugcaccacccccccaacaucggcgaccagagaacccuguaccacaccgagaacgccuacgugagcguggugagcagccacuacagcagaagauucacccccgagaucaccaagagacccaaggugagagaccaggagggcagaaucaacuacuacuggacccugcuggagcccggcgacaccaucaucuucgaggccaacggcaaccugaucgcccccugguacgccuucgcccugagcagaggcuucggcagcggcaucaucaccagcaacgcccccauggacgagugcgacgccaagugccagaccccccagggcgccaucaacagcagccugcccuuccagaacgugcaccccgugaccaucggcgagugccccaaguacgugagaagcgccaagcugagaauggugaccggccugagaaacauccccagcauccagagcagaggccuguucggcgccaucgccggcuucaucgagggcggcuggaccggcaugguggacggcugguacggcuaccaccaccagaacgagcagggcagcggcuacgccgccgaccagaagagcacccagaacgccaucaacggcaucaccaacaaggugaacagcgugaucgagaagaugaacacccaguucaccgccgugggcaaggaguucaacaagcuggagagaagaauggagaaccugaacaagaagguggacgacggcuuccuggacaucuggaccuacaacgccgagcugcuggugcugcuggagaacgagagaacccuggacuuccacgacagcaacgugaagaaccuguacgagaaggugaagagccagcugaagaacaacgccaaggagaucggcaacggcugcuucgaguucuaccacaagugcaacaacgagugcauggagagcgugaagaacggcaccuacgacuaccccaaguacagcgaggagagcaagcugaacagagagaagaucgacggcgugaagcuggacagcaugggcguguaccagauccuggccaucuacagcaccguggccagcagccuggugcugcuggugagccugggcgccaucagcuucuggaugugcagcaacggcagccugcagugcagaaucugcaucuga

SEQ ID NO: 160543 - RNA, 1701 nt, Artificial Sequence
  derived and/or modified CDS sequence (opt4) from hemagglutinin__InfluenzaA__ABB86877
augaaggccauccugcugauccugcuguacaccuucaccgccaccaacgccgacacccugugcaucggcuaccacgccaacaacagcaccgacaccguggacaccgugcuggagaagaacgugaccgugacccacagcgugaaccugcuggaggacagacacaacggcaagcugugcaaccugggcggcaucgccccccuguaccugggcaacugcaacaucgccggcuggcugcugggcaaccccgagugcgagcugcuguucaccgugagcagcuggagcuacaucguggagaccagcaacagcgacaacggcaccugcuaccccggcgacuucaucaacuacgaggagcugagagagcagcugagcagcaugagcagcuacgagagauucgagaucuuccccaaggagagcagcuggcccaaccacgagaccaacagaggcgugaccgccgccugccccuacgccggcgccaacagcuucuacagaaaccugaucuggcuggugaagaagggcaacagcuaccccaagaucaacaagagcuacgugaacaacaaggagaaggaggugcuggugcuguggggcauccaccacccccccaccagcgccgaccagcagagccuguaccagaacgccgacgccuacgugagcguggagagcagcaaguacaacaagaaguucaagcccgagaucgccaccagacccaaggugagaggccaggccggcagaaugaacuacuacuggacccugguggagcccggcgacaccaucaccuucgaggccaccggcaaccugguggugcccagauacgccuucgccaugaacagaggcagcggcagcggcaucaucaucagcgacacccccgugcacgacugcaacaccaccugccagacccccaagggcgccaucaacaccagccugcccuuccagaacgugcaccccgugaccaucggcgagugccccaaguacgugaagagcaccaagcugagaauggccaccggccugagaaacauccccagcauccagagcagaggccuguucgaggccaucgccggcuucaucgagggcggcuggaccggcaugaucgacggcugguacggcuaccaccaccagaacgagcagggcagcggcuacgccgccgacagaaagagcacccagaacgccaucgacggcaucaccaacaaggugaacagcgugaucgagaagaugaacacccaguucaccgccgugggcaaggaguucaaccaccuggagaagagaaucgagaaccugaacaagaagguggacgacggcuuccuggacguguggaccuacaacgccgagcugcuggugcugcuggagaacgagagaacccuggacuuccacgacagcaacgugaagaaccuguacgagaaggugagaagccagcugagaaacaacgccaaggagaucggcaacggcugcuucgaguucuaccacaagugcgacgacaccugcauggagagcgugagaaacggcaccuacgacuaccugaaguacagcgaggagagcaagcugaacagagagaagaucgagggcgugaagcuggacagcgccagaaucuaccagauccuggccaucuacagcaccguggccagcagccuggugcugcuggugagccugggcgccaucagcuucuggaugugcagcaacggcagccugcagugcagaaucugcaucuga

SEQ ID NO: 160544 - RNA, 1701 nt, Artificial Sequence
  derived and/or modified CDS sequence (opt4) from hemagglutinin__InfluenzaA__ABB86887
augaaggccauccugcugauccugcuguacaccuucaccgccaccaacgccgacacccugugcaucggcuaccacgccaacaacagcaccgacaccguggacaccgugcuggagaagaacgugaccgugacccacagcgugaaccugcuggaggacagacacaacggcaagcugugcaaccugggcggcaucgccccccuguaccugggcaacugcaacaucgccggcuggcugcugggcaaccccgagugcgagcugcuguucaccgugagcagcuggagcuacaucguggagaccagcaacagcgacaacggcaccugcuaccccggcgacuucaucaacuacgaggagcugagagagcagcugagcagcaugagcagcuacgagagauucgagaucuuccccaaggagagcagcuggcccaaccacgagaccaacagaggcgugaccgccgccugccccuacgccggcgccaacagcuucuacagaaaccugaucuggcuggugaagaagggcaacagcuaccccaagaucaacaagagcuacgugaacaacaaggagaaggaggugcuggugcuguggggcauccaccacccccccaccagcgccgaccagcagagccuguaccagaacgccgacgccuacgugagcguggagagcagcaaguacaacaagaaguucaagcccgagaucgccaccagacccaaggugagaggccaggccggcagaaugaacuacuacuggacccugguggagcccggcgacaccaucaccuucgaggccaccggcaaccugguggugcccagauacgccuucgccaugaagagaggcagcggcagcggcaucaucaucagcgacacccccgugcacgacugcaacaccaccugccagacccccaagggcgccaucaacaccagccugcccuuccagaacauccaccccgugaccaucggcgagugccccaaguacgugaagagcaccaagcugagaauggccaccggccugagaaacauccccagcauccagagcagaggccuguucggcgccaucgccggcuucaucgagggcggcuggaccggcaugaucgacggcugguacggcuaccaccaccagaacgagcagggcagcggcuacgccgccgacagaaagagcacccagaacgccaucgacggcaucaccaacaaggugaacagcgugaucgagaagaugaacacccaguucaccgccgugggcaaggaguucaaccaccuggagaagagaaucgagaaccugaacaagaagguggacgacggcuuccuggacguguggaccuacaacgccgagcugcuggugcugcuggagaacgagagaacccuggacuuccacgacagcaacgugaagaaccuguacgagaaggugagaagccagcugagaaacaacgccaaggagaucggcaacggcugcuucgaguucuaccacaagugcgacgacaccugcauggagagcgugagaaacggcaccuacgacuaccugaaguacagcgaggagagcaagcugaacagagagaagaucgagggcgugaagcuggacagcgccagaaucuaccagauccuggccaucuacagcaccguggccagcagccuggugcugcuggugagccugggcgccaucagcuucuggaugugcagcaacggcagccugcagugcagaaucugcaucuga

SEQ ID NO: 160545 - RNA, 1698 nt, Artificial Sequence
  derived and/or modified CDS sequence (opt4) from hemagglutinin__InfluenzaA__ABB86899
augaaggugaagcugcugauccugcugugcaccuucaccgccaccuacgccgacaccaucugcaucggcuaccacgccaacaacagcaccgacaccguggacaccgugcuggagaagaacgugaccgugacccacagcgugaaccugcuggaggacagccacaacggcaagcugugccugcugaagggcaucgccccccugcagcugggcaacugcagcguggccggcuggauccugggcaaccccgagugcgagcugcugaucagcaaggagagcuggagcuacaucguggagacccccaaccccgagaacggcgccugcuaccccggccacuucgccgacuacgaggagcugagagagcagcugagcagcgugagcagcuucgagagauucgagaucuuccccaaggagagcagcuggcccaaccacaccaucaccggcgugagcgccagcugcagccacaacggcaagagaagcuucuacagaaaccugcuguggcugaccggcaagaacggccuguaccccaaccugagcaagagcuacgccaacaacaaggagaaggaggugcugauccuguggggcgugcaccacccccccaacaucggcgaccagagaacccuguaccacaccgagaacgccuacgugagcguggugagcagccacuacagcagaagauucacccccgagaucaccaagagacccaaggugagagaccaggagggcagaaucaacuacuacuggacccugcuggagcccggcgacaccaucaucuucgaggccaacggcaaccugaucgcccccugguacgccuucgcccugagcagaggcuucggcagcggcaucaucaccagcaacgcccccauggacgagugcgacgccaagugccagaccccccagggcgccaucaacagcagccugcccuuccagaacgugcaccccgugaccaucggcgagugccccaaguacgugagaagcgccaagcugagaauggugaccggccugagaaacauccccagcauccagagcagaggccuguucggcgccaucgccggcuucaucgagggcggcuggaccggcaugguggacggcugguacggcuaccaccaccagaacgagcagggcagcggcuacgccgccgaccagaagagcacccagaacgccaucaacggcaucaccaacaaggugaacagcgugaucgagaagaugaacacccaguucaccgccgugggcaaggaguucagcaagcuggagagaagaauggagaaccugaacaagaagguggacgacggcuuccuggacaucuggaccuacaacgccgagcugcuggugcugcuggagaacgagagaacccuggacuuccacgacagcaacgugaagaaccuguacgagaaggugaagggccagcugaagaacaacgccaaggagaucggcaacggcugcuucgaguucuaccacaagugcaacaacgagugcauggagagcgugaagaacggcaccuacgacuaccccaaguacagcgaggagagcaagcugaacagagagaagaucgacggcgugaagcuggacagcaugggcguguaccagauccuggccaucuacagcaccguggccagcagccugauccugcuggugagccugggcgccaucagcuucuggaugugcagcaacggcagccugcagugcagaaucugcaucuga

SEQ ID NO: 160546 - RNA, 1701 nt, Artificial Sequence
  derived and/or modified CDS sequence (opt4) from hemagglutinin__InfluenzaA__ABB86907
augaaggccauccugcuggugcugcuguacaccuucaccagcaccaacgccgacacccugugcaucggcuaccacgccaacaacagcaccgacaccguggacaccgugcuggagaagaacgugaccgugacccacagcgugaaccugcuggaggacaagcacaacggcaagcugugcagacugggcggcaucgccccccugcaccugggcaagugcaacaucgccggcuggcugcugggcaaccccgagugcgaccugcugcugaccgugagcagcuggagcuacaucguggagaccagcaacagcuacaacggcaccugcuaccccggcgacuucaccaacuacgaggagcugagagagcagcugagcagcgugagcagcuucgagagauucgagaucuuccccaaggccagcagcuggcccaaccacgagaccaacagaggcgugaccgccgccugcccccacgccggcaccaacagcuucuacagaaaccugaucuggcuggugaagaagggcaacaccuaccccaagcugagcaagagcuacgugaacaacaagggcaaggaggugcuggugcuguggggcauccaccaccccagcaccagcaccgaccagcagagccuguaccagaacgccgacaccuacguguucgugggcaccagcaaguacaacaagaaguucaagcccgagaucgccgugagacccaaggugaaggaccaggccggcagaaugaacuacuacuggacccugguggagcccggcgacaccaucaccuucgaggccaccggcaaccugguggugcccagauacgccuucgccaugaacagaggccacggcagcggcaucaucaucagcgacacccccgugcacgacugcaacaccaccugccagacccccaagggcgccaucaacaccagccugcccuuccagaacgugcaccccgugaccaucggcaagugccccaaguacgugaagagcaccagacugagaauggccaccggccugagaaacauccccagcauccagagcagaggccuguucggcgccaucgccggcuucaucgagggcggcuggaccggcaugaucgacggcugguacggcuaccaccaccagaacggccagggcagcggcuacgccgccgaccagaagagcacccagaacgccaucgacggcaucaccaacaaggugaacagcgugaucgagaagaugaacacccaguucaccgccgugggcaaggaguucaaccaccuggagaagagaaucgagaaccugaacaagaagguggacgacggcuuccuggacguguggaccuacaacgccgagcugcuggugcugcuggagaacgagagaacccuggacuuccacgacagcaacgugaagaaccuguacgagaaggugagaagacagcugaagaacaacgccaaggagaucggcaacggcugcuucgaguucuaccacaacugcgacgacgccugcauggagagcgugaagaacggcaccuacgacuaccccaaguacagcgaggagagcagacugaacagagaggagaucaacggcaucaagcuggacagcaccagaaucuaccagauccuggccaucuacagcaccguggccagcagcagcgugcugcuggugagccugggcgccaucagcuucuggaugugcagcaacggcagccugcagugcagaaucugcaucuga

SEQ ID NO: 160547 - RNA, 1698 nt, Artificial Sequence
  derived and/or modified CDS sequence (opt4) from hemagglutinin__InfluenzaA__ABB86917
augaaggugaagcugcugauccugcugugcaccuucaccgccaccuacgccgaccccaucugcaucggcuaccacgccaacaacagcaccgacaccguggacaccgugcuggagaagaacguggccgugacccacagcgugaaccugcuggaggacagccacaacggcaagcugugccugcugaagggcaucgccccccugcagcugggcaacugcagcguggccggcuggauccugggcaaccccgagugcgagcugcugaucagcaaggagagcuggagcuacaucguggagacccccaaccccgagaacggcgccugcuaccccggcuacuucgccgacuacgaggagcugagagagcagcugagcagcgugagcagcuucgagagauucgagaucuuccccaaggagagcagcuggcccaaccacaccgugaccggcgugagcgccagcugcagccacaacggcaagagcagcuucuacagaaaccugcuguggcugaccggcaagaacggccuguaccccaaccugagcaagagcuacgccaacaacaaggagaaggaggugcugauccuguggggcgugcaccacccccccaacaucggcgaccagagaacccuguaccacaccgagaacgccuacgugagcguggugagcagccacuacagcagaagauucacccccgagaucaccaagagacccaaggugagagaccaggagggcagaaucaacuacuacuggacccugcuggagcccggcgacaccaucaucuucgaggccaacggcaaccugaucgcccccugguacgccuucgcccugagcagaggcuucggcagcggcaucaucaccagcaacgcccccauggacgagugcgacgccaagugccagaccccccagggcgccaucaacagcagccugcccuuccagaacgugcaccccgugaccaucggcgagugccccaaguacgugagaagcgccaagcugagaauggugaccggccugagaaacauccccagcauccagagcagaggccuguucggcgccaucgccggcuucaucgagggcggcuggaccggcaugguggacggcugguacggcuaccaccaccagaacgagcagggcagcggcuacgccgccgaccagaagagcacccagaacgccaucaacggcaucaccaacaaggugaacagcgugaucgagaagaugaacacccaguucaccgccgugggcaaggaguucaacaagcuggagagaagaauggagaaccugaacaagaagguggacgacggcuuccuggacaucuggaccuacaacgccgagcugcuggugcugcuggagaacgagagaacccuggacuuccacgacagcaacgugaagaaccuguacgagaaggugaagagccagcugaagaacaacgccaaggagaucggcaacggcugcuucgaguucuaccacaagugcaacaacgagugcauggagagcgugaagaacggcaccuacgacuaccccaaguacagcgaggagagcaagcugaacagagagaagaucgacggcgugaagcuggacagcaugggcguguaccagauccuggccaucuacagcaccguggccagcagccuggugcugcuggugagccugggcgccaucagcuucuggaugugcagcaacggcagccugcagugcagaaucugcaucuga

SEQ ID NO: 160548 - RNA, 1698 nt, Artificial Sequence
  derived and/or modified CDS sequence (opt4) from hemagglutinin__InfluenzaA__ABB86929
augaaggugaagcugcugauccugcuguacaccuucaccgccaccuacgccgacaccaucugcaucggcuaccacgccaacaacagcaccgacaccguggacaccgugcuggagaagaacgugaccgugacccacagcgugaaccugcuggaggacagccacaacggcaagcugugccugcugaagggcaucgccccccugcagcugggcaacugcagcguggccggcuggauccugggcaaccccgagugcgagcugcugaucagcaaggagagcuggagcuacaucguggagacccccaaccccgagaacggcgccugcuaccccggccacuucgccgacuacgaggagcugagagagcagcugagcagcgugagcagcuucgagagauucgagaucuuccccaaggagagcagcuggcccaaccacaccaucaccggcgugagcgccagcugcagccacaacggcaagagaagcuucuacagaaaccugcuguggcugaccggcaagaacggccuguaccccaaccugagcaagagcuacgccaacaacaaggagaaggaggugcugauccuguggggcgugcaccacccccccaacaucggcgaccagagaacccuguaccacaccgagaacgccuacgugagcguggugagcagccacuacagcagaagauucacccccgagaucaccaagagacccaaggugagagaccaggagggcagaaucaacuacuacuggacccugcuggagcccggcgacaccaucaucuucgaggccaacggcaaccugaucgcccccugguacgccuucgcccugagcagaggcuucggcagcggcaucaucaccagcaacgcccccauggacgagugcgacgccaagugccagaccccccagggcgccaucaacagcagccugcccuuccagaacgugcaccccgugaccaucggcgagugccccaaguacgugagaagcgccaagcugagaauggugaccggccugagaaacauccccagcauccagagcagaggccuguucggcgccaucgccggcuucaucgagggcggcuggaccggcaugguggacggcugguacggcuaccaccaccagaacgagcagggcagcggcuacgccgccgaccagaagagcacccagaacgccaucaacggcaucaccaacaaggugaacagcgugaucgagaagaugaacacccaguucaccgccgugggcaaggaguucagcaagcuggagagaagaauggagaaccugaacaagaagguggacgacggcuuccuggacaucuggaccuacaacgccgagcugcuggugcugcuggagaacgagagaacccuggacuuccacgacagcaacgugaagaaccuguacgagaaggugaagggccagcugaagaacaacgccaaggagaucggcaacggcugcuucgaguucuaccacaagugcaacaacgagugcauggagagcgugaagaacggcaccuacgacuaccccaaguacagcgaggagagcaagcugaacagagagaagaucgacggcgugaagcuggacagcaugggcguguaccagauccuggccaucuacagcaccguggccagcagccugauccugcuggugagccugggcgccaucagcuucuggaugugcagcaacggcagccugcagugcagaaucugcaucuga

SEQ ID NO: 160549 - RNA, 1701 nt, Artificial Sequence
  derived and/or modified CDS sequence (opt4) from hemagglutinin__InfluenzaA__ABB86937
augaaggccauccugcuggugcugcuguacaccuucaccagcaccaacgccgacacccugugcaucggcuaccacgccaacaacagcaccgacaccguggacaccgugcuggagaagaacgugaccgugacccacagcgugaaccugcuggaggacaagcacaacggcagacugugcaagcugggcggcaucgccccccugcaccugggcaagugcaacaucgccggcuggcugcugggcaaccccgagugcgagcugcuguucaccgugagcagcuggagcuacaucguggagaccagcaacagcuacaacggcaccugcuaccccggcgacuucaucaacuacgaggagcugagagagcagcugagcagcgugagcagcuucgagagauucgagaucuuccccaaggccagcagcuggcccaaccacgagaccaacagaggcgugaccgccgccugcccccacgccggcaccaacagcuucuacagaaaccugaucuggcuggugaagaagggcaacaccuaccccaagaucagcaagagcuacgugaacaacaagggcaaggaggugcuggugcuguggggcauccaccaccccagcaccagcaacgaccagcagagccuguaccagaacgccgacaccuacguguucgugggccccagcaaguacaacaagaaguucaagcccgagaucgccaccagacccaaggugagagaccaggccggcagaaugaacuacuacuggacccugguggagcccggcgacaccaucaccuucgaggccaccggcaaccugguggugcccagauacgccuucgccaugaacagaggcagcgagagcggcaucaucaucagcgacacccccgugcacgacugcaacaccaccugccagacccccaagggcgccaucaacaccagccugcccuuccagaacgugcaccccgugaccaucggcgagugccccaaguacgugaagagcaccagacugagaauggccaccggccugagaaacauccccagcauccagagcagaggccuguucggcgccaucgccggcuucaucgaggagggcuggaccggcaugaucgacggcugguacggcuaccaccaccagaacggccagggcagcggcuacgccgccgaccagaagagcacccagaacgccaucgacggcaucaccaacaaggugaacagcgugaucgagaagaugaacacccaguucaccgccgugggcaaggaguucaaccaccuggagaagagaaucgagaaccugaacaagaagguggacgacggcuuccuggacguguggaccuacaacgccgagcugcuggugcugcuggagaacgagagaacccuggacuuccacgacagcaacgugaagaaccuguacgagaaggugagaagacagcugaagaacaacgccaaggagaucggcaacggcugcuucgaguucuaccacaagugcgacgacgccugcauggagagcgugaagaacggcaccuacgacuaccccaaguacagcgaggagagcagacugaacagagaggagaucaacggcaucaagcuggacagcaccagaaucuaccagauccuggccaucuacagcaccguggccagcagcagcgugcugcuggugagccugggcgccaucagcuucuggaugugcagcaacggcagccugcagugcagaaucugcaucuga

SEQ ID NO: 160550 - RNA, 1701 nt, Artificial Sequence
  derived and/or modified CDS sequence (opt4) from hemagglutinin__InfluenzaA__ABB86946
augaaggccauccugcuggugcugcuguacaccuucaccgccgccaacgccgacacccugugcaucggcuaccacgccaacaacagcaccgacaccguggacaccgugcuggagaagaacgugaccgugacccacagcgugaaccugcuggaggacagacacaacggcaagcugugcaagcugagaggcaucgccccccugcaccugggcaagugcaacaucgccggcuggcugcugggcaaccccgagugcgagagccugagcaccgugagcagcuggagcuacaucguggagaccagcaacagcgacaacggcaccugcuaccccggcgacuucaucaacuacgaggagcugagagagcagcugagcagcgugagcagcuucgagagauucgagaucuuccccaaggccagcagcuggcccaaccacgagaccaacagaggcaccaccgccgccugccccuacgccggcgccaacagcuucuacagaaaccugaucuggcuggugaagaagggcaacagcuaccccaagcugaacaagagcuacgugaacaacaagggcaaggaggugcuggugcuguggggcauccaccaccccagcaccagcaacgagcagcagagccuguaccagaacgccgacaccuacguguucgugggcagcagcaaguacaacaagaaguucaagcccgagaucgccaccagacccaaggugagagaccaggccggcagaaugaacuacuacuggacccugaucgagcccggcgacaccaucaccuucgaggccaccggcaaccugguggugcccagauacgccuucgccaugaacagaggcagcggcagcggcaucaucaucagcgacacccccgugcacgacugcaacaccaccugccagacccccaagggcgccaucaacaccagccugcccuuccagaacgugcaccccgugaccaucggcgagugccccaaguacgugaagagcaccaagcugagaauggccaccggccugagaaacauccccagcauccagagcagaggccuguucggcgccaucgccggcuucaucgagggcggcuggaccggcaugaucgacggcugguacggcuaccaccaccagaacgagcagggcagcggcuacgccgccgaccagaagagcacccagaacgccaucgacggcaucaccaacaaggugaacagcgugaucgagaagaugaacacccaguucaccgccgugggcaaggaguucaaccaccuggagaagagaaucgagaaccugaacaagaagguggacgacggcuuccuggacguguggaccuacaacgccgagcugcuggugcugcuggagaacgagagaacccuggacuuccacgacagcaacgugaagaaccuguacgagaaggugagaagccagcugaagaacaacgccaaggagaucggcaacggcugcuucgaguucuaccacaagugcgacgacgccugcauggagagcgugaagaacggcaccuacgacuaccccaaguacagcgaggagagcagacugaacagagaggagaucgacggcaucaagcuggacagcaccagaaucuaccagauccuggccaucuacagcaccguggccagcagcagcgugcugcuggugagccugggcgccaucagcuucuggaugugcagcaacggcagccugcagugcagaaucugcaucuga

SEQ ID NO: 160551 - RNA, 1701 nt, Artificial Sequence
  derived and/or modified CDS sequence (opt4) from hemagglutinin__InfluenzaA__ABB96319
augaagaccaucaucgcccugagcuacaucuucugccagguguucgcccagaaccugcccggcaacgacaacagcaccgccacccugugccugggccaccacgccgugcccaacggcacccuggugaagaccaucaccaacgaccagaucgaggugaccaacgccaccgagcuggugcagagcagcagcaccggcagaaucugcgacaacccccacagaauccuggacggcaagaacugcacccugaucgacgcccugcugggcgacccccacugcgacggcuuccagaacgagaagugggaccuguucguggagagaagcaaggccuucagcaacugcuaccccuacgacgugcccgacuacgccagccugagaagccugguggccagcagcggcacccuggaguucuucaacgagggcuucaacuggaccggcgugacccagaacggcggcagcuacgccugcaagagaggccccgacaacagcuucuucagcagacugaacuggcuguacaagagcgagagcaccuaccccgugcugaacgugaccaugcccaacaacgacaacuucgacaagcuguacaucuggggcgugcaccaccccagcaccgacaaggagcagaccaaccuguacgugcaggccagcggcagagugaccgugagcaccaagagaagccagcagaccaucauccccaacgugggccccagacccugggugagaggccugagcagcagaaucagcaucuacuggaccaucgugaagcccggcgacgugcugcugaucaacagcaacggcaaccugaucgcccccagaggcuacuucaagaucagaaccggcaagagcagcaucaugagaagcgacgcccccaucggcaccugcagcagcgagugcaucacccccaacggcagcauccccaacgacaagcccuuccagaacgugaacaagaucaccuacggcgccugccccaaguacgugaagcagaacacccugaagcuggccaccggcaugagaaacgugcccgagaagcagaccagaggcaucuucggcgccaucgccggcuucaucgagaacggcugggagggcaugaucgacggcugguacggcuucagacaccagaacagcgagggcaccggccaggccgccgaccugaagagcacccaggccgccaucgaccagaucaacggcaagcugaacagagugaucgagaagaccaacgagaaguuccaccagaucgagaaggaguucagcgagguggagggcagaauccaggaccuggagaaguacguggaggacaccaagaucgaccuguggagcuacaacgccgagcugcugguggcccuggagaaccagcacaccaucgaccugaccgacagcgagaugaacaagcuguucgagaagaccagaagacagcugagagagaacgccgaggacaugggcaacggcugcuucaagaucuaccacaagugcgacaacgccugcaucggcagcaucagaaacggcaccuacgaccacgacguguacagagacgaggcccugaacaacagauuccagaucaagggcguggagcugaagagcggcuacaaggacuggauccuguggaucagcuucgccaucagcugcuuccugcugugcguggugcugcugggcuucaucaugugggccugccagaagggcaacaucagaugcaacaucugcaucuga

SEQ ID NO: 160552 - RNA, 1701 nt, Artificial Sequence
  derived and/or modified CDS sequence (opt4) from hemagglutinin__InfluenzaA__ABB96330
augaagaccaucaucgcccugagcuacaucuucugccagguguucgcccagaaccugcccggcaacgacaacagcaccgccacccugugccugggccaccacgccgugcccaacggcacccuggugaagaccaucaccaacgaccagaucgaggugaccaacgccaccgagcuggugcagagcagcagcaccggcagaaucugcgacaacccccacagaauccuggacggcaagaacugcacccugaucgacgcccugcugggcgacccccacugcgacggcuuccagaacgagaagugggaccuguucguggagagaagcaaggccuucagcaacugcuaccccuacgacgugcccgacuacgccagccugagaagccugguggccagcagcggcacccuggaguucuucaacgagggcuucaacuggaccggcgugacccagaacggcggcagcuacgccugcaagagaggccccgacaacagcuucuucagcagacugaacuggcuguacaagagcgagagcaccuaccccgugcugaacgugaccaugcccaacaacgacaacuucgacaagcuguacaucuggggcgugcaccaccccagcaccgacaaggagcagaccaaccuguacgugcaggccagcggcagagugaccgugagcaccaagagaagccagcagaccaucauccccaacgugggcagcagacccugggugagaggccugagcagcagaaucagcaucuacuggaccaucgugaagcccggcgacgugcugcugaucaacagcaacggcaaccugaucgcccccagaggcuacuucaagaucagaaccggcaagagcagcaucaugagaagcgacgcccccaucggcaccugcagcagcgagugcaucacccccaacggcagcauccccaacgacagacccuuccagaacgugaacaagaucaccuacggcgccugccccaaguacgugaagcagaacacccugaagcuggccaccggcaugagaaacgugcccgagaagcagaccagaggcaucuucggcgccaucgccggcuucaucgagaacggcugggagggcaugguggacggcugguacggcuucagacaccagaacagcgagggcaccggccaggccgccgaccugaagagcacccaggccgccaucgaccagaucaacggcaagcugaacagagugaucgagaagaccaacgagaaguuccaccagaucgagaaggaguucagcgagguggagggcagaauccagaaccuggagaaguacguggaggacaccaagaucgaccuguggagcuacaacgccgagcugcugguggcccuggagaaccagcacaccaucgaccugaccgacagcgagaugaacaagcuguucgagaagaccagaagacagcugagagagaacgccgaggacaugggcaacggcugcuucaagaucuaccacaagugcgacaacgccugcaucggcagcaucagaaacggcaccuacgaccacgacguguacagagacgaggcccugaacaacagauuccagaucaagggcguggagcugaagagcggcuacaaggacuggauccuguggaucagcuucgccaucagcugcuuccugcugugcguggugcugcugggcuucaucaugugggccugccagaagggcaacaucagaugcaacaucugcaucuga

SEQ ID NO: 160553 - RNA, 1701 nt, Artificial Sequence
  derived and/or modified CDS sequence (opt4) from hemagglutinin__InfluenzaA__ABB96341
augaagaccaucaucgcccugagcuacaucuucugccagguguucgcccagaaccugcccggcaacgacaacagcaccgccacccugugccugggccaccacgccgugcccaacggcacccuggugaagaccaucaccaacgaccagaucgaggugaccaacgccaccgagcuggugcagagcagcagcaccggcagaaucugcgacaacccccacagaauccuggacggcaagaacugcacccugaucgacgcccugcugggcgacccccacugcgacggcuuccagaacgagaagugggaccuguucguggagagaagcaaggccuucagcaacugcuaccccuacgacgugcccgacuacgccagccugagaagccugguggccagcagcggcacccuggaguucuucaacgagggcuucaacuggaccggcgugacccagaacggcggcagcuacgccugcaagaagggccccgacaacagcuucuucagcagacugaacuggcuguacaagagcgagagcaccuaccccgugcugaacgugaccaugcccaacaacgacaacuucgacaagcuguacaucuggggcgugcaccaccccagcaccgacaaggagcagaccaaccuguacgugcaggccagcggcagagugaccgugagcaccaagagaagccagcagaccaucauccccaacgugggcagcagacccugggugagaggccugagcagcagaaucagcaucuacuggaccaucgugaagcccggcgacgugcugcugaucaacagcaacggcaaccugaucgcccccagaggcuacuucaagaucagaaccggcaagagcagcaucaugagaagcgacgcccccaucggcaccugcagcagcgagugcaucacccccaacggcagcauccccaacgacaagcccuuccagaacgugaacaagaucaccuacggcgccugccccaaguacgugaagcagaacacccugaagcuggccaccggcaugagaaacgugcccgagaagcagaccagaggcaucuucggcgccaucgccggcuucaucgagaacggcugggagggcaugaucgacggcugguacggcuucagacaccagaacagcgagggcaccggccaggccgccgaccugaagagcacccaggccgccaucgaccagaucaacggcaagcugaacagagugaucgagaagaccaacgagaaguuccaccagaucgagaaggaguucagcgagguggagggcagaauccaggaccuggagaaguacguggaggacaccaagaucgaccuguggagcuacaacgccgagcugcugguggcccuggagaaccagcacaccaucgaccugaccgacagcgagaugaacaagcuguucgagaagaccagaagacagcugagagagaacgccgaggacaugggcaacggcugcuucaagaucuaccacaagugcgacaacgccugcaucggcagcaucagaaacggcaccuacgaccacgacguguacagagacgaggcccugaacaacagauuccagaucaagggcguggagcugaagagcggcuacaaggacuggauccuguggaucagcuucgccaucagcugcuuccugcugugcguggugcugcugggcuucaucaugugggccugccagaagggcaacaucagaugcaacaucugcaucuga

SEQ ID NO: 160554 - RNA, 1701 nt, Artificial Sequence
  derived and/or modified CDS sequence (opt4) from hemagglutinin__InfluenzaA__ABB96395
augaagaccaucaucgcccugagcuacaucuucugccagguguucgcccagaaccugcccggcaacgacaacagcaccgccacccugugccugggccaccacgccgugcccaacggcacccuggugaagaccaucaccaacgaccagaucgaggugaccaacgccaccgagcuggugcagagcagcagcaccggcagaaucugcgacagcccccacagaauccuggacggcaagaacugcacccugauggacgcccugcugggcgacccccacugcgacggcuuccagaacgagaagugggaccuguucguggagagaagcaaggccuucagcaacugcuaccccuacgacgugcccgacuacgccagccugagaagccugguggccagcagcggcacccuggaguucaucaacgagggcuucaacuggaccggcgugacccagaacggcggcagcuacgccugcaagagaggccccgacaacagcuucuucagcagacugaacuggcuguacaagagcgagagcaccuaccccgugcugaacgugaccaugcccaacaacgacaacuucgacaagcuguacaucuggggcgugcaccaccccagcaccgacaaggagcagaccaaccuguacgugcaggccagcggcagagugaccgugagcaccaagagaagccagcagaccaucauccccaacgugggcagcagacccugggugagaggccugagcagcagaaucagcaucuacuggaccaucgugaagcccggcgacauccugcugaucaacagcaacggcaaccugaucgcccccagaggcuacuucaagaucagaaccggcaagagcagcaucaugagaagcgacgcccccaucggcaccugcagcagcgagugcaucacccccaacggcagcauccccaacgacaagcccuuccagaacgugaacaagaucaccuacggcgccugccccaaguacgugaagcagaacacccugaagcuggccaccggcaugagaaacgugcccgagaagcagaccagaggcaucuucggcgccaucgccggcuucaucgagaacggcugggagggcaugaucgacggcugguacggcuucagacaccagaacagcgagggcaccggccaggccgccgaccugaagagcacccaggccgccaucgaccagaucaacggcaagcugaacagagugaucgagagaaccaacgagaaguuccaccagaucgagaaggaguucagcgagguggagggcagaauccaggaccuggagaaguacguggaggacaccaagaucgaccuguggagcuacaacgccgagcugcugguggcccuggagaaccagcacaccaucgaccugaccgacagcgagaugaacaagcuguucgagaagaccagaagacagcugagagagaacgccgaggacaugggcaacggcugcuucaagaucuaccacaagugcgacaacgccugcaucggcagcaucagaaacggcaccuacgaccacgacguguacagagacgaggcccugaacaacagauuccagaucaagggcguggagcugaagagcggcuacaaggacuggauccuguggaucagcuucgccaucagcugcuuccugcugugcguggugcugcugggcuucaucaugugggccugccagaagggcaacaucagaugcaacaucugcaucuga

SEQ ID NO: 160555 - RNA, 1698 nt, Artificial Sequence
  derived and/or modified CDS sequence (opt4) from hemagglutinin__InfluenzaA__ABB96487
augaaggugaagcugcugauccugcugugcaccuucaccgccaccuacgccgacaccaucugcaucggcuaccacgccaacaacagcaccgacaccguggacaccgugcuggagaagaacgugaccgugacccacagcgugaaccugcuggaggacagccacaacggcaagcugugccugcugaagggcaucgccccccugcagcugggcaacugcagcguggccggcuggauccugggcaaccccgagugcgagcugcugaucagcaaggagagcuggagcuacaucguggagacccccaaccccgagaacggcgccugcuaccccggcuacuucgccgacuacgaggagcugagagagcagcugagcagcgugagcagcuucgagagauucgagaucuuccccaagaagagcagcuggcccaaccacaccgugaccggcgugagcgccagcugcagccacgacggcaagagcagcuucuacagaaaccugcuguggcugaccggcaagaacggccuguaccccaaccugagcaagagcuacgccaacaacaaggagaaggaggugcugauccuguggggcgugcaccacccccccaacaucggcgaccagagaacccuguaccacaccgagaacgccuacgugagcguggugagcagccacuacagcagaagauucacccccgagaucaccaagagacccaaggugagagaccaggagggcagaaucaacuacuacuggacccugcuggagcccggcgacaccaucaucuucgaggccaacggcaaccugaucgcccccugguacgccuucgcccugagcagaggcuucggcagcggcaucaucaccagcaacgcccccauggacgagugcgacgccaagugccagaccccccagggcgccaucaacagcagccugcccuuccagaacgugcaccccgugaccaucggcgagugccccaaguacgugagaagcgccaagcugagaauggugaccggccugagaaacauccccagcauccagagcagaggccuguucggcgccaucgccggcuucaucgagggcggcuggaccggcaugguggacggcugguacggcuaccaccaccagaacgagcagggcagcggcuacgccgccgaccagaagagcacccagaacgccaucaacggcaucaccaacaaggugaacagcgugaucgagaagaugaacacccaguucaccgccgugggcaaggaguucaacaagcuggagagaagaauggagaaccugaacaagaagguggacgacggcuuccuggacaucuggaccuacaacgccgagcugcuggugcugcuggagaacgagagaacccuggacuuccacgacagcaacgugaagaaccuguacgagaaggugaagagccagcugaagaacaacgccaaggagaucggcaacggcugcuucgaguucuaccacaagugcaacaacgagugcauggagagcgugaagaacggcaccuacgacuaccccaaguacagcgaggagagcaagcugaacagagagaagaucgacggcgugaagcuggacagcaugggcguguaccagauccuggccaucuacagcaccguggccagcagccuggugcugcuggugagccugggcgccaucagcuucuggaugugcagcaacggcagccugcagugcagaaucugcaucuga

SEQ ID NO: 160556 - RNA, 1701 nt, Artificial Sequence
  derived and/or modified CDS sequence (opt4) from hemagglutinin__InfluenzaA__ABB96520
augaagaccaucaucgcccugagcuacaucuucugccuggcccugggccaggaccugcccggcaacggcaacagcaccgccacccugugccugggccaccacgccgugcccaacggcacccuggugaagaccaucaccgacgaccagaucgaggugaccaacgccaccgagcuggugcagagcagcagcaccggcaagaucugcaacaacccccacagaauccuggacggcaucgacugcacccugaucgacgcccugcugggcgacccccacugcgacguguuccagaacgagaccugggaccuguucguggagagaagcaaggccuucagcaacugcuaccccuacgacgugcccgacuacgccagccugagaagccugguggccagcagcggcacccuggaguucaucaccgagggcuucaccuggaccggcgugacccagaacggcggcagcaacgccugcaagagaggccccggcagcggcuucuucagcagacugaacuggcugaccaagagcggcagcaccuaccccgugcugaacgugaccaugcccaacaacgacaacuucgacaagcuguacaucuggggcgugcaccaccccagcaccgaccaggagcagaccagccuguacgugcaggccagcggcagagugaccgugagcaccagaagaagccagcagaccaucauccccaacaucggcagcagacccugggugagaggccugagcagcagaaucagcaucuacuggaccaucgugaagcccggcgacgugcuggugaucaacagcaacggcaaccugaucgcccccagaggcuacuucaagaugagaaccggcaagagcagcaucaugagaagcgacgcccccaucgacaccugcaucagcgagugcaucacccccaacggcagcauccccaacgacaagcccuuccagaacgugaacaagaucaccuacggcgccugccccaaguacgugaagcagaagacccugaagcuggccaccggcaugagaaacauccccgagaagaagaccagaggcaucuucggcgccaucgccggcuucaucgagaacggcugggagggcaugaucgacggcugguacggcuucagacaccagaacagcgagggcaccggccaggccgccgaccugaagagcacccaggccgccaucgaccagaucaacggcaagcugaacagagugaucgagaagaccaacgagaaguuccaccagaucgagaaggaguucagcgagguggagggcagaauccaggaccuggagaaguacguggaggacaccaagaucgaccuguggagcuacaacgccgagcugcugguggcccuggagaaccagcacaccaucgaccugaccgacagcgagaugaacaagcuguucgagaagaccagaagacagcugagagagaacgccgaggacaugggcaacggcugcuucaagaucuaccacaagugcgacaacgccugcaucgagagcaucagaaacggcaccuacgaccacgacguguacagagacgaggcccugaacaacagauuccagaucaagggcguggagcugaagagcggcuacaaggacuggauccuguggaucagcuucgccaucagcugcuuccugcugugcguggugcugcugggcuucaucaugugggccugccagagaggcaacaucagaugcaacaucugcaucuga

SEQ ID NO: 160557 - RNA, 1701 nt, Artificial Sequence
  derived and/or modified CDS sequence (opt4) from hemagglutinin__InfluenzaA__ABB96531
augaagaccaucaucgcccugagcuacauccugugccuggugagcgcccagaagauccccggcaacgacagcagcaccgccacccugugccugggccaccacgccgugcccaacggcacccuggugaagaccaucaccaacgaccagaucgaggugaccaacgccaccgagcuggugcagagcagcagcaccggcagaaucugcgacagcccccacagaauccuggacggcgagaacugcacccugaucgacgcccugcugggcgacccccacugcgacggcuuccagaacaaggagugggaccuguucguggagagaagcaaggccuacagcaacugcuaccccuacgacgugcccgacuacgccagccugagaagccugguggccagcagcggcacccuggaguucaacaacgagagcuucaacuggaccggcguggcccagaacggcaccagcuacgccugcaagagaagaagcaucaagagcuucuucagcagacugaacuggcugcaccagcugaaguacaaguaccccgcccugaacgugaccaugcccaacaacgacaaguucgacaagcuguacaucuggggcgugcaccaccccagcaccgacagcgaccagaccagccuguacgcccaggccagcggcagagugaccgugagcaccaagagaagccagcagaccgugauccccaacaucggcagcagacccugggugagaggcgugagcagcagaaucagcaucuacuggaccaucgugaagcccggcgacauccugcugaucaacagcaccggcaaccugaucgcccccagaggcuacuucaagaucagaagcggcaagagcagcaucaugagaagcgacgcccccaucggcaagugcaacagcgagugcaucacccccaacggcagcauccccaacgacaagcccuuccagaacgugaacagaaucaccuacggcgccugccccagauacgugaagcagaacacccugaagcuggccaccggcaugagaaacgugcccgagaagcagaccagaggcaucuucggcgccaucgccggcuucaucgagaacggcugggagggcaugguggacggcugguacggcuucagacaccagaacagcgagggcaccggccaggccgccgaccugaagagcacccaggccgccaucaaccagaucaacggcaagcugaacagacugaucgagaagaccaacgagaaguuccaccagaucgagaaggaguucagcgagguggagggcagaauccaggaccuggagaaguacguggaggacaccaagaucgaccuguggagcuacaacgccgagcugcugguggcccuggagaaccagcacaccaucgaccugaccgacagcgagaugaacaagcuguucgagagaaccagaaagcagcugagagagaacgccgaggacaugggcaacggcugcuucaagaucuaccacaagugcgacaacgccugcaucggcagcaucagaaacggcaccuacgaccacgacguguacagagacgaggcccugaacaacagauuccagaucaagggcguggagcugaagagcggcuacaaggacuggauccuguggaucagcuucgccaucagcugcuuccugcugugcguggugcugcugggcuucaucaugugggccugccagaagggcaacaucagaugcaacaucugcaucuga

SEQ ID NO: 160558 - RNA, 1701 nt, Artificial Sequence
  derived and/or modified CDS sequence (opt4) from hemagglutinin__InfluenzaA__ABC02234
augaagaccaucaucgcccugagcuacauccugugccugguguucgcccagaagcugcccggcaacgacaacagcaccgccacccugugccugggccaccacgccgugcccaacggcacccuggugaagaccaucaccaacgaccagaucgaggugaccaacgccaccgagcuggugcagagcagcagcaccggcagaaucugcgacagcccccacagaauccuggacggcgagaacugcacccugaucgacgcccugcugggcgacccccacugcgacggcuuccagaacaaggagugggaccuguucguggagagaagcaaggccuacagcaacugcuaccccuacgacgugcccgacuacgccagccugagaagccugguggccagcagcggcacccuggaguucaacaacgagagcuucaacuggaccggcguggcccagaacggcaccagcuacgccugcaagagaagaagcaucaagagcuucuucagcagacugaacuggcugcaccagcugaaguacaaguaccccgcccugaacgugaccaugcccaacaacgacaaguucgacaagcuguacaucuggggcgugcaccaccccagcaccgacagcgaccagaccagccuguacgcccaggccagcggcagagugaccgugagcaccaagaucagccagcagaccgugauccccaacaucggcagcagacccugggugagaggcgugagcagcagaaucagcaucuacuggaccaucgugaagcccggcgacauccugcugaucaacagcaccggcaaccugaucgcccccagaggcuacuucaagaucagaagcggcaagagcagcaucaugagaagcgacgcccccaucggcaagugcaacagcgagugcaucacccccaacggcagcauccccaacgacaagcccuuccagaacgugaacagaaucaccuacggcgccugccccagauacgugaagcagaacacccugaagcuggccaccggcaugagaaacgugcccgagaagcagaccagaggcaucuucggcgccaucgccggcuucaucgagaacggcugggagggcaugguggacggcugguacggcuucagacaccagaacagcgagggcaccggccaggccgccgaccugaagagcacccaggccgccaucaaccagaucaacggcaagcugaacagacugaucgagaagaccaacgagaaguuccaccagaucgagaaggaguucagcgagguggagggcagaauccaggaccuggagaaguacguggaggacaccaagaucgaccuguggagcuacaacgccgagcugcugguggcccuggagaaccagcacaccaucgaccugaccgacagcgagaugaacaagcuguucgagagaaccagaaagcagcugagagagaacgccgaggacaugggcaacggcugcuucaagaucuaccacaagugcgacaacgccugcaucggcagcaucagaaacggcaccuacgaccacgacguguacagagacgaggcccugaacaacagauuccagaucaagggcguggagcugaagagcggcuacaaggacuggauccuguggaucagcuucgccaugagcugcuuccuguucugcguggugcugcugggcuucaucaugugggccugccagaagggcaacaucagaugcaacaucugcaucuga

SEQ ID NO: 160559 - RNA, 1701 nt, Artificial Sequence
  derived and/or modified CDS sequence (opt4) from hemagglutinin__InfluenzaA__ABC02255
augaagaccaucaucgcccugagcuacaucuucugccuggugcuggcccaggaccugcccggcaacgacaacagcaccgccacccugugccugggccaccacgccgugcccaacggcacccuggugaagaccaucaccaacgaccagaucgaggugaccaacgccaccgagcuggugcagagcagcagcaccggcaagaucugcaacaacccccacagaauccuggacggcaucaacugcacccugaucgacgcccugcugggcgacccccacugcgacggcuuccagaacgagaagugggaccuguucguggagagaagcaaggccuucagcaacugcuaccccuacgacgugcccgacuacgccagccugagaagccugguggccagcagcggcacccuggaguucaucaacgagggcuucaacuggaccggcgugacccagaacggcggcagcaacgccugcaagagaggccccgacagcggcuucuucagcagacugaacuggcuguacaagagcggcagcaccuaccccgugcugaacgugaccaugcccaacaacgacaacuucgacaagcuguacaucuggggcgugcaccaccccagcaccgaccaggagcagaccaaccuguacgugcaggccagcggcagagugaccgugagcaccaagagaagccagcagaccaucauccccaacgugggcagcagacccugggugagaggccugagcagcagaaucagcaucuacuggaccaucgugaagcccggcgacauccuggugaucaacagcaacggcaaccugaucgcccccagaggccacuucaagaugagaaccggcaagagcagcaucaugagaagcgacgcccccaucggcaccugcagcagcgagugcaucacccccaacggcagcauccccaacgacaagcccuuccagaacgugaacaagaucaccuacggcgccugccccaaguacgugaagcagaacacccugaagcuggccaccggcaugagaaacgugcccgagaagcagaccagaggcaucuucggcgccaucgccggcuucaucgagaacggcugggagggcaugaucgacggcugguacggcuucagacaccagaacagcgagggcaccggccaggccgccgaccugaagagcacccaggccgccaucgaccagaucaacggcaagcugaacagagugaucgagaagaccaacgagaaguuccaccagaucgagaaggaguucagcgagguggagggcagaauccaggaccuggagaaguacguggaggacaccaagaucgaccuguggagcuacaacgccgagcugcugguggcccuggagaaccagcacaccaucgaccugaccgacagcgagaugaacaagcuguucgagaagaccagaagacagcugagagagaacgccgaggacaugggcaacggcugcuucaagaucuaccacaagugcgacaacgccugcaucggcagcaucagaaacggcaccuacgaccacgacguguacagagacgaggcccugaacaacagauuccagaucaagggcguggagcugaagagcggcuacaaggacuggauccuguggaucagcuucgccaucagcugcuuccugcugugcguggugcugcugggcuucaucaugugggccugccagaagggcaacaucagaugcaacaucugcaucuga

SEQ ID NO: 160560 - RNA, 1701 nt, Artificial Sequence
  derived and/or modified CDS sequence (opt4) from hemagglutinin__InfluenzaA__ABC02266
augaagaccaucaucgcccugagcuacaucuucugccugguguucgcccaggaccugcccggcaacgacaacagcaccgccacccugugccugggccaccacgccgugcccaacggcacccuggugaagaccaucaccaacgaccagaucgaggugaccaacgccaccgagcuggugcagagcagcagcaccggcaagaucugcgacaacccccacagaauccuggacggcaucaacugcacccugaucgacgcccugcugggcgacccccacugcgacggcuuccagaacgagaagugggaccuguucguggagagaagcaaggccuucagcaacugcuaccccuacgacgugcccgacuacgccagccugagaagccugguggccagcagcggcacccuggaguucaucaacgagggcuucaacuggaccggcgugacccagaacggcggcagcagagccugcaagagaggccccgacaacggcuucuucagcagacugaacuggcuguacaagagcggcagcaccuaccccgugcagaacgugaccaugcccaacaacgacaacagcgacaagcuguacaucuggggcgugcaccaccccagcaccgacaaggagcagaccgaccuguacgugcaggccagcggcaaggugaccgugagcaccaagagaagccagcagaccgugauccccaacgugggcagcagacccugggugagaggccugagcagcagagugagcaucuacuggaccaucgugaagcccggcgacauccuggugaucaacagcaacggcaaccugaucgcccccagaggcuacuucaagaugagaaccggcaagagcagcaucaugagaagcgacgcccccaucggcaccugcagcagcgagugcaucacccccaacggcagcauccccaacgacaagcccuuccagaacgugaacaagaucaccuacggcgccugccccaaguacgugaagcagaacacccugaagcuggccaccggcaugagaaacgugcccgagaagcagaccagaggcaucuucggcgccaucgccggcuucaucgagaacggcugggagggcaugaucgacggcugguacggcuucagacaccagaacagcgagggcaccggccaggccgccgaccugaagagcacccaggccgccaucgaccagaucaacggcaagcugaacagagugaucgagaagaccaacgagaaguuccaccagaucgagaaggaguucagcgagguggagggcagaauccaggaccuggagaaguacguggaggacaccaagaucgaccuguggagcuacaacgccgagcugcugguggcccuggagaaccagcacaccaucgaccugaccgacagcgagaugaacaagcuguucgagaagaccagaagacagcugagagagaacgccgaggacaugggcaacggcugcuucaagaucuaccacaagugcgacaacgccugcaucggcagcaucagaaacggcaccuacgaccacgacguguacagagacgaggcccugaacaacagauuccagaucaagggcguggagcugaagagcggcuacaaggacuggauccuguggaucagcuucgccaucagcugcuuccugcugugcguggugcugcugggcuucaucaugugggccugccagaagggcaacaucagaugcaacaucugcaucuga

SEQ ID NO: 160561 - RNA, 1701 nt, Artificial Sequence
  derived and/or modified CDS sequence (opt4) from hemagglutinin__InfluenzaA__ABC02288
augaagaccaucaucgcccugagcuacauccugugccugguguucgcccagaagauccccggcaacgacaacagcaccgccacccugugccugggccaccacgccgugcccaacggcacccuggugaagaccaucaccaacgaccagaucgaggugaccaacgccaccgagcuggugcagagcagcagcaccggcagaaucugcgacagcccccacagaauccuggacggcgagaacugcacccugaucgacgcccugcugggcgacccccacugcgacggcuuccagaacaaggagugggaccuguucguggagagaagcaaggccuacagcaacugcuaccccuacgacgugcccgacuacgccagccugagaagccugguggccagcagcggcacccuggaguucaacaacgagagcuucaacuggaccggcguggcccagaacggcaccagcuacgccugcaagagaagaagcaucaagagcuucuucagcagacugaacuggcugcaccagcugaaguacaaguaccccgcccugaacgugaccaugcccaacaacgacaaguucgacaagcuguacaucuggggcgugcaccaccccagcaccgacagcgaccagaccagccuguacgcccaggccagcggcagagugaccgugagcaccaagagaagccagcagaccgugauccccaacaucggcagcagacccugggugagaggcgugagcagcagaaucagcaucuacuggaccaucgugaagcccggcgacauccugcugaucaacagcaccggcaaccugaucgcccccagaggcuacuucaagaucagaagcggcaagagcagcaucaugagaagcgacgcccccaucggcaagugcaacagcgagugcaucacccccaacggcagcauccccaacgacaagcccuuccagaacgugaacagaaucaccuacggcgccugccccagauacgugaagcagaacacccugaagcuggccaccggcaugagaaacgugcccgagaagcagaccagaggcaucuucggcgccaucgccggcuucaucgagaacggcugggagggcaugguggacggcugguacggcuucagacaccagaacagcgagggcaccggccaggccgccgaccugaagagcacccaggccgccaucaaccagaucaacggcaagcugaacagacugaucgagaagaccaacgagaaguuccaccagaucgagaaggaguucagcgagguggagggcagaauccaggaccuggagaaguacguggaggacaccaagaucgaccuguggagcuacaacgccgagcugcugguggcccuggagaaccagcacaccaucgaccugaccgacagcgagaugaacaagcuguucgagagaaccagaaagcagcugagagagaacgccgaggacaugggcaacggcugcuucaagaucuaccacaagugcgacaacgccugcaucggcagcaucagaaacggcaccuacgaccacgacguguacagagacgaggcccugaacaacagauuccagaucaagggcguggagcugaagagcggccacaaggacuggauccuguggaucagcuucgccaucagcugcuuccugcugugcguggugcugcugggcuucaucaugugggccugccagaagggcaacaucagaugcaacaucugcaucuga

SEQ ID NO: 160562 - RNA, 1701 nt, Artificial Sequence; identical to SEQ ID NO: 160530
  derived and/or modified CDS sequence (opt4) from hemagglutinin__InfluenzaA__ABC02299

SEQ ID NO: 160563 - RNA, 1701 nt, Artificial Sequence; identical to SEQ ID NO: 160554
  derived and/or modified CDS sequence (opt4) from hemagglutinin__InfluenzaA__ABC02310

SEQ ID NO: 160564 - RNA, 1701 nt, Artificial Sequence; identical to SEQ ID NO: 160559
  derived and/or modified CDS sequence (opt4) from hemagglutinin__InfluenzaA__ABC02321

SEQ ID NO: 160565 - RNA, 1701 nt, Artificial Sequence; identical to SEQ ID NO: 160365
  derived and/or modified CDS sequence (opt4) from hemagglutinin__InfluenzaA__ABC02332

SEQ ID NO: 160566 - RNA, 1701 nt, Artificial Sequence
  derived and/or modified CDS sequence (opt4) from hemagglutinin__InfluenzaA__ABC39805
augaagaccaucaucgcccugagcuacauccugugccugguguucgcccagaaccugcccggcaacgacaacagcaccgccacccugugccugggccaccacgccgugcccaacggcacccuggugaagaccaucaccaacgaccagaucgaggugaccaacgccaccgagcuggugcagagcagcagcgccggcagaaucugcgacagcccccacagaauccuggacggcaagaacugcacccugaucgacgcccugcugggcgacccccacugcgacggcuuccagaacgagaagugggaccuguucguggagagaagcaaggccuucagcaacugcuaccccuacgacgugcaggacuacgccagccugagaagccugguggccagcagcggcacccuggaguucaucaacgagggcuucaacuggaccggcgugacccagagcggcggcagcuacgccugcaagagaggcagcggcaacagcuucuucagcagacugaacuggcuguacaagagcgagagcaaguaccccgcccugaacgugaccaugcccaacaacggcaacuucgacaagcuguacaucuggggcgugcaccaccccagcaccgacaaggagcagaccaaccuguacgugagagccagcggcagagugaccgugagcaccaagagaagccagcagaccgugauccccaacaucggccccagacccugggugagaggccugagcagcagaaucagcaucuacuggaccaucgugaagcccggcgacauccugcugaucaacagcagcggcaaccugaucgcccccagaggcuacuucaagaucagaaccggcaagagcagcaucaugagaagcgacgcccccaucggcaccugcagcagcgagugcaucacccccaacggcagcauccccaacgacaagcccuuccagaacgugaacaagaucaccuacggcgccugccccaaguacgugaagcagaacacccugaagcuggccaccggcaugagaaacauccccgagaagcagaccagaggcaucuucggcgccaucgccggcuucaucgagaacggcugggagggcaugguggacggcugguacggcuucagacaccagaacagcgagggcaccggccaggccgccgaccugaagagcacccaggccgccaucgaccagaucaacggcaagcugaacagagugaucgagaagaccaacgagaaguuccaccagaucgagaaggaguucagcgagguggagggcagaauccaggaccuggagaaguacguggaggacaccaagaucgaccuguggagcuacaacgccgagcugcugguggcccuggagaaccagcacaccaucgaccugaccgacagcgagaugaacaagcuguucgagaagaccagaagacagcugagagagaacgccgaggacaugggcaacggcugcuucaagaucuaccacaagugcgacaacgccugcaucggcagcaucagaaacggcaccuacgaccacgacguguacagagacgaggcccugaacaacagauuccagaucaagggcguggagcugaagagcggcuacaaggacuggauccuguggaucagcuucgccaucagcugcuuccugcugugcguggugcugcugggcuucaucaugugggccugccagaagggcaacaucagaugcaacaucugcaucuga

SEQ ID NO: 160567 - RNA, 1698 nt, Artificial Sequence
  derived and/or modified CDS sequence (opt4) from hemagglutinin__InfluenzaA__ABC40522
augaaggugaagcugcugauccugcugugcaccuucaccgccaccuacgccgacaccaucugcaucggcuaccacgccaacaacagcaccgacaccguggacaccgugcuggagaagaacgugaccgugacccacagcgugaaccugcuggaggacagccacaacggcaagcugugccugcugaagggcaucgccccccugcagcugggcaacugcagcguggccggcuggauccugggcaaccccgagugcgagcugcugaucagcaaggagagcuggagcuacaucguggagacccccaaccccgagaacggcgccugcuaccccggcuacuucgccgacuacgaggagcugagagagcagcugagcagcgugagcagcuucgagagauucgagaucuuccccaaggagagcagcuggcccaaccacaccgugaccggcgugagcgccagcugcagccacaacggcaagagcagcuucuacaagaaccugcuguggcugaccggcaagaacggccuguaccccaaccugagcaagagcuacgccaacaacaaggagaaggaggugcugauccuguggggcgugcaccacccccccaacaucggcgaccagagaacccuguaccacaccgagaacgccuacgugagcguggugagcagccacuacagcagaagauucacccccgagaucaccaagagacccaaggugagagaccaggagggcagaaucaacuacuacuggacccugcuggagcccggcgacaccaucaucuucgaggccaacggcaaccugaucgcccccugguacgccuucgcccugagcagaggcuucggcagcggcaucaucaccagcaacgcccccauggacgagugcgacgccaagugccagaccccccagggcgccaucaacagcagccugcccuuccagaacgugcaccccgugaccaucggcgagugccccaaguacgugagaagcgccaagcugagaauggugaccggccugagaaacauccccagcauccagagcagaggccuguucggcgccaucgccggcuucaucgagggcggcuggaccggcaugguggacggcugguacggcuaccaccaccagaacgagcagggcagcggcuacgccgccgaccagaagagcacccagaacgccaucaacggcaucaccaacaaggugaacagcgugaucgagaagaugaacacccaguucaccgccgugggcaaggaguucaacaagcuggagagaagaauggagaaccugaacaagaagguggacgacggcuuccuggacaucuggaccuacaacgccgagcugcuggugcugcuggagaacgagagaacccuggacuuccacgacagcaacgugaagaaccuguacgagaaggugaagagccagcugaagaacaacgccaaggagaucggcaacggcugcuucgaguucuaccacaagugcaacaacgagugcauggagagcgugaagaacggcaccuacgacuaccccaaguacagcgaggagagcaagcugaacagagagaagaucgacggcgugaagcuggacagcaugggcguguaccagauccuggccaucuacagcaccguggccagcagccuggugcugcuggugagccugggcgccaucagcuucuggaugugcagcaacggcagccugcagugcagaaucugcaucuga

SEQ ID NO: 160568 - RNA, 1698 nt, Artificial Sequence; identical to SEQ ID NO: 160356
  derived and/or modified CDS sequence (opt4) from hemagglutinin__InfluenzaA__ABC40533

SEQ ID NO: 160569 - RNA, 1701 nt, Artificial Sequence
  derived and/or modified CDS sequence (opt4) from hemagglutinin__InfluenzaA__ABC40555
augaagaccaucaucgcccugagcuacaucuucugccugguguucgcccagaaccugcccagaaacgacaagagcaccgccacccugugccugggccaccacgccgugcccaacggcacccuggugaagaccaucaccaacgaccagaucgaggugaccaacgccaccgagcuggugcagagcagcagcaccggcagaaucugcgacagcccccacagaauccuggacggcaagaacugcacccugguggacgcccugcugggcgacccccacugcgacggcuuccagaacgagaagugggaccuguucguggagagaagcaaggccuucagcaacugcuaccccuacgacgugcccgacuacgccagccugagaagccugguggccagcagcggcacccuggaguucaucaacgagagcuucaacuggaccggcgugacccagagcggcggcagcuacgccugcaagagaggcagcgacaacagcuucuucagcagacugaacuggcuguacgagagcgagagcaaguaccccgugcugaacgugaccaugcccaacaacggcaacuucgacaagcuguacaucuggggcgugcaccaccccagcaccgacaaggagcagaccaaccuguacgugagagccagcggcagagugaccgugagcaccaagagaagccagcagaccaucauccccaacaucggcagcagacccugggugagaggccugagcagcagaaucagcaucuacuggaccaucgugaagcccggcgacauccugcugaucaacagcaacggcaaccugaucgcccccagaggcuacuucaagaucagaaccggcaagagcagcaucaugagaagcgacgcccccaucggcaccugcagcagcgagugcaucacccccaacggcagcauccccaacgacaagcccuuccagaacgugaacaagaucaccuacggcgccugccccaaguacgugaagcagaacacccugaagcuggccaccggcaugagaaacgugcccgagaagcagaccagaggcaucuucggcgccaucgccggcuucaucgagaacggcugggagggcaugguggacggcugguacggcuucagacaccagaacagcgagggcaccggccaggccgccgaccugaagagcacccaggccgccaucgaccagaucaacggcaagcugaacagagugaucgagaagaccaacgagaaguuccaccagaucgagaaggaguucagcgagguggagggcagaauccaggaccuggagaaguacguggaggacaccaagaucgaccuguggagcuacaacgccgagcugcugguggcccuggagaaccagcacaccaucgaccugaccgacagcgagaugaacaagcuguucgagaagaccagaagacagcugagagagaacgccgaggacaugggcaacggcugcuucaagaucuaccacaagugcgacaacgccugcaucggcagcaucagaaacggcaccuacgaccacgacguguacagagacgaggcccugaacaacagauuccagaucaagggcguggagcugaagagcggcuacaaggacuggauccuguggaucagcuucgccaucagcugcuuccugcugugcguggugcugcugggcuucaucaugugggccugccagaagggcaacaucagaugcaacaucugcaucuga

SEQ ID NO: 160570 - RNA, 1701 nt, Artificial Sequence
  derived and/or modified CDS sequence (opt4) from hemagglutinin__InfluenzaA__ABC40608
augaagaccaucaucgcccugagcuacauccugugccugguguucgcccagaagcugcccggcaacgacaacagcaccgccacccugugccugggccaccacgccgugcccaacggcacccuggugaagaccaucaccaacgaccagaucgaggugaccaacgccaccgagcuggugcagagcagcagcaccggcagaaucugcgacagcccccacagaauccuggacggcgagaacugcacccugaucgacgcccugcugggcgacccccacugcgacggcuuccagaacaaggagugggaccuguucguggagagaagcaaggccuacagcaacugcuaccccuacgacgugcccgacuacgccagccugagaagccugguggccagcagcggcacccuggaguucaacaacgagagcuucaacuggaccggcguggcccagaacggcaccagcagcgccugcaagagaagaagcaucaagagcuucuucagcagacugaacuggcugcaccagcugaaguacaaguaccccgcccugaacgugaccaugcccaacaacgacaaguucgacaagcuguacaucuggggcgugcaccaccccagcaccgacagcgaccagaccagccuguacgcccaggccagcggcagagugaccgugagcaccagaagaagccagcagaccgugauccccaacaucggcagcagacccugggugagaggcgugagcagcagaaucagcaucuacuggaccaucgugaagcccggcgacauccugcugaucaacagcaccggcaaccugaucgcccccagaggcuacuucaagaucagaagcggcaagagcagcaucaugagaagcgacgcccccaucggcaagugcaacagcgagugcaucacccccaacggcagcauccccaacgacaagcccuuccagagcgugaacagaaucaccuacggcgccugccccagauacgugaagcagaacacccugaagcuggccaccggcaugagaaacgugcccgagaagcagaccagaggcaucuucggcgccaucgccggcuucaucgagaacggcugggagggcaugguggacggcugguacggcuucagacaccagaacagcgagggcaccggccaggccgccgaccugaagagcacccaggccgccaucaaccagaucaacggcaagcugaacagacugaucgagaagaccaacgagaaguuccaccagaucgagaaggaguucagcgagguggagggcagaauccaggaccuggagaaguacguggaggacaccaagaucgaccuguggagcuacaacgccgagcugcugguggcccuggagaaccagcacaccaucgaccugaccgacagcgagaugaacaagcuguucgagagaaccagaaagcagcugagagagaacgccgaggacaugggcaacggcugcuucaagaucuaccacaagugcgacaacgccugcaucggcagcaucagaaacggcaccuacgaccacgacguguacagagacgaggcccugaacaacagauuccagaucaagggcguggagcugaagagcggcuacaaggacuggauccuguggaucagcuucgccaucagcugcuuccugcugugcguggugcugcugggcuucaucaugugggccugccagaagggcaacaucagaugcaacaucugcaucuga

SEQ ID NO: 160571 - RNA, 1701 nt, Artificial Sequence
  derived and/or modified CDS sequence (opt4) from hemagglutinin__InfluenzaA__ABC40619
augaagaccaucaucgcccugagcuacaucuucugccuggugcugggccaggacuucagcggcaacgacaacagcaccgccacccugugccugggccaccacgccgugcccaacggcacccuggugaagaccaucaccaacgaccagaucgaggugaccaacgccaccgagcuggugcagagcagcagcaccggcaagaucugcaacaacccccacagaauccuggacggcaucgacugcacccugaucgacgcccugcugggcgacccccacugcgacggcuuccagaacgagaccugggaccuguucguggagagaagcaaggccuucagcaacugcuaccccuacgacgugcccgacuacgccagccugagaagccugguggccagcagcggcacccuggaguucaucaacgagggcuucaacuggaccggcgugacccagaacggcggcagcaacgccugcaagagaggccccgacagcggcuucuucagcagacugaacuggcuguacaagagcggcagcaccuaccccgugcugaacgugagcaugcccaacaacgacaacuucgacaagcuguacaucuggggcgugcaccaccccagcaccgaccaggagcagaccaaccuguacgugcaggccagcggcagagugaccgugagcaccaagagaagccagcagaccaucauccccaacaucggcagcagacccugggugagaggccugagcagcagaaucagcaucuacuggaccaucgugaagcccggcgacauccuggugaucaacagcaacggcaaccugaucgcccccagaggcuacuucaagaugagaaccggcaagagcagcaucaugagaagcgacgcccccaucggcaccugcaucagcgagugcaucacccccaacggcagcauccccaacgacaagcccuuccagaacgugaacaagaucaccuacggcgccugccccaaguacgugaagcagaacacccugaagcuggccaccggcaugagaaacgugcccgagaagcagaccagaggcaucuucggcgccaucgccggcuucaucgagaacggcugggagggcaugaucgacggcugguacggcuucagacaccagaacagcgagggcaccggccaggccgccgaccugaagagcacccaggccgccaucgaccagaucaacggcaagcugaacagaaucaucgagaagaccaacgagaaguuccaccagaucgagaaggaguucagcgagguggagggcagaauccaggaccuggagaaguacguggaggacaccaagaucgaccuguggagcuacaacgccgagcugcugguggcccuggagaaccagcacaccaucgaccugaccgacagcgagaugaacaagcuguucgagaagaccagaagacagcugagagagaacgccgaggacaugggcaacggcugcuucaagaucuaccacaagugcgacaacgccugcaucggcagcaucagaaacggcaccuacgaccacgacguguacagagacgaggcccugaacaacagauuccagaucaagggcguggagcugaagagcggcuacaaggacuggauccuguggaucagcuucgccaucagcugcuuccugcugugcguggugcugcugggcuucaucaugugggccugccagaagggcaacaucagaugcaacaucugcaucuga

SEQ ID NO: 160572 - RNA, 1698 nt, Artificial Sequence
  derived and/or modified CDS sequence (opt4) from hemagglutinin__InfluenzaA__ABC40631
augaaggugaagcugcugauccugcugugcaccuucaccgccaccuacgccgacaccaucugcaucggcuaccacgccaacaacagcaccgacaccguggacaccgugcuggagaagaacgugaccgugacccacagcgugaaccugcuggaggacagccacaacggcaagcugugccugcugaagggcaucgccccccugcagcugggcaacugcagcguggccggcuggauccugggcaaccccgagugcgagcugcugaucagcaaggagagcuggagcuacaucguggagacccccaaccccgagaacggcaccugcuaccccggcuacuucgccgacuacgaggagcugagagagcagcugagcagcgugagcagcuucgagagauucgagaucuuccccaaggagagcagcuggcccaaccacaccgugaccggcgugagcgccagcugcagccacaacggcaagagcagcuucuacagaaaccugcuguggcugaccggcaagaacggccuguaccccaaccugagcaagagcuacgccaacaacaaggagaaggaggugcugauccuguggggcgugcaccacccccccaacaucggcgaccagagaacccuguaccacaccgagaacgccuacgugagcguggugagcagccacuacagcagaagauucacccccgagaucaccaagagacccaaggugagagaccaggagggcagaaucaacuacuacuggacccugcuggagcccggcgacaccaucaucuucgaggccaacggcaaccugaucgcccccugguacgccuucgcccugagcagaggcuucggcagcggcaucaucaccagcaacgcccccauggacgagugcgacgccaagugccagaccccccagggcgccaucaacagcagccugcccuuccagaacgugcaccccgugaccaucggcgagugccccaaguacgugagaagcgccaagcugagaauggugaccggccugagaaacauccccagcauccagagcagaggccuguucggcgccaucgccggcuucaucgagggcggcuggaccggcaugguggacggcugguacggcuaccaccaccagaacgagcagggcagcggcuacgccgccgaccagaagagcacccagaacgccaucaacggcaucaccaacaaggugaacagcgugaucgagaagaugaacacccaguucaccgccgugggcaaggaguucaacaagcuggagagaagaauggagaaccugaacaagaagguggacgacggcuuccuggacaucuggaccuacaacgccgagcugcuggugcugcuggagaacgagagaacccuggacuuccacgacagcaacgugaagaaccuguacgagaaggugaagagccagcugaagaacaacgccaaggagaucggcaacggcugcuucgaguucuaccacaagugcaacaacgagugcauggagagcgugaagaacggcaccuacgacuaccccaaguacagcgaggagagcaagcugaacagagagaagaucgacggcgugaagcuggagagcaugggcguguaccagauccuggccaucuacagcaccguggccagcagccuggugcugcuggugagccugggcgccaucagcuucuggaugugcagcaacggcagccugcagugcagaaucugcaucuga

SEQ ID NO: 160573 - RNA, 1701 nt, Artificial Sequence
  derived and/or modified CDS sequence (opt4) from hemagglutinin__InfluenzaA__ABC41692
augaagaccaucaucgcccugagcuacauccugugccugguguucgcccagaagccccccggcaacgacaacagcaccgccacccugugccugggccaccacgccgugcccaacggcaccaucgugaagaccaucaccaacgaccagaucgaggugaccaacgccaccgagcuggugcagagcagcagcaccggcggcaucugcgacagcccccaccagauccuggacggcgagaacugcacccugaucgacgcccugcugggcgacccccagugcgacggcuuccagaacaagaagugggaccuguucguggagagaagcaaggccuacagcaacugcuaccccuacgacgugcccgaccacgccagccugagaagccugguggccagcagcggcacccuggaguucaacaacgagagcuucgacuggaccggcgugacccagaacggcaccagcagcgccugcaagagaagaagcaacaagagcuucuucagcagacugaacuggcugacccaccugaaguacaaguaccccgcccugaacgugaccaugcccaacaacgagaaguucgacaagcuguacaucuggggcgugcaccaccccggcaccgacagcgaccagaucagccuguacgcccaggccagcggcagaaucaccgugagcaccaagagaagccagcagaccgugauccccaacaucggcagcagacccagagugagagacgugagcagcagaaucagcaucuacuggaccaucgugaagcccggcgacauccugcugaucaacagcaccggcaaccugaucgcccccagaggcuacuucaagaucagaagcggcaagagcagcaucaugagaagcgacgcccccaucggcaagugcaacagcgagugcaucacccccaacggcagcauccccaacgacaagcccuuccagaacgugaacagaaucaccuacggcgccugccccagauacgugaagcagaacacccugaagcuggccaccggcaugagaaacgugcccgagaagcagaccagaggcaucuucggcgccaucgccggcuucaucgagaacggcugggagggcaugguggacggcugguacggcuucagacaccagaacagcgagggcaccggccaggccgccgaccugaagagcacccaggccgccaucaaccagaucaacggcaagcugaacagacugaucggcaagaccaacgagaaguuccaccagaucgagaaggaguucagcgagguggagggcagaauccaggaccuggagaaguacguggaggacaccaagaucgaccuguggagcuacaacgccgagcugcugguggcccuggagaaccagcacaccaucgaccugaccgacagcgagaugaacaagcuguucgagagaaccaagaagcagcugagagagaacgccgaggacaugggcaacggcugcuucaagaucuaccacaagugcgacaacgccugcaucggcagcaucagaaacggcaccuacgaccacgacguguacagagacgaggcccugaacaacagauuccagaucaagggcguggagcugaagagcggcuacaaggacuggauccuguggaucagcuucgccaucagcugcuuccugcugugcguggcccugcugggcuucaucaugugggccugccagaagggcaacaucagaugcaacaucugcaucuga

SEQ ID NO: 160574 - RNA, 1698 nt, Artificial Sequence; identical to SEQ ID NO: 160359
  derived and/or modified CDS sequence (opt4) from hemagglutinin__InfluenzaA__ABC41714

SEQ ID NO: 160575 - RNA, 1701 nt, Artificial Sequence
  derived and/or modified CDS sequence (opt4) from hemagglutinin__InfluenzaA__ABC41725
augaagaccaccaucgcccugagcuacauccugugccugguguucgcccagaagcugcccggcaacgacaacagcaccgccacccugugccugggccaccacgccgugcccaacggcaccaucgugaagaccaucaccaacgaccagaucgaggugaccaacgccaccgagcuggugcagagcagcagcaccggcggcaucugcgacagcccccaccagauccuggacggcgagaacugcacccugaucgacgcccugcugggcgacccccagugcgacggcuuccagaacaagaagugggaccuguucguggagagaagcaaggccuacagcaacugcuaccccuacgacgugcccgaccacgccagccugagaagccugguggccagcagcggcacccuggaguucaacaacgagagcuucgacuggaccggcgugacccagaacggcaccagcagcgccugcaagagaagaagcaacaagagcuucuucagcagacugaacuggcugacccaccugaaguacaaguaccccgcccugaacgugaccaugcccaacaacgagaaguucgacaagcuguacaucuggggcgugcaccaccccggcaccgacagcgaccagaucagccuguacgcccaggccagcggcagaaucaccgugagcaccaagagaagccagcagaccgugauccccaacaucggcagcagacccagagugagagacgugagcagcagaaucagcaucuacuggaccaucgugaagcccggcgacauccugcugaucaacagcaccggcaaccugaucgcccccagaggcuacuucaagaucagaagcggcaagagcagcaucaugagaagcgacgcccccaucggcaagugcaacagcgagugcaucacccccaacggcagcauccccaacgacaagcccuuccagaacgugaacagaaucaccuacggcgccugccccagauacgugaagcagaacacccugaagcuggccaccggcaugagaaacgugcccgagaagcagaccagaggcaucuucggcgccaucgccggcuucaucgagaacggcugggagggcaugguggacggcugguacggcuucagacaccagaacagcgagggcaccggccaggccgccgaccugaagagcacccaggccgccaucaaccagaucaacggcaagcugaacagacugaucggcaagaccaacgagaaguuccaccagaucgagaaggaguucagcgagguggagggcagaauccaggaccuggagaaguacguggaggacaccaagaucgaccuguggagcuacaacgccgagcugcugguggcccuggagaaccagcacaccaucgaccugaccgacagcgagaugaacaagcuguucgagagaaccaagaagcagcugagagagaacgccgaggacaugggcaacggcugcuucaagaucuaccacaagugcgacaacgccugcaucggcagcaucagaaacggcaccuacgaccacgacguguacagagacgaggcccugaacaacagauuccagaucaagggcguggagcugaagagcggcuacaaggacuggauccuguggaucagcuucgccaucagcugcuuccugcugugcguggcccugcugggcuucaucaugugggccugccagaagggcaacaucagaugcaacaucugcaucuga

SEQ ID NO: 160576 - RNA, 1701 nt, Artificial Sequence
  derived and/or modified CDS sequence (opt4) from hemagglutinin__InfluenzaA__ABC41736
augaagaccaucaucgcccugagcuacauccugugccugguguucgcccagaagcugcccggcaacgacaacagcaccgccacccugugccugggccaccacgccgugcccaacggcaccaucgugaagaccaucaccaacgaccagaucgaggugaccaacgccaccgagcuggugcagagcagcagcaccggcggcaucugcgacagcccccaccagauccuggacggcgagaacugcacccugaucgacgcccugcugggcgacccccagugcgacggcuuccagaacaagaagugggaccuguucguggagagaagcaaggccuacagcaacugcuaccccuacgacgugcccgaccacgccagccugagaagccugguggccagcagcggcacccuggaguucaacaacgagagcuucgacuggaccggcgugacccagaacggcaccagcagcgccugcaagagaagaagcaacaagagcuucuucagcagacugaacuggcugacccaccugaaguacaaguaccccgcccugaacgugaccaugcccaacaacgagaaguucgacaagcuguacaucuggggcgugcaccaccccggcaccgacagcgaccagaucagccuguacgcccaggccagcggcagaaucaccgugagcaccaagagaagccagcagaccgugauccccaacaucggcagcagacccagagugagagacgugagcagcagaaucagcaucuacuggaccaucgugaagcccggcgacauccugcugaucaacagcaccggcaaccugaucgcccccagaggcuacuucaagaucagaagcggcaagagcagcaucaugagaagcgacgcccccaucggcaagugcaacagcgagugcaucacccccaacggcagcauccccaacgacaagcccuuccagaacgugaacagaaucaccuacggcgccugccccagauacgugaagcagaacacccugaagcuggccaccggcaugagaaacgugcccgagaagcagaccagaggcaucuucggcgccaucgccggcuucaucgagaacggcugggagggcaugguggacggcugguacggcuucagacaccagaacagcgagggcaccggccaggccgccgaccugaagagcacccaggccgccaucaaccagaucaacggcaagcugaacagacugaucggcaagaccaacgagaaguuccaccagaucgagaaggaguucagcgagguggagggcagaauccaggaccuggagaaguacguggaggacaccaagaucgaccuguggagcuacaacgccgagcugcugguggcccuggagaaccagcacaccaucgaccugaccgacagcgagaugaacaagcuguucgagagaaccaagaagcagcugagagagaacgccgaggacaugggcaacggcugcuucaagaucuaccacaagugcgacaacgccugcaucggcagcaucagaaacggcaccuacgaccacgacguguacagagacgaggcccugaacaacagauuccagaucaagggcguggagcugaagagcggcuacaaggacuggauccuguggaucagcuucgccaucagcugcuuccugcugugcguggcccugcugggcuucaucaugugggccugccagaagggcaacaucagaugcaacaucugcaucuga

SEQ ID NO: 160577 - RNA, 1701 nt, Artificial Sequence; identical to SEQ ID NO: 160576
  derived and/or modified CDS sequence (opt4) from hemagglutinin__InfluenzaA__ABC41952

SEQ ID NO: 160578 - RNA, 1701 nt, Artificial Sequence; identical to SEQ ID NO: 160576
  derived and/or modified CDS sequence (opt4) from hemagglutinin__InfluenzaA__ABC41953

SEQ ID NO: 160579 - RNA, 1701 nt, Artificial Sequence; identical to SEQ ID NO: 160576
  derived and/or modified CDS sequence (opt4) from hemagglutinin__InfluenzaA__ABC41964

SEQ ID NO: 160580 - RNA, 1701 nt, Artificial Sequence; identical to SEQ ID NO: 160576
  derived and/or modified CDS sequence (opt4) from hemagglutinin__InfluenzaA__ABC42014

SEQ ID NO: 160581 - RNA, 1701 nt, Artificial Sequence; identical to SEQ ID NO: 160576
  derived and/or modified CDS sequence (opt4) from hemagglutinin__InfluenzaA__ABC42114

SEQ ID NO: 160582 - RNA, 1701 nt, Artificial Sequence; identical to SEQ ID NO: 160576
  derived and/or modified CDS sequence (opt4) from hemagglutinin__InfluenzaA__ABC42125

SEQ ID NO: 160583 - RNA, 1701 nt, Artificial Sequence; identical to SEQ ID NO: 160576
  derived and/or modified CDS sequence (opt4) from hemagglutinin__InfluenzaA__ABC42136

SEQ ID NO: 160584 - RNA, 1701 nt, Artificial Sequence
  derived and/or modified CDS sequence (opt4) from hemagglutinin__InfluenzaA__ABC42147
augaagaccaucaucgcccugagcuacauccugugccugguguucgcccagaagcugcccggcaacgacaacagcaccgccacccugugccugggccaccacgccgugcccaacggcaccaucgugaagaccaucaccaacgaccagaucgaggugaccaacgccaccgagcuggugcagagcagcagcaccggcggcaucugcgacagcccccaccagauccuggacggcgagaacugcacccugaucgacgcccugcugggcgacccccagugcgacggcuuccagaacaagaagugggaccuguucguggagagaagcaaggccuacagcaacugcuaccccuacgacgugcccgaccacgccagccugagaagccugguggccagcagcggcacccuggaguucaacaacgagagcuucgacuggaccggcgugacccagaacggcaccagcagcgccugcaagagaagaagcaacaagagcuucuucagcagacugaacuggcugacccaccugaaguacaaguaccccgcccugaacgugaccaugcccaacaacgagaaguucgacaagcuguacaucuggggcgugcaccaccccggcaccgacagcgaccagaucagccuguacgcccaggccagcggcagaaucaccgugagcaccaagagaagccagcagaccgugauccccaacaucggcagcagacccagagugagagacgugagcagcagaaucagcaucuacuggaccaucgugaagcccggcgacauccugcugaucaacagcaccggcaaccugaucgcccccagaggcuacuucaagaucagaagcggcaagagcagcaucaugagaagcgacgugcccaucggcaagugcaacagcgagugcaucacccccaacggcagcauccccaacgacaagcccuuccagaacgugaacagaaucaccuacggcgccugccccagauacgugaagcagaacacccugaagcuggccaccggcaugagaaacgugcccgagaagcagaccagaggcaucuucggcgccaucgccggcuucaucgagaacggcugggagggcaugguggacggcugguacggcuucagacaccagaacagcgagggcaccggccaggccgccgaccugaagagcacccaggccgccaucaaccagaucaacggcaagcugaacagacugaucggcaagaccaacgagaaguuccaccagaucgagaaggaguucagcgagguggagggcagaauccaggaccuggagaaguacguggaggacaccaagaucgaccuguggagcuacaacgccgagcugcugguggcccuggagaaccagcacaccaucgaccugaccgacagcgagaugaacaagcuguucgagagaaccaagaagcagcugagagagaacgccgaggacaugggcaacggcugcuucaagaucuaccacaagugcgacaacgccugcaucggcagcaucagaaacggcaccuacgaccacgacguguacagagacgaggcccugaacaacagauuccagaucaagggcguggagcugaagagcggcuacaaggacuggauccuguggaucagcuucgccaucagcugcuuccugcugugcguggcccugcugggcuucaucaugugggccugccagaagggcaacaucagaugcaacaucugcaucuga

SEQ ID NO: 160585 - RNA, 1701 nt, Artificial Sequence; identical to SEQ ID NO: 160576
  derived and/or modified CDS sequence (opt4) from hemagglutinin__InfluenzaA__ABC42158

SEQ ID NO: 160586 - RNA, 1701 nt, Artificial Sequence; identical to SEQ ID NO: 160576
  derived and/or modified CDS sequence (opt4) from hemagglutinin__InfluenzaA__ABC42169

SEQ ID NO: 160587 - RNA, 1701 nt, Artificial Sequence; identical to SEQ ID NO: 160576
  derived and/or modified CDS sequence (opt4) from hemagglutinin__InfluenzaA__ABC42180

SEQ ID NO: 160588 - RNA, 1701 nt, Artificial Sequence; identical to SEQ ID NO: 160576
  derived and/or modified CDS sequence (opt4) from hemagglutinin__InfluenzaA__ABC42192

SEQ ID NO: 160589 - RNA, 1701 nt, Artificial Sequence; identical to SEQ ID NO: 160576
  derived and/or modified CDS sequence (opt4) from hemagglutinin__InfluenzaA__ABC42307

SEQ ID NO: 160590 - RNA, 1701 nt, Artificial Sequence
  derived and/or modified CDS sequence (opt4) from hemagglutinin__InfluenzaA__ABC42318
augaagaccaucaucgcccugagcuacauccugugccugguguucgcccagaagcugcccggcaacgacaacagcaccgccacccugugccugggccaccacgccgugcccaacggcaccaucgugaagaccaucaccaacgaccagaucgaggugaccaacgccaccgagcuggugcagagcagcagcaccggcggcaucugcgacagcccccaccagauccuggacggcgagaacugcacccugaucgacgcccugcugggcgacccccagugcgacggcuuccagaacaagaagugggaccuguucguggagagaagcaaggccuacagcaacugcuaccccuacgacgugcccgaccacgccagccugagaagccugguggccagcagcggcacccuggaguucaacaacgagagcuucgacuggaccggcgugacccagaacggcaccagcagcgccugcaagagaagaagcaacaagagcuucuucagcagacugaacuggcugacccaccugaaguacaaguaccccgcccugaacgugaccaugcccaacaacgagaaguucgacaagcuguacaucuggggcgugcaccaccccggcaccgacagcgaccagaucagccuguacgcccaggccagcggcagaaucaccgugagcaccaagagaagccagcagaccgugauccccaacaucggcagcagacccagagugagagacgugagcagcagaaucagcaucuacuggaccaucgugaagcccggcgacauccugcugaucaacagcaccggcaaccugaucgcccccagaggcuacuucaagaucagaagcggcaagagcagcaucaugagaagcgacgcccccaucggcaagugcaacagcgagugcaucacccccaacggcagcauccccaacgacaagcccuuccagaacgugaacagaaucaccuacggcgccugccccagauacgugaagcagaacacccugaagcuggccaccggcaugagaaacgugcccgagaagcagaccagaggcaucuucggcgccaucgccggcuucaucgagaacggcugggagggcaugguggacggcugguacggcuucagacaccagaacagcgagggcaccggccaggccgccgaccugaagagcacccaggccgccaucaaccagaucaacggcaagcugaacagacugaucggcaagaccaacgagaaguuccaccagaucgagaaggaguucagcgagguggagggcagaauccaggaccuggagaaguacguggaggacaccaagaucgaccuguggagcuacaacgccgaguuccugguggcccuggagaaccagcacaccaucgaccugaccgacagcgagaugaacaagcuguucgagagaaccaagaagcagcugagagagaacgccgaggacaugggcaacggcugcuucaagaucuaccacaagugcgacaacgccugcaucggcagcaucagaaacggcaccuacgaccacgacguguacagagacgaggcccugaacaacagauuccagaucaagggcguggagcugaagagcggcuacaaggacuggauccuguggaucagcuucgccaucagcugcuuccugcugugcguggcccugcugggcuucaucaugugggccugccagaagggcaacaucagaugcaacaucugcaucuga

SEQ ID NO: 160591 - RNA, 1701 nt, Artificial Sequence; identical to SEQ ID NO: 160576
  derived and/or modified CDS sequence (opt4) from hemagglutinin__InfluenzaA__ABC42346

SEQ ID NO: 160592 - RNA, 1701 nt, Artificial Sequence; identical to SEQ ID NO: 160576
  derived and/or modified CDS sequence (opt4) from hemagglutinin__InfluenzaA__ABC42461

SEQ ID NO: 160593 - RNA, 1701 nt, Artificial Sequence; identical to SEQ ID NO: 160576
  derived and/or modified CDS sequence (opt4) from hemagglutinin__InfluenzaA__ABC42494

SEQ ID NO: 160594 - RNA, 1701 nt, Artificial Sequence; identical to SEQ ID NO: 160576
  derived and/or modified CDS sequence (opt4) from hemagglutinin__InfluenzaA__ABC42505

SEQ ID NO: 160595 - RNA, 1701 nt, Artificial Sequence
  derived and/or modified CDS sequence (opt4) from hemagglutinin__InfluenzaA__ABC42516
augaagaccaucaucgcccugagcuacauccugugccugguguucgcccagaagcugcccggcaacgacaacagcaccgccacccugugccugggccaccacgccgugcccaacggcaccaucgugaagaccaucaccaacgaccagaucgaggugaccaacgccaccgagcuggugcagagcagcagcaccggcggcaucugcgacagcccccaccagauccuggacggcgagaacugcacccugaucgacgcccugcugggcgacccccagugcgacggcuuccagaacaagaagugggaccuguucguggagagaagcaaggccuacagcaacugcuaccccuacgacgugcccgaccacgccagccugagaagccugguggccagcagcggcacccuggaguucaacaacgagagcuucgacuggaccggcgugacccagaacggcaccagcagcgccugcaagagaagaagcaacaagagcuucuucagcagacugaacuggcugacccaccugaaguacaaguaccccgcccugaacgugaccaugcccaacaacgagaaguucgacaagcuguacaucuggggcgugcaccaccccggcaccgacagcgaccagaucagccuguacgcccaggccagcggcagaaucaccgugagcaccaagagaagccagcagaccgugauccccaacaucggcagcagacccagagugagagacgugagcagcagaaucagcaucuacuggaccaucgugaagcccggcgacauccugcugaucaacagcaccggcaaccugaucgcccccagaggcuacuucaagaucagaagcggcaagagcagcaucaugagaagcgacgcccccaucggcaagugcaacagcgagugcaucacccccaacggcagcauccccaacgacaagcccuuccagaacgugaacagaaucaccuacggcgccugccccagauacgugaagcagaacacccugaagcuggccaccggcaugagaaacgugcccgagaagcagaccagaggcaucuucggcgccaucgccggcuucaucgagaacggcugggagggcaugguggacggcugguacggcuucagacaccagaacagcgagggcaccggccaggccgccgaccugaagagcacccaggccgccaucaaccagaucaacggcaagcugaacaagcugaucggcaagaccaacgagaaguuccaccagaucgagaaggaguucagcgagguggagggcagaauccaggaccuggagaaguacguggaggacaccaagaucgaccuguggagcuacaacgccgagcugcugguggcccuggagaaccagcacaccaucgaccugaccgacagcgagaugaacaagcuguucgagagaaccaagaagcagcugagagagaacgccgaggacaugggcaacggcugcuucaagaucuaccacaagugcgacaacgccugcaucggcagcaucagaaacggcaccuacgaccacgacguguacagagacgaggcccugaacaacagauuccagaucaagggcguggagcugaagagcggcuacaaggacuggauccuguggaucagcuucgccaucagcugcuuccugcugugcguggcccugcugggcuucaucaugugggccugccagaagggcaacaucagaugcaacaucugcaucuga

SEQ ID NO: 160596 - RNA, 1701 nt, Artificial Sequence; identical to SEQ ID NO: 160576
  derived and/or modified CDS sequence (opt4) from hemagglutinin__InfluenzaA__ABC42527

SEQ ID NO: 160597 - RNA, 1701 nt, Artificial Sequence; identical to SEQ ID NO: 160576
  derived and/or modified CDS sequence (opt4) from hemagglutinin__InfluenzaA__ABC42574

SEQ ID NO: 160598 - RNA, 1701 nt, Artificial Sequence; identical to SEQ ID NO: 160576
  derived and/or modified CDS sequence (opt4) from hemagglutinin__InfluenzaA__ABC42585

SEQ ID NO: 160599 - RNA, 1701 nt, Artificial Sequence; identical to SEQ ID NO: 160303
  derived and/or modified CDS sequence (opt4) from hemagglutinin__InfluenzaA__ABC42596

SEQ ID NO: 160600 - RNA, 1701 nt, Artificial Sequence; identical to SEQ ID NO: 160342
  derived and/or modified CDS sequence (opt4) from hemagglutinin__InfluenzaA__ABC42607

SEQ ID NO: 160601 - RNA, 1701 nt, Artificial Sequence; identical to SEQ ID NO: 160342
  derived and/or modified CDS sequence (opt4) from hemagglutinin__InfluenzaA__ABC42618

SEQ ID NO: 160602 - RNA, 1701 nt, Artificial Sequence
  derived and/or modified CDS sequence (opt4) from hemagglutinin__InfluenzaA__ABC42629
augaagaccaucaucgcccugagcuacauccugugccugguguucgcccagaagcugcccggcaacgacaacagcaccgccacccugugccugggccaccacgccgugcccaacggcaccaucgugaagaccaucaccaacgaccagaucgaggugaccaacgccaccgagcuggugcagagcagcagcaccggcggcaucugcgacagcccccaccagauccuggacggcgagaacugcacccugaucgacgcccugcugggcgacccccagugcgacggcuuccagaacaagaagugggaccuguucguggagagaagcaaggccuacagcaacugcuaccccuacgacgugcccgaccacgccagccugagaagccugguggccagcagcggcacccuggaguucaacaacgagagcuucaacuggaccggcgugacccagaacggcaccagcagcgccugcaagagaagaagcaacaacagcuucuucagcagacugaacuggcugacccaccugaaguucaaguaccccgcccugaacgugaccaugcccaacaacgagaaguucgacaagcuguacaucuggggcgugcaccaccccggcaccgacaacgaccagaucagccuguacgcccaggccagcggcagaaucaccgugagcaccaagagaagccagcagaccgugauccccaacaucggcagcagacccagagugagagacauccccagcagaaucagcaucuacuggaccaucgugaagcccggcgacauccugcugaucaacagcaccggcaaccugaucgcccccagaggcuacuucaagaucagaagcggcaagagcagcaucaugagaagcgacgcccccaucggcaagugcaacagcgagugcaucacccccaacggcagcauccccaacgacaagcccuuccagaacgugaacagaaucaccuacggcgccugccccagauacgugaagcagaacacccugaagcuggccaccggcaugagaaacgugcccgagaagcagaccagaggcaucuucggcgccaucgccggcuucaucgagaacggcugggagggcaugguggacggcugguacggcuucagacaccagaacagcgagggcaccggccaggccgccgaccugaagagcacccaggccgccaucaaccagaucaacggcaagcugaacagacugaucggcaagaccaacgagaaguuccaccagaucgagaaggaguucagcgagguggagggcagaauccaggaccuggagaaguacguggaggacaccaagaucgaccuguggagcuacaacgccgagcugcugguggcccuggagaaccagcacaccaucgaccugaccgacagcgagaugaacaagcuguucgagagaaccaagaagcagcugagagagaacgccgaggacaugggcaacggcugcuucaagaucuaccacaagugcgacaacgccugcaucggcagcaucagaaacggcaccuacgaccacgacguguacagagacgaggcccugaacaacagauuccagaucaagggcguggagcugaagagcggcuacaaggacuggauccuguggaucagcuucgccaucagcugcuuccugcugugcguggcccugcugggcuucaucaugugggccugccagaagggcaacaucagaugcaacaucugcaucuga

SEQ ID NO: 160603 - RNA, 1701 nt, Artificial Sequence
  derived and/or modified CDS sequence (opt4) from hemagglutinin__InfluenzaA__ABC42640
augaagaccaucaucgcccugagcuacauccugugccugguguucgcccagaagauccccggcaacgacaacagcaccgccacccugugccugggccaccacgccgugcccaacggcaccaucgugaagaccaucaccaacgaccagaucgaggugaccaacgccaccgagcuggugcagagcagcagcaccggcggcaucugcgacagcccccaccagauccuggacggcgagaacugcacccugaucgacgcccugcugggcgacccccagugcgacggcuuccagaacaagaagugggaccuguucguggagagaagcaaggccuacagcaacugcuaccccuacgacgugcccgacuacgccagccugagaagccugguggccagcagcggcacccuggaguucaacaacgagagcuucaacuggaccggcgugacccagaacggcaccagcagcgccugcaagagaagaagcaacaacagcuucuucagcagacugaacuggcugacccaccugaaguucaaguaccccgcccugaacgugaccaugcccaacaacgagaaguucgacaagcuguacaucuggggcgugcaccaccccggcaccgacaacgaccagaucagccuguacgcccaggccagcggcagaaucaccgugagcaccaagagaagccagcagaccgugauccccaacaucggcagcagacccagagugagagacauccccagcagaaucagcaucuacuggaccaucgugaagcccggcgacauccugcugaucaacagcaccggcaaccugaucgcccccagaggcuacuucaagaucagaagcggcaagagcagcaucaugagaagcgacgcccccaucggcaagugcaacagcgagugcaucacccccaacggcagcauccccaacgacaagcccuuccagaacgugaacagaaucaccuacggcgccugccccagauacgugaagcagaacacccugaagcuggccaccggcaugagaaacgugcccgagaagcagaccagaggcaucuucggcgccaucgccggcuucaucgagaacggcugggagggcaugguggacggcugguacggcuucagacaccagaacagcgagggcaucggccaggccgccgaccugaagagcacccaggccgccaucaaccagaucaacggcaagcugaacagacugaucggcaagaccaacgagaaguuccaccagaucgagaaggaguucagcgagguggagggcagaauccaggaccuggagaaguacguggaggacaccaagaucgaccuguggagcuacaacgccgagcugcugguggcccuggagaaccagcacaccaucgaccugaccgacagcgagaugaacaagcuguucgagagaaccaagaagcagcugagagagaacgccgaggacaugggcaacggcugcuucaagaucuaccacaagugcgacaacgccugcaucggcagcaucagaaacggcaccuacgaccacgacguguacagagacgaggcccugaacaacagauuccagaucaagggcguggagcugaagagcggcuacaaggacuggauccuguggaucagcuucgccaucagcugcuuccugcugugcguggcccugcugggcuucaucaugugggccugccagaagggcaacaucagaugcaacaucugcaucuga

SEQ ID NO: 160604 - RNA, 1701 nt, Artificial Sequence; identical to SEQ ID NO: 160303
  derived and/or modified CDS sequence (opt4) from hemagglutinin__InfluenzaA__ABC42651

SEQ ID NO: 160605 - RNA, 1701 nt, Artificial Sequence
  derived and/or modified CDS sequence (opt4) from hemagglutinin__InfluenzaA__ABC42662
augaagaccaucaucgcccugagcuacauccugugccugguguucgcccagaagcugcccggcaacgacaacagcaccgccacccugugccugggccaccacgccgugcccaacggcaccaucgugaagaccaucaccaacgaccagaucgaggugaccaacgccaccgagcuggugcagagcagcagcaccggcggcaucugcgacagcccccaccagauccuggacggcgagaacugcacccugaucgacgcccugcugggcgacccccagugcgacggcuuccagaacaagaagugggaccuguucguggagagaagcaaggccuacagcaacugcuaccccuacgacgugcccgacuacgccagccugagaagccugguggccagcagcggcacccuggaguucaacaacgagagcuucaacuggaccggcgugacccagaacggcaccagcagcgccugcaagagaagaagcaacaacagcuucuucagcagacugaacuggcugacccaccugaaguucaaguaccccgcccugaacgugaccaugcccaacaacgagaaguucgacaagcuguacaucuggggcgugcaccaccccggcaccgacaacgaccagaucagccuguacgcccaggccagcggcagaaucaccgugagcaccaagagaagccagcagaccgugauccccaacaucggcagcagacccagagugagagacauccccagcagaaucagcaucuacuggaccaucgugaagcccggcgacauccugcugaucaacagcaccggcaaccugaucgcccccagaggcuacuucaagaucagaagcggcaagagcagcaucaugagaagcgacgcccccaucggcaagugcaacagcgagugcaucacccccaacggcagcauccccaacgacaagcccuuccagaacgugaacagaaucaccuacggcgccugccccagauacgugaagcagaacacccugaagcuggccaccggcaugagaaacgugcccgagaagcagaccagaggcaucuucggcgccaucgccggcuucaucgagaacggcugggagggcaugguggacggcugguacggcuucagacaccagaacagcgagggcaucggccaggccgccgaccugaagagcacccaggccgccaucaaccagaucaacggcaagcugaacagacugaucggcaagaccaacgagaaguuccaccagaucgagaaggaguucagcgagguggagggcagaauccaggaccuggagaaguacguggaggacaccaagaucgaccuguggagcuacaacgccgaguuccugguggcccuggagaaccagcacaccaucgaccugaccgacagcgagaugaacaagcuguucgagagaaccaagaagcagcugagagagaacgccgaggacaugggcaacggcugcuucaagaucuaccacaagugcgacaacgccugcaucggcagcaucagaaacggcaccuacgaccacgacguguacagagacgaggcccugaacaacagauuccagaucaagggcguggagcugaagagcggcuacaaggacuggauccuguggaucagcuucgccaucagcugcuuccugcugugcguggcccugcugggcuucaucaugugggccugccagaagggcaacaucagaugcaacaucugcaucuga

SEQ ID NO: 160606 - RNA, 1701 nt, Artificial Sequence
  derived and/or modified CDS sequence (opt4) from hemagglutinin__InfluenzaA__ABC42673
augaagaccaucaucgcccugagcuacauccugugccugaucuucgcccagaagcugcccggcaacgacaacagcaccgccacccugugccugggccaccacgccgugcccaacggcaccaucgugaagaccaucaccaacgaccagaucgaggugaccaacgccaccgagcuggugcagagcagcagcaccggcggcaucugcgacagcccccaccagauccuggacggcgagaacugcacccugaucgacgcccugcugggcgacccccagugcgacggcuuccagaacaagaagugggaccuguucguggagagaagcaaggccuacagcaacugcuaccccuacgacgugcccgacuacgccagccugagaagccugguggccagcagcggcacccuggaguucaacaacgagagcuucaacuggaccggcgugacccagaacggcaccagcagcgccugcaagagaagaagcaacaacagcuucuucagcagacugaacuggcugacccaccugaaguucaaguaccccgcccugaacgugaccaugcccaacaacgagaaguucgacaagcuguacaucuggggcgugcaccaccccggcaccgacaacgaccagaucagccuguacgcccaggccagcggcagaaucaccgugagcaccaagagaagccagcagaccgugauccccaacaucggcagcagacccagagugagagacauccccagcagaaucagcaucuacuggaccaucgugaagcccggcgacauccugcugaucaacagcaccggcaaccugaucgcccccagaggcuacuucaagaucagaagcggcaagagcagcaucaugagaagcgacgcccccaucggcaagugcaacagcgagugcaucacccccaacggcagcauccccaacgacaagcccuuccagaacgugaacagaaucaccuacggcgccugccccagauacgugaagcagaacacccugaagcuggccaccggcaugagaaacgugcccgagaagcagaccagaggcaucuucggcgccaucgccggcuucaucgagaacggcugggagggcaugguggacggcugguacggcuucagacaccagaacagcgagggcaucggccaggccgccgaccugaagagcacccaggccgccaucaaccagaucaacggcaagcugaacagacugaucggcaagaccaacgagaaguuccaccagaucgagaaggaguucagcgagguggagggcagaauccaggaccuggagaaguacguggaggacaccaagaucgaccuguggagcuacaacgccgagcugcugguggcccuggagaaccagcacaccaucgaccugaccgacagcgagaugaacaagcuguucgagagaaccaagaagcagcugagagagaacgccgaggacaugggcaacggcugcuucaagaucuaccacaagugcgacaacgccugcaucggcagcaucagaaacggcaccuacgaccacgacguguacagagacgaggcccugaacaacagauuccagaucaagggcguggagcugaagagcggcuacaaggacuggauccuguggaucagcuucgccaucagcugcuuccugcugugcguggcccugcugggcuucaucaugugggccugccagaagggcaacaucagaugcaacaucugcaucuga

SEQ ID NO: 160607 - RNA, 1701 nt, Artificial Sequence; identical to SEQ ID NO: 160303
  derived and/or modified CDS sequence (opt4) from hemagglutinin__InfluenzaA__ABC42684

SEQ ID NO: 160608 - RNA, 1701 nt, Artificial Sequence; identical to SEQ ID NO: 160303
  derived and/or modified CDS sequence (opt4) from hemagglutinin__InfluenzaA__ABC42695

SEQ ID NO: 160609 - RNA, 1701 nt, Artificial Sequence
  derived and/or modified CDS sequence (opt4) from hemagglutinin__InfluenzaA__ABC42706
augaagaccaucaucgcccugagcuacauccugugccugguguucgcccagaagcugcccggcaacgacaacagcaccgccacccugugccugggccaccacgccgugcccaacggcaccaccgugaagaccaucaccaacgaccagaucgaggugaccaacgccaccgagcuggugcagagcagcagcaccggcggcaucugcgacagcccccaccagauccuggacggcgagaacugcacccugaucgacgcccugcugggcgacccccagugcgacggcuuccagaacaagaagugggaccuguucguggagagaagcaaggccuacagcaacugcuaccccuacgacgugcccgacuacgccagccugagaagccugguggccagcagcggcacccuggaguucaacaacgagagcuucaacuggaccggcgugacccagaacggcaccagcagcgccugcaagagaagaagcaacaacagcuucuucagcagacugaacuggcugacccaccugaaguucaaguaccccgcccugaacgugaccaugcccaacaacgagaaguucgacaagcuguacaucuggggcgugcaccaccccggcaccgacaacgaccagaucagccuguacgcccaggccagcggcagaaucaccgugagcaccaagagaagccagcagaccgugauccccaacaucggcagcagacccagagugagagacauccccagcagaaucagcaucuacuggaccaucgugaagcccggcgacauccugcugaucaacagcaccggcaaccugaucgcccccagaggcuacuucaagaucagaagcggcaagagcagcaucaugagaagcgacgcccccaucggcaagugcaacagcgagugcaucacccccaacggcagcauccccaacgacaagcccuuccagaacgugaacagaaucaccuacggcgccugccccagauacgugaagcagaacacccugaagcuggccaccggcaugagaaacgugcccgagaagcagaccagaggcaucuucggcgccaucgccggcuucaucgagaacggcugggagggcaugguggacggcugguacggcuucagacaccagaacagcgagggcaucggccaggccgccgaccugaagagcacccaggccgccaucaaccagaucaacggcaagcugaacagacugaucggcaagaccaacgagaaguuccaccagaucgagaaggaguucagcgagguggagggcagaauccaggaccuggagaaguacguggaggacaccaagaucgaccuguggagcuacaacgccgagcugcugguggcccuggagaaccagcacaccaucgaccugaccgacagcgagaugaacaagcuguucgagagaaccaagaagcagcugagagagaacgccgaggacaugggcaacggcugcuucaagaucuaccacaagugcgacaacgccugcaucggcagcaucagaaacggcaccuacgaccacgacguguacagagacgaggcccugaacaacagauuccagaucaagggcguggagcugaagagcggcuacaaggacuggauccuguggaucagcuucgccaucagcugcuuccugcugugcguggugcugcugggcuucaucaugugggccugccagaagggcaacaucagaugcaacaucugcaucuga

SEQ ID NO: 160610 - RNA, 1701 nt, Artificial Sequence; identical to SEQ ID NO: 160303
  derived and/or modified CDS sequence (opt4) from hemagglutinin__InfluenzaA__ABC42717

SEQ ID NO: 160611 - RNA, 1701 nt, Artificial Sequence
  derived and/or modified CDS sequence (opt4) from hemagglutinin__InfluenzaA__ABC42728
augaagaccaucaucgcccugagcuacauccugugccugguguucgcccagaagcugcccggcaacgacaacagcaccgccacccugugccugggccaccacgccgugcccaacggcaccguggugaagaccaucaccaacgaccagaucgaggugaccaacgccaccgagcuggugcagagcagcagcaccggcggcaucugcgacagcccccaccagauccuggacggcgagaacugcacccugauggacgcccugcugggcgacccccagugcgacggcuuccagaacaagaagugggaccuguucguggagagaagcagagccuacagcaacugcuaccccuacgacgugcccgacuacgccagccugagaagccugguggccagcagcggcacccuggaguucaacaacgagagcuucaacuggaccggcgugacccagaacggcaccagcagcgccugcaagagaagaagcaacaacagcuucuucagcagacugaacuggcugacccaccugaaguucaaguaccccgcccugaacgugaccaugcccaacaacgagaaguucgacaagcuguacaucuggggcgugcaccaccccggcaccgacaacgaccagaucagccuguacgcccaggccagcggcagaaucaccgugagcaccaagagaagccagcagaccgugauccccaacaucggcagcagacccagagugagagacauccccagcagaaucagcaucuacuggaccaucgugaagcccggcgacauccugcugaucaacagcaccggcaaccugaucgcccccagaggcuacuucaagaucagaagcggcaagagcagcaucaugagaagcgacgcccccaucggcaagugcaacagcgagugcaucacccccaacggcagcauccccaacgacaagcccuuccagaacgugaacagaaucaccuacggcgccugccccagauacgugaagcagaacacccugaagcuggccaccggcaugagaaacgugcccgagaagcagaccagaggcaucuucggcgccaucgccggcuucaucgagaacggcugggagggcaugguggacggcugguacggcuucagacaccagaacagcgagggcaccggccaggccgccgaccugaagagcacccaggccgccaucaaccagaucaacggcaagcugaacagacugaucggcaagaccaacgagaaguuccaccagaucgagaaggaguucagcgagguggagggcagaauccaggaccuggagaaguacguggaggacaccaagaucgaccuguggagcuacaacgccgagcugcugguggcccuggagaaccagcacaccaucgaccugaccgacagcgagaugaacaagcuguucgagagaaccaagaagcagcugagagagaacgccgaggacaugggcaacggcugcuucaagaucuaccacaagugcgacaacgccugcaucggcagcaucagaaacggcaccuacgaccacgacguguacagagacgaggcccugaacaacagauuccagaucaagggcguggagcugaagagcggcuacaaggacuggauccuguggaucagcuucgccaucagcugcuuccugcugugcguggugcugcugggcuucaucaugugggccugccagaagggcaacaucagaugcaacaucugcaucuga

SEQ ID NO: 160612 - RNA, 1701 nt, Artificial Sequence; identical to SEQ ID NO: 160303
  derived and/or modified CDS sequence (opt4) from hemagglutinin__InfluenzaA__ABC42739

SEQ ID NO: 160613 - RNA, 1698 nt, Artificial Sequence
  derived and/or modified CDS sequence (opt4) from hemagglutinin__InfluenzaA__ABC42750
augaaggugaagcugcuggugcugcugugcaccuucaccgccaccuacgccgacaccaucugcaucggcuaccacgccaacaacagcaccgacaccguggacaccgugcuggagaagaacgugaccgugacccacagcgugaaccugcuggaggacagccacaacggcaagcugugccugcugaagggcaucgccccccugcagcugggcaacugcagcguggccggcuggauccugggcaaccccgagugcgagcugcugaucagcaaggagagcuggagcuacaucguggagaagcccaaccccgagaacggcaccugcuaccccggccacuucgccgacuacgaggagcugagagagcagcugagcagcgugagcagcuucgagagauucgagaucuuccccaaggagagcagcuggcccaaccacaccgugaccggcgugagcgccagcugcagccacaacggcaagagcagcuucuacaagaaccugcuguggcugaccggcaagaacggccuguaccccaaccugagcaagagcuacgccaacaacaaggagaaggaggugcuggugcuguggggcgugcaccacccccccaacaucggcgaccagaaggcccuguaccacaccgagaacgccuacgugagcguggugagcagccacuacagcagaaaguucacccccgagaucgccaagagacccaaggugagagaccaggagggcagaaucaacuacuacuggacccugcuggagcccggcgacaccaucaucuucgaggccaacggcaaccugaucgcccccagauacgccuucgcccugagcagaggcuucggcagcggcaucaucaacagcaacgcccccauggacgagugcgacgccaagugccagaccccccagggcgccaucaacagcagccugcccuuccagaacgugcaccccgugaccaucggcgagugccccaaguacgugagaagcgccaagcugagaauggugaccggccugagaaacauccccagcauccagagcagaggccuguucggcgccaucgccggcuucaucgagggcggcuggaccggcaugguggacggcugguacggcuaccaccaccagaacgagcagggcagcggcuacgccgccgaccagaagagcacccagaacgccaucaacggcaucaccaacaaggugaacagcgugaucgagaagaugaacacccaguucaccgccgugggcaaggaguucaacaagcuggagagaagaauggagaaccugaacaagaagguggacgacggcuucaucgacaucuggaccuacaacgccgagcugcuggugcugcuggagaacgagagaacccuggacuuccacgacagcaacgugaagaaccuguacgagaaggugaagagccagcugaagaacaacgccaaggagaucggcaacggcugcuucgaguucuaccacaagugcaacgacgagugcauggagagcgugaagaacggcaccuacgacuaccccaaguacagcgaggagagcaagcugaacagagagaagaucgacggcgugaagcuggagagcaugggcguguaccagauccuggccaucuacagcaccguggccagcagccuggugcugcuggugagccugggcgccaucagcuucuggaugugcagcaacggcagccugcagugcagaaucugcaucuga

SEQ ID NO: 160614 - RNA, 1701 nt, Artificial Sequence; identical to SEQ ID NO: 160303
  derived and/or modified CDS sequence (opt4) from hemagglutinin__InfluenzaA__ABC42761

SEQ ID NO: 160615 - RNA, 1701 nt, Artificial Sequence
  derived and/or modified CDS sequence (opt4) from hemagglutinin__InfluenzaA__ABC42772
augaagaccaucaucgcccugagcuacauccugugccugguguucgcccagaagcugcccggcaacgacaacagcaccgccacccugugccugggccaccacgccgugcccaacggcaccaucgugaagaccaucaccaacgaccagaucgaggugaccaacgccaccgagcuggugcagagcagcagcaccggcggcaucugcgacagcccccaccagauccuggacggcgagaacugcacccugaucgacgcccugcugggcgacccccagugcgacggcuuccagaacaagaagugggaccuguucguggagagaagcaaggccuacagcaacugcuaccccuacgacgugcccgacuacgccagccugagaagccugguggccagcagcggcacccuggaguucaacaacgagagcuucaacuggaccggcgugacccagaacggcaccagcagcgccugcaagagaagaagcaacaacagcuucuucagcagacugaacuggcugacccaccugaaguucaaguaccccgcccugaacgugaccaugcccaacaacgagaaguucgacaagcuguacaucuggggcgugcaccaccccggcaccgacaacgaccagaucagccuguacgcccaggccagcggcagaaucaccgugagcaccaagagaagccagcagaccgugauccccaacaucggcagcagacccagagugagagacauccccagcagaaucagcaucuacuggaccaucgugaagcccggcgacauccugcugaucaacagcaccggcaaccugaucgcccccagaggcuacuucaagaucagaagcggcaagagcagcaucaugagaagcgacgcccccaucggcaagugcaacagcgagugcaucacccccaacggcagcauccccaacgacaagcccuuccagaacgugaacagaaucaccuacggcgccugccccagauacgugaagcagaacacccugaagcuggccaccggcaugagaaacgugcccgagaagcagaccagaggcaucuucggcgccaucgccggcuucaucgagaacggcugggagggcaugguggacggcugguacggcuucagacaccagaacagcgagggcaucggccaggccgccgaccugaagagcacccaggccgccaucaaccagaucaacggcaagcugaacagacugaucggcaagaccaacgagaaguuccaccagaucgagaaggaguucagcgagguggagggcagaauccaggaccuggagaaguacguggaggacaccaagaucgaccuguggagcuacaacgccgagcugcugguggcccuggagaaccagcacaccaucgaccugaccgacagcgagaugaacaagcuguucgagagaaccaagaagcagcugagagagaacgccgaggacaugggcaacggcugcuucaagaucuaccacaagugcgacaacgccugcaucggcagcaucagaaacggcaccuacgaccacgacguguacagagacgaggcccugaacaacagauuccagaucaagagcguggagcugaagagcggcuacaaggacuggauccuguggaucagcuucgccaucagcugcuuccugcugugcguggcccugcugggcuucaucaugugggccugccagaagggcaacaucagaugcaacaucugcaucuga

SEQ ID NO: 160616 - RNA, 1701 nt, Artificial Sequence; identical to SEQ ID NO: 160303
  derived and/or modified CDS sequence (opt4) from hemagglutinin__InfluenzaA__ABC42783

SEQ ID NO: 160617 - RNA, 1701 nt, Artificial Sequence; identical to SEQ ID NO: 160303
  derived and/or modified CDS sequence (opt4) from hemagglutinin__InfluenzaA__ABC42794

SEQ ID NO: 160618 - RNA, 1701 nt, Artificial Sequence; identical to SEQ ID NO: 160303
  derived and/or modified CDS sequence (opt4) from hemagglutinin__InfluenzaA__ABC42805

SEQ ID NO: 160619 - RNA, 1701 nt, Artificial Sequence; identical to SEQ ID NO: 160342
  derived and/or modified CDS sequence (opt4) from hemagglutinin__InfluenzaA__ABC42816

SEQ ID NO: 160620 - RNA, 1701 nt, Artificial Sequence
  derived and/or modified CDS sequence (opt4) from hemagglutinin__InfluenzaA__ABC42827
augaagaccaucaucgcccugagcuacauccugugccugguguucgcccagaagcugcccggcaacgacaacagcaccgccacccugugccugggccaccacgccgugcccaacggcaccaucgugaagaccaucaccaacgaccagaucgaggugaccaacgccaccgagcuggugcagagcagcagcaccggcggcaucugcgacagcccccaccagauccuggacggcgagaacugcacccugaucgacgcccugcugggcgacccccagugcgacggcuuccagaacaagaagugggaccuguucguggagagaagcaaggccuacagcaacugcuaccccuacgacgugcccgacuacgccagccugagaagccugguggccagcagcggcacccuggaguucaacaacgagagcuucaacuggaccggcgugacccagaacggcaccagcagcgccugcaagagaagaagcaacaacagcuucuucagcagacugaacuggcugacccaccugaaguucaaguaccccgcccugaacgugaccaugcccaacaacgagaaguucgacaagcuguacaucuggggcgugcaccaccccggcaccgacaacgaccagaucagccuguacgcccaggccagcggcagaaucaccgugagcaccaagagaagccagcagaccgugauccccaacaucggcagcagacccagagugagagacauccccagcagaaugagcaucuacuggaccaucgugaagcccggcgacauccugcugaucaacagcaccggcaaccugaucgcccccagaggcuacuucaagaucagaagcggcaagagcagcaucaugagaagcgacgcccccaucggcaagugcaacagcgagugcaucacccccaacggcagcauccccaacgacaagcccuuccagaacgugaacagaaucaccuacggcgccugccccagauacgugaagcagaacacccugaagcuggccaccggcaugagaaacgugcccgagaagcagaccagaggcaucuucggcgccaucgccggcuucaucgagaacggcugggagggcaugguggacggcugguacggcuucagacaccagaacagcgagggcaucggccaggccgccgaccugaagagcacccaggccgccaucaaccagaucaacggcaagcugaacagacugaucggcaagaccaacgagaaguuccaccagaucgagaaggaguucagcgagguggagggcagaauccaggaccuggagaaguacguggaggacaccaagaucgaccuguggagcuacaacgccgagcugcugguggcccuggagaaccagcacaccaucgaccugaccgacagcgagaugaacaagcuguucgagagaaccaagaagcagcugagagagaacgccgaggacaugggcaacggcugcuucaagaucuaccacaagugcgacaacgccugcaucggcagcaucagaaacggcaccuacgaccacgacguguacagagacgaggcccugaacaacagauuccagaucaagggcguggagcugaagagcggcuacaaggacuggauccuguggaucagcuucgccaucagcugcuuccugcugugcguggcccugcugggcuucaucaugugggccugccagaagggcaacaucagaugcaacaucugcaucuga

SEQ ID NO: 160621 - RNA, 1701 nt, Artificial Sequence; identical to SEQ ID NO: 160303
  derived and/or modified CDS sequence (opt4) from hemagglutinin__InfluenzaA__ABC42849

SEQ ID NO: 160622 - RNA, 1701 nt, Artificial Sequence
  derived and/or modified CDS sequence (opt4) from hemagglutinin__InfluenzaA__ABC42882
augaagaccaucaucgcccugagcuacauccugugccugguguucgcccagaagcugcccggcaacgacaacagcaccgccacccugugccugggccaccacgccgugcccaacggcacccuggugaagaccaucaccaacgaccagaucgaggugaccaacgccaccgagcuggugcagagcagcagcaccggcagaaucugcgacagcccccaccagauccuggacggcgagaacugcacccugaucgacgcccugcugggcgacccccacugcgacggcuuccagaacaaggagugggaccuguucguggagagaagcaaggccuacagcaacugcuaccccuacgacgugcccgacuacgugagccugagaagccugguggccagcagcggcacccuggaguucaacaacgagagcuucaacuggaccggcguggcccagaacggcaccagcagcgccugcaagagaagaagcgacaagagcuucuucagcagacugaacuggcugcaccagcugaaguacaaguaccccgcccugaacgugaccaugcccaacaacgagaaguucgacaagcuguacaucuggggcgugcaccaccccggcaccgacagcgaccagaucagccuguacgcccaggccagcggcagagugaccgugagcaccaagagaagccagcagaccgugauccccaacaucggcagcagacccugggugagaggcgugagcagcagaaucagcaucuacuggaccaucgugaagcccggcgacauccugcugaucaacagcaccggcaaccugaucgcccccagaggcuacuucaagaucagaagcggcaagagcagcaucaugagaagcgacgcccccaucggcaagugcaacagcgagugcaucacccccaacggcagcauccccaacgacaagcccuuccagaacgugaacagaaucaccuacggcgccugccccagauacgugaagcagaacacccugaagcuggccaccggcaugagaaacgugcccgagaagcagaccagaggcaucuucggcgccaucgccggcuucaucgagaacggcugggagggcaugauggacggcugguacggcuucagacaccagaacagcgagggcaccggccaggccgccgaccugaagagcacccaggccgccaucaaccagaucaacggcaagcugaacagacugaucgagaagaccaacgagaaguuccaccagaucgagaaggaguucagcgagguggagggcagaauccaggaccuggagaaguacguggaggacaccaagaucgaccuguggagcuacaacgccgagcugcugguggcccuggagaaccagcacaccaucgaccugaccgacagcgagaugaacaagcuguucgagagaaccaagaagcagcugagagagaacgccgaggacaugggcaacggcugcuucaagaucuaccacaagugcgacaacgccugcaucggcagcaucagaaacggcaccuacgaccacgacguguacagagacgaggcccugaacaacagauuccagaucaagggcguggagcugaagagcggcuacaaggacugggugcuguggaucagcuucgccaucagcugcuuccugcugugcaucgugcugcugggcuucaucaugugggccugccagaagggcaacaucagaugcaacaucugcaucuga

SEQ ID NO: 160623 - RNA, 1701 nt, Artificial Sequence; identical to SEQ ID NO: 160622
  derived and/or modified CDS sequence (opt4) from hemagglutinin__InfluenzaA__ABC42893

SEQ ID NO: 160624 - RNA, 1701 nt, Artificial Sequence; identical to SEQ ID NO: 160576
  derived and/or modified CDS sequence (opt4) from hemagglutinin__InfluenzaA__ABC42929

SEQ ID NO: 160625 - RNA, 1701 nt, Artificial Sequence; identical to SEQ ID NO: 160576
  derived and/or modified CDS sequence (opt4) from hemagglutinin__InfluenzaA__ABC42940

SEQ ID NO: 160626 - RNA, 1701 nt, Artificial Sequence; identical to SEQ ID NO: 160576
  derived and/or modified CDS sequence (opt4) from hemagglutinin__InfluenzaA__ABC42951

SEQ ID NO: 160627 - RNA, 1701 nt, Artificial Sequence; identical to SEQ ID NO: 160576
  derived and/or modified CDS sequence (opt4) from hemagglutinin__InfluenzaA__ABC42962

SEQ ID NO: 160628 - RNA, 1701 nt, Artificial Sequence; identical to SEQ ID NO: 160576
  derived and/or modified CDS sequence (opt4) from hemagglutinin__InfluenzaA__ABC42973

SEQ ID NO: 160629 - RNA, 1701 nt, Artificial Sequence; identical to SEQ ID NO: 160576
  derived and/or modified CDS sequence (opt4) from hemagglutinin__InfluenzaA__ABC42995

SEQ ID NO: 160630 - RNA, 1701 nt, Artificial Sequence; identical to SEQ ID NO: 160576
  derived and/or modified CDS sequence (opt4) from hemagglutinin__InfluenzaA__ABC43006

SEQ ID NO: 160631 - RNA, 1701 nt, Artificial Sequence; identical to SEQ ID NO: 160576
  derived and/or modified CDS sequence (opt4) from hemagglutinin__InfluenzaA__ABC43028

SEQ ID NO: 160632 - RNA, 1701 nt, Artificial Sequence; identical to SEQ ID NO: 160576
  derived and/or modified CDS sequence (opt4) from hemagglutinin__InfluenzaA__ABC43039

SEQ ID NO: 160633 - RNA, 1701 nt, Artificial Sequence; identical to SEQ ID NO: 160576
  derived and/or modified CDS sequence (opt4) from hemagglutinin__InfluenzaA__ABC43050

SEQ ID NO: 160634 - RNA, 1701 nt, Artificial Sequence; identical to SEQ ID NO: 160576
  derived and/or modified CDS sequence (opt4) from hemagglutinin__InfluenzaA__ABC43061

SEQ ID NO: 160635 - RNA, 1701 nt, Artificial Sequence
  derived and/or modified CDS sequence (opt4) from hemagglutinin__InfluenzaA__ABC43072
augaagaccaucaucgcccugagcuacauccugugccugguguucgcccagaagcugcccggcaacgacaacagcaccgccacccugugccugggccaccacgccgugcccaacggcaccaucgugaagaccaucaccaacgaccagaucgaggugaccaacgccaccgagcuggugcagagcagcagcaccggcggcaucugcgacagcccccaccagauccuggacggcgagaacugcacccugaucgacgcccugcugggcgacccccagugcgacggcuuccagaacaagaagugggaccuguucguggagagaagcaaggccuacagcaacugcuaccccuacgacgugcccgaccacgccagccugagaagccugguggccagcagcggcacccuggaguucaacaacgagagcuucgacuggaccggcgugacccagaacggcaccagcagcgccugcaagagaagaagcaacaagagcuucuucagcagacugaacuggcugacccaccugaaguacaaguaccccgcccugaacgugaccaugcccaacaacgagaaguucgacaagcuguacaucuggggcgugcaccaccccggcaccgacagcgaccagaucagccuguacgcccaggccagcggcagaaucaccgugagcaccaagagaagccagcagaccgugauccccaacaucggcagcagacccagagugagagacgugagcagcagaaucagcaucuacuggaccaucgugaagcccggcgacauccugcugaucaacagcaccggcaaccugaucgcccccagaggcuacuucaagaucagaagcggcaagagcagcaucaugagaagcgacgcccccaucggcaagugcaacagcgagugcaucacccccaacggcagcauccccaacgacaagcccuuccagaacgugaacagaaucaccuacggcgccugccccagauacgugaagcagaacacccugaagcuggccaccggcaugagaaacgugcccgagaagcagaccagaggcaucuucggcgccaucgccggcuucaucgagaacggcugggagggcaugguggacggcugguacggcuucagacaccagaacagcgagggcaccggccaggccgccgaccugaagagcacccaggccgccaucaaccagaucaacggcaagcugaacagacugaucggcaagaccaacgagaaguuccaccagaucgagaaggaguucagcgagguggagggcagaauccaggaccuggagaaguacguggaggacaccaagaucgaccuguggagcuacaacgccgagcugcugguggcccuggagaaccagcacaccaucgaccugaccgacagcgagaugaacaagcuguucgagaagaccaagaagcagcugagagagaacgccgaggacaugggcaacggcugcuucaagaucuaccacaagugcgacaacgccugcaucggcagcaucagaaacggcaccuacgaccacgacguguacagagacgaggcccugaacaacagauuccagaucaagggcguggagcugaagagcggcuacaaggacuggauccuguggaucagcuucaccaucagcugcuuccugcugugcguggcccugcugggcuucaucaugugggccugccagaagggcaacaucagaugcaacaucugcaucuga

SEQ ID NO: 160636 - RNA, 1701 nt, Artificial Sequence; identical to SEQ ID NO: 160576
  derived and/or modified CDS sequence (opt4) from hemagglutinin__InfluenzaA__ABC43083

SEQ ID NO: 160637 - RNA, 1701 nt, Artificial Sequence; identical to SEQ ID NO: 160576
  derived and/or modified CDS sequence (opt4) from hemagglutinin__InfluenzaA__ABC43094

SEQ ID NO: 160638 - RNA, 1701 nt, Artificial Sequence; identical to SEQ ID NO: 160576
  derived and/or modified CDS sequence (opt4) from hemagglutinin__InfluenzaA__ABC43116

SEQ ID NO: 160639 - RNA, 1701 nt, Artificial Sequence; identical to SEQ ID NO: 160303
  derived and/or modified CDS sequence (opt4) from hemagglutinin__InfluenzaA__ABC43127

SEQ ID NO: 160640 - RNA, 1701 nt, Artificial Sequence; identical to SEQ ID NO: 160342
  derived and/or modified CDS sequence (opt4) from hemagglutinin__InfluenzaA__ABC43138

SEQ ID NO: 160641 - RNA, 1701 nt, Artificial Sequence; identical to SEQ ID NO: 160303
  derived and/or modified CDS sequence (opt4) from hemagglutinin__InfluenzaA__ABC43149

SEQ ID NO: 160642 - RNA, 1701 nt, Artificial Sequence; identical to SEQ ID NO: 160303
  derived and/or modified CDS sequence (opt4) from hemagglutinin__InfluenzaA__ABC43160

SEQ ID NO: 160643 - RNA, 1701 nt, Artificial Sequence; identical to SEQ ID NO: 160303
  derived and/or modified CDS sequence (opt4) from hemagglutinin__InfluenzaA__ABC43171

SEQ ID NO: 160644 - RNA, 1701 nt, Artificial Sequence; identical to SEQ ID NO: 160303
  derived and/or modified CDS sequence (opt4) from hemagglutinin__InfluenzaA__ABC43182

SEQ ID NO: 160645 - RNA, 1701 nt, Artificial Sequence
  derived and/or modified CDS sequence (opt4) from hemagglutinin__InfluenzaA__ABC43475
augaagaccaucaucgcccugagcuacauccugugccugguguucgcccagaagcugcccggcaacgacaacagcaccgccacccugugccugggccaccacgccgugcccaacggcaccaccgugaagaccaucaccaacgaccagaucgaggugaccaacgccaccgagcuggugcagagcagcagcaccggcggcaucugcgacagcccccaccagauccuggacggcgagaacugcacccugaucgacgcccugcugggcgacccccagugcgacggcuuccagaacaagaagugggaccuguucguggagagaagcaaggccuacagcaacugcuaccccuacgacgugcccgacuacgccagccugagaagccugguggccagcagcggcacccuggaguucaacaacgagagcuucaacuggaccggcgugacccagaacggcaccagcagcgccugcaagagaagaagcaacaacagcuucuucagcagacugaacuggcugacccaccugaaguucaaguaccccgcccugaacgugaccaugcccaacaacgagaaguucgacaagcuguacaucuggggcgugcaccaccccggcaccgacaacgaccagaucagccuguacgcccaggccagcggcagaaucaccgugagcaccaagagaagccagcagaccgugauccccaacaucggcagcagacccagagugagagacauccccagcagaaucagcaucuacuggaccaucgugaagcccggcgacauccugcugaucaacagcaccggcaaccugaucgcccccagaggcuacuucaagaucagaagcggcaagagcagcaucaugagaagcgacgcccccaucggcaagugcaacagcgagugcaucacccccaacggcagcauccccaacgacaagcccuuccagaacgugaacagaaucaccuacggcgccugccccagauacgugaagcagaacacccugaagcuggccaccggcaugagaaacgugcccgagaagcagaccagaggcaucuucggcgccaucgccggcuucaucgagaacggcugggagggcaugguggacggcugguacggcuucagacaccagaacagcgagggcaucggccaggccgccgaccugaagagcacccaggccgccaucaaccagaucaacggcaagcugaacagacugaucggcaagaccaacgagaaguuccaccagaucgagaaggaguucagcgagguggagggcagaauccaggaccuggagaaguacguggaggacaccaagaucgaccuguggagcuacaacgccgagcugcugguggcccuggagaaccagcacaccaucgaccugaccgacagcgagaugaacaagcuguucgagagaaccaagaagcagcugagagagaacgccgaggacaugggcaacggcugcuucaagaucuaccacaagugcgacaacgccugcaucggcagcaucagaaacggcaccuacgaccacgacguguacagagacgaggcccugaacaacagauuccagaucaagggcguggagcugaagagcggcuacaaggacuggauccuguggaucagcuucgccaucagcugcuuccugcugugcguggcccugcugggcuucaucaugugggccugccagaagggcaacaucagaugcaacaucugcaucuga

SEQ ID NO: 160646 - RNA, 1701 nt, Artificial Sequence; identical to SEQ ID NO: 160303
  derived and/or modified CDS sequence (opt4) from hemagglutinin__InfluenzaA__ABC43486

SEQ ID NO: 160647 - RNA, 1701 nt, Artificial Sequence; identical to SEQ ID NO: 160303
  derived and/or modified CDS sequence (opt4) from hemagglutinin__InfluenzaA__ABC43497

SEQ ID NO: 160648 - RNA, 1701 nt, Artificial Sequence; identical to SEQ ID NO: 160342
  derived and/or modified CDS sequence (opt4) from hemagglutinin__InfluenzaA__ABC43508

SEQ ID NO: 160649 - RNA, 1701 nt, Artificial Sequence; identical to SEQ ID NO: 160342
  derived and/or modified CDS sequence (opt4) from hemagglutinin__InfluenzaA__ABC43519

SEQ ID NO: 160650 - RNA, 1701 nt, Artificial Sequence; identical to SEQ ID NO: 160342
  derived and/or modified CDS sequence (opt4) from hemagglutinin__InfluenzaA__ABC43530

SEQ ID NO: 160651 - RNA, 1701 nt, Artificial Sequence
  derived and/or modified CDS sequence (opt4) from hemagglutinin__InfluenzaA__ABC43552
augaagaccaucaucgcccugagcuacauccugugccugguguucgcccagaagcugcccggcaacgacaacagcaccgccacccugugccugggccaccacgccgugcccaacggcaccaucgugaagaccaucaccaacgaccagaucgaggugaccaacgccaccgagcuggugcagagcagcagcaccggcggcaucugcgacagcccccaccagauccuggacggcgagaacugcacccugaucgacgcccugcugggcgacccccagugcgacggcuuccagaacaagaagugggaccuguucguggagagaagcaaggccuacagcaacugcuaccccuacgacgugcccgacuacgccagccugagaagccugguggccagcagcggcacccuggaguucaacaacgagagcuucaacuggaccggcgugacccagaacggcaccagcagcgccugcaagagaagaagcaacaacagcuucuucagcagacugaacuggcugacccaccugaaguucaaguaccccgcccugaacgugaccaugcccaacaacgagaaguucgacaagcuguacaucuggggcgugcaccaccccggcaccgacaacgaccagaucagccuguacgcccaggcccccggcagaaucaccgugagcaccaagagaagccagcagaccgugauccccaacaucggcagcagacccagagugagagacauccccagcagaaucagcaucuacuggaccaucgugaagcccggcgacauccugcugaucaacagcaccggcaaccugaucgcccccagaggcuacuucaagaucagaagcggcaagagcagcaucaugagaagcgacgcccccaucggcaagugcaacagcgagugcaucacccccaacggcagcauccccaacgacaagcccuuccagaacgugaacagaaucaccuacggcgccugccccagauacgugaagcagaacacccugaagcuggccaccggcaugagaaacgugcccgagaagcagaccagaggcaucuucggcgccaucgccggcuucaucgagaacggcugggagggcaugguggacggcugguacggcuucagacaccagaacagcgagggcaucggccaggccgccgaccugaagagcacccaggccgccaucaaccagaucaacggcaagcugaacagacugaucggcaagaccaacgagaaguuccaccagaucgagaaggaguucagcgagguggagggcagaauccaggaccuggagaaguacguggaggacaccaagaucgaccuguggagcuacaacgccgagcugcugguggcccuggagaaccagcacaccaucgaccugaccgacagcgagaugaacaagcuguucgagagaaccaagaagcagcugagagagaacgccgaggacaugggcaacggcugcuucaagaucuaccacaagugcgacaacgccugcaucggcagcaucagaaacggcaccuacgaccacgacguguacagagacgaggcccugaacaacagauuccagaucaagggcguggagcugaagagcggcuacaaggacuggauccuguggaucagcuucgccaucagcugcuuccugcugugcguggcccugcugggcuucaucaugugggccugccagaagggcaacaucagaugcaacaucugcaucuga

SEQ ID NO: 160652 - RNA, 1701 nt, Artificial Sequence
  derived and/or modified CDS sequence (opt4) from hemagglutinin__InfluenzaA__ABC46554
augaagaccaucaucgcccugagcuacaucuucugccagguguucgcccagaaccugcccggcaacgacaacagcaccgccacccugugccugggccaccacgccgugcccaacggcacccuggugaagaccaucaccaacgaccagaucgaggugaccaacgccaccgagcuggugcagagcagcagcaccggcagaaucugcgacagcccccacagaauccuggacggcaagaacugcacccugaucgacgcccugcugggcgacccccacugcgacggcuuccagaacgagaagugggaccuguucguggagagaagcaaggccuucagcaacugcuaccccuacgacgugcccgacuacgccagccugagaagccugguggccagcagcggcacccuggaguucaucaacgagggcuucaacuggaccggcgugacccaggacggcggcagcuacgccugcaagagaggccccgacaacagcuucuucagcagacugaacuggcuguacaagagcgagagcaccuaccccgugcugaacgugaccaugcccaacaacgacaacuucgacaagcuguacaucuggggcgugcaccaccccagcaccgacaaggagcagaccaaccuguacgugcaggccagcggcagagugaccgugagcaccaagagaagccagcagaccaucauccccaacgugggcagcagacccugggugagaggccugagcagcagaaucagcaucuacuggaccaucgugaagcccggcgacauccugcugaucaacagcaacggcaaccugaucgcccccagaggcuacuucaagaucagaaccggcaagagcagcaucaugagaagcgacgcccccaucggcaccugcagcagcgagugcaucacccccaacggcagcauccccaacgacaagcccuuccagaacgugaacaagaucaccuacggcgccugccccaaguacgugaagcagaacacccugaagcuggccaccggcaugagaaacgugcccgagaagcagaccagaggcaucuucggcgccaucgccggcuucaucgagaacggcugggagggcaugaucgacggcugguacggcuucagacaccagaacagcgagggcaccggccaggccgccgaccugaagagcacccaggccgccaucgaccagaucaacggcaagcugaacagagugaucgagaagaccaacgagaaguuccaccagaucgagaaggaguucagcgagguggagggcagaauccaggaccuggagaaguacguggaggacaccaagaucgaccuguggagcuacaacgccgagcugcugguggcccuggagaaccagcacaccaucgaccugaccgacagcgagaugaacaagcuguucgagaagaccagaagacagcugagagagaacgccgaggacaugggcaacggcugcuucaagaucuaccacaagugcgacaacgccugcaucggcagcaucagaaacggcaccuacgaccacgacguguacagagacgaggcccugaacaacagauuccagaucaagggcguggagcugaagagcggcuacaaggacuggauccuguggaucagcuucgccaucagcugcuuccugcugugcguggugcugcugggcuucaucaugugggccugccagaagggcaacaucagaugcaacaucugcaucuga

SEQ ID NO: 160653 - RNA, 1701 nt, Artificial Sequence
  derived and/or modified CDS sequence (opt4) from hemagglutinin__InfluenzaA__ABC46576
augaagaccaucaucgcccugagcuacaucuucugccugguguucgcccagaaccugcccggcaacgacaagagcaccgccacccugugccugggccaccacgccgugcccaacggcacccuggugaagaccaucaccaacgaccagaucgaggugaccaacgccaccgagcuggugcagagcagcagcaccggcagaaucugcgacagcccccacagaauccuggacggcaagaacugcacccugguggacgcccugcugggcgacccccacugcgacggcuuccagaacgagaagugggaccuguucguggagagaagcaaggccuucagcaacugcuaccccuacgacgugcccgacuacgccagccugagaagccugguggccagcagcggcacccuggaguucaucaacgagagcuucaacuggaccggcgugacccagagcggcggcagcuacgccugcaagagaggcagcgacaacagcuucuucagcagacugaacuggcuguacgagagcgagagcaaguaccccgugcugaacgugaccaugcccaacaacggcaacuucgacaagcuguacaucuggggcgugcaccaccccagcaccgacaaggagcagaccaaccuguacgugagagccagcggcagagugaccgugagcaccaagagaagccagcagaccaucauccccaacaucggcagcagacccugggugagaggccugagcagcagaaucagcaucuacuggaccaucgugaagcccggcgacauccugcugaucaacagcaacggcaaccugaucgcccccagaggcuacuucaagaucagaaccggcaagagcagcaucaugagaagcgacgcccccaucggcaccugcagcagcgagugcaucacccccaacggcagcauccccaacgacaagcccuuccagaacgugaacaagaucaccuacggcgccugccccaaguacgugaagcagaacacccugaagcuggccaccggcaugagaaacgugcccgagaagcagaccagaggcaucuucggcgccaucgccggcuucaucgagaacggcugggagggcaugguggacggcugguacggcuucagacaccagaacagcgagggcaccggccaggccgccgaccugaagagcacccaggccgccaucgaccagaucaacggcaagcugaacagagugaucgagaagaccaacgagaaguuccaccagaucgagaaggaguucagcgagguggagggcagaauccaggaccuggagaaguacguggaggacaccaagaucgaccuguggagcuacaacgccgagcugcugguggcccuggagaaccagcacaccaucgaccugaccgacagcgagaugaacaagcuguucgagaagaccagaagacagcugagagagaacgccgaggacaugggcaacggcugcuucaagaucuaccacaagugcgacaacgccugcaucggcagcaucagaaacggcaccuacgaccacgacguguacagagacgaggcccugaacaacagauuccagaucaagggcguggagcugaagagcggcuacaaggacuggauccuguggaucagcuucgccaucagcugcuuccugcugugcguggugcugcugggcuucaucaugugggccugccagaagggcaacaucagaugcaacaucugcaucuga

SEQ ID NO: 160654 - RNA, 1701 nt, Artificial Sequence; identical to SEQ ID NO: 160512
  derived and/or modified CDS sequence (opt4) from hemagglutinin__InfluenzaA__ABC50167

SEQ ID NO: 160655 - RNA, 1701 nt, Artificial Sequence; identical to SEQ ID NO: 160512
  derived and/or modified CDS sequence (opt4) from hemagglutinin__InfluenzaA__ABC50178

SEQ ID NO: 160656 - RNA, 1701 nt, Artificial Sequence; identical to SEQ ID NO: 160512
  derived and/or modified CDS sequence (opt4) from hemagglutinin__InfluenzaA__ABC50189

SEQ ID NO: 160657 - RNA, 1701 nt, Artificial Sequence; identical to SEQ ID NO: 160622
  derived and/or modified CDS sequence (opt4) from hemagglutinin__InfluenzaA__ABC50200

SEQ ID NO: 160658 - RNA, 1701 nt, Artificial Sequence; identical to SEQ ID NO: 160622
  derived and/or modified CDS sequence (opt4) from hemagglutinin__InfluenzaA__ABC50211

SEQ ID NO: 160659 - RNA, 1701 nt, Artificial Sequence; identical to SEQ ID NO: 160622
  derived and/or modified CDS sequence (opt4) from hemagglutinin__InfluenzaA__ABC50222

SEQ ID NO: 160660 - RNA, 1701 nt, Artificial Sequence; identical to SEQ ID NO: 160622
  derived and/or modified CDS sequence (opt4) from hemagglutinin__InfluenzaA__ABC50233

SEQ ID NO: 160661 - RNA, 1701 nt, Artificial Sequence; identical to SEQ ID NO: 160622
  derived and/or modified CDS sequence (opt4) from hemagglutinin__InfluenzaA__ABC50244

SEQ ID NO: 160662 - RNA, 1701 nt, Artificial Sequence; identical to SEQ ID NO: 160622
  derived and/or modified CDS sequence (opt4) from hemagglutinin__InfluenzaA__ABC50266

SEQ ID NO: 160663 - RNA, 1701 nt, Artificial Sequence; identical to SEQ ID NO: 160622
  derived and/or modified CDS sequence (opt4) from hemagglutinin__InfluenzaA__ABC50277

SEQ ID NO: 160664 - RNA, 1701 nt, Artificial Sequence
  derived and/or modified CDS sequence (opt4) from hemagglutinin__InfluenzaA__ABC50299
augaagaccaucaucgcccugagcuacauccugugccugguguucgcccagaagcugcccggcaacgacaacagcaccgccacccugugccugggccaccacgccgugcccaacggcacccuggugaagaccaucaccaacgaccagaucgaggugaccaacgccaccgagcuggugcagagcagcagcaccggcagaaucugcgacagcccccaccagauccuggacggcgagaacugcacccugaucgacgcccugcugggcgacccccacugcgacggcuuccagaacaaggagugggaccuguucguggagagaagcaaggccuacagcaacugcuaccccuacgacgugcccgacuacgugagccugagaagccugguggccagcagcggcacccuggaguucaacaacgagagcuucaacuggaccggcguggcccagaacggcaccagcagcgccugcaagagaagaagcgacaagagcuucuucagcagacugaacuggcugcaccagcugaaguacaaguaccccgcccugaacgugaccaugcccaacaacgagaaguucgacaagcuguacaucuggggcgugcaccaccccggcaccgacagcgaccagaucagccuguacgcccaggccagcggcagagugaccgugagcaccaagagaagccagcagaccgugauccccaacaucggcagcagacccugggugagaggcgugagcagcagaaucagcaucuacuggaccaucgugaagcccggcgacauccugcugaucaacagcaccggcaaccugaucgcccccagaggcuacuucaagaucagaagcggcaagagcagcaucaugagaagcgacgcccccaucggcaagugcaacagcgagugcaucacccccaacggcagcauccccaacgacaagcccuuccagaacgugaacagaaucaccuacggcgccugccccagauacgugaagcagaacacccugaagcuggccaccggcaugagaaacgugcccgagaagcagaccagaggcaucuucggcgccaucgccggcuucaucgagaacggcugggagggcaugauggacggcugguacggcuucagacaccagaacagcgagggcaccggccaggccgccgaccugaagagcacccaggccgccaucaaccagaucaacggcaagcugaacagacugaucgagaagaccaacgagaaguuccaccagaucgagaaggaguucagcgagguggagggcagaauccaggaccuggagaaguacguggaggacaccaagaucgaccuguggagcuacaacgccgagcugcugguggcccuggagaaccagcacaccaucgaccugaccgacagcgagaugaacaagcuguucgagagaaccaagaagcagcugagagagaacgccgaggacaugggcaacggcugcuucaagaucuaccacaagugcgacaacgccugcaucggcagcaucagaaacggcaccuacgaccacgacguguacagagacgaggcccugaacaacagauuccagaucaagggcguggagcugaagagcggcuacaaggacugggugcuguggaucagcuucgccaccagcugcuuccugcugugcaucgugcugcugggcuucaucaugugggccugccagaagggcaacaucagaugcaacaucugcaucuga

SEQ ID NO: 160665 - RNA, 1701 nt, Artificial Sequence; identical to SEQ ID NO: 160622
  derived and/or modified CDS sequence (opt4) from hemagglutinin__InfluenzaA__ABC50310

SEQ ID NO: 160666 - RNA, 1701 nt, Artificial Sequence
  derived and/or modified CDS sequence (opt4) from hemagglutinin__InfluenzaA__ABC50321
augaagaccaucaucgcccugagcuacauccugugccugguguucgcccagaagcugcccggcaacgacaacagcaccgccacccugugccugggccaccacgccgugcccaacggcacccuggugaagaccaucaccaacgaccagaucgaggugaccaacgccaccgagcuggugcagagcagcagcaccggcagaaucugcgacagcccccaccagauccuggacggcgagaacugcacccugaucgacgcccugcugggcgacccccacugcgacggcuuccagaacaaggagugggaccuguucguggagagaagcaaggccuacagcaacugcuaccccuacgacgugcccgacuacgugagccugagaagccugguggccagcagcggcacccuggaguucaacaacgagagcuucaacuggaccggcguggcccagaacggcaccagcagcgccugcaagagaagaagcgacaagagcuucuucagcagacugaacuggcugcaccagcugaaguacaaguaccccgcccugaacgugaccaugcccaacaacgagaaguucgacaagcuguacaucuggggcgugcaccaccccggcaccgacagcgaccagaucagccuguacgcccaggccagcggcagagugaccgugagcaccaagagaagccagcagaccgugauccccaacaucggcagcagacccugggugagaggcgugagcagcagaaucagcaucuacuggaccaucgugaagcccggcgacauccugcugaucaacagcaccggcaaccugaucgcccccagaggcuacuucaagaucagaagcggcaagagcagcaucaugagaagcgacgcccccaucggcaagugcaacagcgagugcaucacccccaacggcagcauccccaacgacaagcccuuccagaacgugaacagaaucaccuacggcgccugccccagauacgugaagcagaacacccugaagcuggccaccggcaugagaaacgugcccggcaagcagaccagaggcaucuucggcgccaucgccggcuucaucgagaacggcugggagggcaugauggacggcugguacggcuucagacaccagaacagcgagggcaccggccaggccgccgaccugaagagcacccaggccgccaucaaccagaucaacggcaagcugaacagacugaucgagaagaccaacgagaaguuccaccagaucgagaaggaguucagcgagguggagggcagaauccaggaccuggagaaguacguggaggacaccaagaucgaccuguggagcuacaacgccgagcugcugguggcccuggagaaccagcacaccaucgaccugaccgacagcgagaugaacaagcuguucgagagaaccaagaagcagcugagagagaacgccgaggacaugggcaacggcugcuucaagaucuaccacaagugcgacaacgccugcaucggcagcaucagaaacggcaccuacgaccacgacguguacagagacgaggcccugaacaacagauuccagaucaagggcguggagcugaagagcggcuacaaggacugggugcuguggaucagcuucgccaucagcugcuuccugcugugcaucgugcugcugggcuucaucaugugggccugccagaagggcaacaucagaugcaacaucugcaucuga

SEQ ID NO: 160667 - RNA, 1701 nt, Artificial Sequence
  derived and/or modified CDS sequence (opt4) from hemagglutinin__InfluenzaA__ABC50332
augaagaccaucaucgcccugagcuacauccugugccugguguucgcccagaagcugcccggcaacgacaacagcaccgccacccugugccugggccaccacgccgugcccaacggcacccuggugaagaccaucaccaacgaccagaucgaggugaccaacgccaccgagcuggugcagagcagcagcaccggcagaaucugcgacagcccccaccagauccuggacggcgagaacugcacccugaucgacgcccugcugggcgacccccacugcgacggcuuccagaacaaggagugggaccuguucguggagagaagcaaggccuacagcaacugcuaccccuacgacgugcccgacuacgugagccugagaagccugguggccagcagcggcacccuggaguucaacaacgagagcuucaacuggaccggcguggcccagaacggcaccagcagcgccugcaagagaagaagcgacaagagcuucuucagcagacugaacuggcugcaccagcugaaguacaaguaccccgcccugaacgugaccaugcccaacaacgagaaguucgacaagcuguacaucuggggcgugcaccaccccggcaccgacagcgaccagaucagccuguacgcccaggccagcggcagagugaccgugagcaccaagagaagccagcagaccgugauccccaacaucggcagcagacccugggugagaggcgugagcagcagaaucagcaucuacuggaccaucgugaagcccggcgacauccugcugaucaacagcaccggcaaccugaucgcccccagaggcuacuucaagaucagaagcggcaagagcagcaucaugagaagcgacgcccccaucggcaagugcaacagcgagugcaucacccccaacggcagcauccccaacggcaagcccuuccagaacgugaacagaaucaccuacggcgccugccccagauacgugaagcagaacacccugaagcuggccaccggcaugagaaacgugcccgagaagcagaccagaggcaucuucggcgccaucgccggcuucaucgagaacggcugggagggcaugauggacggcugguacggcuucagacaccagaacagcgagggcaccggccaggccgccgaccugaagagcacccaggccgccaucaaccagaucaacggcaagcugaacagacugaucgagaagaccaacgagaaguuccaccagaucgagaaggaguucagcgagguggagggcagaauccaggaccuggagaaguacguggaggacaccaagaucgaccuguggagcuacaacgccgagcugcugguggcccuggagaaccagcacaccaucgaccugaccgacagcgagaugaacaagcuguucgagagaaccaagaagcagcugagagagaacgccgaggacaugggcaacggcugcuucaagaucuaccacaagugcgacaacgccugcaucggcagcaucagaaacggcaccuacgaccacgacguguacagagacgaggcccugaacaacagauuccagaucaagggcguggagcugaagagcggcuacaaggacuggauccuguggaucagcuucgccaucagcugcuuccugcugugcaucgugcugcugggcuucaucaugugggccugccagaagggcaacaucagaugcaacaucugcaucuga

SEQ ID NO: 160668 - RNA, 1701 nt, Artificial Sequence; identical to SEQ ID NO: 160622
  derived and/or modified CDS sequence (opt4) from hemagglutinin__InfluenzaA__ABC50343

SEQ ID NO: 160669 - RNA, 1701 nt, Artificial Sequence
  derived and/or modified CDS sequence (opt4) from hemagglutinin__InfluenzaA__ABC50354
augaagaccaucaucgcccugagcuacauccugugccugguguucgcccagaagcugcccggcaacgacaacagcaccgccacccugugccugggccaccacgccgugcccaacggcacccuggugaagaccaucaccaacgaccagaucgaggugaccaacgccaccgagcuggugcagagcagcagcaccggcagaaucugcgacagcccccaccagauccuggacggcgagaacugcacccugaucgacgcccugcugggcgacccccacugcgacggcuuccagaacaaggagugggaccuguucguggagagaagcaaggccuacagcaacugcuaccccuacgacgugcccgacuacgugagccugagaagccugguggccagcagcggcacccuggaguucaacaacgagagcuucaacuggaccggcguggcccagaacggcaccagcagcagcugcaagagaagaagcgacaagagcuucuucagcagacugaacuggcugcaccagcugaaguacaaguaccccgcccugaacgugaccaugcccaacaacgagaaguucgacaagcuguacaucuggggcgugcaccaccccggcaccgacagcgaccagaucagccuguacgcccaggccagcggcagagugaccgugagcaccaagagaagccagcagaccgugauccccaacaucggcagcagacccugggugagaggcgugagcagcagaaucagcaucuacuggaccaucgugaagcccggcgacauccugcugaucaacagcaccggcaaccugaucgcccccagaggcuacuucaagaucagaagcggcaagagcagcaucaugagaagcgacgcccccaucggcaagugcaacagcgagugcaucacccccaacggcagcauccccaacgacaagcccuuccagaacgugaacagaaucaccuacggcgccugccccagauacgugaagcagaacacccugaagcuggccaccggcaugagaaacgugcccgagaagcagaccagaggcaucuucggcgccaucgccggcuucaucgagaacggcugggagggcaugauggacggcugguacggcuucagacaccagaacagcgagggcaccggccaggccgccgaccugaagagcacccaggccgccaucaaccagaucaacggcaagcugaacagacugaucgagaagaccaacgagaaguuccaccagaucgagaaggaguucagcgagguggagggcagaauccaggaccuggagaaguacguggaggacaccaagaucgaccuguggagcuacaacgccgagcugcugguggcccuggagaaccagcacaccaucgaccugaccgacagcgagaugaacaagcuguucgagagaaccaagaagcagcugagagagaacgccgaggacaugggcaacggcugcuucaagaucuaccacaagugcgacaacgccugcaucggcagcaucagaaacggcaccuacgaccacgacguguacagagacgaggcccugaacaacagauuccagaucaagggcguggagcugaagagcggcuacaaggacugggugcuguggaucagcuucgccaucagcugcuuccugcugugcaucgugcugcugggcuucaucaugugggccugccagaagggcaacaucagaugcaacaucugcaucuga

SEQ ID NO: 160670 - RNA, 1701 nt, Artificial Sequence
  derived and/or modified CDS sequence (opt4) from hemagglutinin__InfluenzaA__ABC50376
augaagaccaucaucgcccugagcuacauccugugccugguguucgcccagaagcugcccggcaacgacaacagcaccgccacccugugccugggccaccacgccgugcccaacggcacccuggugaagaccaucaccaacgaccagaucgaggugaccaacgccaccgagcuggugcagagcagcagcaccggcagaaucugcgacagcccccaccagauccuggacggcgagaacugcacccugaucgacgcccugcugggcgacccccacugcgacggcuuccagaacaaggagugggaccuguucguggagagaagcaaggccuacagcaacugcuaccccuacgacgugcccgacuacgugagccugagaagccugguggccagcagcggcacccuggaguucaacaacgagagcuucaacuggaccggcguggcccagaacggcaccagcagcgccugcaagagaagaagcgacaagagcuucuucagcagacugaacuggcugcaccagcugaaguacaaguaccccgcccugaacgugaccaugcccaacaacgagaaguucgacaagcuguacaucuggggcgugcaccaccccggcaccgacagcgaccagaucagccuguacgcccaggccagcggcagagugaccgugagcaccaagagaagccagcagaccgugauccccaacaccggcagcagacccugggugagaggcgugagcagcagaaucagcaucuacuggaccaucgugaagcccggcgacauccugcugaucaacagcaccggcaaccugaucgcccccagaggcuacuucaagaucagaagcggcaagagcagcaucaugagaagcgacgcccccaucggcaagugcaacagcgagugcaucacccccaacggcagcauccccaacgacaagcccuuccagaacgugaacagaaucaccuacggcgccugccccagauacgugaagcagaacacccugaagcuggccaccggcaugagaaacgugcccgagaagcagaccagaggcaucuucggcgccaucgccggcuucaucgagaacggcugggagggcaugauggacggcugguacggcuucagacaccagaacagcgagggcaccggccaggccgccgaccugaagagcacccaggccgccaucaaccagaucaacggcaagcugaacagacugaucgagaagaccaacgagaaguuccaccagaucgagaaggaguucagcgagguggagggcagaauccaggaccuggagaaguacguggaggacaccaagaucgaccuguggagcuacaacgccgagcugcugguggcccuggagaaccagcacaccaucgaccugaccgacagcgagaugaacaagcuguucgagagaaccaagaagcagcugagagagaacgccgaggacaugggcaacggcugcuucaagaucuaccacaagugcgacaacgccugcaucggcagcaucagaaacggcaccuacgaccacgacguguacagagacgaggcccugaacaacagauuccagaucaagggcguggagcugaagagcggcuacaaggacugggugcuguggaucagcuucgccaucagcugcuuccugcugugcaucgugcugcugggcuucaucaugugggccugccagaagggcaacaucagaugcaacaucugcaucuga

SEQ ID NO: 160671 - RNA, 1701 nt, Artificial Sequence
  derived and/or modified CDS sequence (opt4) from hemagglutinin__InfluenzaA__ABC50387
augaagaccaucaucgcccugagcuacauccugugccugguguucgcccagaagcugcccggcaacgacaacagcaccgccacccugugccugggccaccacgccgugcccaacggcacccuggugaagaccaucaccaacgaccagaucgaggugaccaacgccaccgagcuggugcagagcagcagcaccggcagaaucugcgacagcccccaccagauccuggacggcgagaacugcacccugaucgacgcccugcugggcgacccccacugcgacggcuuccagaacaaggagugggaccuguucguggagagaagcaaggccuacagcaacugcuaccccuacgacgugcccgacuacgugagccugagaagccugguggccagcagcggcacccuggaguucaacaacgagagcuucaacuggaccggcguggcccagaacggcaccagcagcgccugcaagagaagaagcgacaagagcuucuucagcagacugaacuggcugcaccagcugaaguacaaguaccccgcccugaacgugaccaugcccaacaacgagaaguucgacaagcuguacguguggggcgugcaccaccccggcaccgacagcgaccagaucagccuguacgcccaggccagcggcagagugaccgugagcaccaagagaagccagcagaccgugauccccaacaucggcagcagacccugggugagaggcgugagcagcagaaucagcaucuacuggaccaucgugaagcccggcgacauccugcugaucaacagcaccggcaaccugaucgcccccagaggcuacuucaagaucagaagcggcaagagcagcaucaugagaagcgacgcccccaucggcaagugcaacagcgagugcaucacccccaacggcagcauccccaacgacaagcccuuccagaacgugaacagaaucaccuacggcgccugccccagauacgugaagcagaacacccugaagcuggccaccggcaugagaaacgugcccgagaagcagaccagaggcaucuucggcgccaucgccggcuucaucgagaacggcugggagggcaugauggacggcugguacggcuucagacaccagaacagcgagggcaccggccaggccgccgaccugaagagcacccaggccgccaucaaccagaucaacggcaagcugaacagacugaucgagaagaccaacgagaaguuccaccagaucgagaaggaguucagcgagguggagggcagaauccaggaccuggagaaguacguggaggacaccaagaucgaccuguggagcuacaacgccgagcugcugguggcccuggagaaccagcacaccaucgaccugaccgacagcgagaugaacaagcuguucgagagaaccaagaagcagcugagagagaacgccgaggacaugggcaacggcugcuucaagaucuaccacaagugcgacaacgccugcaucggcagcaucagaaacggcaccuacgaccacgacguguacagagacgaggcccugaacaacagauuccagaucaagggcguggagcugaagagcggcuacaaggacugggugcuguggaucagcuucgccaucagcugcuuccugcugugcaucgugcugcugggcuucaucaugugggccugccagaagggcaacaucagaugcaacaucugcaucuga

SEQ ID NO: 160672 - RNA, 1701 nt, Artificial Sequence
  derived and/or modified CDS sequence (opt4) from hemagglutinin__InfluenzaA__ABC50409
augaagaccaucaucgcccugagcuacauccugugccugguguucgcccagaagcugcccggcaacgacaacagcaccgccacccugugccugggccaccacgccgugcccaacggcaccaucgugaagaccaucaccaacgaccagaucgaggugaccaacgccaccgagcuggugcagagcagcagcaccggcggcaucugcgacagcccccaccagauccuggacggcgagaacugcacccugaucgacgcccugcugggcgacccccagugcgacggcuuccagaacaagaagugggaccuguucguggagagaagcaaggccuacagcaacugcuaccccuacgacgugcccgacuacgugagccugagaagccugguggccagcagcggcacccuggaguucaacaacgagagcuucaacuggaccggcgugacccagaacggcaccagcagcgccugcaagagaagaagcaacaacagcuucuucagcagacugaacuggcugacccaccugaaguucaaguaccccgcccugaacgugaccaugcccaacaacgagaaguucgacaagcuguacaucuggggcgugcaccaccccggcaccgacaacgaccagaucagccuguacgcccaggccagcggcagaaucaccgugagcaccaagagaagccagcagaccgugauccccaacaucggcagcagacccagagugagagacauccccagcagaaucagcaucuacuggaccaucgugaagcccggcgacauccugcugaucaacagcaccggcaaccugaucgcccccagaggcuacuucaagaucagaagcggcaagagcagcaucaugagaagcgacgcccccaucggcaagugcaacagcgagugcaucacccccaacggcagcauccccaacgacaagcccuuccagaacgugaacagaaucaccuacggcgccugccccagauacgugaagcagaacacccugaagcuggccaccggcaugagaaacgugcccgagaagcagaccagaggcaucuucggcgccaucgccggcuucaucgagaacggcugggagggcaugguggacggcugguacggcuucagacaccagaacagcgagggcaucggccaggccgccgaccugaagagcacccaggccgccaucaaccagaucaacggcaagcugaacagacugaucggcaagaccaacgagaaguuccaccagaucgagaaggaguucagcgagguggagggcagaauccaggaccuggagaaguacguggaggacaccaagaucgaccuguggagcuacaacgccgagcugcugguggcccuggagaaccagcacaccaucgaccugaccgacagcgagaugaacaagcuguucgagagaaccaagaagcagcugagagagaacgccgaggacaugggcaacggcugcuucaagaucuaccacaagugcgacaacgccugcaucggcagcaucagaaacggcaccuacgaccacgacguguacagagacgaggcccugaacaacagauuccagaucaagggcguggagcugaagagcggcuacaaggacuggauccuguggaucagcuucgccaucagcugcuuccugcugugcguggcccugcugggcuucaucaugugggccugccagaagggcaacaucagaugcaacaucugcaucuga

SEQ ID NO: 160673 - RNA, 1701 nt, Artificial Sequence; identical to SEQ ID NO: 160672
  derived and/or modified CDS sequence (opt4) from hemagglutinin__InfluenzaA__ABC50420

SEQ ID NO: 160674 - RNA, 1701 nt, Artificial Sequence
  derived and/or modified CDS sequence (opt4) from hemagglutinin__InfluenzaA__ABC54668
augaagaccaucaucgcccugagcuacauccugugccugguguucgcccagaagcugcccggcaacgacaacagcaccgccacccugugccugggccaccacgccgugcccaacggcacccuggugaagaccaucaccaacgaccagaucgaggugaccaacgccaccgagcuggugcagagcagcagcaccggcagaaucugcgacagcccccaccagauccuggacggcgagaacugcacccugaucgacgcccugcugggcgacccccacugcgacggcuuccagaacaaggagugggaccuguucguggagagaagcaaggccuacagcaacugcuaccccuacgacgugcccgacuacgccagccugagaagccugguggccagcagcggcacccuggaguucaacaacgagagcuucaacuggaccggcguggcccagaacggcaccagcagcgccugcaagagaagaagcaacaagagcuucuucagcagacugaacuggcugcaccagcugaaguacaaguaccccgcccugaacgugaccaugcccaacaacgagaaguucgacaagcuguacaucuggggcgugcaccaccccagcaccgacagcgaccagaucagccuguacgcccaggccagcggcagagugaccgugagcaccaagagaagccagcagaccgugauccccaacaucggcagcggccccugggugagaggcgugagcagcagaaucagcaucuacuggaccaucgugaagcccggcgacauccugcugaucaacagcaccggcaaccugaucgcccccagaggcuacuucaagaucagaagcggcaagagcagcaucaugagaagcgacgcccccaucggcaagugcaacagcgagugcaucacccccaacggcagccugcccaacgacaagcccuuccagaacgugaacagaaucaccuacggcgccugccccagauacgugaagcagaacacccugaagcuggccaccggcaugagaaacgugcccgagaagcagaccagaggcaucuucggcgccaucgccggcuucaucgagaacggcugggagggcaugguggacggcugguacggcuucagacaccagaacagcgagggcaccggccaggccgccgaccugaagagcacccaggccgccaucaaccagaucaacggcaagcugaacagacugaucgagaagaccaacgagaaguuccaccagaucgagaaggaguucagcgagguggagggcagaauccaggaccuggagaaguacguggaggacaccaagaucgaccuguggagcuacaacgccgagcugcugguggcccuggagaaccagcacaccaucgaccugaccgacagcgagaugaacaagcuguucgagagaaccaagaagcagcugagagagaacgccgaggacaugggcaacggcugcuucaagaucuaccacaagugcgacaacgccugcaucggcagcaucagaaacggcaccuacgaccacgacguguacagagacgaggcccugaacaacagauuccagaucaagggcguggagcugaagagcggcuacaaggacuggauccuguggaucagcuucgccaucagcugcuuccugcugugcguggugcugcugggcuucaucaugugggccugccagaagggcaacaucagaugcaacaucugcaucuga

SEQ ID NO: 160675 - RNA, 1701 nt, Artificial Sequence
  derived and/or modified CDS sequence (opt4) from hemagglutinin__InfluenzaA__ABC54679
augaagaccaucaucgcccugagcuacauccugugccugguguucgcccagaagcugcccggcaacgacaacagcaccgccacccugugccugggccaccacgccgugcccaacggcaccaucgugaagaccaucaccaacgaccagaucgaggugaccaacgccaccgagcuggugcagagcagccccaccggcggcaucugcgacagcccccaccagauccuggacggcgagaacugcacccugaucgacgcccugcugggcgacccccagugcgacggcuuccagaacaagaagugggaccuguucaucgagagaagcaaggccuacagcaacugcuaccccuacgacgugcccgacuacgccagccugagaagccugguggccagcagcggcacccuggaguucaacaacgagagcuucaacuggaccggcgugacccagaacggcaccagcagcgccugcaagagaagaagcaacaacagcuucuucagcagacugaacuggcugacccaccugaaguucaaguaccccgcccugaacgugaccaugcccaacaacgagaaguucgacaagcuguacaucuggggcgugcaccaccccggcaccgacaacgaccagaucagccuguacgcccaggccagcggcagaaucaccgugagcaccaagagaagccagcagaccgugauccccaacgugggcagcagacccagagugagagacauccccagcagaaucagcaucuacuggaccaucgugaagcccggcgacauccugcugaucaacagcaccggcaaccugaucgcccccagaggcuacuucaagaucagaagcggcaagagcagcaucaugagaagcgacgcccccaucggcaagugcaacagcgagugcaucacccccaacggcagcauccccaacgacaagcccuuccagaacgugaacagaaucaccuacggcgccugccccagauacgugaagcagaacacccugaagcuggccaccggcaugagaaacgugcccgagaagcagaccagaggcaucuucggcgccaucgccggcuucaucgagaacggcugggagggcaugguggacggcugguacggcuucagacaccagaacagcgagggcaucggccaggccgccgaccugaagagcacccaggccgccaucaaccagaucaacggcaagcugaacagacugaucggcaagaccaacgagaaguuccaccagaucgagaaggaguucagcgagguggagggcagaauccaggaccuggagaaguacguggaggacaccaagaucgaccuguggagcuacaacgccgagcugcugguggcccuggagaaccagcacaccaucgaccugaccgacagcgagaugaacaagcuguucgagagaaccaagaagcagcugagagagaacgccgaggacaugggcaacggcugcuucaagaucuaccacaagugcgacaacgccugcaucggcagcaucagaaacggcaccuacgaccacgacguguacagagacgaggcccugaacaacagauuccagaucaagggcguggagcugaagagcggcuacaaggacuggauccuguggaucagcuucgccaucagcugcuuccugcugugcguggcccugcugggcuucaucaugugggccugccagaagggcaacaucagaugcaacaucugcaucuga

SEQ ID NO: 160676 - RNA, 1701 nt, Artificial Sequence; identical to SEQ ID NO: 160576
  derived and/or modified CDS sequence (opt4) from hemagglutinin__InfluenzaA__ABC67319

SEQ ID NO: 160677 - RNA, 1701 nt, Artificial Sequence
  derived and/or modified CDS sequence (opt4) from hemagglutinin__InfluenzaA__ABC67454
augaagaccaucaucgcccugagcuacauccugugccugguguucgcccaggagcugcccggcaacgacaacagcaccgccacccugugccugggccaccacgccgugcccaacggcacccuggugaagaccaucaccaacgaccagaucgaggugaccaacgccaccgagcuggugcagagcagcagcaccggcagaaucugcgacagcccccaccagauccuggacggcgagaacugcacccugaucgacgcccugcugggcgacccccacugcgacggcuuccagaacaaggagugggaccuguucguggagagaagcaaggccuacagcaacugcuaccccuacgacgugcccgacuacgugagccugagaagccugguggccagcagcggcacccuggaguucaacaacgagagcuucaacuggaccggcguggcccagaacggcaccagcagcgccugcaagagaagaagcgacaagagcuucuucagcagacugaacuggcugcaccagcugaaguacaaguaccccgcccugaacgugaccaugcccaacaacgagaaguucgacaagcuguacaucuggggcgugcaccaccccggcaccgacagcgaccagaucagccuguacgcccaggccagcggcagagugaccgugagcaccaagagaagccagcagaccgugauccccaacaucggcagcagacccugggugagaggcgugagcagcagaaucagcaucuacuggaccaucgugaagcccggcgacauccugcugaucaacagcaccggcaaccugaucgcccccagaggcuacuucaagaucagaagcggcaagagcagcaucaugagaagcgacgcccccaucggcaagugcaacagcgagugcaucacccccaacggcagcauccccaacgacaagcccuuccagaacgugaacagaaucaccuacggcgccugccccagauacgugaagcagaacacccugaagcuggccaccggcaugagaaacgugcccgagaagcagaccagaggcaucuucggcgccaucgccggcuucaucgagaacggcugggagggcaugauggacggcugguacggcuucagacaccagaacagcgagggcaccggccaggccgccgaccugaagagcacccaggccgccaucaaccagaucaacggcaagcugaacagacugaucgagaagaccaacgagaaguuccaccagaucgagaaggaguucagcgagguggagggcagaauccaggaccuggagaaguacguggaggacaccaagaucgaccuguggagcuacaacgccgagcugcugguggcccuggagaaccagcacaccaucgaccugaccgacagcgagaugaacaagcuguucgagagaaccaagaagcagcugagagagaacgccgaggacaugggcaacggcugcuucaagaucuaccacaagugcgacaacgccugcaucggcagcaucagaaacggcaccuacgaccacgacguguacagagacgaggcccugaacaacagauuccagaucaagggcguggagcugaagagcggcuacaaggacugggugcuguggaucagcuucgccaucagcugcuuccugcugugcaucgugcugcugggcuucaucaugugggccugccagaagggcaacaucagaugcaacaucugcaucuga

SEQ ID NO: 160678 - RNA, 1701 nt, Artificial Sequence; identical to SEQ ID NO: 160622
  derived and/or modified CDS sequence (opt4) from hemagglutinin__InfluenzaA__ABC67471

SEQ ID NO: 160679 - RNA, 1701 nt, Artificial Sequence
  derived and/or modified CDS sequence (opt4) from hemagglutinin__InfluenzaA__ABC67554
augaagaccaucaucgcccugagcuacauccugugccugguguucgcccagaagcugcccggcaacgacaacagcaccgccacccugugccugggccaccacgccgugcccaacggcaccaucgugaagaccaucaccaacgaccagaucgaggugaccaacgccaccgagcuggugcagagcagcagcaccggcggcaucugcgacagcccccaccagauccuggacggcgagaacugcacccugaucgacgcccugcugggcgacccccagugcgacggcuuccagaacaagaagugggaccuguucguggagagaagcaaggccuacagcaacugcuaccccuacgacgugcccgacuacgccagccugagaagccugaucgccagcagcggcacccuggaguucaacaacgagagcuucaacuggaccggcgugacccagaacggcaccagcagcgccugcaagagaagaagcaacagcagcuucuucagcagacugaacuggcugacccaccugaaguucaaguaccccgcccugaacgugaccaugcccaacaacgaggaguucgacaagcuguacaucuggggcgugcaccaccccggcaccgacaacgaccagaucagccuguacgcccaggccagcggcagaaucaccgugagcaccaagagaagccagcagaccgugauccccaacaucggcagcagacccagagugagagacauccccagcagaaucagcaucuacuggaccaucgugaagcccggcgacauccugcugaucaacagcaccggcaaccugaucgcccccagaggcuacuucaagaucagaagcggcaagagcagcaucaugagaagcgacgcccccaucgugaagugcaacagcgagugcaucacccccaacggcagcauccccaacgacaagcccuuccagaacgugaacagaaucaccuacggcgccugccccagauacgugaagcagaacacccugaagcuggccaccggcaugagaaacgugcccgagaagcagaccagaggcaucuucggcgccaucgccggcuucaucgagaacggcugggagggcaugguggacggcugguacggcuucagacaccagaacagcgagggcaucggccaggccgccgaccugaagagcacccaggccgccaucgaccagaucaacggcaagcugaacagacugaucggcaagaccaacgagaaguuccaccagaucgagaaggaguucagcgagguggagggcagaauccaggaccuggagaaguacguggaggacaccaagaucgaccuguggagcuacaacgccgagcugcugguggcccuggagaaccagcacaccaucgaccugaccgacagcgagaugaacaagcuguucgagagaaccaagaagcagcugagagagaacgccgaggacaugggcaacggcugcuucaagaucuaccacaagugcgacaacgccugcaucggcagcaucagaaacggcaccuacgaccacgacguguacagagacgaggcccugaacaacagauuccagaucaagggcguggagcugaagagcggcuacaaggacuggauccuguggaucagcuucgccaucagcugcuuccugcugugcguggcccugcugggcuucaucaugugggccugccagaagggcaacaucagaugcaacaucugcaucuga

SEQ ID NO: 160680 - RNA, 1701 nt, Artificial Sequence
  derived and/or modified CDS sequence (opt4) from hemagglutinin__InfluenzaA__ABC67565
augaagaccaucaucgcccugagcuacaucuucugccuggugcugggccaggacuuccccggcaacgacaacagcaccgccacccugugccugggccaccacgccgugcccaacggcacccuggugaagaccaucaccaacgaccagaucgaggugaccaacgccaccgagcuggugcagagcagcagcaccggcaagaucugcaacaacccccacagaauccuggacggcaucgacugcacccugaucgacgcccugcugggcgacccccacugcgacggcuuccagaacgagaccugggaccuguucguggagagaagcaaggccuucagcaacugcuaccccuacgacgugcccgacuacgccagccugagaagccugguggccagcagcggcacccuggaguucaucaacgagggcuucaccuggaccggcgugacccagaacggcggcagcaacgccugcaagagaggccccgacaucggcuucuucagcagacugaacuggcuguacaagagcggcagcaccuaccccgugcugaacgugaccaugcccaacaacgacaacuucgacaagcuguacaucuggggcgugcaccaccccagcaccgaccaggagcagaccagccuguacgugcaggccagcggcagagugaccgugagcaccaagagaagccagcagaccaucauccccaacaucggcagcagacccugggugagaggccugagcagcagaaucagcaucuacuggaccaucgugaagcccggcgacauccuggugaucaacagcaacggcaaccugaucgcccccagaggcuacuucaagaugagaaccggcaagagcagcaucaugagaagcgacgcccccaucggcaccugcaucagcgagugcaucacccccaacggcagcauccccaacgacaagcccuuccagaacgugaacaagaucaccuacggcgccugccccaaguacgugaagcagaacacccugaagcuggccaccggcaugagaaacgugcccgagaagcagaccagaggccuguucggcgccaucgccggcuucaucgagaacggcugggagggcaugaucgacggcugguacggcuucagacaccagaacagcgagggcaccggccaggccgccgaccugaagagcacccaggccgccaucgaccagaucaacggcaagcugaacagagugaucgagaagaccaacgagaaguuccaccagaucgagaaggaguucagcgagguggagggcagaauccaggaccuggagaaguacguggaggacaccaagaucgaccuguggagcuacaacgccgagcugcugguggcccuggagaaccagcacaccaucgaccugaccgacagcgagaugaacaagcuguucgagaagaccagaagacagcugagagagaacgccgaggacaugggcaacggcugcuucaagaucuaccacaagugcgacaacgccugcaucggcagcaucagaaacggcaccuacgaccacgacguguacagagacgaggcccugaacaacagauuccagaucaagggcguggagcugaagagcggcuacaaggacuggauccuguggaucagcuucgccaucagcugcuuccugcugugcguggugcugcugggcuucaucaugugggccugccagaagggcaacaucagaugcaacaucugcaucuga

SEQ ID NO: 160681 - RNA, 1701 nt, Artificial Sequence
  derived and/or modified CDS sequence (opt4) from hemagglutinin__InfluenzaA__ABC67576
augaagaccaucaucgcccugagcuacauccugugccugguguucgcccagaagcugcccggcaacgacaacagcauggccacccugugccugggccaccacgccgugcccaacggcacccuggugaagaccaucaccaacgaccagaucgaggugaccaacgccaccgagcuggugcagagcagcagcaccggcagaaucugcgacagcccccacagaauccuggacggcgagaacugcacccugaucgacgcccugcugggcgacccccacugcgacggcuuccagaacaaggagugggaccuguucguggagagaagcaaggccuacagcaacugcuaccccuacgacgugcccgacuacgccagccugagaagccugguggccagcagcggcacccuggaguucaacaacgagagcuucaacuggaccggcguggcccagaacggcaccagcuacgccugcaagagaagaagcaucaagagcuucuucagcagacugaacuggcugcaccagcugaaguacaaguaccccgcccugaacgugaccaugcccaacaacgacgaguucgacaagcuguacaucuggggcgugcaccaccccagcaccgacagcgaccagaccagccuguacgcccaggccagcggcagagugaccgugagcaccaagagaagccagcagaccgugauccccaacaucggcagcagacccugggugagaggcgugagcagcagaaucagcaucuacuggaccaucgugaagcccggcgacauccugcugaucaacagcaccggcaaccugaucgcccccagaggcuacuucaagaucagaagcggcaagagcagcaucaugagaagcgacgcccccaucggcaagugcaacagcgagugcaucacccccaacggcagcauccccaacgacaagcccuuccagaacgugaacagaaucaccuacggcgccugccccagauacgugaagcagaacacccugaagcuggccaccggcaugagaaacgugcccgagaagcagaccagaggcaucuucggcgccaucgccggcuucaucgagaacggcugggagggcaugguggacggcugguacggcuucagacaccagaacagcgagggcaccggccaggccgccgaccugaagagcacccaggccgccaucaaccagaucaacggcaagcugaacagacugaucgagaagaccaacgagaaguuccaccagaucgagaaggaguucagcgagguggagggcagaauccaggaccuggagaaguacguggaggacaccaagaucgaccuguggagcuacaacgccgagcugcugguggcccuggagaaccagcacaccaucgaccugaccgacagcgagaugaacaagcuguucgagagaaccagaaagcagcugagagagaacgccgaggacaugggcaacggcugcuucaagaucuaccacaagugcgacaacgccugcaucggcagcaucagaaacggcaccuacgaccacgacguguacagagacgaggcccugaacaacagauuccagaucaagggcguggagcugaagagcggcuacaaggacuggauccuguggaucagcuucgccaucagcugcuuccugcugugcguggugcugcugggcuucaucaugugggccugccagaagggcaacaucagaugcaacaucugcaucuga

SEQ ID NO: 160682 - RNA, 1701 nt, Artificial Sequence
  derived and/or modified CDS sequence (opt4) from hemagglutinin__InfluenzaA__ABC67587
augaagaccaucaucgcccugagcuacauccugugccugguguucgcccagaagcugcccggcaacgacaacagcaccgccacccugugccugggccaccacgccgugcccaacggcaccaucgugaagaccaucaccaacgaccagaucgaggugaccaacgccaccgagcuggugcagagcagcagcaccggcggcaucugcgacagcccccaccagauccuggacggcgagaacugcacccugaucgacgcccugcugggcgacccccagugcgacggcuuccagaacaagaagugggaccuguucguggagagaagcaaggccuacagcaacugcuaccccuacgacgugcccgacuacgccagccugagaagccugguggccagcagcggcacccuggaguucaacaacgagagcuucaacuggaccggcgugacccagaacggcaccagcagcgccugcaagagaagaagcaacaacagcuucuucagcagacugaacuggcugacccaccugaaguucaaguaccccgcccugaacgugaccaugcccaacaacgagaaguucgacaagcuguacaucuggggcgugcaccaccccggcaccgacaacgaccagaucagccuguacgcccaggccagcggcagaaucaccgugagcaccaagagaagccagcagaccgugauccccaacaucggcagcagacccagagugagagacauccccagcagaaucagcaucuacuggaccaucgugaagcccggcgacauccugcugaucaacagcaccggcaaccugaucgcccccagaggcuacuucaagaucagaagcggcaagagcagcaucaugagaagcgacgcccccaucggcaagugcaacagcgagugcaucacccccaacggcagcauccccaacgacaagcccuuccagaacgugaacagaaucaccuacggccccugccccagauacgugaagcagaacacccugaagcuggccaccggcaugagaaacgugcccgagaagcagaccagaggcaucuucggcgccaucgccggcuucaucgagaacggcugggagggcaugguggacggcugguacggcuucagacaccagaacagcgagggcaucggccaggccgccgaccugaagagcacccaggccgccaucaaccagaucaacggcaagcugaacagacugaucggcaagaccaacgagaaguuccaccagaucgagaaggaguucagcgagguggagggcagaauccaggaccuggagaaguacguggaggacaccaagaucgaccuguggagcuacaacgccgagcugcugguggcccuggagaaccagcacaccaucgaccugaccgacagcgagaugaacaagcuguucgagagaaccaagaagcagcugagagagaacgccgaggacaugggcaacggcugcuucaagaucuaccacaagugcgacaacgccugcaucggcagcaucagaaacggcaccuacgaccacgacguguacagagacgaggcccugaacaacagauuccagaucaagggcguggagcugaagagcggcuacaaggacuggauccuguggaucagcuucgccaucagcugcuuccugcugugcguggcccugcugggcuucaucaugugggccugccagaagggcaacaucagaugcaacaucugcaucuga

SEQ ID NO: 160683 - RNA, 1701 nt, Artificial Sequence; identical to SEQ ID NO: 160303
  derived and/or modified CDS sequence (opt4) from hemagglutinin__InfluenzaA__ABC67598

SEQ ID NO: 160684 - RNA, 1701 nt, Artificial Sequence; identical to SEQ ID NO: 160622
  derived and/or modified CDS sequence (opt4) from hemagglutinin__InfluenzaA__ABC67609

SEQ ID NO: 160685 - RNA, 1701 nt, Artificial Sequence; identical to SEQ ID NO: 160622
  derived and/or modified CDS sequence (opt4) from hemagglutinin__InfluenzaA__ABC67620

SEQ ID NO: 160686 - RNA, 1701 nt, Artificial Sequence; identical to SEQ ID NO: 160622
  derived and/or modified CDS sequence (opt4) from hemagglutinin__InfluenzaA__ABC67631

SEQ ID NO: 160687 - RNA, 1701 nt, Artificial Sequence; identical to SEQ ID NO: 160622
  derived and/or modified CDS sequence (opt4) from hemagglutinin__InfluenzaA__ABC67642

SEQ ID NO: 160688 - RNA, 1701 nt, Artificial Sequence
  derived and/or modified CDS sequence (opt4) from hemagglutinin__InfluenzaA__ABC67653
augaagaccaucaucgcccugagcuacauccugugccugguguucgcccagaagcugcccggcaacgacaacagcaccgccacccugugccugggccaccacgccgugcccaacggcacccuggugaagaccaucaccaacgaccagaucgaggugaccaacgccaccgagcuggugcagagcagcagcaccggcagaaucugcgacagcccccaccagauccuggacggcgagaacugcacccugaucgacgcccugcugggcgacccccacugcgacggcuuccagaacaaggagugggaccuguucguggagagaagcaaggccuacagcaacugcuaccccuacgacgugcccgacuacgugagccugagaagccugguggccagcagcggcacccuggaguucaacaacgagagcuucaacuggaccggcguggcccagaacggcaccagcagcgccugcaagagaagaagcgacaagagcuucuucagcagacugaacuggcugcaccagcugaaguacaaguaccccgcccugaacgugaccaugcccaacaacgagaaguucgacaagcuguacaucuggggcgugcaccaccccggcaccgacagcgaccagaucagccuguacgcccaggccagcggcagagugaccgugagcaccaagagaagccagcagaccgugauccccaacaucggcagcagacccugggugagaggcgugagcagcagaaucagcaucuacuggaccaucgugaagcccggcgacauccugcugaucaacagcaccggcaaccugaucgcccccagaggcuacuucaagaucagaagcggcaagagcagcaucaugagaagcgacgcccccaucggcaagugcaacagcgagugcaucacccccaacggcagcauccccaacgacaagcccuuccagaacgugaacagaaucaccuacggcgccugccccagauacgugaagcagaacacccugaagcuggccaccggcaugagaaacgugcccgagaagcagaccagaggcaucuucggcgccaucgccggcuucaucgagaacggcugggagggcaugauggacggcugguacggcuucagacaccagaacagcgagggcaccggccaggccgccgaccugaagagcacccaggccgccaucaaccagaucaacggcaagcugaacagacugaucgagaagaccaacgagaaguuccaccagaucgagaaggaguucagcgagguggagggcagaauccaggaccuggagaaguacguggaggacaccaagaucgaccuguggagcuacaacgccgagcugcugguggcccuggagaaccagcacaccaucgaccugaccgacagcgagaugaacaagcuguucgagagaaccaagaagcagcugagagagaacgccgaggacaugggcaacggcugcuucaagaucuaccacaagugcgacaacgccugcaucggcagcaucagaaacggcaccuacgaccacgacguguacagagacgaggcccugaacaacagauuccagaucaagggcguggagcugaagagcggcuacaaggacugggugcuguggaucagcuucgccaucagcugcuuccugcugugcguggugcugcugggcuucaucaugugggccugccagaagggcaacaucagaugcaacaucugcaucuga

SEQ ID NO: 160689 - RNA, 1701 nt, Artificial Sequence
  derived and/or modified CDS sequence (opt4) from hemagglutinin__InfluenzaA__ABC67697
augaagaccaucaucgcccugagcuacauccugugccugguguucgcccagaagcugcccggcaacgacaacagcaccgccacccugugccugggccaccacgccgugcccaacggcaccaucgugaagaccaucaccaacgaccagaucgaggugaccaacgccaccgagcuggugcagagcagcagcaccggcgagaucugcgacagcccccaccagauccuggacggcgagaacugcacccugaucgacgcccugcugggcgacccccagugcgacggcuuccagaacaaggagugggaccuguucguggagagaagcaaggccuacagcaacugcuaccccuacgacgugcccgacuacgccagccugagaagccugguggccagcagcggcacccuggaguucaacaacgagagcuucaacuggaccggcgugacccagaacggcaccagcagcgccugcaagagaagaagcaacaacagcuucuucagcagacugaacuggcugacccaccugaaguucaaguaccccgcccugaacgugaccaugcccaacaacgagaaguucgacaagcuguacaucuggggcgugcaccaccccggcaccgacaacgaccagaucuuccuguacgcccaggccagcggcagaaucaccgugagcaccaagagaagccagcagaccgugauccccaacaucggcagcagacccagagugagaaacauccccagcagaaucagcaucuacuggaccaucgugaagcccggcgacauccugcugaucaacagcaccggcaaccugaucgcccccagaggcuacuucaagaucagaagcggcaagagcagcaucaugagaagcgacgcccccaucggcaagugcaacagcgagugcaucacccccaacggcagcauccccaacgacaagcccuuccagaacgugaacagaaucaccuacggcgccugccccagauacgugaagcagaacacccugaagcuggccaccggcaugagaaacgugcccgagaagcagaccagaggcaucuucggcgccaucgccggcuucaucgagaacggcugggagggcaugguggacggcugguacggcuucagacaccagaacagcgagggcaucggccaggccgccgaccugaagagcacccaggccgccaucaaccagaucaacggcaagcugaacagacugaucggcaagaccaacgagaaguuccaccagaucgagaaggaguucagcgagguggagggcagaauccaggaccuggagaaguacguggaggacaccaagaucgaccuguggagcuacaacgccgagcugcugguggcccuggagaaccagcacaccaucgaccugaccgacagcgagaugaacaagcuguucgagagaaccaagaagcagcugagagagaacgccgaggacaugggcaacggcugcuucaagaucuaccacaagugcgacaacgccugcaucggcagcaucagaaacggcaccuacgaccacgacguguacagagacgaggcccugaacaacagauuccagaucaagggcguggagcugaagagcggcuacaaggacuggauccuguggaucagcuucgccaucagcugcuuccugcugugcguggcccugcugggcuucaucaugugggccugccagaagggcaacaucagaugcaacaucugcaucuga

SEQ ID NO: 160690 - RNA, 1701 nt, Artificial Sequence
  derived and/or modified CDS sequence (opt4) from hemagglutinin__InfluenzaA__ABC67708
augaagaccaucaucgcccugagcuacauccugugccugguguucgcccagaagcugcccggcaacgacaacagcaccgccacccugugccugggccaccacgccgugcccaacggcaccaucgugaagaccaucaccaacgaccagaucgaggugaccaacgccaccgagcuggugcagagcagcagcaccggcggcaucugcgacagcccccaccagauccuggacggcgagaacugcacccugaucgacgcccugcugggcgacccccagugcgacggcuuccagaacaagaagugggaccuguucguggagagaagcaaggccuacagcaacugcuaccccuacgacgugcccgacuacgccagccugagaagccugguggccagcagcggcacccuggaguucaacaacgagagcuucaacuggaccggcgugacccagaacggcaccagcagcgccugcaagagaagaagcaacaacagcuucuucagcagacugaacuggcugacccaccugaaguucaaguaccccgcccugaacgugaccaugcccaacaacgagaaguucgacaagcuguacaucuggggcgugcaccaccccggcaccgacaacgaccagaucuuccuguacgcccaggccagcggcagaaucaccgugagcaccaagagaagccagcagaccgugauccccaacaucggcagcagacccagagugagaaacauccccagcagaaucagcaucuacuggaccaucgugaagcccggcgacauccugcugaucaacagcaccggcaaccugaucgcccccagaggcuacuucaagaucagaagcggcaagagcagcaucaugagaagcgacgcccccaucggcaagugcaacagcgagugcaucacccccaacggcagcauccccaacgacaagcccuuccagaacgugaacagaaucaccuacggcgccugccccagauacgugaagcagaacacccugaagcuggccaccggcaugagaaacgugcccgagaagcagaccagaggcaucuucggcgccaucgccggcuucaucgagaacggcugggagggcaugguggacggcugguacggcuucagacaccagaacagcgagggcaucggccaggccgccgaccugaagagcacccaggccgccaucaaccagaucaacggcaagcugaacagacugaucggcaagaccaacgagaaguuccaccagaucgagaaggaguucagcgagguggagggcagaauccaggaccuggagaaguacguggaggacaccaagaucgaccuguggagcuacaacgccgagcugcugguggcccuggagaaccagcacaccaucgaccugaccgacagcgagaugaacaagcuguucgagagaaccaagaagcagcugagagagaacgccgaggacaugggcaacggcugcuucaagaucuaccacaagugcgacaacgccugcaucggcagcaucagaaacggcaccuacgaccacgacguguacagagacgaggcccugaacaacagauuccagaucaagggcguggagcugaagagcggcuacaaggacuggauccuguggaucagcuucgccaucagcugcuuccugcugugcguggcccugcugggcuucaucaugugggccugccagaagggcaacaucagaugcaacaucugcaucuga

SEQ ID NO: 160691 - RNA, 1701 nt, Artificial Sequence; identical to SEQ ID NO: 160690
  derived and/or modified CDS sequence (opt4) from hemagglutinin__InfluenzaA__ABC67719

SEQ ID NO: 160692 - RNA, 1701 nt, Artificial Sequence; identical to SEQ ID NO: 160690
  derived and/or modified CDS sequence (opt4) from hemagglutinin__InfluenzaA__ABC67733

SEQ ID NO: 160693 - RNA, 1701 nt, Artificial Sequence
  derived and/or modified CDS sequence (opt4) from hemagglutinin__InfluenzaA__ABC67806
augaagaccaucaucgcccugagcuacauccugugccugguguucgcccagaagcugcccggcaacgacaacagcaccgccacccugugccugggccaccacgccgugcccaacggcaccaucgugaagaccaucaccaacgaccagaucgaggugaccaacgccaccgagcuggugcagagcagcagcaccggcggcaucugcgacagcccccaccagauccuggacggcgagaacugcacccugaucgacgcccugcugggcgacccccagugcgacggcuuccagaacaagaagugggaccuguucguggagagaagcaaggccuacagcaacugcuaccccuacgacgugcccgacuacgccagccugagaagccugaucgccagcagcggcacccuggaguucaacaacgagagcuucaacuggaccggcgugacccagaacggcaccagcagcgccugcaagagaagaagcaacagcagcuucuucagcagacugaacuggcugacccaccugaaguucaaguaccccgcccugaacgugaccaugcccaacaacgaggaguucgacaagcuguacaucuggggcgugcaccaccccggcaccuacaacgaccagaucagccuguacgcccaggccagcggcagaaucaccgugagcaccaagagaagccagcagaccgugauccccaacaucggcagcagacccagagugagagacauccccagcagaaucagcaucuacuggaccaucgugaagcccggcgacauccugcugaucaacagcaccggcaaccugaucgcccccagaggcuacuucaagaucagaagcggcaagagcagcaucaugagaagcgacgcccccaucggcaagugcaacagcgagugcaucacccccaacggcagcauccccaacgacaagcccuuccagaacgugaacagaaucaccuacggcgccugccccagauacgugaagcagaacacccugaagcuggccaccggcaugagaaacgugcccgagaagcagaccagaggcaucuucggcgccaucgccggcuucaucgagaacggcugggagggcaugguggacggcugguacggcuucagacaccagaacagcgagggcaucggccaggccgccgaccugaagagcacccaggccgccaucgaccagaucaacggcaagcugaacagacugaucggcaagaccaacgagaaguuccaccagaucgagaaggaguucagcgagguggagggcagaauccaggaccuggagaaguacguggaggacaccaagaucgaccuguggagcuacaacgccgagcugcugguggcccuggagaaccagcacaccaucgaccugaccgacagcgagaugaacaagcuguucgagagaaccaagaagcagcugagagagaacgccgaggacaugggcaacggcugcuucaagaucuaccacaagugcgacaacgccugcaucggcagcaucagaaacggcaccuacgaccacgacguguacagagacgaggcccugaacaacagauuccagaucaagggcguggagcugaagagcggcuacaaggacuggauccuguggaucagcuucgccaucagcugcuuccugcugugcguggcccugcugggcuucaucaugugggccugccagaagggcaacaucagaugcaacaucugcaucuga

SEQ ID NO: 160694 - RNA, 1701 nt, Artificial Sequence; identical to SEQ ID NO: 160576
  derived and/or modified CDS sequence (opt4) from hemagglutinin__InfluenzaA__ABC67817

SEQ ID NO: 160695 - RNA, 1701 nt, Artificial Sequence; identical to SEQ ID NO: 160690
  derived and/or modified CDS sequence (opt4) from hemagglutinin__InfluenzaA__ABC67828

SEQ ID NO: 160696 - RNA, 1701 nt, Artificial Sequence; identical to SEQ ID NO: 160554
  derived and/or modified CDS sequence (opt4) from hemagglutinin__InfluenzaA__ABC67839

SEQ ID NO: 160697 - RNA, 1701 nt, Artificial Sequence
  derived and/or modified CDS sequence (opt4) from hemagglutinin__InfluenzaA__ABC67850
augaagaccaucaucgcccugagcuacauccugugccugguguucgcccagaagcugcccggcaacgacaacagcaccgccacccugugccugggccaccacgccgugcccaacggcacccuggugaagaccaucaccaacgaccagaucgaggugaccaacgccaccgagcuggugcagagcagcagcaccggcagaaucugcgacagcccccaccagauccuggacggcgagaacugcacccugaucgacgcccugcugggcgacccccacugcgacggcuuccagaacaaggagugggaccuguucguggagagaagcaaggccuacagcaacugcuaccccuacgacgugcccgacuacgugagccugagaagccugguggccagcagcggcacccuggaguucaacaacgagagcuucaacuggaccggcguggcccagaacggcaccagcagcgccugcaagagaagaagcgacaagagcuucuucagcagacugaacuggcugcaccagcugaaguacaaguaccccgcccugaacgugaccaugcccaacaacgagaaguucgacaagcuguacaucuggggcgugcaccaccccggcaccgacagcgaccagaucagccuguacgcccaggccagcggcagagugaccgugagcaccaagagaagccagcagaccgugauccccaacaucggcagcagacccugggccagaggcgugagcagcagaaucagcauccacuggaccaucgugaagcccggcgacauccugcugaucaacagcaccggcaaccugaucgcccccagaggcuacuucaagaucagaagcggcaagagcagcaucaugagaagcgacgcccccaucggcaagugcaacagcgagugcaucacccccaacggcagcauccccaacgacaagcccuuccagaacgugaacagaaucaccuacggcgccugccccagauacgugaagcagaacacccugaagcuggccaccggcaugagaaacgugcccgagaagcagaccagaggcaucuucggcgccaucgccggcuucaucgagaacggcugggagggcaugauggacggcugguacggcuucagacaccagaacagcgagggcaccggccaggccgccgaccugaagagcacccaggccgccaucaaccagaucaacggcaagcugaacagacugaucgagaagaccaacgagaaguuccaccagaucgagaaggaguucagcgagguggagggcagaauccaggaccuggagaaguacguggaggacaccaagaucgaccuguggagcuacaacgccgagcugcugguggcccuggagaaccagcacaccaucgaccugaccgacagcgagaugaacaagcuguucgagagaaccaagaagcagcugagagagaacgccgaggacaugggcaacggcugcuucaagaucuaccacaagugcgacaacgccugcaucggcagcaucagaaacggcaccuacgaccacgacguguacagagacgaggcccugaacaacagauuccagaucaagggcguggagcugaagagcggcuacaaggacugggugcuguggaucagcuucgccaucagcugcuuccugcugugcaucgugcugcugggcuucaucaugugggccugccagaagggcaacaucagaugcaacaucugcaucuga

SEQ ID NO: 160698 - RNA, 1701 nt, Artificial Sequence; identical to SEQ ID NO: 160554
  derived and/or modified CDS sequence (opt4) from hemagglutinin__InfluenzaA__ABC67861

SEQ ID NO: 160699 - RNA, 1701 nt, Artificial Sequence; identical to SEQ ID NO: 160622
  derived and/or modified CDS sequence (opt4) from hemagglutinin__InfluenzaA__ABC67883

SEQ ID NO: 160700 - RNA, 1701 nt, Artificial Sequence
  derived and/or modified CDS sequence (opt4) from hemagglutinin__InfluenzaA__ABC67894
augaagaccaucaucgcccugagcuacauccugugccugguguucgcccagaagcugcccggcaacgacaacagcaccgccacccugugccugggccaccacgccgugcccaacggcacccuggugaagaccaucaccaacgaccagaucgaggugaccaacgccaccgagcuggugcagagcagcagcaccggcagaaucugcgacagcccccaccagauccuggacggcgagaacugcacccugaucgacgcccugcugggcgacccccacugcgacggcuuccagaacaaggagugggaccuguucguggagagaagcaaggccuacagcaacugcuaccccuacgacgugcccgacuacgugagccugagaagccugguggccagcagcggcacccuggaguucaacaacgagagcuucaacuggaccggcguggcccagaacggcaccagcagcgccugcaagagaagaagcgacaagagcuucuucagcaagcugaacuggcugcaccagcugaaguacaaguaccccgcccugaacgugaccaugcccaacaacgagaaguucgacaagcuguacaucuggggcgugcaccaccccggcaccgacagcgaccagaucagccuguacgcccaggccagcggcagagugaccgugagcaccaagagaagccagcagaccgugauccccaacaucggcagcagacccugggugagaggcgugagcagcagaaucagcaucuacuggaccaucgugaagcccggcgacauccugcugaucaacagcaccggcaaccugaucgcccccagaggcuacuucaagaucagaagcggcaagagcagcaucaugagaagcgacgcccccaucggcaagugcaacagcgagugcaucacccccaacggcagcauccccaacgacaagcccuuccagaacgugaacagaaucaccuacggcgccugccccagauacgugaagcagaacacccugaagcuggccaccggcaugagaaacgugcccgagaagcagaccagaggcaucuucggcgccaucgccggcuucaucgagaacggcugggagggcaugauggacggcugguacggcuucagacaccagaacagcgagggcaccggccaggccgccgaccugaagagcacccaggccgccaucaaccagaucaacggcaagcugaacagacugaucgagaagaccaacgagaaguuccaccagaucgagaaggaguucagcgagguggagggcagaauccaggaccuggagaaguacguggaggacaccaagaucgaccuguggagcuacaacgccgagcugcugguggcccuggagaaccagcacaccaucgaccugaccgacagcgagaugaacaagcuguucgagagaaccaagaagcagcugagagagaacgccgaggacaugggcaacggcugcuucaagaucuaccacaagugcgacaacgccugcaucggcagcaucagaaacggcaccuacgaccacgacguguacagagacgaggcccugaacaacagauuccagaucaagggcguggagcugaagagcggcuacaaggacugggugcuguggaucagcuucgccaucagcugcuuccugcugugcaucgugcugcugggcuucaucaugugggccugccagaagggcaacaucagaugcaacaucugcaucuga

SEQ ID NO: 160701 - RNA, 1701 nt, Artificial Sequence; identical to SEQ ID NO: 160622
  derived and/or modified CDS sequence (opt4) from hemagglutinin__InfluenzaA__ABC67967

SEQ ID NO: 160702 - RNA, 1701 nt, Artificial Sequence; identical to SEQ ID NO: 160622
  derived and/or modified CDS sequence (opt4) from hemagglutinin__InfluenzaA__ABC67978

SEQ ID NO: 160703 - RNA, 1701 nt, Artificial Sequence
  derived and/or modified CDS sequence (opt4) from hemagglutinin__InfluenzaA__ABC67989
augaagaccaucaucgcccugagcuacauccugugccugguguucgcccagaagcugcccggcaacgacaacagcaccgccacccugugccugggccaccacgccgugcccaacggcacccuggugaagaccaucaccaacgaccagaucgaggugaccaacgccaccgagcuggugcagagcagcagcaccggcagaaucugcgacagcccccaccagauccuggacggcgagaacugcacccugaucgacgcccugcugggcgacccccacugcgacggcuuccagaacaaggagugggaccuguucguggagagaagcaaggccuacagcaacugcuaccccuacgacgugcccgacuacgugagccugagaagccugguggccagcagcggcacccuggaguucaacaacgagagcuucaacuggaccggcguggcccagaacggcaccagcagcgccugcaagagaagaagcgacaagagcuucuucagcagacugaacuggcugcaccagcugaaguacaaguaccccgcccugaaggugaccaugcccaacaacgagaaguucgacaagcuguacaucuggggcgugcaccaccccggcaccgacagcgaccagaucagccuguacgcccaggccagcggcagagugaccgugagcaccaagagaagccagcagaccgugauccccaacaucggcagcagacccugggugagaggcgugagcagcagaaucagcaucuacuggaccaucgugaagcccggcgacauccugcugaucaacagcaccggcaaccugaucgcccccagaggcuacuucaagaucagaagcggcaagagcagcaucaugagaagcgacgcccccaucggcaagugcaacagcgagugcaucacccccaacggcagcauccccaacgacaagcccuuccagaacgugaacagaaucaccuacggcgccugccccagauacgugaagcagaacacccugaagcuggccaccggcaugagaaacgugcccgagaagcagaccagaggcaucuucggcgccaucgccggcuucaucgagaacggcugggagggcaugauggacggcugguacggcuucagacaccagaacagcgagggcaccggccaggccgccgaccugaagagcacccaggccgccaucaaccagaucaacggcaagcugaacagacugaucgagaagaccaacgagaaguuccaccagaucgagaaggaguucagcgagguggagggcagaauccaggaccuggagaaguacguggaggacaccaagaucgaccuguggagcuacaacgccgagcugcugguggcccuggagaaccagcacaccaucgaccugaccgacagcgagaugaacaagcuguucgagagaaccaagaagcagcugagagagaacgccgaggacaugggcaacggcugcuucaagaucuaccacaagugcgacaacgugugcaucggcagcaucagaaacggcaccuacgaccacgacguguacagagacgaggcccugaacaacagauuccagaucaagggcguggagcugaagagcggcuacaaggacugggugcuguggaucagcuucgccaucagcugcuuccugcugugcaucgugcugcugggcuucaucaugugggccugccagaagggcaacaucagaugcaacaucugcaucuga

SEQ ID NO: 160704 - RNA, 1701 nt, Artificial Sequence; identical to SEQ ID NO: 160677
  derived and/or modified CDS sequence (opt4) from hemagglutinin__InfluenzaA__ABC68000

SEQ ID NO: 160705 - RNA, 1701 nt, Artificial Sequence
  derived and/or modified CDS sequence (opt4) from hemagglutinin__InfluenzaA__ABC68049
augaagaccaucaucgcccugagcuacauccugugccugguguucgcccagaagcugcccggcaacgacaacagcaccgccacccugugccugggccaccacgccgugcccaacggcacccuggugaagaccaucaccgacgaccagaucgaggugaccaacgccaccgagcuggugcagagcagcagcaccggcagaaucugcgacagcccccaccagauccuggacggcgagaacugcacccugaucgacgcccugcugggcgacccccacugcgacggcuuccagaacaaggagugggaccuguucguggagagaagcaaggccuacagcaacugcuaccccuacgacgugcccgacuacgugagccugagaagccugguggccagcagcggcacccuggaguucaacaacgagagcuucaacuggaccggcguggcccagaacggcaccagcagcgccugcaagagaagaagcgacaagagcuucuucagcagacugaacuggcugcaccagcugaaguacaaguaccccgcccugaacgugaccaugcccaacaacgagaaguucgacaagcuguacguguggggcgugcaccaccccggcaccgacagcgaccagaucagccuguacgcccaggccagcggcagagugaccgugagcaccaagagaagccagcagaccgugauccccaacaucggcagcagacccugggugagaggcgugagcagcaagaucagcaucuacuggaccaucgugaagcccggcgacauccugcugaucaacagcaccggcaaccugaucgcccccagaggcuacuucaagaucagaagcggcaagagcagcaucaugagaagcgacgcccccaucggcaagugcaacagcgagugcaucacccccaacggcagcauccccaacgacaagcccuuccagaacgugaacagaaucaccuacggcgccugccccagauacgugaagcagaacacccugaagcuggccaccggcaugagaaacgugcccgagaagcagaccagaggcaucuucggcgccaucgccggcuucaucgagaacggcugggagggcaugauggacggcugguacggcuucagacaccagaacagcgagggcaccggccaggccgccgaccugaagagcacccaggccgccaucaaccagaucaacggcaagcugaacagacugaucgagaagaccaacgagaaguuccaccagaucgagaaggaguucagcgagguggagggcagaauccaggaccuggagaaguacguggaggacaccaagaucgaccuguggagcuacaacgccgagcugcugguggcccuggagaaccagcacaccaucgaccugaccgacagcgagaugaacaagcuguucgagagaaccaagaagcagcugagagagaacgccgaggacaugggcaacggcugcuucaagaucuaccacaagugcgacaacgccugcaucggcagcaucagaaacggcaccuacgaccacgacguguacagagacgaggcccugaacaacagauuccagaucaagggcguggagcugaagagcggcuacaaggacugggugcuguggaucagcuucgccaucagcugcuuccugcugugcaucgugcugcugggcuucaucaugugggccugccagaagggcaacaucagaugcaacaucugcaucuga

SEQ ID NO: 160706 - RNA, 1701 nt, Artificial Sequence; identical to SEQ ID NO: 160622
  derived and/or modified CDS sequence (opt4) from hemagglutinin__InfluenzaA__ABC68060

SEQ ID NO: 160707 - RNA, 1701 nt, Artificial Sequence
  derived and/or modified CDS sequence (opt4) from hemagglutinin__InfluenzaA__ABC68071
augaagaccaucaucgcccugagcuacauccugugccugguguucgcccagaagcugcccggcaacgacaacagcaccgccacccugugccugggccaccacgccgugcccaacggcacccuggugaagaccaucaccaacgaccagaucgaggugaccaacgccaccgagcuggugcagagcagcagcaccggcagaaucugcgacagcccccaccagauccuggacggcgagaacugcacccugaucgacgcccugcugggcgacccccacugcgacggcuuccagaacaaggagugggaccuguucguggagagaagcaaggccuacagcaacugcuaccccuacgacgugcccgacuacgugagccugagaagccugguggccagcagcggcacccuggaguucaacaacgagagcuucaacuggaccggcguggcccagaacggcaccagcagcgccugcaagagaagaagcgacaagagcuucuucagcagacugaacuggcugcaccagcugaaguacaaguaccccgcccugaacgugaccaugcccaacaacgagaaguucgacaagcuguacaucuggggcgugcaccaccccggcaccgacagcgaccagaucagccuguacgcccaggccagcggcagagugaccgugagcaccaagagaagccagcagaccgugauccccaacaucggcagcagacccugggugagaggcgugagcagcagaaucagcaucuacuggaccaucgugaagcccggcgacauccugcugaucaacagcaccggcaaccugaucgcccccagaggcuacuucaagaucagaagcggcaagagcagcaucaugagaagcgacgcccccaucggcaagugcaacagcgagugcaucacccccaacggcagcauccccaacgacaagcccuuccagaacgugaacagaaucaccuacggcgccugccccagauacgugaagcagaacacccugaagcuggccaccggcaugagaaacgugcccgagaagcagaccagaggcaucuucggcgccaucgccggcuucaucgagaacggcugggagggcaugauggacggcugguacggcuucagacaccagaacagcgagggcaccggccaggccgccgaccugaagagcacccaggccgccaucaaccagaucaacggcaagcugaacagacugaucgagaagaccaacgagaaguuccaccagaucgagaaggaguucagcgagguggagggcagaauccaggaccuggagaaguacguggaggacaccaagaucgaccuguggagcuacaacgccgagcugcugguggcccuggagaaccagcacaccaucgaccugaccgacagcgagaugaacaagcuguucgagagaaccaagaagcagcugagagagaacgccgaggacaugggcaacggcugcuucaagaucuaccacaagugcgacaacgccugcaucggcagcaucagaaacggcaccuacgaccacaacguguacagagacgaggcccugaacaacagauuccagaucaagggcguggagcugaagagcggcuacaaggacugggugcuguggaucagcuucgccaucagcugcuuccugcugugcaucgugcugcugggcuucaucaugugggccugccagaagggcaacaucagaugcaacaucugcaucuga

SEQ ID NO: 160708 - RNA, 1701 nt, Artificial Sequence; identical to SEQ ID NO: 160690
  derived and/or modified CDS sequence (opt4) from hemagglutinin__InfluenzaA__ABC68082

SEQ ID NO: 160709 - RNA, 1701 nt, Artificial Sequence
  derived and/or modified CDS sequence (opt4) from hemagglutinin__InfluenzaA__ABC68093
augaagaccaucaucgcccugagcuacauccugugccugguguucgcccagaagcugcccggcaacgacaacagcaccgccacccugugccugggccaccacgccgugcccaacggcacccuggugaagaccaucaccaacgaccagaucgaggugaccaacgccaccgagcuggugcagagcagcagcaccagcagaaucugcgacagcccccaccagauccuggacggcgagaacugcacccugaucgacgcccugcugggcgacccccacugcgacggcuuccagaacaaggagugggaccuguucguggagagaagcaaggccuacagcaacugcuaccccuacgacgugcccgacuacgugagccugagaagccugguggccagcagcggcacccuggaguucaacaacgagagcuucaacuggaccggcguggcccagaacggcaccagcagcgccugcaagagaagaagcgacaagagcuucuucagcagacugaacuggcugcaccagcugaaguacaaguaccccgcccugaacgugaccaugcccaacaacgagaaguucgacaagcuguacaucuggggcgugcaccaccccggcaccgacagcgaccagaucagccuguacgcccaggccagcggcagagugaccgugagcaccaagagaagccagcagaccgugauccccaacaucggcagcagacccugggugagaggcgugagcagcaucaucagcaucuacuggaccaucgugaagcccggcgacauccugcugaucaacagcaccggcaaccugaucgcccccagaggcuacuucaagaucagaagcggcaagagcagcaucaugagaagcgacgcccccaucggcaagugcaacagcgagugcaucacccccaacggcagcauccccaacggcaagcccuuccagaacgugaacagaaucaccuacggcgccugccccagauacgugaagcagaacacccugaagcuggccaccggcaugagaaacgugcccgagaagcagaccagaggcaucuucggcgccaucgccggcuucaucgagaacggcugggagggcaugauggacggcugguacggcuucagacaccagaacagcgagggcaccggccaggccgccgaccugaagagcacccaggccgccaucaaccagaucaacggcaagcugaacagacugaucgagaagaccaacgagaaguuccaccagaucgagaaggaguucagcgagguggagggcagaauccaggaccuggagaaguacguggaggacaccaagaucgaccuguggagcuacaacgccgagcugcugguggcccuggagaaccagcacaccaucgaccugaccgacagcgagaugaacaagcuguucgagagaaccaagaagcagcugagagagaacgccgaggacaugggcaacggcugcuucaagaucuaccacaagugcgacaacgccugcaucggcagcaucagaaacggcaccuacgaccacgacguguacagagacgaggcccugaacaacagauuccagaucaagggcguggagcugaagagcggcuacaaggacuggauccuguggaucagcuucgccaccagcugcuuccugcugugcaucgugcugcugggcuucaucaugugggccugccagaagggcaacaucagaugcaacaucugcaucuga

SEQ ID NO: 160710 - RNA, 1701 nt, Artificial Sequence
  derived and/or modified CDS sequence (opt4) from hemagglutinin__InfluenzaA__ABC68222
augaagaccaucaucgcccugagcuacauccugugccugguguucgcccagaagcugcccggcaacgacaacagcaccgccacccugugccugggccaccacgccgugcccaacggcacccuggugaagaccaucaccaacgaccagaucgaggugaccaacgccaccgagcuggugcagagcagcagcaccggcggcaucugcgacagcccccaccagauccuggacggcgagaacugcacccugaucgacgcccugcugggcgacccccacugcgacggcuuccagaacaaggagugggaccuguucguggagagaagcaaggccuacagcaacugcuaccccuacgacgugcccgacuacgccagccugagaagccugguggccagcagcggcacccuggaguucaacaacgagagcuucaacuggaccggcguggcccagaacggcaccagcagcgccugcaagagaagaagcaacaagagcuucuucagcagacugaacuggcugcaccagcugaaguacaaguaccccgcccugaacgugaccaugcccaacaacgagaaguucgacaagcuguacaucuggggcgugcaccaccccagcaccgacagcgaccagaucagccuguacgcccaggcccccggcagagugaccgugagcaccaagagaagccagcagaccgugauccccaacaucggcagcagacccugggugagaggcgugagcagcagaaucagcaucuacuggaccaucgugaagcccggcgacauccugcugaucaacugcaccggcaaccugaucgcccccagaggcuacuucaagaucagaagcggcaagagcagcaucaugagaagcgacgccagcaucggcaagugcaacagcgagugcaucacccccaacggcagcauccccaacgacaagcccuuccagaacgugaacagaaucaccuacggcgccugccccagauacgugaagcagaacacccugaagcuggccaccggcaugagaaacgugcccgagaagcagaccagaggcaucuucggcgccaucgccggcuucaucgagaacggcugggagggcaugguggacggcugguacggcuucagacaccagaacagcgagggcaccggccaggccgccgaccugaagagcacccaggccgccaucaaccagaucaacggcaagcugaacagacugaucgagaagaccaacgagaaguuccaccagaucgagaaggaguucagcgagguggagggcagaauccaggaccuggagaaguacguggaggacaccaagaucgaccuguggagcuacaacgccgagcugcugguggcccuggagaaccagcacaccaucgaccugaccgacagcgagaugaacaagcuguucgagagaaccaagaagcagcugagagagaacgccgaggacaugggcaacggcugcuucaagaucuaccacaagugcgacaacgccugcaucggcagcaucagaaacggcaccuacgaccacgacguguacagagacgaggcccugaacaacagauuccagaucaagggcguggagcugaagagcggcuacaaggacuggauccuguggaucagcuucgccaucagcugcuuccugcugugcguggugcugcugggcuucaucaugugggccugccagaagggcaacaucagaugcaacaucugcaucuga

SEQ ID NO: 160711 - RNA, 1701 nt, Artificial Sequence; identical to SEQ ID NO: 160502
  derived and/or modified CDS sequence (opt4) from hemagglutinin__InfluenzaA__ABC68233

SEQ ID NO: 160712 - RNA, 1707 nt, Artificial Sequence
  derived and/or modified CDS sequence (opt4) from hemagglutinin__InfluenzaA__ABC72655
auggagaagaucgugcugcuguucgccaucgugagccuggugaagagcgaccagaucugcaucggcuaccacgccaacaacagcaccgagcagguggacaccaucauggagaagaacgugaccgugacccacgcccaggacauccuggagaagacccacaacggcaagcugugcgaccuggacggcgugaagccccugauccugagagacugcagcguggccggcuggcugcugggcaaccccaugugcgacgaguucaucaacgugcccgaguggagcuacaucguggagaagcccaaccccgccaacgaccugugcuaccccggcgacuucaacgacuacgaggagcugaagcaccugcugagcagaaucaaccacuucgagaagauccagaucauccccaagagcagcuggagcagccacgaggccagcgugggcgugagcagcgugugccccuaccagggcaagagcagcuucuucagaaacgugguguggcugaucaagaagaacagcaccuaccccaccaucaagagaagcuacaacaacaccaaccaggaggaccugcuggugcuguggggcauccaccaccccaacgacgccgccgagcagaccaagcuguaccagaaccccaccaccuacaucagcgugggcaccagcacccugaaccagagacuggugcccagaaucgccaccagaagcaaggugaacggccagagcggcagaauggaguucuucuggaccauccugaagcccaacgacgccaucaacuucgagagcaacggcaacuucaucgcccccgaguacgccuacaagaucgugaagaagggcgacagcaccaucaugaagagcgagcuggaguacggcaacugcaacaccaagugccagacccccaugggcgccaucaacagcagcaugcccuuccacaacauccacccccugaccaucggcgagugccccaaguacgugaagagcaacagacuggugcuggccaccggccugagaaacagcccccagagagagaagagaagaaagaagagaggccuguucggcgccaucgccggcuucaucgagggcggcuggcagggcaugguggacggcugguacggcuaccaccacagcaacgagcagggcagcggcuacgccgccgacaaggagagcacccagaaggccaucgacggcgugaccaacaaggugaacagcaucaucgacaagaugaacacccaguucgaggccgugggcagagaguucaacaaccuggagagaagaaucgagaaccugaacaagaagauggaggacggcuuccuggacguguggaccuacaacgccgagcugcuggugcugauggagaacgagagaacccuggacuuccacgacagcaacgugaagaaccuguacgacaaggugagacugcagcugagagacaacgccaaggagcugggcaacggcugcuucgaguucuaccacaagugcgacaacgagugcauggagagcgugagaaacggcaccuacgacuacccccaguacagcgaggaggccagacugaagagagaggagaucagcggcgugaagcuggagagcaucggcaucuaccagauccugagcaucuacagcaccguggccagcagccuggcccuggccaucaugguggccggccugagccuguggaugugcagcaacggcagccugcagugcagaaucugcaucuga

SEQ ID NO: 160713 - RNA, 1701 nt, Artificial Sequence; identical to SEQ ID NO: 160303
  derived and/or modified CDS sequence (opt4) from hemagglutinin__InfluenzaA__ABC84400

SEQ ID NO: 160714 - RNA, 1701 nt, Artificial Sequence; identical to SEQ ID NO: 160512
  derived and/or modified CDS sequence (opt4) from hemagglutinin__InfluenzaA__ABC84411

SEQ ID NO: 160715 - RNA, 1701 nt, Artificial Sequence
  derived and/or modified CDS sequence (opt4) from hemagglutinin__InfluenzaA__ABC84433
augaagaccaucaucgcccugagcuacauccugugccugguguucgcccagaagcugcccggcaacgacaacagaaccgccacccugugccugggccaccacgccgugcccaacggcaccaucgugaagaccaucaccaacgaccagaucgaggugaccaacgccaccgagcuggugcagagcagcagcaccggcggcaucugcgacagcccccaccagauccuggacggcgagaacugcacccugaucgacgcccugcugggcgacccccagugcgacggcuuccagaacaagaagugggaccuguucguggagagaagcaaggccuacagcaacugcuaccccuacgacgugcccgacuacgccagccugagaagccugguggccagcagcggcacccuggaguucaacaacgagagcuucaacuggaccggcgugacccagaacggcaccagcagcgccugcaagagaagaagcaacaacagcuucuucagcagacugaacuggcugacccaccugaaguucaaguaccccgcccugaacgugaccaugcccaacaacgagaaguucgacaagcuguacaucuggggcgugcaccaccccggcaccaacaacgaccagaucagccuguacgcccaggccagcggcagaaucaccgugagcaccaagagaagccagcagaccgugauccccaacaucggcagcagacccagagugagagacauccccagcagaaucagcaucuacuggaccaucgugaagcccggcgacauccugcugaucaacagcaccggcaaccugaucgcccccagaggcuacuucaagaucagaagcggcaagagcagcaucaugagaagcgacgcccccaucggcaagugcaacagcgagugcaucacccccaacggcagcauccccaacgacaagcccuuccagaacgugaacagaaucaccuacggcgccugccccagauacgugaagcagaacacccugaagcuggccaccggcaugagaaacgugcccgagaagcagaccagaggcaucuucggcgccaucgccggcuucaucgagaacggcugggagggcaugguggacggcugguacggcuucagacaccagaacagcgagggcaucggccaggccgccgaccugaagagcacccaggccgccaucaaccagaucaacggcaagcugaacagacugaucggcaagaccaacgagaaguuccaccagaucgagaaggaguucagcgagguggagggcagaauccaggaccuggagaaguacguggaggacaccaagaucgaccuguggagcuacaacgccgagcugcugguggcccuggagaaccagcacaccaucgaccugaccgacagcgagaugaacaagcuguucgagagaaccaagaagcagcugagagagaacgccgaggacaugggcaacggcugcuucaagaucuaccacaagugcgacaacgccugcaucggcagcaucagaaacggcaccuacgaccacgacguguacagagacgaggcccugaacaacagauuccagaucaagggcguggagcugaagagcggcuacaaggacuggauccuguggaucagcuucgccaucagcugcuuccugcugugcguggcccugcugggcuucaucaugugggccugccagaagggcaacaucagaugcaacaucugcaucuga

SEQ ID NO: 160716 - RNA, 1701 nt, Artificial Sequence; identical to SEQ ID NO: 160622
  derived and/or modified CDS sequence (opt4) from hemagglutinin__InfluenzaA__ABC84444

SEQ ID NO: 160717 - RNA, 1701 nt, Artificial Sequence; identical to SEQ ID NO: 160693
  derived and/or modified CDS sequence (opt4) from hemagglutinin__InfluenzaA__ABC84498

SEQ ID NO: 160718 - RNA, 1701 nt, Artificial Sequence; identical to SEQ ID NO: 160693
  derived and/or modified CDS sequence (opt4) from hemagglutinin__InfluenzaA__ABC84509

SEQ ID NO: 160719 - RNA, 1701 nt, Artificial Sequence
  derived and/or modified CDS sequence (opt4) from hemagglutinin__InfluenzaA__ABC84520
augaagaccaucaucgcccugagcuacauccugugccugguguucgcccagaagcugcccggcaacgacaacagcaccgccacccugugccugggccaccacgccgugcccaacggcaccaucgugaagaccaucaccaacgaccagaucgaggugaccaacgccaccgagcuggugcagagcagcagcaccggcggcaucugcgacagcccccaccagauccuggacggcgagaacugcacccugaucgacgcccugcugggcgacccccagugcgacggcuuccagaacaagaagugggaccuguucguggagagaagcaaggccuacagcaacugcuaccccuacgacgugcccgacuacgccagccugagaagccugguggccagcagcggcacccuggaguucaacaacgagagcuucaacuggaccggcgugacccagaacggcaccagcagcgccugcaagagaagaagcaacaacagcuucuucagcagacugaacuggcugacccaccugaaguucaaguaccccgcccugaacgugaccaugcccaacaacgagaaguucgacaagcuguacaucuggggcgugcaccaccccggcaccgacaacgaccagaucuuccuguacgcccaggccagcggcagaaucaccgugagcaccaagagaagccagcagaccgugauccccaacaucggcagcagacccagagugagagacauccccagcagaaucagcaucuacuggaccaucgugaagcccggcgacauccugcugaucaacagcaccggcaaccugaucgcccccagaggcuacuucaagaucagaagcggcaagagcagcaucaugagaagcgacgcccccaucggcaagugcaacagcgagugcaucacccccaacggcagcauccccaacgacaagcccuuccagaacgugaacagaaucaccuacggcgccugccccagauacgugaagcagaacacccugaagcuggccaccggcaugagaaacgugcccgagaagcagaccagaggcaucuucggcgccaucgccggcuucaucgagaacggcugggagggcaugguggacggcugguacggcuucagacaccagaacagcgagggcaucggccaggccgccgaccugaagagcacccaggccgccaucaaccagaucaacggcaagcugaacagacugaucggcaagaccaacgagaaguuccaccagaucgagaaggaguucagcgagguggagggcagaauccaggaccuggagaaguacguggaggacaccaagaucgaccuguggagcuacaacgccgagcugcugguggcccuggagaaccagcacaccaucgaccugaccgacagcgagaugaacaagcuguucgagagaaccaagaagcagcugagagagaacgccgaggacaugggcaacggcugcuucaagaucuaccacaagugcgacaacgccugcaucggcagcaucagaaacggcaccuacgaccacgacguguacagagacgaggcccugaacaacagauuccagaucaagggcguggagcugaagagcggcuacaaggacuggauccuguggaucagcuucgccaucagcugcuuccugcugugcguggcccugcugggcuucaucaugugggccugccagaagggcaacaucagaugcaacaucugcaucuga

SEQ ID NO: 160720 - RNA, 1701 nt, Artificial Sequence
  derived and/or modified CDS sequence (opt4) from hemagglutinin__InfluenzaA__ABC84531
augaagaccaucaucgcccugagcuacaucuucugccugguguucgcccagaagcugcccggcaacgacaacagcaccgccacccugugccugggccaccacgccgugcccaacggcacccuggugaagaccaucaccaacgaccagaucgaggugaccaacgccaccgagcuggugcagagcagcagcaccggcagaaucugcgacagcccccacagaauccuggacggcaagaacugcacccugaucgacgcccugcugggcgacccccacugcgacggcuuccagaacgagaagugggaccuguucguggagagaagcaaggccuucagcaacugcuaccccuacgacgugcccgacuacgccagccugagaagccugguggccagcagcggcacccuggaguucaucaacgagggcuucaacuggaccggcgugacccagagcggcggcagcuacgccugcaagagaggcagcgugaacagcuucuucagcagacugaacuggcuguacgagagcgagagcaaguaccccgcccugaacgugaccaugcccaacaacggcagauucgacaagcuguacaucuggggcgugcaccaccccagcaccgacaaggagcagaccaaccuguacgugagagccgccggcagagugaccgugagcaccaagagaagccagcagaccgugauccccaacaucggcagcagacccugggugagaggccugagcagcagaaucagcaucuacuggaccaucgugaagcccggcgacauccugcugaucaacagcaccggcaaccugaucgcccccagaggcuacuucaagaucagaaccggcaagagcagcaucaugagaagcgacgcccccaucggcaccugcagcagcgagugcaucacccccaacggcagcauccccaacgacaagcccuuccagaacgugaacaagaucaccuacggcgccugccccagauacgugaagcagaacacccugaagcuggccaccggcaugagaaacgugcccgagaagcagaccagaggcaucuucggcgccaucgccggcuucaucgagaacggcugggagggcaugguggacggcugguacggcuucagacaccagaacagcgagggcaccggccaggccgccgaccugaagagcacccaggccgccaucgaccagaucaacggcaagcugaacagacugaucgagaagaccaacgagaaguuccaccagaucgagaaggaguucagcgagguggagggcagaauccaggaccuggagaaguacguggaggacaccaagaucgaccuguggagcuacaacgccgagcugcugguggcccuggagaaccagcacaccaucgaccugaccgacagcgagaugaacaagcuguucgagaagaccagaaagcagcugagagagaacgccgaggacaugggcaacggcugcuucaagaucuaccacaagugcgacaacgccugcaucggcagcaucagaaacggcaccuacgaccacgacguguacagagacgaggcccugaacaacagauuccagaucaagggcguggagcugaagagcggcuacaaggacuggauccuguggaucagcuucgccaucagcugcuuccugcugugcguggugcugcugggcuucaucaugugggccugccagaagggcaacaucagaugcaacaucugcaucuga

SEQ ID NO: 160721 - RNA, 1701 nt, Artificial Sequence; identical to SEQ ID NO: 160710
  derived and/or modified CDS sequence (opt4) from hemagglutinin__InfluenzaA__ABC84560

SEQ ID NO: 160722 - RNA, 1701 nt, Artificial Sequence
  derived and/or modified CDS sequence (opt4) from hemagglutinin__InfluenzaA__ABC84571
augaagaccaucaucgcccugagcuacauccugugccugguguucgcccagaagcugcccggcaacgacaacagcaccgccacccugugccugggccaccacgccgugcccaacggcacccuggugaagaccaucaccaacgaccagaucgaggugaccaacgccaccgagcuggugcagagcagcagcaccggcggcaucugcgacagcccccaccagaucaucgacggcgagaacugcacccugaucgacgcccugcugggcgacccccacugcgacggcuuccagaacaaggagugggaccuguucguggagagaagcaaggccuacagcaacugcuaccccuacgacgugcccgacuacgccagccugagaagccugguggccagcagcggcacccuggaguucaacaacgagagcuucaacuggaccggcguggcccagaacggcaccagcagcgccugcaagagaagaagcaacaagagcuucuucagcagacugaacuggcugcaccagcugaaguacaaguaccccgcccugaacgugaccaugcccaacaacgagaaguucgacaagcuguacaucuggggcgugcaccaccccagcaccgacagcgaccagaucagccuguacgcccaggcccccggcagagugaccgugagcaccaagagaagccagcagaccgugauccccaacaucggcagcagacccugggugagaggcgugagcagcagaaucagcaucuacuggaccaucgugaagcccggcgacauccugcugaucaacugcaccggcaaccugaucgcccccagaggcuacuucaagaucagaagcggcaagagcagcaucaugagaagcgacgccagcaucggcaagugcaacagcgagugcaucacccccaacggcagcauccccaacgacaagcccuuccagaacgugaacagaaucaccuacggcgccugccccagauacgugaagcagaacacccugaagcuggccaccggcaugagaaacgugcccgagaagcagaccagaggcaucuucggcgccaucgccggcuucaucgagaacggcugggagggcaugguggacggcugguacggcuucagacaccagaacagcgagggcaccggccaggccgccgaccugaagagcacccaggccgccaucaaccagaucaacggcaagcugaacagacugaucgagaagaccaacgagaaguuccaccagaucgagaaggaguucagcgagguggagggcagaauccaggaccuggagaaguacguggaggacaccaagaucgaccuguggagcuacaacgccgagcugcugguggcccuggagaaccagcacaccaucgaccugaccgacagcgagaugaacaagcuguucgagagaaccaagaagcagcugagagagaacgccgaggacaugggcaacggcugcuucaagaucuaccacaagugcgacaacgccugcaucggcagcaucagaaacggcaccuacgaccacgacguguacagagacgaggcccugaacaacagauuccagaucaagggcguggagcugaagagcggcuacaaggacuggauccuguggaucagcuucgccaucagcugcuuccugcugugcguggugcugcugggcuucaucaugugggccugccagaagggcaacaucagaugcaacaucugcaucuga

SEQ ID NO: 160723 - RNA, 1701 nt, Artificial Sequence; identical to SEQ ID NO: 160710
  derived and/or modified CDS sequence (opt4) from hemagglutinin__InfluenzaA__ABC85754

SEQ ID NO: 160724 - RNA, 1701 nt, Artificial Sequence; identical to SEQ ID NO: 160690
  derived and/or modified CDS sequence (opt4) from hemagglutinin__InfluenzaA__ABC85765

SEQ ID NO: 160725 - RNA, 1701 nt, Artificial Sequence
  derived and/or modified CDS sequence (opt4) from hemagglutinin__InfluenzaA__ABC85776
augaagaccaucaucgcccugagcuacauccugugccugguguucgcccagaagcugcccggcaacgacaacagcaccgccacccugugccugggccaccacgccgugcccaacggcacccuggugaagaccaucaccaacgaccagaucgaggugaccaacgccaccgagcuggugcagagcagcagcaccggcggcaucugcgacagcccccaccagauccuggacggcgagaacugcacccugaucgacgcccugcugggcgacccccacugcgacggcuuccagaacaaggagugggaccuguucguggagagaagcaaggccuacagcaacugcuaccccuacgacgugcccgacuacgccagccugagaagccugguggccagcagcggcacccuggaguucaacaacgagagcuucaacuggaccggcguggcccagaacggcaccagcagcgccugcaagagaagaagcaacaagagcuucuucagcagacugaacuggcugcaccagcugaaguacaaguaccccgcccugaacgugaccaugcccaacaacgagaaguucgacaagcuguacaucuggggcgugcaccaccccagcaccgacagcgaccagaucagccuguacgcccaggcccccggcagagugaccgugagcaccaagagaagccagcagaccgugauccccaacaucggcagcagacccugggugagaggcgugagcagcagaaucagcaucuacuggaccaucgugaagcccggcgacauccugcugaucaacuucaccggcaaccugaucgcccccagaggcuacuucaagaucagaagcggcaagagcagcaucaugagaagcgacgccagcaucggcaagugcaacagcgagugcaucacccccaacggcagcauccccaacgacaagcccuuccagaacgugaacagaaucaccuacggcgccugccccagauacgugaagcagaacacccugaagcuggccaccggcaugagaaacgugcccgagaagcagaccagaggcaucuucggcgccaucgccggcuucaucgagaacggcugggagggcaugguggacggcugguacggcuucagacaccagaacagcgagggcaccggccaggccgccgaccugaagagcacccaggccgccaucaaccagaucaacggcaagcugaacagacugaucgagaagaccaacgagaaguuccaccagaucgagaaggaguucagcgagguggagggcagaauccaggaccuggagaaguacguggaggacaccaagaucgaccuguggagcuacaacgccgagcugcugguggcccuggagaaccagcacaccaucgaccugaccgacagcgagaugaacaagcuguucgagagaaccaagaagcagcugagagagaacgccgaggacaugggcaacggcugcuucaagaucuaccacaagugcgacaacgccugcaucggcagcaucagaaacggcaccuacgaccacgacguguacagagacgaggcccugaacaacagauuccagaucaagggcguggagcugaagagcggcuacaaggacuggauccuguggaucagcuucgccaucagcugcuuccugcugugcguggugcugcugggcuucaucaugugggccugccagaagggcaacaucagaugcaacaucugcaucuga

SEQ ID NO: 160726 - RNA, 1701 nt, Artificial Sequence; identical to SEQ ID NO: 160710
  derived and/or modified CDS sequence (opt4) from hemagglutinin__InfluenzaA__ABC85787

SEQ ID NO: 160727 - RNA, 1701 nt, Artificial Sequence; identical to SEQ ID NO: 160693
  derived and/or modified CDS sequence (opt4) from hemagglutinin__InfluenzaA__ABC85798

SEQ ID NO: 160728 - RNA, 1701 nt, Artificial Sequence; identical to SEQ ID NO: 160690
  derived and/or modified CDS sequence (opt4) from hemagglutinin__InfluenzaA__ABC85820

SEQ ID NO: 160729 - RNA, 1701 nt, Artificial Sequence; identical to SEQ ID NO: 160690
  derived and/or modified CDS sequence (opt4) from hemagglutinin__InfluenzaA__ABC85831

SEQ ID NO: 160730 - RNA, 1701 nt, Artificial Sequence; identical to SEQ ID NO: 160693
  derived and/or modified CDS sequence (opt4) from hemagglutinin__InfluenzaA__ABC85842

SEQ ID NO: 160731 - RNA, 1701 nt, Artificial Sequence; identical to SEQ ID NO: 160690
  derived and/or modified CDS sequence (opt4) from hemagglutinin__InfluenzaA__ABC85853

SEQ ID NO: 160732 - RNA, 1701 nt, Artificial Sequence; identical to SEQ ID NO: 160690
  derived and/or modified CDS sequence (opt4) from hemagglutinin__InfluenzaA__ABC85864

SEQ ID NO: 160733 - RNA, 1701 nt, Artificial Sequence; identical to SEQ ID NO: 160693
  derived and/or modified CDS sequence (opt4) from hemagglutinin__InfluenzaA__ABC85886

SEQ ID NO: 160734 - RNA, 1701 nt, Artificial Sequence; identical to SEQ ID NO: 160622
  derived and/or modified CDS sequence (opt4) from hemagglutinin__InfluenzaA__ABC85908

SEQ ID NO: 160735 - RNA, 1701 nt, Artificial Sequence
  derived and/or modified CDS sequence (opt4) from hemagglutinin__InfluenzaA__ABC85919
augaagaccaucaucgcccugagcuacauccugugccugguguucgcccagaagcugcccggcaacgacaacagcaccgccacccugugccugggccaccacgccgugcccaacggcacccuggugaagaccaucaccaacgaccagaucgaggugaccaacgccaccgagcuggugcagagcagcagcaccggcagaaucugcgacagcccccaccagauccuggacggcgagaacugcacccugaucgacgcccugcugggcgacccccacugcgacggcuuccagaacaaggagugggaccuguucguggagagaagcaaggccuacagcaacugcuaccccuacgacgugcccgacuacgugagccugagaagccugguggccagcagcggcacccuggaguucaacaacgagagcuucaacuggaccggcguggcccagaacggcaccagcagcgccugcaagagaagaagcgacaagagcuucuucagcagacugaacuggcugcaccagcugaaguacaaguaccccgcccugaacgugaccaugcccaacaacgagaaguucgacaagcuguacaucuggggcgugcaccaccccggcaccgacagcgaccagaucagccuguacgcccaggccagcggcagagugaccgugagcaccaagagaagccagcagaccgugauccccaacaucggcagcagacccugggugagaggcgugagcagcagaaucagcaucuacuggaccaucgugaagcccggcgacauccugcugaucaacagcaccggcaaccugaucgcccccagaggcuacuucaagaucagaagcggcaagagcagcaucaugagaagcgacgcccccaucggcaagugcaacagcgagugcaucacccccaacggcagcauccccaacgacaagcccuuccagaacgugaacagaaucaccuacggcgccugccccagauacgugaagcagaacacccugaagcuggccaccggcaugagaaacgugcccgagaagcagaccagaggcaucuucggcgccaucgccggcuucaucgagaacggcugggagggcaugauggacggcugguacggcuucagacaccagaacagcgagggcaccggccaggccgccgaccugaagagcacccaggccgccaucaaccagaucaacggcaagcugaacagacugaucgagaagaccaacgagaaguuccaccagaucgagaaggaguucagcgagguggagggcagaauccaggaccuggagaaguacguggaggacaccaagaucgaccuguggagcuacaacgccgagcugcugguggcccuggagaaccagcacaccaucgaccugaccgacagcgagaugaacaagcuguucgagagaaccaagaagcagcugagagagaacgccgaggacaugggcaacggcugcuucaagaucuaccacaagugcgacaacgccugcaucggcagcaucagaaacggcaccuacgaccacgacguguacagagacgaggcccugaacaacagauuccagaucaagggcguggagcugaagagcggcuacaaggacugggugcuguggaucagcuucgccaucagcugcuuccugcugugcaucgugcugaugggcuucaucaugugggccugccagaagggcaacaucagaugcaacaucugcaucuga

SEQ ID NO: 160736 - RNA, 1701 nt, Artificial Sequence; identical to SEQ ID NO: 160622
  derived and/or modified CDS sequence (opt4) from hemagglutinin__InfluenzaA__ABC85930

SEQ ID NO: 160737 - RNA, 1701 nt, Artificial Sequence; identical to SEQ ID NO: 160671
  derived and/or modified CDS sequence (opt4) from hemagglutinin__InfluenzaA__ABC85941

SEQ ID NO: 160738 - RNA, 1701 nt, Artificial Sequence
  derived and/or modified CDS sequence (opt4) from hemagglutinin__InfluenzaA__ABC85952
augaagaccaucaucgcccugagcuacauccugugccugguguucgcccagaagcugcccggcaacgacaacagcaccgccacccugugccugggccaccacgccgugcccaacggcacccuggugaagaccaucaccaacgaccagaucgaggugaccaacgccaccgagcuggugcagagcagcagcaccggcagaaucugcgacagcccccaccagauccuggacggcgagaacugcacccugaucgacgcccugcugggcgacccccacugcgacggcuuccagaacaagaagugggaccuguucguggagagaagcaaggccuacagcaacugcuaccccuacgacgugcccgacuacgugagccugagaagccugguggccagcagcggcacccuggaguucaacaacgagagcuucaacuggaccggcguggcccagaacggcaccagcagcgccugcaagagaagaagcgacaagagcuucuucagcagacugaacuggcugcaccagcugaaguacaaguaccccgcccugaacgugaccaugcccaacaacgagaaguucgacaagcuguacaucuggggcgugcaccaccccggcaccgacagcgaccagaucagccuguacgcccaggccagcggcagagugaccgugagcaccaagagaagccagcagaccgugauccccaacaucggcagcagacccugggugagaggcgugagcagcagaaucagcaucuacuggaccaucgugaagcccggcgacauccugcugaucaacagcaccggcaaccugaucgcccccagaggcuacuucaagaucagaagcggcaagagcagcaucaugagaagcgacgcccccaucggcaagugcaacagcgagugcaucacccccaacggcagcauccccaacgacaagcccuuccagaacgugaacagaaucaccuacggcgccugccccagauacgugaagcagaacacccugaagcuggccaccggcaugagaaacgugcccgagaagcagaccagaggcaucuucggcgccaucgccggcuucaucgagaacggcugggagggcaugauggacggcugguacggcuucagacaccacaacagcgagggcaccggccaggccgccgaccugaagagcacccaggccgccaucaaccagaucaacggcaagcugaacagacugaucgagaagaccaacgagaaguuccaccagaucgagaaggaguucagcgagguggagggcagaauccaggaccuggagaaguacguggaggacaccaagaucgaccuguggagcuacaacgccgagcugcugguggcccuggagaaccagcacaccaucgaccugaccgacagcgagaugaacaagcuguucgagagaaccaagaagcagcugagagagaacgccgaggacaugggcaacggcugcuucaagaucuaccacaagugcgacaacgccugcaucggcagcaucagaaacggcaccuacgaccacgacguguacagagacgaggcccugaacaacagauuccagaucaagggcguggagcugaagagcggcuacaaggacugggugcuguggaucagcuucgccaucagcugcuuccugcugugcaucgugcugcugggcuucaucaugugggccugccagaagggcaacaucagaugcaacaucugcaucuga

SEQ ID NO: 160739 - RNA, 1701 nt, Artificial Sequence; identical to SEQ ID NO: 160622
  derived and/or modified CDS sequence (opt4) from hemagglutinin__InfluenzaA__ABC85974

SEQ ID NO: 160740 - RNA, 1701 nt, Artificial Sequence; identical to SEQ ID NO: 160622
  derived and/or modified CDS sequence (opt4) from hemagglutinin__InfluenzaA__ABC85985

SEQ ID NO: 160741 - RNA, 1701 nt, Artificial Sequence
  derived and/or modified CDS sequence (opt4) from hemagglutinin__InfluenzaA__ABC85996
augaagaccaucaucgcccugagcuacauccugugccugguguucgcccagaagcugcccggcaacgacaacagcaccgccacccugugccugggccaccacgccgugcccaacggcaccaucgugaagaccaucaccaacgaccagaucgaggugaccaacgccaccgagcuggugcagagcagcagcaccggcggcaucugcgacagcccccaccagauccuggacggcgagaacugcacccugaucgacgcccugcugggcgacccccagugcgacggcuuccagaacaagaagugggaccuguucguggagagaagcaaggccuacagcaacugcuaccccuacgacgugcccgacuacgccagccugagaagccugguggccagcagcggcacccuggaguucaacaacgagagcuucaacuggaccggcgugacccagaacggcaccagcagcgccugcaagagaagaagcaacaacagcuucuucagcagacugaacuggcugacccaccugaaguucaaguaccccgcccugaacgugaccaugcccaacaacgagaaguucgacaagcuguacaucuggggcgugcaccaccccggcaccgacaacgaccagaucagccuguacgcccaggccagcggcagaaucaccgugagcaccaagagaagccagcagaccgugauccccaacaucggcagcagacccagagugagagacauccccagcagaaucagcaucuacuggaccaucgugaagcccggcgacauccugcugaucaacagcaccggcaaccugaucgcccccagaggcuacuucaagaucagaagcggcaagagcagcaucaugagaagcgacgcccccaucggcaagugcaacagcgagugcaucacccccaacggcagcauccccaacgacaagcccuuccagaacgugaacagaaucaccuacggcgccugccccagauacgugaagcagaacacccugaagcuggccaccggcaugagaaacgugcccgagaagcagaccagaggcaucuucggcgccaucgccggcuucaucgagaacggcugggagggcaugauggacggcugguacggcuucagacaccagaacagcgagggcaucggccaggccgccgaccugaagagcacccaggccgccaucaaccagaucaacggcaagcugaacagacugaucggcaagaccaacgagaaguuccaccagaucgagaaggaguucagcgagguggagggcagaauccaggaccuggagaaguacguggaggacaccaagaucgaccuguggagcuacaacgccgagcugcugguggcccuggagaaccagcacaccaucgaccugaccgacagcgagaugaacaagcuguucgagagaaccaagaagcagcugagagagaacgccgaggacaugggcaacggcugcuucaagaucuaccacaagugcgacaacgccugcaucggcagcaucagaaacggcaccuacgaccacgacguguacagagacgaggcccugaacaacagauuccagaucaagggcguggagcugaagagcggcuacaaggacuggauccuguggaucagcuucgccaucagcugcuuccugcugugcguggcccugcugggcuucaucaugugggccugccagaagggcaacaucagaugcaacaucugcaucuga

SEQ ID NO: 160742 - RNA, 1701 nt, Artificial Sequence; identical to SEQ ID NO: 160303
  derived and/or modified CDS sequence (opt4) from hemagglutinin__InfluenzaA__ABC86007

SEQ ID NO: 160743 - RNA, 1701 nt, Artificial Sequence
  derived and/or modified CDS sequence (opt4) from hemagglutinin__InfluenzaA__ABC86018
augaagaccaucaucgcccugagcuacauccugugccugguguucgcccagaagcugcccggcaacgacaacagcaccgccacccugugccugggccaccacgccgugcccaacggcaccaucgugaagaccaucaccaacgaccagaucgaggugaccaacgccaccgagcuggugcagagcagcagcaccggcggcaucugcgacagcccccaccagauccuggacggcgagaacugcaccaucaucgacgcccugcugggcgacccccagugcgacggcuuccagaacaagaagugggaccuguucguggagagaagcaaggccuacagcaacugcuaccccuacgacgugcccgacuacgccagccugagaagccugguggccagcagcggcacccuggaguucaacaacgagagcuucaacuggaccggcgugacccagaacggcaccagcagcgccugcaagagaagaagcaacaacagcuucuucagcagacugaacuggcugacccaccugaaguucaaguaccccgcccugaacgugaccaugcccaacaacgagaaguucgacaagcuguacaucuggggcgugcaccaccccggcaccgacaacgaccagaucagccuguacgcccaggccagcggcagaaucaccgugagcaccaagagaagccagcagaccgugauccccaacaucggcagcagacccagagugagagacauccccagcagaaucagcaucuacuggaccaucgugaagcccggcgacauccugcugaucaacagcaccggcaaccugaucgcccccagaggcuacuucaagaucagaagcggcaagagcagcaucaugagaagcgacgcccccaucggcaagugcaacagcgagugcaucacccccaacggcagcauccccaacgacaagcccuuccagaacgugaacagaaucaccuacggcgccugccccagauacgugaagcagaacacccugaagcuggccaccggcaugagaaacgugcccgagaagcagaccagaggcaucuucggcgccaucgccggcuucaucgagaacggcugggagggcaugguggacggcugguacggcuucagacaccagaacagcgagggcaucggccaggccgccgaccugaagagcacccaggccgccaucaaccagaucaacggcaagcugaacagacugaucggcaagaccaacgagaaguuccaccagaucgagaaggaguucagcgagguggagggcagaauccaggaccuggagaaguacguggaggacaccaagaucgaccuguggagcuacaacgccgagcugcugguggcccuggagaaccagcacaccaucgaccugaccgacagcgagaugaacaagcuguucgagagaaccaagaagcagcugagagagaacgccgaggacaugggcaacggcugcuucaagaucuaccacaagugcgacaacgccugcaucggcagcaucagaaacggcaccuacgaccacgacguguacagagacgaggcccugaacaacagauuccagaucaagggcguggagcugaagagcggcuacaaggacuggauccuguggaucagcuucgccaucagcugcuuccugcugugcguggcccugcugggcuucaucaugugggccugccagaagggcaacaucagaugcaacaucugcaucuga

SEQ ID NO: 160744 - RNA, 1701 nt, Artificial Sequence; identical to SEQ ID NO: 160303
  derived and/or modified CDS sequence (opt4) from hemagglutinin__InfluenzaA__ABC86029

SEQ ID NO: 160745 - RNA, 1701 nt, Artificial Sequence; identical to SEQ ID NO: 160342
  derived and/or modified CDS sequence (opt4) from hemagglutinin__InfluenzaA__ABC86040

SEQ ID NO: 160746 - RNA, 1701 nt, Artificial Sequence; identical to SEQ ID NO: 160576
  derived and/or modified CDS sequence (opt4) from hemagglutinin__InfluenzaA__ABC86124

SEQ ID NO: 160747 - RNA, 1701 nt, Artificial Sequence; identical to SEQ ID NO: 160653
  derived and/or modified CDS sequence (opt4) from hemagglutinin__InfluenzaA__ABC86137

SEQ ID NO: 160748 - RNA, 1701 nt, Artificial Sequence
  derived and/or modified CDS sequence (opt4) from hemagglutinin__InfluenzaA__ABC97374
augaagaccaucaucgcccugagcuacaucuucugccuggugcugggccaggacuuccccggcaacgacaacagcaccgccacccugugccugggccaccacgccgugcccaacggcacccuggugaagaccaucaccaacgaccagaucgaggugaccaacgccaccgagcuggugcagagcagcagcaccggcaagaucugcaacaacccccacagaauccuggacggcaucgacugcacccugaucgacgcccugcugggcgacccccacugcgacggcuuccagaacgagaccugggaccuguucguggagagaagcaaggccuucagcaacugcuaccccuacgacgugcccgacuacgccagccugagaagccugguggccagcagcggcacccuggaguucaucaacgagggcuucaccuggaccggcgugacccagaacggcggcagcaacgccugcaagagaggccccgacagcggcuucuucagcagacugaacuggcuguacaagagcggcagcaccuaccccgugcugaacgugaccaugcccaacaacgacaacuucgacaagcuguacaucuggggcgugcaccaccccagcaccgaccaggagcagaccagccuguacgugcaggccagcggcagagugaccgugagcaccaagagaagccagcagaccaucauccccaacaucggcagcagacccugggugagaggccugagcagcagaaucagcaucuacuggaccaucgugaagcccggcgacauccuggugaucaacagcaacggcaaccugaucgcccccagaggcuacuucaagaugagaaccggcaagagcagcaucaugagaagcgacgcccccaucggcaccugcaucagcgagugcaucacccccaacggcagcauccccaacgacaagcccuuccagaacgugaacaagaucaccuacggcgccugccccaaguacgugaagcagaacacccugaagcuggccaccggcaugagaaacgugcccgagaagcagaccagaggccuguucggcgccaucgccggcuucaucgagaacggcugggagggcaugguggacggcugguacggcuucagacaccagaacagcgagggcaccggccaggccgccgaccugaagagcacccaggccgccaucgaccagaucaacggcaagcugaacagagugaucgagaagaccaacgagaaguuccaccagaucgagaaggaguucagcgagguggagggcagaauccaggaccuggagaaguacguggaggacaccaagaucgaccuguggagcuacaacgccgagcugcugguggcccuggagaaccagcacaccaucgaccugaccgacagcgagaugaacaagcuguucgagaagaccagaagacagcugagagagaacgccgaggacaugggcaacggcugcuucagaaucuaccacaagugcgacaacgccugcaucggcagcaucagaaacggcaccuacgaccacgacguguacagagacgaggcccugaacaacagauuccagaucaagggcguggagcugaagagcggcuacaaggacuggauccuguggaucagcuucgccaucagcugcuuccugcugugcguggugcugcugggcuucaucaugugggccugccagaagggcaacaucagaugcaacaucugcaucuga

SEQ ID NO: 160749 - RNA, 1701 nt, Artificial Sequence; identical to SEQ ID NO: 160092
  derived and/or modified CDS sequence (opt4) from hemagglutinin__InfluenzaA__ABD15449

SEQ ID NO: 160750 - RNA, 1701 nt, Artificial Sequence
  derived and/or modified CDS sequence (opt4) from hemagglutinin__InfluenzaA__ABD15460
augaagaccaucaucgcccugagcuacauccugugccugguguucgcccagaagcugcccggcaacgacaacagcaccgccacccugugccugggccaccacgccgugcccaacggcaccaucgugaagaccaucaccaacgaccagaucgaggugaccaacgccaccgagcuggugcagaucagcagcaccggcggcaucugcgacagccccuaccagauccuggacggcgagaacugcacccugaucgacgcccugcugggcgacccccagugcgacggcuuccagaacaagaagugggaccuguucguggagagaagcaaggccuacagcaacugcuaccccuacgacgugcccgacuacgccagccugagaagccugguggccagcagcggcacccuggaguucaacaacgagagcuucgacuggaccggcgugacccagaacggcaccagcagcgccugcaagagaagaagcaacaagagcuucuucagcagacugaacuggcugacccaccugaaguacaaguaccccgcccugaacgugaccaugcccaacaacgagaaguucgacaagcuguacaucuggggcgugcaccaccccggcaccgacagcgaccagaucagccuguacgcccaggccagcggcagaaucaccgugagcaccaagagaagccagcagaccgugauccccaacaucggcagcagacccagagugagagacgugagcagcagaaucagcaucuacuggaccaucgugaagcccggcgacauccugcugaucaacagcaccggcaaccugaucgcccccagaggcuacuucaagaucagaagcggcaagagcagcaucaugagaagcgacgcccccaucggcaagugcaacagcgagugcaucacccccaacggcagcauccccaacgacaagcccuuccagaacgugaacagaaucaccuacggcgccugccccagauacgugaagcagaacacccugaagcuggccaccggcaugagaaacgugcccgagaagcagaccagaggcaucuucggcgccaucgccggcuucaucgagaacggcugggagggcaugguggacggcugguacggcuucagacaccagaacagcgagggcaccggccaggccgccgaccugaagagcacccaggccgccaucaaccagaucaacggcaagcugaacagacugaucggcaagaccaacgagaaguuccaccagaucgagaaggaguucagcgagguggagggcagaauccaggaccuggagaaguacguggaggacaccaagaucgaccuguggagcuacaacgccgagcugcugguggcccuggagaaccagcacaccaucgaccugaccgacagcgagaugaacaagcuguucgagagaaccaagaagcagcugagagagaacgccgaggacaugggcaacggcugcuucaagaucuaccacaagugcgacaacgccugcaucggcagcaucagaaacggcaccuacgaccacgacguguacagagacgaggcccugaacaacagauuccagaucaagggcguggagcugaagagcggcuacaaggacuggauccuguggaucagcuucgccaucagcugcuuccugcugugcguggcccugcugggcuucaucaugugggccugccagaagggcaacaucagaugcaacaucugcaucuga

SEQ ID NO: 160751 - RNA, 1701 nt, Artificial Sequence; identical to SEQ ID NO: 160092
  derived and/or modified CDS sequence (opt4) from hemagglutinin__InfluenzaA__ABD15471

SEQ ID NO: 160752 - RNA, 1701 nt, Artificial Sequence; identical to SEQ ID NO: 160092
  derived and/or modified CDS sequence (opt4) from hemagglutinin__InfluenzaA__ABD15482

SEQ ID NO: 160753 - RNA, 1701 nt, Artificial Sequence; identical to SEQ ID NO: 160750
  derived and/or modified CDS sequence (opt4) from hemagglutinin__InfluenzaA__ABD15493

SEQ ID NO: 160754 - RNA, 1701 nt, Artificial Sequence; identical to SEQ ID NO: 160303
  derived and/or modified CDS sequence (opt4) from hemagglutinin__InfluenzaA__ABD15526

SEQ ID NO: 160755 - RNA, 1701 nt, Artificial Sequence; identical to SEQ ID NO: 160512
  derived and/or modified CDS sequence (opt4) from hemagglutinin__InfluenzaA__ABD15537

SEQ ID NO: 160756 - RNA, 1701 nt, Artificial Sequence; identical to SEQ ID NO: 160512
  derived and/or modified CDS sequence (opt4) from hemagglutinin__InfluenzaA__ABD15548

SEQ ID NO: 160757 - RNA, 1701 nt, Artificial Sequence; identical to SEQ ID NO: 160530
  derived and/or modified CDS sequence (opt4) from hemagglutinin__InfluenzaA__ABD15559

SEQ ID NO: 160758 - RNA, 1701 nt, Artificial Sequence; identical to SEQ ID NO: 160512
  derived and/or modified CDS sequence (opt4) from hemagglutinin__InfluenzaA__ABD15570

SEQ ID NO: 160759 - RNA, 1701 nt, Artificial Sequence; identical to SEQ ID NO: 160530
  derived and/or modified CDS sequence (opt4) from hemagglutinin__InfluenzaA__ABD15581

SEQ ID NO: 160760 - RNA, 1701 nt, Artificial Sequence; identical to SEQ ID NO: 160512
  derived and/or modified CDS sequence (opt4) from hemagglutinin__InfluenzaA__ABD15592

SEQ ID NO: 160761 - RNA, 1701 nt, Artificial Sequence; identical to SEQ ID NO: 160512
  derived and/or modified CDS sequence (opt4) from hemagglutinin__InfluenzaA__ABD15603

SEQ ID NO: 160762 - RNA, 1701 nt, Artificial Sequence; identical to SEQ ID NO: 160512
  derived and/or modified CDS sequence (opt4) from hemagglutinin__InfluenzaA__ABD15614

SEQ ID NO: 160763 - RNA, 1701 nt, Artificial Sequence
  derived and/or modified CDS sequence (opt4) from hemagglutinin__InfluenzaA__ABD15625
augaagaccaucaucgcccugagcuacauccugugccugguguucgcccagaagcugcccggcaacgacaacagcaccgccacccugugccugggccaccacgccgugcccaacggcaccaucgugaagaccaucaccaacgaccagaucgaggugaccaacgccaccgagcuggugcagagcagcagcaccggcggcaucugcgacagcccccaccagauccuggacggcgagaacugcacccugaucgacgcccugcugggcgacccccagugcgacggcuuccagaacaagaagugggaccuguucguggagagaagcaaggccuacagcaacugcuaccccuacgacgugcccgacuacgccagccugagaagccugguggccagcagcggcacccuggaguucaacaacgagagcuucgacuggaccggcgugacccagaacggcaccagcagcgccugcaagagaagaagcaacaagagcuucuucagcagacugaacuggcugacccaccugaaguacaaguaccccgcccugaacgugaccaugcccaacaacgagaaguucgacaagcuguacaucuggggcgugcaccaccccggcaccgacagcgaccagaucagccuguacgcccaggccagcggcagaaucaccgugagcaccaagagaagccagcagaccgugauccccaacaucggcagcagacccagagugagagacgugagcagccagaucagcaucuacuggaccaucgugaagcccggcgacauccugcugaucaacagcaccggcaaccugaucgcccccagaggcuacuucaagaucagaagcggcaagagcagcaucaugagaagcgacgcccccaucggcaagugcaacagcgagugcaucacccccaacggcagcauccccaacgacaagcccuuccagaacgugaacagaaucaccuacggcgccugccccagauacgugaagcagaacacccugaagcuggccaccggcaugagaaacgugcccgagaagcagaccagaggcaucuucggcgccaucgccggcuucaucgagaacggcugggagggcaugguggacggcugguacggcuucagacaccagaacagcgagggcaccggccaggccgccgaccugaagagcacccaggccgccaucaaccagaucaacggcaagcugaacagacugaucggcaagaccaacgagaaguuccaccagaucgagaaggaguucagcgagguggagggcagaauccaggaccuggugaaguacguggaggacaccaagaucgaccuguggagcuacaacgccgagcugcugguggcccuggagaaccagcacaccaucgaccugaccgacagcgagaugaacaagcuguucgagagaaccaagaagcagcugagagagaacgccgaggacaugggcaacggcugcuucaagaucuaccacaagugcgacaacgccugcaucggcagcaucagaaacggcaccuacgaccacgacguguacagagacgaggcccugaacaacagauuccagaucaagggcguggagcugaagagcggcuacaaggacuggauccuguggaucagcuucgccaucagcugcuuccugcugugcguggcccugcugggcuucaucaugugggccugccagaagggcaacaucagaugcaacaucugcaucuga

SEQ ID NO: 160764 - RNA, 1701 nt, Artificial Sequence; identical to SEQ ID NO: 160530
  derived and/or modified CDS sequence (opt4) from hemagglutinin__InfluenzaA__ABD15636

SEQ ID NO: 160765 - RNA, 1701 nt, Artificial Sequence; identical to SEQ ID NO: 160710
  derived and/or modified CDS sequence (opt4) from hemagglutinin__InfluenzaA__ABD15680

SEQ ID NO: 160766 - RNA, 1701 nt, Artificial Sequence
  derived and/or modified CDS sequence (opt4) from hemagglutinin__InfluenzaA__ABD15691
augaagaccaucaucgcccugagcuacauccugugccugguguucgcccagaagcugcccgugaacgacaagagcaccgccacccugugccugggccaccacgccgugcccaacggcacccuggugaagaccaucaccaacgaccacaucgaggugaccaacgccaccgagcuggugcagagcagccccaccggcagaaucugcgacagcccccaccagauccuggacggcgagaacugcacccugaucgacgcccugcugggcgacccccacugcgacggcuuccagaacaaggagugggaccuguucguggagagaagcaccgccuacagcaacugcuaccccuacgacgugcccgacuacgccagccugagaagccugguggccagcagcggcacccuggaguucaacaacgagagcuucaacuggaccggcguggcccagaacggcaccagcagcgccugcaagagaagaagcaucaagagcuucuucagcagacugaacuggcugcaccagcugaaguacaaguaccccgcccugaacgugaccaugcccaacaacgagaaguucgacaagcuguacaucuggggcgugcaccaccccagcaccgacagcgaccagaucagccuguacgcccaggccagcggcagagugaccgugagcaccaagagaagccagcagaccgugauccccaacaucggcagcagacccugggugagaggcgugagcagcagaaucagcaucuacuggaccaucgugaagcccggcgacauccugcugaucaacagcaccggcaaccugaucgcccccagaggcuacuucaagaucagaagcggcaagagcagcaucaugagaagcaacgcccccaucggcaagugcaacagcgagugcaucacccccaacggcagcauccccaacgacaagcccuuccagaacgugaacagaaucaccuacggcgccugccccagauacgugaagcagaacacccugaagcuggccaccggcaugagaaacgugcccgagaagcagaccagaggcaucuucggcgccaucgccggcuucaucgagaacggcugggagggcaugguggacggcugguacggcuucagacaccagaacagcgagggcaccggccaggccgccgaccugaagagcacccaggccgccaucaaccagaucaacggcaagcugaacagacugaucgagaagaccaacgagaaguuccaccagaucgagaaggaguucagcgagguggagggcagaauccaggaccuggagaaguacguggaggacaccaagaucgaccuguggagcuacaacgccgagcugcugguggcccuggagaaccagcacaccaucgaccugaccgacagcgagaugaacaagcuguucgagagaaccagaaagcagcugagagagaacgccgaggacaugggcaacggcugcuucaagaucuaccacaagugcgacaacgccugcaucggcagcaucagaaacggcaccuacgaccacgacguguacagagacgaggcccugaacaacagauuccagaucaagggcguggagcugaagagcggcuacaaggacuggauccuguggaucagcuucgccaucagcugcuuccugcugugcguggugcugcugggcuucaucaugugggccugccagaagggcaacaucagaugcaacaucugcaucuga

SEQ ID NO: 160767 - RNA, 1701 nt, Artificial Sequence
  derived and/or modified CDS sequence (opt4) from hemagglutinin__InfluenzaA__ABD15702
augaagaccaucaucgcccugagcuacauccugugccugguguucgcccagaagcugcccggcaacgacaacagcaccgccacccugugccugggccaccacgccgugcccaacggcacccuggugaagaccaucaccaacgaccagaucgaggugaccaacgccaccgagcuggugcagagcagcagcaccggcggcaucugcgacagcccccaccagauccuggacggcgagaacugcacccugaucgacgcccugcugggcgacccccacugcgacggcuuccagaacaaggagugggaccuguucguggagagaagcaaggccuacagcaacugcuaccccuacgacgugcccgacuacgccagccugagaagccugguggccagcagcggcacccuggaguucaacaacgagagcuucaacuggaccggcguggcccagaacggcaccagcagcgccugcaagagaagaagcaacaagagcuucuucagcagacugaacuggcugcaccagcugaaguacaaguaccccgcccugaacgugaccaugcccaacaacgagaaguucgacaagcuguacaucuggggcgugcaccaccccagcaccgacagcgaccagaccagccuguacgcccaggcccccggcagagugaccgugagcaccaagagaagccagcagaccgugauccccaacaucggcagcagacccugggugagaggcgugagcagcagaaucagcaucuacuggaccaucgugaagcccggcgacauccugcugaucaacugcaccggcaaccugaucgcccccagaggcuacuucaagaucagaagcggcaagagcagcaucaugagaagcgacgccagcaucggcaagugcaacagcgagugcaucacccccaacggcagcauccccaacgacaagcccuuccagaacgugaacagaaucaccuacggcgccugccccagauacgugaagcagaacacccugaagcuggccaccggcaugagaaacgugcccgagaagcagaccagaggcaucuucggcgccaucgccggcuucaucgagaacggcugggagggcaugguggacggcugguacggcuucagacaccagaacagcgagggcaccggccaggccgccgaccugaagagcacccaggccgccaucaaccagaucaacggcaagcugaacagacugaucgagaagaccaacgagaaguuccaccagaucgagaaggaguucagcgagguggagggcagaauccaggaccuggagaaguacguggaggacaccaagaucgaccuguggagcuacaacgccgagcugcugguggcccuggagaaccagcacaccaucgaccugaccgacagcgagaugaacaagcuguucgagagaaccaagaagcagcugagagagaacgccgaggacaugggcaacggcugcuucaagaucuaccacaagugcgacaacgccugcaucggcagcaucagaaacggcaccuacgaccacgacguguacagagacgaggcccugaacaacagauuccagaucaagggcguggagcugaagagcggcuacaaggacuggauccuguggaucagcuucgccaucagcugcuuccugcugugcguggugcugcugggcuucaucaugugggccugccagaagggcaacaucagaugcaacaucugcaucuga

SEQ ID NO: 160768 - RNA, 1701 nt, Artificial Sequence
  derived and/or modified CDS sequence (opt4) from hemagglutinin__InfluenzaA__ABD15724
augaagaccaucaucgcccugagcuacauccugugccugguguucgcccagaagcugcccggcaacgacaacagcaccgccacccugugccugggccaccacgccgugcccaacggcacccuggugaagaccaucaccaacgaccagaucgaggugaccaacgccaccgagcuggugcagagcagcagcaccggcggcaucugcgacagcccccaccagauccuggacggcgagaacugcacccugaucgacgcccugcugggcgacccccacugcgacggcuuccagaacaaggagugggaccuguucguggagagaagcaaggccuacagcaacugcuaccccuacgacgugcccgacuacgccagccugagaagccugguggccagcagcggcacccuggaguucaacaacgagagcuucaacuggaccggcguggcccagaacggcaccagcagcgccugcaagagaagaagcaacaagagcuucuucagcagacugaacuggcugcaccagcugaaguacaaguaccccgcccugaacguggccaugcccaacaacgagaaguucgacaagcuguacaucuggggcgugcaccaccccagcaccgacagcgaccagaucagccuguacgcccaggcccccggcagagugaccgugagcaccaagagaagccagcagaccgugauccccaacaucggcagcagacccugggugagaggcgugagcagcagaaucagcaucuacuggaccaucgugaagcccggcgacauccugcugaucaacugcaccggcaaccugaucgcccccagaggcuacuucaagaucagaagcggcaagagcagcaucaugagaagcgacgccagcaucggcaagugcaacagcgagugcaucacccccaacggcagcauccccaacgacaagcccuuccagaacgugaacagaaucaccuacggcgccugccccagauacgugaagcagaacacccugaagcuggccaccggcaugagaaacgugcccgagaagcagaccagaggcaucuucggcgccaucgccggcuucaucgagaacggcugggagggcaugguggacggcugguacggcuucagacaccagaacagcgagggcaccggccaggccgccgaccugaagagcacccaggccgccaucaaccagaucaacggcaagcugaacagacugaucgagaagaccaacgagaaguuccaccagaucgagaaggaguucagcgagguggagggcagaauccaggaccuggagaaguacguggaggacaccaagaucgaccuguggagcuacaacgccgagcugcugguggcccuggagaaccagcacaccaucgaccugaccgacagcgagaugaacaagcuguucgagagaaccaagaagcagcugagagagaacgccgaggacaugggcaacggcugcuucaagaucuaccacaagugcgacaacgccugcaucggcagcaucagaaacggcaccuacgaccacgacguguacagagacgaggcccugaacaacagauuccagaucaagggcguggagcugaagagcggcuacaaggacuggauccuguggaucagcuucgccaucagcugcuuccugcugugcguggugcugcugggcuucaucaugugggccugccagaagggcaacaucagaugcaacaucugcaucuga

SEQ ID NO: 160769 - RNA, 1701 nt, Artificial Sequence
  derived and/or modified CDS sequence (opt4) from hemagglutinin__InfluenzaA__ABD15746
augaagaccaucaucgcccugagcuacauccugugccugguguucgcccagaagcugcccgugaacgacaacagcaccgccacccugugccugggccaccacgccgugcccaacggcacccuggugaagaccaucaccaacgaccacaucgaggugaccaacgccaccgagcuggugcagagcagcagcaccggcagaaucugcgacagcccccaccagauccuggacggcgagaacugcacccugaucgacgcccugcugggcgacccccacugcgacggcuuccagaacaaggagugggaccuguucguggagagaagcaccgccuacagcaacugcuaccccuacgacgugcccgacuacgccagccugagaagccugguggccagcagcggcacccuggaguucaacaacgagagcuucaacuggaccggcguggcccagaacggcaccagcagcgccugcaagagaagaagcaucaagagcuucuucagcagacugaacuggcugcaccagcugaaguacaaguaccccgcccugaacgugaccaugcccaacaacgagaaguucgacaagcuguacaucuggggcgugcaccaccccagcaccgacagcgaccagaucagccuguacgcccaggccagcggcagagugaccgugagcaccaagagaagccagcagaccgugauccccaacaucggcagcagacccugggugagaggcaucagcagcagaaucagcaucuacuggaccaucgugaagcccggcgacauccugcugaucaacagcaccggcaaccugaucgcccccagaggcuacuucaagaucagaagcggcaagagcagcaucaugagaagcaacgcccccaucggcaagugcaacagcgagugcaucacccccaacggcagcauccccaacgacaagcccuuccagaacgugaacagaaucaccuacggcgccugccccagauacgugaagcagaacacccugaagcuggccaccggcaugagaaacgugcccgagaagcagaccagaggcaucuucggcgccaucgccggcuucaucgagaacggcugggagggcaugguggacggcugguacggcuucagacaccagaacagcgagggcaccggccaggccgccgaccugaagagcacccaggccgccaucaaccagaucaacggcaagcugaacagacugaucgagaagaccaacgagaaguuccaccagaucgagaaggaguucagcgagguggagggcagaauccaggaccuggagaaguacguggaggacaccaagaucgaccuguggagcuacaacgccgagcugcugguggcccuggagaaccagcacaccaucgaccugaccgacagcgagaugaacaagcuguucgagagaaccagaaagcagcugagagagaacgccgaggagaugggcaacggcugcuucaagaucuaccacaagugcgacaacgccugcaucggcagcaucagaaacggcaccuacgaccacgacguguacagagacgaggcccugaacaacagauuccagaucaagggcguggagcugaagagcggcuacaaggacuggauccuguggaucagcuucgccaucagcugcuuccugcugugcguggugcugcugggcuucaucaugugggccugccagaagggcaacaucagaugcaacaucugcaucuga

SEQ ID NO: 160770 - RNA, 1701 nt, Artificial Sequence
  derived and/or modified CDS sequence (opt4) from hemagglutinin__InfluenzaA__ABD15757
augaagaccaucaucgcccugagcuacauccugugccugguguucgcccagaagcugcccgugaacgacaacagcaccgccacccugugccugggccaccacgccgugcccaacggcacccuggugaagaccaucaccaacgaccacaucgaggugaccaacgccaccgagcuggugcagagcagcagcaccggcagaaucugcgacagcccccaccagauccuggacggcgagaacugcacccugaucgacgcccugcugggcgacccccacugcgacggcuuccagaacaaggagugggaccuguucguggagagaagcaccgccuacagcaacugcuaccccuacgacgugcccgacuacgccagccugagaagccugguggccagcagcggcacccuggaguucaacaacgagagcuucaacuggaccggcguggcccagaacggcaccagcagcgccugcaagagaagaagcaucaagagcuucuucagcagacugaacuggcugcaccagcugaaguacaaguaccccgcccugaacgugaccaugcccaacaacgagaaguucgacaagcuguacaucuggggcgugcaccaccccagcaccgacagcgaccagaucagccuguacgcccaggccagcggcagagugaccgugagcaccaagagaagccagcagaccgugauccccaacaucggcagcagacccugggugagaggcgugagcagcagaaucagcaucuacuggaccaucgugaagcccggcgacauccugcugaucaacagcaccggcaaccugaucgcccccagaggcuacuucaagaucagaagcggcaagagcagcaucaugagaagcaacgcccccaucggcaagugcaacagcgagugcaucacccccaacggcagcauccccaacgacaagcccuuccagaacgugaacagaaucaccuacggcgccugccccagauacgugaagcagaacacccugaagcuggccaccggcaugagaaacgugcccgagaagcagaccagaggcaucuucggcgccaucgccggcuucaucgagaacggcugggagggcaugguggacggcugguacggcuucagacaccagaacagcgagggcaccggccaggccgccgaccugaagagcacccaggccgccaucaaccagaucaacggcaagcugaacagacugaucgagaagaccaacgagaaguuccaccagaucgagaaggaguucagcgagguggagggcagaauccaggaccuggagaaguacguggaggacaccaagaucgaccuguggagcuacaacgccgagcugcugguggcccuggagaaccagcacaccaucgaccugaccgacagcgagaugaacaagcuguucgagagaaccagaaagcagcugagagagaacgccgaggagaugggcaacggcugcuucaagaucuaccacaagugcgacaacgccugcaucggcagcaucagaaacggcaccuacgaccacgacguguacagagacgaggcccugaacaacagauuccagaucaagggcguggagcugaagagcggcuacaaggacuggauccuguggaucagcuucgccaucagcugcuuccugcugugcguggugcugcugggcuucaucaugugggccugccagaagggcaacaucagaugcaacaucugcaucuga

SEQ ID NO: 160771 - RNA, 1701 nt, Artificial Sequence; identical to SEQ ID NO: 160710
  derived and/or modified CDS sequence (opt4) from hemagglutinin__InfluenzaA__ABD15779

SEQ ID NO: 160772 - RNA, 1701 nt, Artificial Sequence; identical to SEQ ID NO: 160710
  derived and/or modified CDS sequence (opt4) from hemagglutinin__InfluenzaA__ABD15790

SEQ ID NO: 160773 - RNA, 1701 nt, Artificial Sequence; identical to SEQ ID NO: 160710
  derived and/or modified CDS sequence (opt4) from hemagglutinin__InfluenzaA__ABD16292

SEQ ID NO: 160774 - RNA, 1701 nt, Artificial Sequence; identical to SEQ ID NO: 160693
  derived and/or modified CDS sequence (opt4) from hemagglutinin__InfluenzaA__ABD16303

SEQ ID NO: 160775 - RNA, 1701 nt, Artificial Sequence; identical to SEQ ID NO: 160693
  derived and/or modified CDS sequence (opt4) from hemagglutinin__InfluenzaA__ABD16325

SEQ ID NO: 160776 - RNA, 1701 nt, Artificial Sequence
  derived and/or modified CDS sequence (opt4) from hemagglutinin__InfluenzaA__ABD16336
augaagaccaucaucgcccugagcuacacccugugccugguguucgcccagaagcugcccggcaacgacaacagcaccgccacccugugccugggccaccacgccgugcccaacggcaccaucgugaagaccaucaccaacgaccagaucgaggugaccaacgccaccgagcuggugcagagcagcagcaccggcggcaucugcgacagcccccaccagauccuggacggcgagaacugcacccugaucgacgcccugcugggcgacccccagugcgacggcuuccagaacaagaagugggaccuguucguggagagaagcaaggccuacagcaacugcuaccccuacgacgugcccgacuacgccagccugagaagccugaucgccagcagcggcacccuggaguucaacaacgagagcuucaacuggaccggcgugacccagaacggcaccagcagcgccugcaagagaagaagcaacagcagcuucuucagcagacugaacuggcugacccaccugaaguucaaguaccccgcccugaacgugaccaugcccaacaacgaggaguucgacaagcuguacaucuggggcgugcaccaccccggcaccuacaacgaccagaucagccuguacgcccaggccagcggcagaaucaccgugagcaccaagagaagccagcagaccgugauccccaacaucggcagcagacccagagugagagacauccccagcagaaucagcaucuacuggaccaucgugaagcccggcgacauccugcugaucaacagcaccggcaaccugaucgcccccagaggcuacuucaagaucagaagcggcaagagcagcaucaugagaagcgacgcccccaucggcaagugcaacagcgagugcaucacccccaacggcagcauccccaacgacaagcccuuccagaacgugaacagaaucaccuacggcgccugccccagauacgugaagcagaacacccugaagcuggccaccggcaugagaaacgugcccgagaagcagaccagaggcaucuucggcgccaucgccggcuucaucgagaacggcugggagggcaugguggacggcugguacggcuucagacaccagaacagcgagggcaucggccaggccgccgaccugaagagcacccaggccgccaucgaccagaucaacggcaagcugaacagacugaucggcaagaccaacgagaaguuccaccagaucgagaaggaguucagcgagguggagggcagaauccaggaccuggagaaguacguggaggacaccaagaucgaccuguggagcuacaacgccgagcugcugguggcccuggagaaccagcacaccaucgaccugaccgacagcgagaugaacaagcuguucgagagaaccaagaagcagcugagagagaacgccgaggacaugggcaacggcugcuucaagaucuaccacaagugcgacaacgccugcaucggcagcaucagaaacggcaccuacgaccacgacguguacagagacgaggcccugaacaacagauuccagaucaagggcguggagcugaagagcggcuacaaggacuggauccuguggaucagcuucgccaucagcugcuuccugcugugcguggcccugcugggcuucaucaugugggccugccagaagggcaacaucagaugcaacaucugcaucuga

SEQ ID NO: 160777 - RNA, 1701 nt, Artificial Sequence; identical to SEQ ID NO: 160693
  derived and/or modified CDS sequence (opt4) from hemagglutinin__InfluenzaA__ABD16347

SEQ ID NO: 160778 - RNA, 1701 nt, Artificial Sequence
  derived and/or modified CDS sequence (opt4) from hemagglutinin__InfluenzaA__ABD16358
augaagaccaucaucgcccugagcuacauccugugccugguguucgcccagaagcugcccggcaacgacaacagcaccgccacccugugccugggccaccacgccgugcccaacggcaccaucgugaagaccaucaccaacgaccagaucgaggugaccaacgccaccgagcuggugcagagcagcagcaccggcggcaucugcgacagcccccaccagauccuggacggcgagaacugcacccugaucgacgcccugcugggcgacccccagugcgacggcuuccagaacaagaagugggaccuguucguggagagaagcaaggccuacagcaacugcuaccccuacgacgugcccgacuacgccagccugagaagccugaucgccagcagcggcacccuggaguucaacaacgagagcuucaacuggaccggcgugacccagaacggcaccagcagcgccugcaagagaagaagcaacagcagcuucuucagcagacugaacuggcugacccaccugaaguucaaguaccccgcccugaacgugaccaugcccaacaacgaggaguucgacaagcuguacaucuggggcgugcaccaccccggcaccuacaacgaccagaucagccuguacgcccaggccagcggcagaaucaccgugagcaccaagagaagccagcagaccgugauccccaacaucggcagcagacccagagugagagacauccccagcagaaucagcaucuacuggaccaucgugaagcccggcgacauccugcugaucaacagcaccggcaaccugaucgcccccagaggcuacuucaagaucagaagcggcaagagcagcaucaugagaagcgacgcccccaucggcaagugcaacagcgagugcaucacccccaacggcagcauccccaacgacaagcccuuccagaacgugaacagaaucaccuacggcgccugccccagauacgugaagcagaacacccugaagcuggccaccggcaugagaaacgugcccgagaagcagaccagaggcaucuucggcgccaucgccggcuucaucgagaacggcugggagggcaugguggacggcugguacggcuucagacaccagaacagcgagggcaucggccaggccgccgaccugaagagcacccaggccgccaucgaccagaucaacggcaagcugaacagacugaucggcaagaccaacgagaaguuccaccagaucgagaaggaguucagcgagguggagggcagaauccaggaccuggagaaguacguggaggacaccaagaucgaccuguggagcuacaacgccgagcugcugguggcccuggagaaccagcacaccaucgaccugaccgaccuggagaugaacaagcuguucgagagaaccaagaagcagcugagagagaacgccgaggacaugggcaacggcugcuucaagaucuaccacaagugcgacaacgccugcaucggcagcaucagaaacggcaccuacgaccacgacguguacagagacgaggcccugaacaacagauuccagaucaagggcguggagcugaagagcggcuacaaggacuggauccuguggaucagcuucgccaucagcugcuuccugcugugcguggcccugcugggcuucaucaugugggccugccagaagggcaacaucagaugcaacaucugcaucuga

SEQ ID NO: 160779 - RNA, 1701 nt, Artificial Sequence; identical to SEQ ID NO: 160693
  derived and/or modified CDS sequence (opt4) from hemagglutinin__InfluenzaA__ABD16472

SEQ ID NO: 160780 - RNA, 1701 nt, Artificial Sequence; identical to SEQ ID NO: 160693
  derived and/or modified CDS sequence (opt4) from hemagglutinin__InfluenzaA__ABD16483

SEQ ID NO: 160781 - RNA, 1701 nt, Artificial Sequence; identical to SEQ ID NO: 160690
  derived and/or modified CDS sequence (opt4) from hemagglutinin__InfluenzaA__ABD16494

SEQ ID NO: 160782 - RNA, 1701 nt, Artificial Sequence; identical to SEQ ID NO: 160693
  derived and/or modified CDS sequence (opt4) from hemagglutinin__InfluenzaA__ABD16505

SEQ ID NO: 160783 - RNA, 1701 nt, Artificial Sequence
  derived and/or modified CDS sequence (opt4) from hemagglutinin__InfluenzaA__ABD16516
augaagaccaucaucgcccugagcuacauccugugcaugguguucgcccagaagcugcccggcaacgacaacagcaccgccacccugugccugggccaccacgccgugcccaacggcaccaucgugaagaccaucaccaacgaccagaucgaggugaccaacgccaccgagcuggugcagagcagcagcaccggcggcaucugcgacagcccccaccagauccuggacggcgagaacugcacccugaucgacgcccugcugggcgacccccagugcgacggcuuccagaacaagaagugggaccuguucaucgagagaagcaaggccuacagcaacugcuaccccuacgacgugcccgacuacgccagccugagaagccugguggccagcagcggcacccuggaguucaacaacgagagcuucaacuggaccggcgugacccagaacggcaccagcagcgccugcaagagaagaagcaacaacagcuucuucagcagacugaacuggcugacccaccugaaguucaaguaccccgcccugaacgugaccaugcccaacaacgagaaguucgacaagcuguacaucuggggcgugcaccaccccggcaccgacaacgaccagaucagccuguacgcccaggccagcggcagaaucaccgugagcaccaagagaagccagcagaccgugauccccaacaucggcagcagacccagagugagagacauccccagcagaaucagcaucuacuggaccaucgugaagcccggcgacauccugcugaucaacagcaccggcaaccugaucgcccccagaggcuacuucaagaucagaagcggcaagagcagcaucaugagaagcgacgcccccaucgacaagugcaacagcgagugcaucacccccaacggcagcauccccaacgacaagcccuuccagaacgugaacagaaucaccuacggcgccugccccagauacgugaagcagaacacccugaagcuggccaccggcaugagaaacgugcccgagaagcagaccagaggcaucuucggcgccaucgccggcuucaucgagaacggcugggagggcaugguggacggcugguacggcuucagacaccagaacagcgagggcaucggccaggccgccgaccugaagagcacccaggccgccaucaaccagaucaacggcaagcugaacagacugaucggcaagaccaacgagaaguuccaccagaucgagaaggaguucagcgagguggagggcagaauccaggaccuggagaaguacguggaggacaccaagguggaccuguggagcuacaacgccgagcugcugguggcccuggagaaccagcacaccaucgaccugaccgacagcgagaugaacaagcuguucgagagaaccaagaagcagcugagagagaacgccgaggacaugggcaacggcugcuucaagaucuaccacaagugcgacaacgccugcaucggcagcaucagaaacggcaccuacgaccacgacguguacagagacgaggcccugaacaacagauuccagaucaagggcguggagcugaagagcggcuacaaggacuggauccuguggaucagcuucgccaucagcugcuuccugcugugcguggcccugcugggcuucaucaugugggccugccagaagggcaacaucagaugcaacaucugcaucuga

SEQ ID NO: 160784 - RNA, 1701 nt, Artificial Sequence
  derived and/or modified CDS sequence (opt4) from hemagglutinin__InfluenzaA__ABD16527
augaagaccaucaucgcccugagcuacauccugugccugguguucgcccagaagcugcccgagaacgacaacagcaccgccacccugugccugggccaccacgccgugcccaacggcaccaucgugaagaccaucaccaacgaccagaucgaggugaccaacgccaccgagcuggugcagagcagcagcaccggcggcaucugcgacagcccccaccagauccuggacggcgagaacugcacccugaucgacgcccugcugggcgacccccagugcgacggcuuccagaacaagaagugggaccuguucguggagagaagcaaggccuacagcaacugcuaccccuacgacgugcccgaccacgccagccugagaagccugguggccagcagcggcacccuggaguucaacaacgagagcuucgacuggaccggcgugacccagaacggcaccagcagcgccugcaagagaagaagcaacaagagcuucuucagcagacugaacuggcugacccaccugaaguacaaguaccccgcccugaacgugaccaugcccaacaacgagaaguucgacaagcuguacaucuggggcgugcaccaccccggcaccgacagcgaccagaucagccuguacgcccaggccagcggcagaaucaccgugagcaccaagagaagccagcagaccgugauccccaacaucggcagcagacccagagugagagacgugagcagcagaaucagcaucuacuggaccaucgugaagcccggcgacauccugcugaucaacagcaccggcaaccugaucgcccccagaggcuacuucaagaucagaagcggcaagagcagcaucaugagaagcgacgcccccaucggcaagugcaacagcgagugcaucacccccaacggcagcauccccaacgacaagcccuuccagaacgugaacagaaucaccuacggcgccugccccagauacgugaagcagaacacccugaagcuggccaccggcaugagaaacgugcccgagaagcagaccagaggcaucuucggcgccaucgccggcuucaucgagaacggcugggagggcaugguggacggcugguacggcuucagacaccagaacagcgagggcaccggccaggccgccgaccugaagagcacccaggccgccaucaaccagaucaacggcaagcugaacagacugaucggcaagaccaacgagaaguuccaccagaucgagaaggaguucagcgagguggagggcagaauccaggaccuggagaaguacguggaggacaccaagaucgaccuguggagcuacaacgccgagcugcugguggcccuggagaaccagcacaccaucgaccugaccgacagcgagaugaacaagcuguucgagagaaccaagaagcagcugagagagaacgccgaggacaugggcaacggcugcuucaagaucuaccacaagugcgacaacgccugcaucggcagcaucagaaacggcaccuacgaccacgacguguacagagacgaggcccugaacaacagauuccagaucaagggcguggagcugaagagcggcuacaaggacuggauccuguggaucagcuucgccaucagcugcuuccugcugugcguggcccugcugggcuucaucaugugggccugccagaagggcaacaucagaugcgacaucugcaucuga

SEQ ID NO: 160785 - RNA, 1701 nt, Artificial Sequence; identical to SEQ ID NO: 160576
  derived and/or modified CDS sequence (opt4) from hemagglutinin__InfluenzaA__ABD16538

SEQ ID NO: 160786 - RNA, 1701 nt, Artificial Sequence
  derived and/or modified CDS sequence (opt4) from hemagglutinin__InfluenzaA__ABD16549
augaagaccaucaucgcccugagcuacauccugugccugguguucgcccagaagcugcccggcaacgacaacagcaccgccacccugugccugggccaccacgccgugcccaacggcaccaucgugaagaccaucaccaacgaccagaucgaggugaccaacgccaccgagcuggugcagagcagcagcaccggcggcaucugcgacagcccccaccagauccuggacggcgagaacugcacccugaucgacgcccugcugggcgacccccagugcgacggcuuccagaacaagaagugggaccuguucguggagagaagcaaggccuacagcaacugcuaccccuacgacgugcccgacuacgccagccugagaagccugaucgccagcagcggcacccuggaguucaacaacgagagcuucaacuggaccggcgugacccagaacggcaccagcagcgccugcaagagaagaagcaacagcagcuucuucagcagacugaacuggcugacccaccugaaguucaaguaccccgcccugaacgugaccaugcccaacaacgaggaguucgacaagcuguacaucuggggcgugcaccaccccggcaccuacaacgaccagaucagccuguacgcccaggccagcggcagaaucaccgugagcaccaagagaagccagcagaccgugauccccaacaucggcagcagacccagagugagagacauccccagcagaaucagcaucuacuggaccaucgugaagcccggcgacauccugcugaucaacagcaccggcaaccugaucgcccccagaggcuacuucaagaucagaagcggcaagagcagcaucaugagaagcgacgcccccaucggcaagugcaacagcgagugcaucacccccaacggcagcauccccaacgacaagcccuuccagaacgugaacagaaucaccuacggcgccugccccagauacgugaagcagaacacccugaagcuggccaccggcaugagaaacgugcccgagaagcagaccagaggcaucuucggcgccaucgccggcuucaucgagaacggcugggagggcaugguggacggcugguacggcuucagacaccagaacagcgagggcaucggccaggccgccgaccugaagagcacccaggccgccaucgaccagaucaacggcaagcugaacagacugaucggcaagaccaacgagaaguuccaccagaucgagaaggaguucagcgagguggagggcagaauccaggaccuggagaaguacguggaggacaccaagaucgaccuguggagcuacaacgccgagcugcugguggcccuggagaaccagcacaccaucgaccugaccgacagcgagaugaacaagcuguucgagagaaccaagaagcagcugagagagaacgccgaggacaugggcaacggcugcuucaagaucuaccacaagugcgacaacgccugcaucggcagcaucagaaacggcaccuacgaccacgacguguacagagacgaggcccugaacaacagauuccagaucaagggcguggagcugaagagcggcuacaaggacuggauccuguggaucagcuucgccaucagcugcuuccugcugugcguggcccugcugggcuucaucgugugggccugccagaagggcaacaucagaugcaacaucugcaucuga

SEQ ID NO: 160787 - RNA, 1701 nt, Artificial Sequence; identical to SEQ ID NO: 160690
  derived and/or modified CDS sequence (opt4) from hemagglutinin__InfluenzaA__ABD16560

SEQ ID NO: 160788 - RNA, 1701 nt, Artificial Sequence
  derived and/or modified CDS sequence (opt4) from hemagglutinin__InfluenzaA__ABD16571
augaagaccaucaucgcccugagcuacaucuucugccuggugguggcccagaagcugcccggcaacgacaacagcaccgccacccugugccugggccaccacgccgugcccaacggcaccaucgugaagaccaucaccaacgaccagaucgaggugaccaacgccaccgagcuggugcagagcagcagcaccggcagaaucugcaacagcccccacagaauccuggacggcaagaacugcacccugaucgacgcccugcugggcgacccccacugcgacagcuuccagaacaaggagugggaccuguucguggagagaagcaaggccuacagcaacugcuaccccuacgacgugcccgacuacgccagccugagaagccugguggccagcagcggcacccuggaguucaucaacgaggacuucaacuggaccggcguggcccagagcggcggcagcuacgccugcaagagaggcagcgugaacagcuucuucagcagacugaacuggcugcacgagagcgaguacaaguaccccgcccugaacgugaccaugcccaacaacggcaaguucgacaagcuguacaucuggggcgugcaccaccccagcaccgacagagagcagaccaaccuguacgugagagccagcggcagagugaccgugagcaccaagagaagccagcagaccgugauccccaacaucggcagcagacccugggugagaggccugagcagcagaaucagcaucuacuggaccaucgugaagcccggcgacauccugcugaucaacagcaccggcaaccugaucgcccccagaggcuacuucaagaucagaaccggcaagagcagcaucaugagaagcgacgcccccaucggcaccugcagcagcgagugcaucacccccaacggcagcauccccaacgacaagcccuuccagaacgugaacagaaucaccuacggcgccugccccagauacgugaagcagaacacccugaagcuggccaccggcaugagaaacgugcccgagaagcagaccagaggcaucuucggcgccaucgccggcuucaucgagaacggcugggagggcaugguggacggcugguacggcuucagacaccagaacagcgagggcaccggccaggccgccgaccugaagagcacccaggccgccaucgaccagaucaacggcaagcugaacagacugaucgagaagaccaacgagaaguuccaccagaucgagaaggaguucagcgagguggagggcagaauccaggaccuggagaaguacguggaggacaccaagaucgaccuguggagcuacaacgccgagcugcugguggcccuggagaaccagcacaccaucgaccugaccgacagcgagaugaacaagcuguucgagaagaccagaaagcagcugagagagaacgccgaggacaugggcaacggcugcuucaagaucuaccacaagugcgacaacgccugcaucggcagcaucagaaacggcaccuacgaccacgacguguacagagacgaggcccugaacaacagauuccagaucaagggcguggagcugaagagcggcuacaaggacuggauccuguggaucagcuucgccaucagcugcuuccugcugugcguggugcugcugggcuucaucaugugggccugccagaagggcaacaucagaugcaacaucugcaucuga

SEQ ID NO: 160789 - RNA, 1701 nt, Artificial Sequence
  derived and/or modified CDS sequence (opt4) from hemagglutinin__InfluenzaA__ABD16718
augaagaccaucaucgcccugagcuacaucuucugccugguguucgcccagaagcugcccggcaacgacaacagcaccgccacccugugccugggccaccacgccgugcccaacggcacccuggugaagaccaucaccaacgaccagaucgaggugaccaacgccaccgagcuggugcagagcagcagcaccggcagaaucugcgacagcccccacagaauccuggacggcaagaacugcacccugaucgacgcccugcugggcgacccccacugcgacggcuuccagaacgagaagugggaccuguucaucgagagaagcaaggccuucagcaacugcuaccccuacgacgugcccgacuacgccagccugagaagccugguggccagcagcggcacccuggaguucaucaacgagggcuucaacuggaccggcgugacccagagcggcggcagcuacgccugcaagagaggcagcgugaacagcuucuucagcagacugaacuggcuguacgagagcgaguacaaguaccccgcccugaacgugaccaugcccaacaacggcaaguucgacaagcuguacaucuggggcgugcaccaccccaucaccgagaaggagcagaccaaccuguacgugagagccagcggcagagugaccgugagcaccaagagaagccagcagaccgugauccccaacaucggcagcagacccugggugagaggccugagcagcagaaucagcaucuacuggaccaucgugaagcccggcgacauccugcugaucaacagcaccggcaaccugaucgcccccagaggcuacuucaagaucagaaccggcaagagcagcaucaugagaagcgacgcccccaucggcaccugcagcagcgagugcaucacccccaacggcagcauccccaacgacaagcccuuccagaacgugaacaagaucaccuacggcgccugccccagauacgugaagcagaacacccugaagcuggccaccggcaugagaaacgugcccgagaagcagaccagaggcaucuucggcgccaucgccggcuucaucgagaacggcugggagggcaugguggacggcugguacggcuucagacaccagaacagcgagggcaccggccaggccgccgaccugaagagcacccaggccgccaucgaccagaucaacggcaagcugaacagacugaucgagaagaccaacgagaaguuccaccagaucgagaaggaguucagcgagguggagggcagaauccaggaccuggagaaguacguggaggacaccaagaucgaccuguggagcuacaacgccgagcugcugguggcccuggagaaccagcacaccaucgaccugaccgacagcgagaugaacaagcuguucgagaagaccagaaagcagcugagagagaacgccgaggacaugggcaacggcugcuucaagaucuaccacaagugcgacaacgccugcaucggcagcaucagaaacggcaccuacgaccacgacguguacagagacgaggcccugaacaacagauuccagaucaagggcguggagcugaagagcggcuacaaggacuggauccuguggaucagcuucgccaucagcugcuuccugcugugcguggugcugcugggcuucaucaugugggccugccagaagggcaacaucagaugcaacaucugcaucuga

SEQ ID NO: 160790 - RNA, 1701 nt, Artificial Sequence
  derived and/or modified CDS sequence (opt4) from hemagglutinin__InfluenzaA__ABD16729
augaagaccaucaucgcccugagcuacaucuucugccugguguucgcccagaagcugcccggcaacgacaacagcaccgccacccugugccugggccaccacgccgugcccaacggcacccuggugaagaccaucaccaacgaccagaucgaggugaccaacgccaccgagcuggugcagagcagcagcaccggcagaaucugcgacagcccccacagaauccuggacggcaagaacugcacccugaucgacgcccugcugggcgacccccacugcgacggcuuccagaacgagaagugggaccuguucguggagagaagcaaggccuucagcaacugcuaccccuacgacgugcccgacuacgccagccugagaagccugguggccagcagcggcacccuggaguucaucaacgagggcuucaacuggaccggcgugacccagaacggcggcagcuacaccugcaagagaggcagcgugaacagcuucuucagcagacugaacuggcuguacgagagcgagagcaaguaccccgugcugaacgugaccaugcccaacaacggcaaguucgacaagcuguacaucuggggcgugcaccaccccagcaccgacaaggagcagaccaaccuguacgugagagccagcggcaaggugaccgugagcaccaagagaagccagcagaccgugauccccaacaucggcagcagacccugggugagaggccugagcagcagaaucagcaucuacuggaccaucgugaagcccggcgacauccugcugaucaacagcaccggcaaccugaucgcccccagaggcuacuucaagaucagaaccggcaagagcagcaucaugagaagcgacgcccccaucggcaccugcagcagcgagugcaucacccccaacggcagcauccccaacgacaagcccuuccagaacgugaacaagaucaccuacggcgccugccccagauacgugaagcagaacacccugaagcuggccaccggcaugagaaacgugcccgagaagcagaccagaggcaucuucggcgccaucgccggcuucaucgagaacggcugggagggcaugguggacggcugguacggcuucagacaccagaacagcgagggcaccggccaggccgccgaccugaagagcacccaggccgccaucgaccagaucaacggcaagcugaacagacugaucgagaagaccaacgagaaguuccaccagaucgagaaggaguucagcgagguggagggcagaauccaggaccuggagaaguacguggaggacaccaagaucgaccuguggagcuacaacgccgagcugcugguggcccuggagaaccagcacaccaucgaccugaccgacagcgagaugaacaagcuguucgagaagaccagaaagcagcugagagagaacgccgaggacaugggcaacggcugcuucaagaucuaccacaagugcgacaacgccugcaucggcagcaucagaaacggcaccuacgaccacgacguguacagagacgaggcccugaacaacagauuccagaucaagggcguggagcugaagagcggcuacaaggacuggauccuguggaucagcuucgccaucagcugcuuccugcugugcguggugcugcugggcuucaucaugugggccugccagaagggcaacaucagaugcaacaucugcaucuga

SEQ ID NO: 160791 - RNA, 1701 nt, Artificial Sequence
  derived and/or modified CDS sequence (opt4) from hemagglutinin__InfluenzaA__ABD16751
augaagaccaucaucgcccugagcuacaucuucugccugguguucgcccaggaccugcccggcaacgacaacagcaccgccacccugugccugggccaccacgccgugcccaacggcacccuggugaagaccaucaccaacgaccagaucgaggugaccaacgccaccgagcuggugcacagcagcagcaccggcaagaucugcgacaacccccacagaauccuggacggcaucaacugcacccugaucgacgcccugcugggcgacccccacugcgacggcuuccagaacgagaagugggaccuguucguggagagaagcaaggccuucagcaacugcuaccccuacgacgugcccgacuacgccagccugagaagccugguggccagcagcggcacccuggaguucaucaacgagggcuucaacuggaccggcgugacccagaacggcggcagcagcgccugcaagagaggccccgacaacggcuucuucagcagacugaacuggcuguacaagagcggcagcaccuaccccgugcagaacgugaccaugcccaacaacgacaacagcgacaagcuguacaucuggggcgugcaccaccccagcaccgacaaggagcagaccgaccuguacgugcaggccagcggcaaggugaccgugagcaccaagagaagccagcagaccgugauccccaacgugggcagcagacccugggugagaggccugagcagcagagugagcaucuacuggaccaucgugaagcccggcgacauccuggugaucaacagcaacggcaaccugaucgcccccagaggcuacuucaagaugagaaccggcaagagcagcaucaugagaagcgacgcccccaucggcaccugcagcagcgagugcaucacccccaacggcagcauccccaacgacaagcccuuccagaacgugaacaagaucaccuacggcgccugccccaaguacgugaagcagaacacccugaagcuggccaccggcaugagaaacgugcccgagaagcagaccagaggcaucuucggcgccaucgccggcuucaucgagaacggcugggagggcaugaucgacggcugguacggcuucagacaccagaacagcgagggcaccggccaggccgccgaccugaagagcacccaggccgccaucgaccagaucaacggcaagcugaacagagugaucgagaagaccaacgagaaguuccaccagaucgagaaggaguucagcgagguggagggcagaauccaggaccuggagaaguacguggaggacaccaagaucgaccuguggagcuacaacgccgagcugcugguggcccuggagaaccagcacaccaucgaccugaccgacagcgagaugaacaagcuguucgagaagaccagaagacagcugagagagaacgccgaggacaugggcaacggcugcuucaagaucuaccacaagugcgacaacgccugcaucggcagcaucagaaacggcaccuacgaccacgacguguacagagacgaggcccugaacaacagauuccagaucaagggcguggagcugaagagcggcuacaaggacuggauccuguggaucagcuucgccaucagcugcuuccugcugugcguggugcugcugggcuucaucaugugggccugccagaagggcaacaucagaugcaacaucugcaucuga

SEQ ID NO: 160792 - RNA, 1701 nt, Artificial Sequence; identical to SEQ ID NO: 160653
  derived and/or modified CDS sequence (opt4) from hemagglutinin__InfluenzaA__ABD16762

SEQ ID NO: 160793 - RNA, 1701 nt, Artificial Sequence; identical to SEQ ID NO: 160365
  derived and/or modified CDS sequence (opt4) from hemagglutinin__InfluenzaA__ABD17323

SEQ ID NO: 160794 - RNA, 1701 nt, Artificial Sequence; identical to SEQ ID NO: 160622
  derived and/or modified CDS sequence (opt4) from hemagglutinin__InfluenzaA__ABD38134

SEQ ID NO: 160795 - RNA, 1698 nt, Artificial Sequence; identical to SEQ ID NO: 160361
  derived and/or modified CDS sequence (opt4) from hemagglutinin__InfluenzaA__ABD60779

SEQ ID NO: 160796 - RNA, 1701 nt, Artificial Sequence
  derived and/or modified CDS sequence (opt4) from hemagglutinin__InfluenzaA__ABD60790
augaagaccaucaucgcccugagcuacaucuucugccuggugcugggccaggacuuccccggcaacgacaacagcaccgccacccugugccugggccaccacgccgugcccaacggcacccuggugaagaccaucaccaacgaccagaucgaggugaccaacgccaccgagcuggugcagagcagcagcaccggcaagaucugcaacaacccccacagaauccuggacggcaucgacugcacccugaucgacgcccugcugggcgacccccacugcgacggcuuccagaacgagaccugggaccuguucguggagagaagcaaggccuucagcaacugcuaccccuacgacgugcccgacuacgccagccugagaagccugguggccagcagcggcacccuggaguucaucaacgagggcuucaccuggaccggcgugacccagaacggcggcagcaacgccugcaagagaggccccgacagcggcuucuucagcagacugaacuggcuguacaagagcggcagcaccuaccccgugcugaacgugaccaugcccaacaacgacaacuucgacaagcuguacaucuggggcgugcaccaccccagcaccgaccaggagcagaccagccuguacgugcaggccagcggcagagugaccgugagcaccaagagaagccagcagaccaucauccccaacaucggcagcagacccugggugagaggccugagcagcagaaucagcaucuacuggaccaucgugaagcccggcgacauccugaucaucaacagcaacggcaaccugaucgcccccagaggcuacuucaagaugagaaccggcaagagcagcaucaugagaagcgacgcccccaucggcaccugcaucagcgagugcaucacccccaacggcagcauccccaacgacaagcccuuccagaacgugaacaagaucaccuacggcgccugccccaaguacgugaagcagaacacccugaagcuggccaccggcaugagaaacgugcccgagaagcagaccagaggcaucuucggcgccaucgccggcuucaucgagaacggcugggagggcaugaucgacggcugguacggcuucagacaccagaacagcgagggcaccggccaggccgccgaccugaagagcacccaggccgccaucgaccagaucaacggcaagcugaacagaaucaucgagaagaccaacgagaaguuccaccagaucgagaaggaguucagcgagguggagggcagaauccaggaccuggagaaguacguggaggacaccaagaucgaccuguggagcuacaacgccgagcugcugguggcccuggagaaccagcacaccaucgaccugaccgacagcgagaugaacaagcuguucgagaagaccagaagacagcugagagagaacgccgaggacaugggcaacggcugcuucaagaucuaccacaagugcgacaacgccugcaucggcagcaucagaaacggcaccuacgaccacgacguguacagagacgaggcccugaacaacagauuccagaucaagggcguggagcugaagagcggcuacaaggacuggauccuguggaucagcuucgccaucagcugcuuccugcugugcguggugcugcugggcuucaucaugugggccugccagaagggcaacaucagaugcaacaucugcaucuga

SEQ ID NO: 160797 - RNA, 1701 nt, Artificial Sequence
  derived and/or modified CDS sequence (opt4) from hemagglutinin__InfluenzaA__ABD60801
augaagaccaucaucgcccugagcuacauccugugccugguguucgcccagaagcugcccggcaacgacaacagcaccgccacccugugccugggccaccacgccgugcccaacggcacccuggugaagaccaucaccaacgaccagaucgaggugaccaacgccaccgagcuggugcagagcagcagcaccggcagacugugcgacagcccccacagaauccuggacggcaagaacugcacccugaucgacgcccugcugggcgacccccacugcgacggcuuccagaacaaggagugggaccuguucguggagagaagcaaggccuacagcaacugcuaccccuacgacgugcccgacuacgccagccugagaagccugguggccagcagcggcacccuggaguucaucaacgaggacuucaacuggaccggcguggcccaggacggcggcagcuacgccugcagaagaggcagcgugaacagcuucuucagcagacugaacuggcugcacaagcuggaguacaaguaccccgcccugaacgugaccaugcccaacaacggcaaguucgacaagcuguacaucuggggcgugcaccaccccagcaccgacagcgaccagaccagccuguacgugagagccagcggcagagugaccgugagcaccaagagaagccagcagaccgugauccccaacaucggcagcagacccugggugagaggccagagcagcagaaugagcaucuacuggaccaucgugaagcccggcgacauccugcugaucaacagcaccggcaaccugaucgcccccagaggcuacuucaagaucagaaacggcaagagcagcaucaugagaagcgacgcccccaucggcaacugcagcagcgagugcaucacccccaacggcagcauccccaacgacaagcccuuccagaacgugaacagaaucaccuacggcgccugccccagauacgugaagcagcacacccugaagcuggccaccggcaugagaaacgugcccgagaagcagaccagaggcaucuucggcgccaucgccggcuucaucgagaacggcugggagggcaugguggacggcugguacggcuucagacaccagaacagcgagggcaccggccaggccgccgaccugaagagcacccaggccgccaucgaccagaucaacggcaagcugaacagacugaucgagaagaccaacgagaaguuccaccagaucgagaaggaguucagcgagguggagggcagaauccaggaccuggagaaguacguggaggacaccaagaucgaccuguggagcuacaacgccgagcugcugguggcccuggagaaccagcacaccaucgaccugaccgacagcgagaugaacaagcuguucgagagaaccagaaagcagcugagagagaacgccgaggacaugggcaacggcugcuucaagaucuaccacaagugcgacaacgccugcaucggcagcaucagaaacggcaccuacgaccacgacguguacagagacgaggcccugaacaacagauuccagaucaagggcguggagcugaagagcggcuacaaggacuggauccuguggaucagcuucgccaucagcugcuuccugcugugcguggugcugcugggcuucaucaugugggccugccagaagggcaacaucagaugcaacaucugcaucuga

SEQ ID NO: 160798 - RNA, 1701 nt, Artificial Sequence
  derived and/or modified CDS sequence (opt4) from hemagglutinin__InfluenzaA__ABD60812
augaagaccaucaucgcccugagcuacauccugugccugaucuucgcccagaagcugcccggcaacgacaacagcaccgccacccugugccugggccaccacgccgugcccaacggcaccaucgugaagaccaucaccaacgaccagaucgaggugaccaacgccaccgagcuggugcagagcagcagcaccggcggcaucugcgacagcccccaccagauccuggacggcgagaacugcacccugaucgacgcccugcugggcgacccccagugcgacggcuuccagaacaagaagugggaccuguucguggagagaagcaaggccuacagcaacugcuaccccuacgacgugcccgacuacgccagccugagaagccugguggccagcagcggcacccuggaguucaacaacgagagcuucaacuggaccggcgugacccagaacggcaccagcagcgccugcaagagaagaagcaacaacagcuucuucagcagacugaacuggcugacccaccugaaguucaaguaccccgcccugaacgugaccaugcccaacaacgagaaguucgacaagcuguacaucuggggcgugcaccaccccggcaccgacaacgaccagaucuuccuguacgcccaggccagcggcagaaucaccgugagcaccaagagaagccagcagaccgugauccccagcaucggcagcagacccagagugagaaacauccccagcagaaucagcaucuacuggaccaucgugaagcccggcgacauccugcugaucaacagcaccggcaaccugaucgcccccagaggcuacuucaagaucagaagcggcaagagcagcaucaugagaagcgacgcccccaucggcaagugcaacagcgagugcaucacccccaacggcagcauccccaacgacaagcccuuccagaacgugaacagaaucaccuacggcgccugccccagauacgugaagcagaacacccugaagcuggccaccggcaugagaaacgugcccgagaagcagaccagaggcaucuucggcgccaucgccggcuucaucgagaacggcugggagggcaugguggacggcugguacggcuucagacaccagaacagcgagggcaucggccaggccgccgaccugaagagcacccaggccgccaucaaccagaucaacggcaagcugaacagacugaucggcaagaccaacgagaaguuccaccagaucgagaaggaguucagcgagguggagggcagaauccaggaccuggagaaguacguggaggacaccaagaucgaccuguggagcuacaacgccgagcugcugguggcccuggagaaccagcacaccaucgaccugaccgacagcgagaugaacaagcuguucgagagaaccaagaagcagcugagagagaacgccgaggacaugggcaacggcugcuucaagaucuaccacaagugcgacaacgccugcaucggcagcaucagaaacggcaccuacgaccacgacguguacagagacgaggcccugaacaacagauuccagaucaagggcguggagcugaagagcggcuacaaggacuggauccuguggaucagcuucgccaucagcugcuuccugcugugcguggcccugcugggcuucaucaugugggccugccagaagggcaacaucagaugcaacaucugcaucuga

SEQ ID NO: 160799 - RNA, 1701 nt, Artificial Sequence; identical to SEQ ID NO: 160693
  derived and/or modified CDS sequence (opt4) from hemagglutinin__InfluenzaA__ABD60823

SEQ ID NO: 160800 - RNA, 1701 nt, Artificial Sequence
  derived and/or modified CDS sequence (opt4) from hemagglutinin__InfluenzaA__ABD60845
augaagaccaucaucgcccugagcuacauccugugccugguguucgcccagaagcugcccgugaacgacaacagcaccgccacccugugccugggccaccacgccgugcccaacggcacccuggugaagaccaucaccaacgaccacaucgaggugaccaacgccaccgagcuggugcagagcagcagcaccggcagaaucugcgacagcccccaccagauccuggacggcgagaacugcacccugaucgacgcccugcugggcgacccccacugcgacggcuuccagaacaaggagugggaccuguucguggagagaagcaccgccuacagcaacugcuaccccuacgacgugcccgacuacgccagccugagaagccugguggccagcagcggcacccuggaguucaacaacgagagcuucaacuggaccggcguggaccagaacggcaccagcagcgccugcaagagaagaagcaccaagagcuucuucagcagacugaacuggcugcaccagcugaaguacaaguaccccgcccugaacgugaccaugcccaacaacgagaaguucgacaagcuguacaucuggggcgugcaccaccccagcaccgacagcgaccagaucagccuguacgcccaggccagcggcagagugaccgugagcaccaagagaagccagcagaccgugacccccaacaucggcagcagacccugggugagaggcgugagcagcagaaucagcaucuacuggaccaucgugaagcccggcgacauccugcugaucaacagcaccggcaaccugaucgcccccagaggcuacuucaagaucagaagcggcaagagcagcaucaugagaagcaacgcccugaucggcaagugcaacagcgagugcaucacccccaacggcagcauccccaacgacaagcccuuccagaacgugaacagaaucaccuacggcgccugccccagauacgugaagcagaacacccugaagcuggccaccggcaugagaaacgugcccgagaagcagaccagaggcaucuucggcgccaucgccggcuucaucgagaacggcugggagggcaugguggacggcugguacggcuucagacaccagaacagcgagggcaccggccaggccgccgaccugaagagcacccaggccgccaucaaccagaucaacggcaagcugaacagacugaucgagaagaccaacgagaaguuccaccagaucgagaaggaguucagcgagguggagggcagaauccaggaccuggagaaguacguggaggacaccaagaucgaccuguggagcuacaacgccgagcugcugguggcccuggagaaccagcacaccaucgaccugaccgacagcgagaugaacaagcuguucgagagaaccagaaagcagcugagagagaacgccgaggacaugggcaacggcugcuucaagaucuaccacaagugcgacaacgccugcaucggcagcaucagaaacggcaccuacgaccacgacguguacagagacgaggcccugaacaacagauuccagaucaagggcguggagcugaagagcggcuacaaggacuggauccuguggaucagcuucgccaucagcugcuuccugcugugcguggugcugcugggcuucaucaugugggccugccagaagggcaacaucagaugcaacaucugcaucuga

SEQ ID NO: 160801 - RNA, 1698 nt, Artificial Sequence
  derived and/or modified CDS sequence (opt4) from hemagglutinin__InfluenzaA__ABD60878
augaaggugaagcugcuggugcugcugugcaccuucaccgccaccuacgccgacaccaucugcaucggcuaccacgccaacaacagcaccgacaccguggacaccgugcuggagaagaacgugaccgugacccacagcgugaaccugcuggaggacagccacaacggcaagcugugccugcugaagggcaucgccccccugcagcugggcaacugcagcguggccggcuggauccugggcaaccccgagugcgagcugcugaucagcaaggagagcuggagcuacaucguggagacccccaaccccgagaacggcaccugcuaccccggcuacuucgccgacuacgaggagcugagagagcagcugagcagcgugagcagcuucgagagauucgagaucuuccccaaggagagcagcuggcccaaccacaccgugaccggcgugagcgccagcugcagccacaacggcaagagcagcuucuacagaaaccugcuguggcugaccggcaagaacggccuguaccccaaccugagcaagagcuacgccaacaacaaggagaaggaggugcuggugcuguggggcgugcaccacccccccaacaucggcgaccagaaggcccuguaccacaccgagaacgccuacgugagcguggugagcagccacuacagcagaagauucacccccgagaucgccaagagacccaaggugagagaccaggagggcagaaucaacuacuacuggacccugcuggagcccggcgacaccaucaucuucgaggccaacggcaaccugaucgcccccagauacgccuucgcccugagcagaggcuucggcagcggcaucaucaccagcaacgcccccauggacgagugcgacgccaagugccagaccccccagggcgccaucaacagcagccugcccuuccagaacgugcaccccgugaccaucggcgagugccccaaguacgugagaagcgccaagcugagaauggugaccggccugagaaacauccccagcauccagagcagaggccuguucggcgccaucgccggcuucaucgagggcggcuggaccggcaugguggacggcugguacggcuaccaccaccagaacgagcagggcagcggcuacgccgccgaccagaagagcacccagaacgccaucaacggcaucaccaacaaggugaacagcgugaucgagaagaugaacacccaguucaccgccgugggcaaggaguucaacaagcuggagagaagaauggagaaccugaacaagaagguggacgacggcuuccuggacaucuggaccuacaacgccgagcugcuggugcugcuggagaacgagagaacccuggacuuccacgacagcaacgugaagaaccuguacgagaaggugaagagccagcugaagaacaacgccaaggagaucggcaacggcugcuucgaguucuaccacaagugcaacaacgagugcauggagagcgugaagaacggcaccuacgacuaccccaaguacagcgaggagagcaagcugaacagagagaagaucgacggcgugaagcuggagagcaugggcguguaccagauccuggccaucuacagcaccguggccagcagccuggugcugcuggugagccugggcgccaucagcuucuggaugugcagcaacggcagccugcagugcagaaucugcaucuga

SEQ ID NO: 160802 - RNA, 1698 nt, Artificial Sequence
  derived and/or modified CDS sequence (opt4) from hemagglutinin__InfluenzaA__ABD60889
augaaggugaagcugcuggugcugcugugcaccuucaccgccaccuacgccgacaccaucugcaucggcuaccacgccaacaacagcaccgacaccguggacaccgugcuggagaagaacgugaccgugacccacagcgugaaccugcuggaggacagccacaacggcaagcugugccugcugaagggcaucgccccccugcagcugggcaacugcagcguggccggcuggauccugggcaaccccgagugcgagcugcugaucagcaaggagagcuggagcuacaucguggagacccccaaccccgagaacggcaccugcuaccccggcuacuucgccgacuacgaggagcugagagagcagcugagcagcgugagcagcuucgagagauucgagaucuuccccaaggagagcagcuggcccaaccacaccgugaccggcgugagcgccagcugcagccacaacggcaagagcagcuucuacagaaaccugcuguggcugaccggcaagaacggccuguaccccaaccugagcaagagcuacgccaacaacaaggagaaggaggugcuggugcuguggggcgugcaccacccccccaacaucggcgaccagagagcccuguaccacaccgagaacgccuacgugagcguggugagcagccacuacagcagaagauucacccccgagaucgccaagagacccaaggugagagaccaggagggcagaaucaacuacuacuggacccugcuggagcccggcgacaccaucaucuucgaggccaacggcaaccugaucgcccccagauacgccuucgcccugagcagaggcuucggcagcggcaucaucaccagcaacgcccccauggacgagugcgacgccaagugccagaccccccagggcgccaucaacagcagccugcccuuccagaacgugcaccccgugaccaucggcgagugccccaaguacgugagaagcgccaagcugagaauggugaccggccugagaaacauccccagcauccagagcagaggccuguucggcgccaucgccggcuucaucgagggcggcuggaccggcaugguggacggcugguacggcuaccaccaccagaacgagcagggcagcggcuacgccgccgaccagaagagcacccagaacgccaucaacggcaucaccaacaaggugaacagcgugaucgagaagaugaacacccaguucaccgccgugggcaaggaguucaacaagcuggagagaagaauggagaaccugaacaagaagguggacgacggcuuccuggacaucuggaccuacaacgccgagcugcuggugcugcuggagaacgagagaacccuggacuuccacgacagcaacgugaagaaccuguacgagaaggugaagagccagcugaagaacaacgccaaggagaucggcaacggcugcuucgaguucuaccacaagugcaacaacgagugcauggagagcgugaagaacggcaccuacgacuaccccaaguacagcgaggagagcaagcugaacagagagaagaucgacggcgugaagcuggagagcaugggcguguaccagauccuggccaucuacagcaccguggccagcagccuggugcugcuggugagccugggcgccaucagcuucuggaugugcagcaacggcagccugcagugcagaaucugcaucuga

SEQ ID NO: 160803 - RNA, 1698 nt, Artificial Sequence
  derived and/or modified CDS sequence (opt4) from hemagglutinin__InfluenzaA__ABD60900
augaaggugaagagacuggugcugcugugcaccuucaccgccaccuacgccgacaccaucugcaucggcuaccacgccaacaacagcaccgacaccguggacaccgugcuggagaagaacgugaccgugacccacagcgugaaccugcuggaggacagccacaacggcaagcugugccugcugaagggcaucgccccccugcagcugggcaacugcagcguggccggcuggauccugggcaaccccgagugcgagcugcugaucagcaaggagagcuggagcuacaucguggagacccccaaccccgagaacggcaccugcuaccccggcuacuucgccgacuacgaggagcugagagagcagcugagcagcgugagcagcuucgagagauucgagaucuuccccaaggagagcagcuggcccaaccacaccgugaccggcgugagcgccagcugcagccacaacggcaagagcagcuucuacagaaaccugcuguggcugaccggcaagaacggccuguaccccaaccugagcaagagcuacgccaacaacaaggagaaggaggugcuggugcuguggggcgugcaccacccccccaacaucggcgaccagaaggcccuguaccacaccgagaacgccuacgugagcguggugagcagccacuacagcagaagauucacccccgagaucgccaagagacccaaggugagagaccaggagggcagaaucaacuacuacuggacccugcuggagcccggcgacaccaucaucuucgaggccaacggcaaccugaucgcccccagauacgccuucgcccugagcagaggcuucggcagcggcaucaucaccagcaacgcccccauggacgagugcgacgccaagugccagaccccccagggcgccaucaacagcagccugcccuuccagaacgugcaccccgugaccaucggcgagugccccaaguacgugagaagcgccaagcugagaauggugaccggccugagaaacauccccagcauccagagcagaggccuguucggcgccaucgccggcuucaucgagggcggcuggaccggcaugguggacggcugguacggcuaccaccaccagaacgagcagggcagcggcuacgccgccgaccagaagagcacccagaacgccaucaacggcaucaccaacaaggugaacagcgugaucgagaagaugaacacccaguucaccgccgugggcaaggaguucaacaagcuggagagaagaauggagaaccugaacaagaagguggacgacggcuuccuggacaucuggaccuacaacgccgagcugcuggugcugcuggagaacgagagaacccuggacuuccacgacagcaacgugaagaaccuguacgagaaggugaagagccagcugaagaacaacgccaaggagaucggcaacggcugcuucgaguucuaccacaagugcaacaacgagugcauggagagcgugaagaacggcaccuacgacuaccccaaguacagcgaggagagcaagcugaacagagagaagaucgacggcgugaagcuggagagcaugggcguguaccagauccuggccaucuacagcaccguggccagcagccuggugcugcuggugagccugggcgccaucagcuucuggaugugcagcaacggcagccugcagugcagaaucugcaucuga

SEQ ID NO: 160804 - RNA, 1698 nt, Artificial Sequence
  derived and/or modified CDS sequence (opt4) from hemagglutinin__InfluenzaA__ABD60911
augaaggccaagcugauggugcugcugugcaccuucaccgccaccuacgccgacaccaucugcaucggcuaccacgccaacaacagcaccgacaccguggacaccgugcuggagaagaacgugaccgugacccacagcgugaaccugcuggaggacagccacaacggcaagcugugccugcugaagggcaucgccccccugcagcugggcaacugcagcguggccggcuggauccugggcaaccccgagugcgagcugcugaucagcaaggagagcuggagcuacaucguggagacccccaaccccgagaacggcaccugcuaccccggcuacuucgccgacuacgaggagcugagagagcagcugagcagcgugagcagcuucgagagauucgagaucuuccccaaggagagcagcuggcccaaccacaccgugaccggcgugagcgccagcugcagccacaacggcaagagcagcuucuacagaaaccugcuguggcugaccggcaagaacggccuguaccccaaccugagcaagagcuacgccaacaacaaggagaaggaggugcuggugcuguggggcgugcaccacccccccaacaucggcgaccagagagcccuguaccacaccgagaacgccuacgugagcguggugagcagccacuacagcagaagauucacccccgagaucgccaagagacccaaggugagagaccaggagggcagaaucaacuacuacuggacccugcuggagcccggcgacaccaucaucuucgaggccaacggcaaccugaucgcccccugguacgccuucgcccugagcagaggcuucggcagcggcaucaucaccagcaacgcccccaugggcgagugcgacgccaagugccagaccccccagggcgccaucaacagcagccugcccuuccagaacgugcaccccgugaccaucggcgagugccccaaguacgugagaagcgccaagcugagaauggugaccggccugagaaacauccccagcauccagagcagaggccuguucggcgccaucgccggcuucaucgagggcggcuggaccggcaugguggacggcugguacggcuaccaccaccagaacgagcagggcagcggcuacgccgccgaccagaagagcacccagaacgccaucgacggcaucaccaacaaggugaacagcaucaucgagaagaugaacacccaguucaccgccgugggcaaggaguucaacaagcuggagagaagaauggagaaccugaacaagaagguggacgacggcuuccuggacaucuggaccuacaacgccgagcugcuggugcugcuggagaacgagagaacccuggacuuccacgacagcaacgugaagaaccuguacgagaaggugaagagccagcugaagaacaacgccaaggagaucggcaacggcugcuucgaguucuaccacaagugcaacaacgagugcauggagagcgugaagaacggcaccuacgacuaccccaaguacagcgaggagagcaagcugaacagagagaagaucgacggcgugaagcuggagagcaugggcguguaccagauccuggccaucuacagcaccguggccagcagccuggugcugcuggugagccugggcgccaucagcuucuggaugugcagcaacggcagccugcagugcagaaucugcaucuga

SEQ ID NO: 160805 - RNA, 1701 nt, Artificial Sequence; identical to SEQ ID NO: 160092
  derived and/or modified CDS sequence (opt4) from hemagglutinin__InfluenzaA__ABD60922

SEQ ID NO: 160806 - RNA, 1701 nt, Artificial Sequence
  derived and/or modified CDS sequence (opt4) from hemagglutinin__InfluenzaA__ABD60933
augaaggccaagcugcuggugcugcugugcgcccugagcgccaccgacgccgacaccaucugcaucggcuaccacgccaacaacagcaccgacaccguggacaccgugcuggagaagaacgugaccgugacccacagcgugaaccugcuggaggacagccacaacggcaagcugugcagacugaagggcaucgccccccugcagcugggcaagugcagcaucgccggcuggauccugggcaaccccgagugcgagagccuggugagcaagaagagcuggagcuacaucgccgagacccccaacagcgagaacggcaccugcuaccccggcuacuucgccgacuacgaggagcugagagagcagcugagcagcgugagcagcuucgagagauucgagaucuuccccaaggagagaagcuggcccaagcacaacgugaccagaggcgugaccgccagcugcagccacaagggcaagagcagcuucuacagaaaccugcuguggcugaccgagaagaacggcagcuaccccaaccugagcaagagcuacgugaacaacaaggagaaggaggugcuggugcuguggggcgugcaccaccccagcaacaucgaggaccagaagaccaucuacagaaaggagaacgccuacgugagcguggugagcagcaacuacaacagaagauucacccccgagaucgccgagagacccaaggugagaggccaggccggcagaaucaacuacuacuggacccugcuggagcccggcgacaccaucaucuucgaggccaacggcaaccugaucgcccccuggcacgccuucgcccugaacagaggcuucggcagcggcaucaucaccagcaacgccagcauggacgagugcgacaccaagugccagaccccccagggcgccaucaacagcagccugcccuuccagaacauccaccccgugaccaucggcgagugccccaaguacgugagaagcaccaagcugagaauggugaccggccugagaaacauccccagcauccagagcagaggccuguucggcgccaucgccggcuucaucgagggcggcuggaccggcaugaucgacggcugguacggcuaccaccaccagaacgagcagggcagcggcuacgccgccgaccagaagagcacccagaacgccaucaacggcaucaccaacaaggugaacagcgugaucgagaagaugaacacccaguucaccgccgugggcaaggaguucaacaagcuggagaagagaauggagaaccugaacaagaagguggacgacggcuuccuggacaucuggaccuacaacgccgagcugcuggugcugcuggagaacgagagaacccuggacuuccacgacagcaacgugaagaaccuguacgagaaggugaagagccagcugaagaacaacgccaaggagaucggcaacggcugcuucgaguucuaccacaagugcaacaacgagugcauggagagcgugaagaacggcaccuacgacuaccccaaguacagcgaggagagcaagcugaacagagagaagaucgacggcgugaagcuggagagcaugggcguguaccagauccuggccaucuacagcaccguggccagcagccuggugcugcuggugagccugggcgccaucagcuucuggaugugcagcaacggcagccugcagugcagaaucugcaucuga

SEQ ID NO: 160807 - RNA, 1701 nt, Artificial Sequence
  derived and/or modified CDS sequence (opt4) from hemagglutinin__InfluenzaA__ABD60944
augaaggccaagcugcuggugcugcugugcgcccugagcgccaccgacgccgacaccaucugcaucggcuaccacgccaacaacagcaccgacaccguggacaccgugcuggagaagaacgugaccgugacccacagcgugaaccugcuggaggacagccacaacggcaagcugugcagacugaagggcaucgccccccugcagcugggcaagugcagcaucgccggcuggauccugggcaaccccgagugcgagagccuguucagcaagaagagcuggagcuacaucgccgagacccccaacagcgagaacggcaccugcuaccccggcuacuucgccgacuacgaggagcugagagagcagcugagcagcgugagcagcuucgagagauucgagaucuuccccaaggagagaagcuggcccaagcacaacgugaccagaggcgugaccgccagcugcagccacaagggcaagagcagcuucuacagaaaccugcuguggcugaccgagaagaacggcagcuaccccaaccugagcaagagcuacgugaacaacaaggagaaggaggugcuggugcuguggggcgugcaccaccccagcaacaucgaggaccagaagaccaucuacagaaaggagaacgccuacgugagcguggugagcagcaacuacaacagaagauucacccccgagaucgccgagagacccaaggugagaggccaggccggcagaaucaacuacuacuggacccugcuggagcccggcgacaccaucaucuucgaggccaacggcaaccugaucgcccccugguacgccuucgcccugagcagaggcuucggcagcggcaucaucaccagcaacgccagcauggacgagugcgacaccaagugccagaccccccagggcgccaucaacagcagccugcccuuccagaacgugcaccccgugaccaucggcgagugccccaaguacgugagaagcaccaagcugagaauggugaccggccugagaaacauccccagcauccagagcagaggccuguucggcgccaucgccggcuucaucgagggcggcuggaccggcaugaucgacggcugguacggcuaccaccaccagaacgagcagggcagcggcuacgccgccgaccagaagagcacccagaacgccaucaacggcaucaccaacaaggugaacagcgugaucgagaagaugaacacccaguucaccgccgugggcaaggaguucaacaagcuggagaagagaauggagaaccugaacaagaagguggacgacggcuuccuggacaucuggaccuacaacgccgagcugcuggugcugcuggagaacgagagaacccuggacuuccacgacagcaacgugaagaaccuguacgagaaggugaagagccagcugaagaacaacgccaaggagaucggcaacggcugcuucgaguucuaccacaagugcaacaacgagugcauggagagcgugaagaacggcaccuacgacuaccccaaguacagcgaggagagcaagcugaacagagagaagaucgacggcgugaagcuggagagcaugggcguguaccagauccuggccaucuacagcaccguggccagcagccuggugcugcuggugagccugggcgccaucagcuucuggaugugcagcaacggcagccugcagugcagaaucugcaucuga

SEQ ID NO: 160808 - RNA, 1701 nt, Artificial Sequence
  derived and/or modified CDS sequence (opt4) from hemagglutinin__InfluenzaA__ABD60955
augaaggccaagcugcuggugcugcugugcgccuucaccgccaccuacgccgacaccaucugcaucggcuaccacgccaacaacagcaccgacaccguggacaccgugcuggagaagaacgugaccgugacccacagcgugaaccugcuggaggacagccacaacggcaagcugugcagacugaagggcaucgccccccugcagcugggcaacugcagcguggccggcuggauccugggcaaccccaagugcgagagccuguucagcaaggagagcuggagcuacaucgccgagacccccaaccccgagaacggcaccugcuaccccggcuacuucgccgacuacgaggagcugagagagcagcugagcagcgugagcagcuucgagagauucgagaucuuccccaaggagagcagcuggcccaaccacaccgugaccaagggcgugaccaccagcugcagccacaacggcaagagcagcuucuacagaaaccugcuguggcugaccgagaagaacggccuguaccccaaccugagcaagagcuacgugaacaacaaggagaaggaggugcuggugcuguggggcgugcaccaccccagcaacaucagagaccagagagccaucuaccacaccgagaacgccuacgugagcguggugagcagccacuacagcagaagauucacccccgagaucgccaagagacccaaggugagagaccaggagggcagaaucaacuacuacuggacccugcuggagcccggcgacaccaucaucuucgaggccaacggcaaccugaucgcccccugguacgccuucgcccugagcagaggcuucggcagcggcaucaucaccagcaacgccagcauggacgagugcgacgccaagugccagaccccccagggcgccaucaacagcagccugcccuuccagaacgugcaccccgugaccaucggcgagugccccaaguacgugagaagcaccaagcugagaauggugaccggccugagaaacauccccagcauccagagcagaggccuguucggcgccaucgccggcuucaucgagggcggcuggaccggcaugaucgacggcugguacggcuaccaccaccagaacgagcagggcagcggcuacgccgccgaccagaagagcacccagaacgccaucaacggcaucaccaacaaggugaacagcgugaucgagaagaugaacacccaguucaccgccgugggcaaggaguucaacaagcuggagagaagaauggagaaccugaacaagaagguggacgacggcuuccuggacaucuggaccuacaacgccgagcugcuggugcugcuggagaacggcagaacccuggacuuccacgacagcaacgugaagaaccuguacgagaaggugaagagccagcugaagaacaacgccaaggagaucggcaacggcugcuucgaguucuaccacaagugcaacaacgagugcauggagagcgugaagaacggcaccuacgacuaccccaaguacagcgaggagagcaagcugaacagaggcaagaucgacggcgugaagcuggagagcaugggcguguaccagauccuggccaucuacagcaccguggccagcagccuggugcugcuggugagccugggcgccaucagcuucuggaugugcagcaacggcagccugcagugcagaaucugcaucuga

SEQ ID NO: 160809 - RNA, 1701 nt, Artificial Sequence; identical to SEQ ID NO: 160092
  derived and/or modified CDS sequence (opt4) from hemagglutinin__InfluenzaA__ABD61260

SEQ ID NO: 160810 - RNA, 1701 nt, Artificial Sequence; identical to SEQ ID NO: 160092
  derived and/or modified CDS sequence (opt4) from hemagglutinin__InfluenzaA__ABD61271

SEQ ID NO: 160811 - RNA, 1701 nt, Artificial Sequence; identical to SEQ ID NO: 160346
  derived and/or modified CDS sequence (opt4) from hemagglutinin__InfluenzaA__ABD61282

SEQ ID NO: 160812 - RNA, 1701 nt, Artificial Sequence; identical to SEQ ID NO: 160576
  derived and/or modified CDS sequence (opt4) from hemagglutinin__InfluenzaA__ABD61293

SEQ ID NO: 160813 - RNA, 1701 nt, Artificial Sequence; identical to SEQ ID NO: 160798
  derived and/or modified CDS sequence (opt4) from hemagglutinin__InfluenzaA__ABD61304

SEQ ID NO: 160814 - RNA, 1701 nt, Artificial Sequence; identical to SEQ ID NO: 160710
  derived and/or modified CDS sequence (opt4) from hemagglutinin__InfluenzaA__ABD61315

SEQ ID NO: 160815 - RNA, 1701 nt, Artificial Sequence; identical to SEQ ID NO: 160132
  derived and/or modified CDS sequence (opt4) from hemagglutinin__InfluenzaA__ABD61337

SEQ ID NO: 160816 - RNA, 1701 nt, Artificial Sequence
  derived and/or modified CDS sequence (opt4) from hemagglutinin__InfluenzaA__ABD61348
augaagaccaucaucgcccugagcuacauccugugccugguguucgcccagaagcugcccgugaacgacaacagcaccgccacccugugccugggccaccacgccgugcccaacggcacccuggugaagaccaucaccaacgaccacaucgaggugaccaacgccaccgagcuggugcagagcagcagcaccggcagaaucugcgacagcccccaccagauccuggacggcgagaacugcacccugaucgacgcccugcugggcgacccccacugcgacggcuuccagaacaaggagugggaccuguucguggagagaagcaccgccuacagcaacugcuaccccuacgacgugcccgacuacgccagccugagaagccugguggccagcagcggcacccuggaguucaacaacgagagcuucaacuggaccggcguggcccagaacggcaccagcagcgccugcaagagaagaagcaucaagagcuucuucagcagacugaacuggcugcaccagcugaaguacaaguaccccgcccugaacgugaccaugcccaacaacgagaaguucgacaagcuguacaucuggggcgugcaccaccccagcaccgacagcgaccagaucagccuguacgcccaggccagcggcagagugaccgugagcaccaagagaagccagcagaccgugauccccaacaucggcagcagacccugggugagaggcgugagcagcagaaucagcaucuacuggaccaucgugaagcccggcgacauccugcugaucaacagcaccggcaaccugaucgcccccagaggcuacuucaagaucagaagcggcaagagcagcaucaugagaagcaacgcccccaucggcaagugcaacagcgagugcaucacccccaacggcagcauccccaacaacaagcccuuccagaacgugaacagaaucaccuacggcgccugccccagauacgugaagcagaacacccugaagcuggccaccggcaugagaaacgugcccgagaagcagaccagaggcaucuucggcgccaucgccggcuucaucgagaacggcugggagggcaugguggacggcugguacggcuucagacaccagaacagcgagggcaccggccaggccgccgaccugaagagcacccaggccgccaucaaccagaucaacggcaagcugaacagacugaucgagaagaccaacgagaaguuccaccagaucgagaaggaguucagcgagguggagggcagaauccaggaccuggagaaguacguggaggacaccaagaucgaccuguggagcuacaacgccgagcugcugguggcccuggagaaccagcacaccaucgaccugaccgacagcgagaugaacaagcuguucgagagaaccagaaagcagcugagagagaacgccgaggacaugggcaacggcugcuucaagaucuaccacaagugcgacaacgccugcaucggcagcaucagaaacggcaccuacgaccacgacguguacagagacgaggcccugaacaacagauuccagaucaagggcguggagcugaagagcggcuacaaggacuggauccuguggaucagcuucgccaucagcugcuuccugcugugcguggugcugcugggcuucaucaugugggccugccagaagggcaacaucagaugcaacaucugcaucuga

SEQ ID NO: 160817 - RNA, 1701 nt, Artificial Sequence; identical to SEQ ID NO: 160132
  derived and/or modified CDS sequence (opt4) from hemagglutinin__InfluenzaA__ABD61359

SEQ ID NO: 160818 - RNA, 1701 nt, Artificial Sequence; identical to SEQ ID NO: 160770
  derived and/or modified CDS sequence (opt4) from hemagglutinin__InfluenzaA__ABD61370

SEQ ID NO: 160819 - RNA, 1701 nt, Artificial Sequence; identical to SEQ ID NO: 160710
  derived and/or modified CDS sequence (opt4) from hemagglutinin__InfluenzaA__ABD61381

SEQ ID NO: 160820 - RNA, 1701 nt, Artificial Sequence
  derived and/or modified CDS sequence (opt4) from hemagglutinin__InfluenzaA__ABD61392
augaagaccaucaucgcccugagcuacauccugugccugguguucgcccagaagcugcccggcaacgacaacagcaccgccacccugugccugggccaccacgccgugcccaacggcacccuggugaagaccaucaccaacgaccagaucgaggugaccaacgccaccgagcuggugcagagcagcagcaccggcggcaucugcgacagcccccaccagauccuggacggcgagaacugcacccugaucgacgcccugcugggcgacccccacugcgacggcuuccagaacaaggagugggaccuguucguggagagaagcaaggccuacagcaacugcuaccccuacgacgugcccgacuacgccagccugagaagccugguggccagcagcggcacccuggaguucaacaacgagagcuucaacuggaccggcguggcccagaacggcaccagcagcgccugcaagagaggcagcaacaagagcuucuucagcagacugaacuggcugcaccagcugaaguacaaguaccccgcccugaacgugaccaugcccaacaacgagaaguucgacaagcuguacaucuggggcgugcaccaccccagcaccgacagcgaccagaucagccuguacgcccaggcccccggcagagugaccgugagcaccaagagaagccagcagaccgugauccccaacaucggcagcagacccugggugagaggcgugagcagcagaaucagcaucuacuggaccaucgugaagcccggcgacauccugcugaucaacugcaccggcaaccugaucgcccccagaggcuacuucaagaucagaagcggcaagagcagcaucaugagaagcgacgccagcaucggcaagugcaacagcgagugcaucacccccaacggcagcauccccaacgacaagcccuuccagaacgugaacagaaucaccuacggcgccugccccagauacgugaagcagaacacccugaagcuggccaccggcaugagaaacgugcccgagaagcagaccagaggcaucuucggcgccaucgccggcuucaucgagaacggcugggagggcaugguggacggcugguacggcuucagacaccagaacagcgagggcaccggccaggccgccgaccugaagagcacccaggccgccaucaaccagaucaacggcaagcugaacagacugaucgagaagaccaacgagaaguuccaccagaucgagaaggaguucagcgagguggagggcagaauccaggaccuggagaaguacguggaggacaccaagaucgaccuguggagcuacaacgccgagcugcugguggcccuggagaaccagcacaccaucgaccugaccgacagcgagaugaacaagcuguucgagagaaccaagaagcagcugagagagaacgccgaggacaugggcaacggcugcuucaagaucuaccacaagugcgacaacgccugcaucggcagcaucagaaacggcaccuacgaccacgacguguacagagacgaggcccugaacaacagauuccagaucaagggcguggagcugaagagcggcuacaaggacuggauccuguggaucagcuucgccaucagcugcuuccugcugugcguggugcugcugggcuucaucaugugggccugccagaagggcaacaucagaugcaacaucugcaucuga

SEQ ID NO: 160821 - RNA, 1701 nt, Artificial Sequence; identical to SEQ ID NO: 160800
  derived and/or modified CDS sequence (opt4) from hemagglutinin__InfluenzaA__ABD61403

SEQ ID NO: 160822 - RNA, 1701 nt, Artificial Sequence
  derived and/or modified CDS sequence (opt4) from hemagglutinin__InfluenzaA__ABD61529
augaagaccaucaucgcccugagcuacaucuucugccugguguucgcccagaagcugcccggcaacgacaacagcaccgccacccugugccugggccaccacgccgugcccaacggcacccuggugaagaccaucaccaacgaccagaucgaggugaccaacgccaccgagcuggugcagagcagcagcaccggcagaaucugcgacagcccccacagaauccuggacggcaagaacugcacccugaucgacgcccugcugggcgacccccacugcgacggcuuccagaacgagaagugggaccuguucguggagagaagcaaggccuucagcaacugcuaccccuacgacgugcccgacuacgccagccugagaagccugguggccagcagcggcacccuggaguucaucaacgagggcuucaacuggaccggcgugacccagagcggcggcagcuacgccugcaagagaggcagcgugaacagcuucuucagcagacugaacuggcuguacgagagcgagagcaaguaccccgugcugaacgugaccaugcccaacaacggcaaguucgacaagcuguacaucuggggcgugcaccaccccagcaccgacaaggagcagaccaaccuguacgugagagccagcggcagagugaccgugagcaccaagagaagccagcagaccgugauccccaacaucggcagcagacccugggugagaggccugagcagcagaaucagcaucuacuggaccaucgugaagcccggcgacauccugcugaucaacagcaccggcaaccugaucgcccccagaggcuacuucaagaucagaaccggcaagagcagcaucaugagaagcgacgcccccaucggcaccugcagcagcgagugcaucacccccaacggcagcauccccaacgacaagcccuuccagaacgugaacaagaucaccuacggcgccugccccagauacgugaagcagaacacccugaagcuggccaccggcaugagaaacgugcccgagaagcagaccagaggcaucuucggcgccaucgccggcuucaucgagaacggcugggagggcaugguggacggcugguacggcuucagacaccagaacagcgagggcaccggccaggccgccgaccugaagagcacccaggccgccaucgaccagaucaacggcagacugaacagacugaucgagaagaccaacgagaaguuccaccagaucgagaaggaguucagcgagguggagggcagaauccaggaccuggagaaguacguggaggacaccaagaucgaccuguggagcuacaacgccgagcugcugguggcccuggagaaccagcacaccaucgaccugaccgacagcgagaugaacaagcuguucgagaagaccagaaagcagcugagagagaacgccgaggacaugggcaacggcugcuucaagaucuaccacaagugcgacaacgccugcaucggcagcaucagaaacggcaccuacgaccacgacguguacagagacgaggcccugaacaacagauuccagaucaagggcguggagcugaagagcggcuacaaggacuggauccuguggaucagcuucgccaucagcugcuuccugcugugcguggugcugcugggcuucaucaugugggccugccagaagggcaacaucagaugcaacaucugcaucuga

SEQ ID NO: 160823 - RNA, 1698 nt, Artificial Sequence; identical to SEQ ID NO: 160801
  derived and/or modified CDS sequence (opt4) from hemagglutinin__InfluenzaA__ABD61540

SEQ ID NO: 160824 - RNA, 1701 nt, Artificial Sequence
  derived and/or modified CDS sequence (opt4) from hemagglutinin__InfluenzaA__ABD61757
augaagaccaucaucgcccugagcuacaucuucugccugguguucgcccaggaccugcccggcaacgacaacagcaccgccacccugugccugggccaccacgccgugcccaacggcacccuggugaagaccaucaccaacgaccagaucgaggugaccaacgccaccgagcuggugcagagcagcagcaccggcaagaucugcgacaacccccacagaauccuggacggcaucaacugcacccugaucgacgcccugcugggcgacccccacugcgacggcuuccagaacgagaagugggaccuguucguggagagaagcaaggccuucagcaacugcuaccccuacgacgugcccgacuacgccagccugagaagccugguggccagcagcggcacccuggaguucaucaacgagggcuucaacuggaccggcgugacccagaacggcggcagcagcgccugcaagagaggccccgacaacggcuucuucagcagacugaacuggcuguacaagagcggcagcaccuaccccgugcagaacgugaccaugcccaacaacgacaacagcgacaagcuguacaucuggggcgugcaccaccccagcaccgacaaggagcagaccgaccuguacgugcaggccagcggcaaggugaccgugagcaccaagagaagccagcagaccgugauccccaacgugggcagcagacccugggugagaggccugagcagcagagugagcaucuacuggaccaucgugaagcccggcgacauccuggugaucaacagcaacggcaaccugaucgcccccagaggcuacuucaagaugagaaccggcaagagcagcaucaugagaagcgacgcccccaucggcaccugcagcagcgagugcaucacccccaacggcagcauccccaacgacaagcccuuccagaacgugaacaagaucaccuacggcgccugccccaaguacgugaagcagaacacccugaagcuggccaccggcaugagaaacgugcccgagaagcagaccagaggcaucuucggcgccaucgccggcuucaucgagaacggcugggagggcaugaucgacggcugguacggcuucagacaccagaacagcgagggcaccggccaggccgccgaccugaagagcacccaggccgccaucgaccagaucaacggcaagcugaacagagugaucgagaagaccaacgagaaguuccaccagaucgagaaggaguucagcgagguggagggcagaauccaggaccuggagaaguacguggaggacaccaagaucgaccuguggagcuacaacgccgagcugcugguggcccuggagaaccagcacaccaucgaccugaccgacagcgagaugaacaagcuguucgagaagaccagaagacagcugagagagaacgccgaggacaugggcaacggcugcuucaagaucuaccacaagugcgacaacgccugcaucggcagcaucagaaacggcaccuacgaccacgacguguacagagacgaggcccugaacaacagauuccagaucaagggcguggagcugaagagcggcuacaaggacuggauccuguggaucagcuucgccaucagcugcuuccugcugugcguggugcugcugggcuucaucaugugggccugccagaagggcaacaucagaugcaacaucugcaucuga

SEQ ID NO: 160825 - RNA, 1701 nt, Artificial Sequence
  derived and/or modified CDS sequence (opt4) from hemagglutinin__InfluenzaA__ABD61777
augaagaccaucaucgcccugagcuacaucuucugccugggcuucgcccagaagcugcccggcaacgacaacagcaccgccacccugugccugggccaccacgccgugcccaacggcacccuggugaagaccaucaccaacgaccagaucgaggugaccaacgccaccgagcuggugcagagcagcagcaccggcagaaucugcgacagcccccacagaauccuggacggcaagaacugcacccugaucgacgcccugcugggcgacccccacugcgacggcuuccagaacgagaagugggaccuguucguggagagaagcaaggccuucagcaacugcuaccccuacgacgugcccgacuacgccagccugagaagccugguggccagcagcggcacccuggaguucaucaacgagggcuucaacuggaccggcgugacccagagcggcggcagcuacgccugcaagagaggcagcgugaacagcuucuucagcagacugaacuggcuguacgagagcgagagcaaguaccccgcccugaacgugaccaugcccaacaacggcaaguucgacaagcuguacaucuggggcgugcaccaccccagcaccgacaaggagcagaccaaccuguacgugagagccagcggcagagugaccgugagcaccaagagaagccagcagaccgugauccccaacaucggcagcagacccugggugagaggccugagcagcagaaucagcaucuacuggaccaucgugaagcccggcgacauccugcugaucaacagcaccggcaaccugaucgcccccagaggcuacuucaagaucagaaccggcaagagcagcaucaugagaagcgacgcccccaucggcaccugcagcagcgagugcaucacccccaacggcagcauccccaacgacaagcccuuccagaacgugaacaagaucaccuacggcgccugccccagauacgugaagcagaacacccugaagcuggccaccggcaugagaaacgugcccgagaagcagaccagaggcaucuucggcgccaucgccggcuucaucgagaacggcugggagggcaugguggacggcugguacggcuucagacaccagaacagcgagggcaccggccaggccgccgaccugaagagcacccaggccgccaucgaccagaucaacggcaagcugaacagacugaucgagaagaccaacgagaaguuccaccagaucgagaaggaguucagcgagguggagggcagaauccaggaccuggagaaguacguggaggacaccaagaucgaccuguggagcuacaacgccgagcugcugguggcccuggagaaccagcacaccaucgaccugaccgacagcgagaugaacaagcuguucgagaagaccagaaagcagcugagagagaacgccgaggacaugggcaacggcugcuucaagaucuaccacaagugcgacaacgccugcaucggcagcaucagaaacggcaccuacgaccacgacguguacagagacgaggcccugaacaacagauuccagaucaagggcguggagcugaagagcggcuacaaggacuggauccuguggaucagcuucgccaucagcugcuuccugcugugcguggugcugcugggcuucaucaugugggccugccagaagggcaacaucagaugcaacaucugcaucuga

SEQ ID NO: 160826 - RNA, 1701 nt, Artificial Sequence
  derived and/or modified CDS sequence (opt4) from hemagglutinin__InfluenzaA__ABD77598
augaagaccaucaucgcccugagcuacauccugugccugguguucgcccagaagcugcccgugaacgacaacagcaccgccacccugugccugggccaccacgccgugcccaacggcacccuggugaagaccaucaccaacgaccacaucgaggugaccaacgccaccgagcuggugcagagcagccccaccggcagaaucugcgacagcccccaccagauccuggacggcgagaacugcacccugaucgacgcccugcugggcgacccccacugcgacggcuuccagaacaaggagugggaccuguucguggagagaagcaccgccuacagcaacugcuaccccuacgacgugcccgacuacgccagccugagaagccugguggccagcagcggcacccuggaguucaacaacgagagcuucaacuggaccggcguggcccagaacggcaccagcagcgccugcaagagaagaagcaucaagagcuucuucagcagacugaacuggcugcaccagcugaaguacaaguaccccgcccugaacgugaccaugcccaacaacgagaaguucgacaagcuguacaucuggggcgugcaccaccccagcaccgacagcgaccagaucagccuguacgcccaggccagcggcagagugaccgugagcaccaagagaagccagcagaccgugauccccaacaucggcagcagacccugggugagaggcgugagcagcagaaucagcaucuacuggaccaucgugaagcccggcgacauccugcugaucaacagcaccggcaaccugaucgcccccagaggcuacuucaagaucagaagcggcaagagcagcaucaugagaagcaacgcccccaucggcaagugcaacagcgagugcaucacccccaacggcagcauccccaacgacaagcccuuccagaacgugaacagaaucaccuacggcgccugccccagauacgugaagcagaacacccugaagcuggccaccggcaugagaaacgugcccgagaagcagaccagaggcaucuucggcgccaucgccggcuucaucgagaacggcugggagggcaugguggacggcugguacggcuucagacaccagaacagcgagggcaccggccaggccgccgaccugaagagcacccaggccgccaucaaccagaucaacggcaagcugaacagacugaucgagaagaccaacgagaaguuccaccagaucgagaaggaguucagcgagguggagggcagaauccaggaccuggagaaguacguggaggacaccaagaucgaccuguggagcuacaacgccgagcugcugguggcccuggagaaccagcacaccaucgaccugaccgacagcgagaugaacaagcuguucgagagaaccagaaagcagcugagagagaacgccgaggacaugggcaacggcugcuucaagaucuaccacaagugcgacaacgccugcaucggcagcaucagaaacggcaccuacgaccacgacguguacagagacgaggcccugaacaacagauuccagaucaagggcguggagcugaagagcggcuacaaggacuggauccuguggaucagcuucgccaucagcugcuuccugcugugcguggugcugcugggcuucaucaugugggccugccagaagggcaacaucagaugcaacaucugcaucuga

SEQ ID NO: 160827 - RNA, 1701 nt, Artificial Sequence; identical to SEQ ID NO: 160710
  derived and/or modified CDS sequence (opt4) from hemagglutinin__InfluenzaA__ABD77609

SEQ ID NO: 160828 - RNA, 1701 nt, Artificial Sequence; identical to SEQ ID NO: 160710
  derived and/or modified CDS sequence (opt4) from hemagglutinin__InfluenzaA__ABD77620

SEQ ID NO: 160829 - RNA, 1701 nt, Artificial Sequence; identical to SEQ ID NO: 160710
  derived and/or modified CDS sequence (opt4) from hemagglutinin__InfluenzaA__ABD77631

SEQ ID NO: 160830 - RNA, 1701 nt, Artificial Sequence; identical to SEQ ID NO: 160710
  derived and/or modified CDS sequence (opt4) from hemagglutinin__InfluenzaA__ABD77642

SEQ ID NO: 160831 - RNA, 1701 nt, Artificial Sequence; identical to SEQ ID NO: 160710
  derived and/or modified CDS sequence (opt4) from hemagglutinin__InfluenzaA__ABD77653

SEQ ID NO: 160832 - RNA, 1698 nt, Artificial Sequence; identical to SEQ ID NO: 160801
  derived and/or modified CDS sequence (opt4) from hemagglutinin__InfluenzaA__ABD77708

SEQ ID NO: 160833 - RNA, 1698 nt, Artificial Sequence
  derived and/or modified CDS sequence (opt4) from hemagglutinin__InfluenzaA__ABD77719
augaaggugaagcugcuggugcugcugugcaccuucaccgccaccuacgccgacaccaucugcaucggcuaccacgccaacaacagcaccgacaccguggacaccgugcuggagaagaacgugaccgugacccacagcgugaaccugcuggaggacagccacaacggcaagcugugccugcugaagggcaucgccccccugcagcugggcaacugcagcguggccggcuggauccugggcaaccccgagugcgagcugcugaucagcaaggagagcuggagcuacaucguggagacccccaaccccgagaacggcaccugcuaccccggcuacuucgccgacuacgaggagcugagagagcagcugagcagcgugagcagcuucgagagauucgagaucuuccccaaggagagcagcuggcccaaccacaccgugaccggcgugagcgccagcugcagccacaacggcaagagcagcuucuacagaaaccugcuguggcugaccggcaagaacggccuguaccccaaccugagcaagagcuacgccaacaacaaggagaaggaggugcuggugcuguggggcgugcaccacccccccaacaucggcgaccagagagcccuguaccacaccgagaacgccuacgugagcguggugagcagccacuacagcagaagauucacccccgagaucgccaagagacccaaggugagaaaccaggagggcagaaucaacuacuacuggacccugcuggagcccggcgacaccaucaucuucgaggccaacggcaaccugaucgcccccagauacgccuucgcccugagcagaggcuucggcagcggcaucaucaccagcaacgcccccauggacgagugcgacgccaagugccagaccccccagggcgccaucaacagcagccugcccuuccagaacgugcaccccgugaccaucggcgagugccccaaguacgugagaagcgccaagcugagaauggugaccggccugagaaacauccccagcauccagagcagaggccuguucggcgccaucgccggcuucaucgagggcggcuggaccggcaugguggacggcugguacggcuaccaccaccagaacgagcagggcagcggcuacgccgccgaccagaagagcacccagaacgccaucaacggcaucaccaacaaggugaacagcgugaucgagaagaugaacacccaguucaccgccgugggcaaggaguucaacaagcuggagagaagaauggagaaccugaacaagaagguggacgacggcuuccuggacaucuggaccuacaacgccgagcugcuggugcugcuggagaacgagagaacccuggacuuccacgacagcaacgugaagaaccuguacgagaaggugaagagccagcugaagaacaacgccaaggagaucggcaacggcugcuucgaguucuaccacaagugcaacaacgagugcauggagagcgugaagaacggcaccuacgacuaccccaaguacagcgaggagagcaagcugaacagagagaagaucgacggcgugaagcuggagagcaugggcguguaccagauccuggccaucuacagcaccguggccagcagccuggugcugcuggugagccugggcgccaucagcuucuggaugugcagcaacggcagccugcagugcagaaucugcaucuga

SEQ ID NO: 160834 - RNA, 1698 nt, Artificial Sequence; identical to SEQ ID NO: 160801
  derived and/or modified CDS sequence (opt4) from hemagglutinin__InfluenzaA__ABD77730

SEQ ID NO: 160835 - RNA, 1701 nt, Artificial Sequence; identical to SEQ ID NO: 160710
  derived and/or modified CDS sequence (opt4) from hemagglutinin__InfluenzaA__ABD77752

SEQ ID NO: 160836 - RNA, 1701 nt, Artificial Sequence; identical to SEQ ID NO: 160710
  derived and/or modified CDS sequence (opt4) from hemagglutinin__InfluenzaA__ABD77763

SEQ ID NO: 160837 - RNA, 1701 nt, Artificial Sequence
  derived and/or modified CDS sequence (opt4) from hemagglutinin__InfluenzaA__ABD77774
augaagaccaucaucgcccugagcuacauccugugccugguguucgcccagaagcugcccgugaacgacaacagcaccgccacccugugccugggccaccacgccgugcccaacggcacccuggugaagaccaucaccaacgacaacaucgaggugaccaacgccaccgagcuggugcagagcagcagcaccggcagaaucugcgacagcccccaccagauccuggacggcgagaacugcacccugaucgacgcccugcugggcgacccccacugcgacggcuuccagaacaaggagugggaccuguucguggagagaagcaccgccuacagcaacugcuaccccuacgacgugcccgacuacgccagccugagaagccugguggccagcagcggcacccuggaguucaacaacgagagcuucaacuggaccggcguggaccagaacggcaccagcagcgccugcaagagaagaagcaacaagagcuucuucagcagacugaacuggcugcaccagcugaaguacaaguaccccgcccugaacgugaccaugcccaacaacgagaaguucgacaagcuguacaucuggggcgugcaccaccccagcaccgacagcgaccagaucagccuguacgcccaggccagcggcagagugaccgugagcaccaagagaagccagcagaccgugauccccaacaucggcagcagacccugggugagaggcgugagcagcagaaucagcaucuacuggaccaucgugaagcccggcgacauccugcugaucaacagcaccggcaaccugaucgcccccagaggcuacuucaagaucagaagcggcaagagcagcaucaugagaagcaacgcccccaucggcaagugcaacagcgagugcaucacccagaacggcagcauccccaacgacaagcccuuccagaacgugaacagaaucaccuacggcgccugccccagauacgugaagcagaacacccugaagcuggccaccggcaugagaaacgugcccgagaagcagaccagaggcaucuucggcgccaucgccggcuucaucgagaacggcugggagggcaugguggacggcugguacggcuucagacaccagaacagcgagggcaccggccaggccgccgaccugaagagcacccaggccgccaucaaccagaucaacggcaagcugaacagacugaucgagaagaccaacgagaaguuccaccagaucgagaaggaguucagcgagguggagggcagaauccaggaccuggagaaguacguggaggacaccaagaucgaccuguggagcuacaacgccgagcugcugguggcccuggagaaccagcacaccaucgaccugaccgacagcgagaugaacaagcuguucgagagaaccagaaagcagcugagagagaacgccgaggacaugggcaacggcugcuucaagaucuaccacaagugcgacaacgccugcaucggcagcaucagaaacggcaccuacgaccacgacguguacagagacgaggcccugaacaacagauuccagaucaagggcguggagcugaagagcggcuacaaggacuggauccuguggaucagcuucgccaucagcugcuuccugcugugcguggugcugcugggcuucaucaugugggccugccagaagggcaacaucagaugcaacaucugcaucuga

SEQ ID NO: 160838 - RNA, 1701 nt, Artificial Sequence; identical to SEQ ID NO: 160837
  derived and/or modified CDS sequence (opt4) from hemagglutinin__InfluenzaA__ABD77785

SEQ ID NO: 160839 - RNA, 1701 nt, Artificial Sequence
  derived and/or modified CDS sequence (opt4) from hemagglutinin__InfluenzaA__ABD77807
augaaggccaagcugcugauccugcugugcgcccugagcgccaccgacgccgacaccaucugcaucggcuaccacgccaacaacagcaccgacaccguggacaccgugcuggagaagaacgugaccgugacccacagcgugaaccugcuggaggacagccacaacggcaagcugugcagacugaagggcaucgccccccugcagcugggcaagugcaacaucgccggcuggauccugggcaaccccgagugcgagagccugcugagcaagagaagcuggagcuacaucgccgagacccccaacagcgagaacggcaccugcuaccccggcgacuucgccgacuacgaggagcugagagagcagcugagcagcgugagcagcuucgagagauucgagaucuuccccaaggagagaagcuggcccaagcacaacaucaccagaggcgugaccgccgccugcagccacgccggcaagagcagcuucuacaagaaccugcuguggcugaccgagaccaacggcagcuaccccaagcugagcaagagcuacgugaacaacaaggagaaggaggugcuggugcuguggggcgugcaccaccccagcaacaucgaggaccagaagacccuguacagaaaggagaacgccuacgugagcguggugagcagcaacuacaacagaagauucacccccgagaucgccgagagacccaaggugagaggccaggccggcagaaugaacuacuacuggacccugcuggagcccggcgacaccaucaucuucgaggccaacggcaaccugaucgcccccugguacgccuucgcccugagcagaggcuucggcagcggcaucaucaccagcaacgccagcauggacgagugcgacaccaagugccagaccccccagggcgccaucaacagcagccugcccuuccagaacauccaccccgugaccaucggcgagugccccaaguacgugaagagcaccaagcugagaauggugaccggccugagaaacauccccagcauccagagcagaggccuguucggcgccaucgccggcuucaucgagggcggcuggaccggcaugaucgacggcugguacggcuaccaccaccagaacgagcagggcagcggcuacgccgccgaccagaagagcacccagaacgccaucaacggcaucaccaacaaggugaacagcgugaucgagaagaugaacacccaguucaccgccgugggcaaggaguucaacaagcuggagaagagaauggagaaccugaacaagaagguggacgacggcuuccuggacaucuggaccuacaacgccgagcugcuggugcugcuggagaacgagagaacccuggacuuccacgacagcaacgugaagaaccuguacgagaaggugaagaaccagcugagaaacaacgccaaggagaucggcaacggcugcuucgaguucuaccacaagugcaacaacgagugcauggagagcgugaagaacggcaccuacgacuaccccaaguacagcgaggagagcaagcugaacagagagaagaucgacggcgugaagcuggagagcaugggcguguaccagauccuggccaucuacagcaccguggccagcagccuggugcugcuggugagccugggcgccaucagcuucuggaugugcagcaacggcagccugcagugcagaaucugcaucuga

SEQ ID NO: 160840 - RNA, 1701 nt, Artificial Sequence
  derived and/or modified CDS sequence (opt4) from hemagglutinin__InfluenzaA__ABD77818
augaaggccaagcugcuggugcugcugugcgcccugagcgccaccgacgccgacaccaucugcaucggcuaccacgccaacaacagcaccgacaccguggacaccgugcuggagaagaacgugaccgugacccacagcgugaaccugcuggaggacagccacaacggcaagcugugcagacugaagggcaucgccccccugcagcugggcaagugcagcaucgccggcuggauccugggcaaccccgagugcgagagccuguucagcaagaagagcuggagcuacaucgccgagacccccaacagcgagaacggcaccugcuaccccggcuacuucgccgacuacgaggagcugagagagcagcugagcagcgugagcagcuucgagagauucgagaucuuccccaaggagagcagcuggcccaagcacaccgugaccagaggcgugaccgccagcugcagccacaagggcaagagcagcuucuacagaaaccugcuguggcugaccgagaagaacggcagcuaccccaaccugagcaagagcuacgugaacaacaaggagaaggaggugcuggugcuguggggcgugcaccaccccagcaacaucgaggaccagaagaccaucuacagaaaggagaacgccuacgugagcguggugagcagccacuacaacagaagauucacccccgagaucgccaagagacccaaggugagagaccaggagggcagaaucaacuacuacuggacccugcuggagcccggcgacaccaucaucuucgaggccaacggcaaccugaucgcccccugguacgccuucgcccugagcagaggcuucggcagcggcaucaucaccagcaacgccagcauggacgagugcgacgccaagugccagaccccccagggcgccaucaacagcagccugcccuuccagaacgugcaccccgugaccaucggcgagugccccaaguacgugagaagcaccaagcugagaauggugaccggccugagaaacauccccagcauccagagcagaggccuguucggcgccaucgccggcuucaucgagggcggcuggaccggcaugaucgacggcugguacggcuaccaccaccagaacgagcagggcagcggcuacgccgccgaccagaagagcacccagaacgccaucaacggcaucaccaacaaggugaacagcgugaucgagaagaugaacacccaguucaccgccgugggcaaggaguucaacaagcuggagaagagaauggagaaccugaacaagaagguggacgacggcuuccuggacaucuggaccuacaacgccgagcugcuggugcugcuggagaacgagagaacccuggacuuccacgacagcaacgugaagaaccuguacgagaaggugaagagccagcugaagagcaacgccaaggagaucggcaacggcugcuucgaguucuaccacaagugcaacaacgagugcauggagagcgugaagaacggcaccuacgacuaccccaaguacagcgaggagagcaagcugaacagagagaagaucgacggcgugaagcuggagagcaugggcguguaccagauccuggccaucuacagcaccguggccagcagccuggugcugcuggugagccugggcgccaucagcuucuggaugugcagcaacggcagccugcagugcagaaucugcaucuga

SEQ ID NO: 160841 - RNA, 1701 nt, Artificial Sequence
  derived and/or modified CDS sequence (opt4) from hemagglutinin__InfluenzaA__ABD77829
augaagaccaucaucgcccugagcuacauccuguaccugguguucgcccagaagcugcccggcaacgacaacagcaccgccacccugugccugggccaccacgccgugcccaacggcacccuggugaagaccaucaccaacgaccagaucgaggugaccaacgccaccgagcuggugcagagcagcagcaccggcagacugugcgacagcccccacagaauccuggacggcaagaacugcacccugaucgacgcccugcugggcgacccccacugcgacggcuuccagaacaaggagugggaccuguucguggagagaagcaaggccuacagcgacugcuaccccuacgacgugcccgacuacgccagccugagaagccugguggccagcagcggcacccuggaguucaccaacgagggcuucaacuggaccggcguggcccagaacggcaccagcuacgccugcaagagaggcagcgugaagagcuucuucagcagacugaacuggcugcacaagcuggaguacaaguaccccgcccugaacgugaccaugcccaacaacgacaaguucgacaagcuguacaucuggggcgugcaccaccccagcaccgacagcgaccagaccagccuguacgugcaggccagcggcagagugaccgugagcaccaagagaagccagcagaccgugauccccaacaucggcagcagacccugggugagaggcgugagcagcagaaucagcaucuacuggaccaucgugaagcccggcgacauccugcugaucaacagcaccggcaaccugaucgcccccagaggcuacuucaagaucagaagcggcaagagcagcaucaugagaagcgacgcccccaucggcaacugcaacagcgagugcaucacccccaacggcagcauccccaacgacaagcccuuccagaacgugaacagaaucaccuacggcgccugccccagauacgugaagcagaacacccugaagcuggccaccggcaugagaaacgugcccgagaagcagaccagaggcaucuucggcgccaucgccggcuucaucgagaacggcugggagggcaugguggacggcugguacggcuucagacaccagaacagcgagggcaccggccaggccgccgaccugaagagcacccaggccgccaucaaccagaucaacggcaagcugaacagacugaucgagaagaccaacgagaaguuccaccagaucgagaaggaguucagcgagguggagggcagaauccaggaccuggagaaguacguggaggacaccaagaucgaccuguggagcuacaacgccgagcugcugguggcccuggagaaccagcacaccaucgaccugaccgacagcgagaugaacaagcuguucgagagaaccagaaagcagcugagagagaacgccgaggacaugggcaacggcugcuucaagaucuaccacaagugcgacaacgccugcaucggcagcaucagaaacggcaccuacgaccacgacguguacagagacgaggcccugaacaacagauuccagaucaagggcguggagcugaagagcggcuacaaggacuggauccuguggaucagcuucgccaucagcugcuuccugcugugcguggugcugcugggcuucaucaugugggccugccagaagggcaacaucagaugcaacaucugcaucuga

SEQ ID NO: 160842 - RNA, 1701 nt, Artificial Sequence
  derived and/or modified CDS sequence (opt4) from hemagglutinin__InfluenzaA__ABD77862
augaagaccaucaucgcccugagcuacauccugugccugguguucgcccagaagcugcccggcaacgacaacagcaccgccacccugugccugggccaccacgccgugcccaacggcacccuggugaagaccaucaccaacgaccagaucgaggugaccaacgccaccgagcuggugcagagcagcagcaccggcagaaucugcgacagcccccacagaauccuggacggcaagaacugcacccugaucgacgcccugcugggcgacccccacugcgacggcuuccagaacaaggagugggaccuguucguggagagaagcaaggccuacagcgacugcuaccccuacgacgugcccgacuacgccagccugagaagccugguggccagcagcggcacccuggaguucaccaacgagggcuucaacuggaccggcguggcccaggacggcaccagcuacgccugcaagagaggcagcgugaagagcuucuucagcagacugaacuggcugcacaagcuggaguacaaguaccccgcccugaacgugaccaugcccaacaacgacaaguucgacaagcuguacaucuggggcgugcaccaccccagcaccgacagcgaccagaccagcaucuacgugcaggccagcggcagagugaccgugagcaccaagagaagccagcagaccgugauccccaacaucggcagcagacccugggugagaggcgugagcagcagaaucagcaucuacuggaccaucgugaagcccggcgacauccugcugaucaacagcaccggcaaccugaucgcccccagaggcuacuucaagaucagaagcggcaagagcagcaucaugagaagcgacgcccccaucggcaacugcaacagcgagugcaucacccccaacggcagcauccccaacgacaagcccuuccagaacgugaacagaaucaccuacggcgccugccccagauacgugaagcagaacacccugaagcuggccaccggcaugagaaacgugcccgagaagcagaccagaggcaucuucggcgccaucgccggcuucaucgagaacggcugggagggcaugguggacggcugguacggcuucagacaccagaacagcgagggcaccggccaggccgccgaccugaagagcacccaggccgccaucaaccagaucaacggcaagcugaacagacugaucgagaagaccaacgagaaguuccaccagaucgagaaggaguucagcgagguggagggcagaauccaggaccuggagaaguacguggaggacaccaagaucgaccuguggagcuacaacgccgagcugcugguggcccuggagaaccagcacaccaucgaccugaccgacagcgagaugaacaagcuguucgagagaaccagaaagcagcugagagagaacgccgaggacaugggcaacggcugcuucaagaucuaccacaagugcgacaacgccugcaucggcagcaucagaaacggcaccuacgaccacgacguguacagagacgaggcccugaacaacagauuccagaucaagggcguggagcugaagagcggcuacaaggacuggauccuguggaucagcuucgccaucagcugcuuccugcugugcguggugcugcugggcuucaucaugugggccugccagaagggcaacaucagaugcaacaucugcaucuga

SEQ ID NO: 160843 - RNA, 1701 nt, Artificial Sequence
  derived and/or modified CDS sequence (opt4) from hemagglutinin__InfluenzaA__ABD77884
augaagaccaucaucgcccugagcuacauccugugccugguguucgcccagaagcugcccggcaacgacaacagcaccgccacccugugccugggccaccacgccgugcccaacggcacccuggugaagaccaucaccaacgaccagaucgaggugaccaacgccaccgagcuggugcagggcagcagcaccggcagaaucugcgacagcccccacagaauccuggacggcaagaacugcacccugaucgacgcccugcugggcgacccccacugcgacggcuuccagaacaaggagugggaccuguucguggagagaagcaaggccuacagcaacugcuaccccuacgacgugcccgacuacgccagccugagaagccugguggccagcagcggcacccuggaguucaacaacgagagcuucaacuggaccggcguggcccagaacggcaccagcuacgccugcaagagaagaagcgugaagagcuucuucagcagacugaacuggcugcacaagcuggaguacaaguaccccgcccugaacgugaccaugcccaacaacgacaaguucgacaagcuguacaucuggggcgugcaccaccccagcaccgacagcgaccagaccagccuguacgugcaggccagcggcagagugaccgugagcaccaagagaagccagcagaccgugauccccaacaucggcagcagacccugggugagaggcgugagcagcagaaucagcaucuacuggaccaucgugaagcccggcgacauccugcugaucaacagcaccggcaaccugaucgcccccagaggcuacuucaagaucagaagcggcaagagcagcaucaugagaagcgacgcccccaucgacaacugcaacagcgagugcaucacccccaacggcagcauccccaacgacaagcccuuccagaacgugaacagaaucaccuacggcgccugccccagauacgugaagcagaacacccugaagcuggccaccggcaugagaaacgugcccgagaagcagaccagaggcaucuucggcgccaucgccggcuucaucgagaacggcugggagggcaugguggacggcugguacggcuucagacaccagaacagcgagggcaccggccaggccgccgaccugaagagcacccaggccgccaucaaccagaucaacggcaagcugaacagacugaucgagaagaccaacgagaaguuccaccagaucgagaaggaguucagcgagguggagggcagaauccaggaccuggagaaguacguggaggacaccaagaucgaccuguggagcuacaacgccgagcugcugguggcccuggagaaccagcacaccaucgaccugaccgacagcgagaugaacaagcuguucgagagaaccagaaagcagcugagagagaacgccgaggacaugggcaacggcugcuucaagaucuaccacaagugcgacaacgccugcaucggcagcaucagaaacggcaccuacgaccacgacguguacagagacgaggcccugaacaacagauuccagaucaagggcguggagcugaagagcggcuacaaggacuggauccuguggaucagcuucgccaucagcugcuuccugcugugcguggugcugcugggcuucaucaugugggccugccagaagggcaacaucagaugcaacaucugcaucuga

SEQ ID NO: 160844 - RNA, 1701 nt, Artificial Sequence
  derived and/or modified CDS sequence (opt4) from hemagglutinin__InfluenzaA__ABD77895
augaagaccaucaucgcccugagcuacauccugugccugguguucgcccagaagcugcccggcaacgacaacagcaccgccacccugugccugggccaccacgccgugcccaacggcacccuggugaagaccaucaccaacgaccagaucgaggugaccaacgccaccgagcuggugcagagcagcagcaccggcagaaucugcgacagcccccacagaauccuggacggcaagaacugcacccugaucgacgcccugcugggcgacccccacugcgacggcuuccagaacaaggagugggaccuguucguggagagaagcaaggccuacagcaacugcuaccccuacgacgugcccgacuacgccagccugagaagccugguggccagcagcggcacccuggaguucaacaacgagagcuucaacuggaccggcguggcccagaacggcaccagcuacgccugcaagagaagaagcgugaagagcuucuucagcagacugaacuggcugcacaagcuggaguacaaguaccccgcccugaacgugaccaugcccaacaacgacaaguucgacaagcuguacaucuggggcgugcaccaccccagcaccgacagcgaccagaccagccuguacgugcaggccagcggcagagugaccgugagcaccaagagaagccagcagaccgugauccccaacaucggcagcagacccugggugagaggcaucagcagcagaaucagcaucuacuggaccaucgugaagcccggcgacauccugcugaucaacagcaccggcaaccugaucgcccccagaggcuacuucaagaucagaagcggcaagagcagcaucaugagaagcgacgcccccaucgacaacugcaacagcgagugcaucacccccaacggcagcauccccaacgacaagcccuuccagaacgugaacagaaucaccuacggcgccugccccagauacgugaagcagaacacccugaagcuggccaccggcaugagaaacgugcccgagaagcagaccagaggcaucuucggcgccaucgccggcuucaucgagaacggcugggagggcaugguggacggcugguacggcuucagacaccagaacagcgagggcaccggccaggccgccgaccugaagagcacccaggccgccaucaaccagaucagcggcaagcugaacagacugaucgagaagaccaacgagaaguuccaccagaucgagaaggaguucagcgagguggagggcagaauccaggaccuggagaaguacguggaggacaccaagaucgaccuguggagcuacaacgccgagcugcugguggcccuggagaaccagcacaccaucgaccugaccgacagcgagaugaacaagcuguucgagagaaccagaaagcagcugagagagaacgccgaggacaugggcaacggcugcuucaagaucuaccacaagugcgacaacgccugcaucggcagcaucagaaacggcaccuacgaccacgacguguacagagacgaggcccugaacaacagauuccagaucaagggcguggagcugaagagcggcuacaaggacuggauccuguggaucagcuucgccaucagcugcuuccugcugugcguggugcugcugggcuucaucaugugggccugccagaagggcaacaucagaugcaacaucugcaucuga

SEQ ID NO: 160845 - RNA, 1701 nt, Artificial Sequence; identical to SEQ ID NO: 160843
  derived and/or modified CDS sequence (opt4) from hemagglutinin__InfluenzaA__ABD77906

SEQ ID NO: 160846 - RNA, 1698 nt, Artificial Sequence
  derived and/or modified CDS sequence (opt4) from hemagglutinin__InfluenzaA__ABD77917
augaaggugaagcugcuggugcugcugugcaccuucaccgccaccuacgccgacaccaucugcaucggcuaccacgccaacaacagcaccgacaccguggacaccgugcuggagaagaacgugaccgugacccacagcgugaaccugcuggaggacagccacaacggcaagcugugccugcugaagggcaucgccccccugcagcugggcaacugcagcguggccggcuggauccugggcaaccccgagugcgagcugcugaucagcaaggagagcuggagcuacaucguggagacccccaaccccgagaacggcaccugcuaccccggcuacuucgccgacuacgaggagcugagagagcagcugagcagcgugagcagcuucgagagauucgagaucuuccccaaggagagcagcuggcccaaccacaccgugaccggcgugagcgccagcugcagccacaacggcaagagcagcuucuacagaaaccugcuguggcugaccggcaagaacggccuguaccccaaccugagcaagagcuacgccaacaacaaggagaaggaggugcuggugcuguggggcgugcaccacccccccaacaucggcaaccagaaggcccuguaccacaccgagaacgccuacgugagcguggugagcagccacuacagcagaagauucacccccgagaucgccaagagacccaaggugagagaccaggagggcagaaucaacuacuacuggacccugcuggagcccggcgacaccaucaucuucgaggccaacggcaaccugaucgcccccagauacgccuucgcccugagcagaggcuucggcagcggcaucaucaccagcaacgcccccauggacgagugcgacgccaagugccagaccccccagggcgccaucaacagcagccugcccuuccagaacgugcaccccgugaccaucggcgagugccccaaguacgugagaagcgccaagcugagaauggugaccggccugagaaacauccccagcauccagagcagaggccuguucggcgccaucgccggcuucaucgagggcggcuggaccggcaugguggacggcugguacggcuaccaccaccagaacgagcagggcagcggcuacgccgccgaccagaagagcacccagaacgccaucaacggcaucaccaacaaggugaacagcgugaucgagaagaugaacacccaguucaccgccgugggcaaggaguucaacaagcuggagagaagaauggagaaccugaacaagaagguggacgacggcuuccuggacaucuggaccuacaacgccgagcugcuggugcugcuggagaacgagagaacccuggacuuccacgacagcaacgugaagaaccuguacgagaaggugaagagccagcugaagaacaacgccaaggagaucggcaacggcugcuucgaguucuaccacaagugcaacaacgagugcauggagagcgugaagaacggcaccuacgacuaccccaaguacagcgaggagagcaagcugaacagagagaagaucgacggcgugaagcuggagagcaugggcguguaccagauccuggccaucuacagcaccguggccagcagccuggugcugcuggugagccugggcgccaucagcuucuggaugugcagcaacggcagccugcagugcagaaucugcaucuga

SEQ ID NO: 160847 - RNA, 1698 nt, Artificial Sequence
  derived and/or modified CDS sequence (opt4) from hemagglutinin__InfluenzaA__ABD77928
augaaggugaagcugcuggugcugcugugcaccuucaccgccaccuacgccgacaccaucugcaucggcuaccacgccaacaacagcaccgacaccguggacaccgugcuggagaagaacgugaccgugacccacagcgugaaccugcuggaggacagccacaacggcaagcugugccugcugaagggcaucgccccccugcagcugggcaacugcagcguggccggcuggauccugggcaaccccgagugcgagcugcugaucagcaaggagagcuggagcuacaucguggagacccccaaccccgagaacggcaccugcuaccccggcuacuucgccgacuacgaggagcugagagagcagcugagcagcgugagcagcuucgagagauucgagaucuuccccaaggagagcagcuggcccaaccacaccgugaccggcgugagcgccagcugcagccacaacggcaagagcagcuucuacagaaaccugcuguggcugaccggcaagaacggccuguaccccaaccugagcaagagcuacgccaacaacaaggagaagaaggugcuggugcuguggggcgugcaccacccccccaacaucggcgaccagaaggcccuguaccacaccgagaacgccuacgugagcguggugagcagccacuacagcagaagauucacccccgagaucgccaagagacccaaggugagagaccaggagggcagaaucaacuacuacuggacccugcuggagcccggcgacaccaucaucuucgaggccaacggcaaccugaucgcccccagauacgccuucgcccugagcagaggcuucggcagcggcaucaucaccagcaacgcccccauggacgagugcgacgccaagugccagaccccccagggcgccaucaacagcagccugcccuuccagaacgugcaccccgugaccaucggcgagugccccaaguacgugagaagcgccaagcugagaauggugaccggccugagaaacauccccagcauccagagcagaggccuguucggcgccaucgccggcuucaucgagggcggcuggaccggcaugguggacggcugguacggcuaccaccaccagaacgagcagggcagcggcuacgccgccgaccagaagagcacccagaacgccaucaacggcaucaccaacaaggugaacagcgugaucgagaagaugaacacccaguucaccgccgugggcaaggaguucaacaagcuggagagaagaauggagaaccugaacaagaagguggacgacggcuuccuggacaucuggaccuacaacgccgagcugcuggugcugcuggagaacgagagaacccuggacuuccacgacagcaacgugaagaaccuguacgagaaggugaagagccagcugaagaacaacgccaaggagaucggcaacggcugcuucgaguucuaccacaagugcaacaacgagugcauggagagcgugaagaacggcaccuacgacuaccccaaguacagcgaggagagcaagcugaacagagagaagaucgacggcgugaagcuggagagcaugggcguguaccagauccuggccaucuacagcaccguggccagcagccuggugcugcuggugagccugggcgccaucagcuucuggaugugcagcaacggcagccugcagugcagaaucugcaucuga

SEQ ID NO: 160848 - RNA, 1698 nt, Artificial Sequence; identical to SEQ ID NO: 160802
  derived and/or modified CDS sequence (opt4) from hemagglutinin__InfluenzaA__ABD77939

SEQ ID NO: 160849 - RNA, 1698 nt, Artificial Sequence; identical to SEQ ID NO: 160802
  derived and/or modified CDS sequence (opt4) from hemagglutinin__InfluenzaA__ABD77950

SEQ ID NO: 160850 - RNA, 1698 nt, Artificial Sequence; identical to SEQ ID NO: 160801
  derived and/or modified CDS sequence (opt4) from hemagglutinin__InfluenzaA__ABD77961

SEQ ID NO: 160851 - RNA, 1698 nt, Artificial Sequence; identical to SEQ ID NO: 160802
  derived and/or modified CDS sequence (opt4) from hemagglutinin__InfluenzaA__ABD77983

SEQ ID NO: 160852 - RNA, 1698 nt, Artificial Sequence; identical to SEQ ID NO: 160802
  derived and/or modified CDS sequence (opt4) from hemagglutinin__InfluenzaA__ABD77994

SEQ ID NO: 160853 - RNA, 1698 nt, Artificial Sequence; identical to SEQ ID NO: 160801
  derived and/or modified CDS sequence (opt4) from hemagglutinin__InfluenzaA__ABD78005

SEQ ID NO: 160854 - RNA, 1698 nt, Artificial Sequence; identical to SEQ ID NO: 160801
  derived and/or modified CDS sequence (opt4) from hemagglutinin__InfluenzaA__ABD78016

SEQ ID NO: 160855 - RNA, 1698 nt, Artificial Sequence; identical to SEQ ID NO: 160802
  derived and/or modified CDS sequence (opt4) from hemagglutinin__InfluenzaA__ABD78027

SEQ ID NO: 160856 - RNA, 1698 nt, Artificial Sequence; identical to SEQ ID NO: 160802
  derived and/or modified CDS sequence (opt4) from hemagglutinin__InfluenzaA__ABD78038

SEQ ID NO: 160857 - RNA, 1701 nt, Artificial Sequence; identical to SEQ ID NO: 160837
  derived and/or modified CDS sequence (opt4) from hemagglutinin__InfluenzaA__ABD78049

SEQ ID NO: 160858 - RNA, 1698 nt, Artificial Sequence; identical to SEQ ID NO: 160356
  derived and/or modified CDS sequence (opt4) from hemagglutinin__InfluenzaA__ABD78060

SEQ ID NO: 160859 - RNA, 1698 nt, Artificial Sequence
  derived and/or modified CDS sequence (opt4) from hemagglutinin__InfluenzaA__ABD78071
augaaggccaagcugcuggugcugcugugcaccuucaccgccaccuacgccgacaccaucugcaucggcuaccacgccaacaacagcaccgacaccguggacaccgugcuggagaagaacgugaccgugacccacagcgugaaccugcuggaggacagccacaacggcaagcugugccugcugaagggcaucgccccccugcagcugggcaacugcagcguggccggcuggauccugggcaaccccgagugcgagcugcugaucagcaaggagagcuggagcuacaucguggagacccccaaccccgagaacggcaccugcuaccccggcuacuucgccgacuacgaggagcugagagagcagcugagcagcgugagcagcuucgagagauucgagaucuuccccaagggcagcagcuggcccaaccacaccgugaccggcgugagcgccagcugcagccacaacggcaagagcagcuucuacagaaaccugcuguggcugaccggcaagaacggccuguaccccaaccugagcaugagcuacgugaacaacaaggagaaggaggugcuggugcuguggggcgugcaccacccccccaacaucggcgaccagagagcccuguaccacaccgagaacgccuacgugagcguggugagcagccacuacagcagaagauucacccccgagaucgccaagagacccaaggugagagaccaggagggcagaaucaacuacuacuggacccugcuggagcccggcgacaccaucaucuucgaggccaacggcaaccugaucgcccccugguacgccuucgcccugagcggcggcuucggcagcggcaucaucaccagcaacgcccccaugggcgagugcgacgccaagugccagaccccccagggcgccaucaacagcagccugcccuuccagaacgugcaccccgugaccaucggcgagugccccaaguacgugagaagcgccaagcugagaauggugaccggccugagaaacauccccagcauccagagcagaggccuguucggcgccaucgccggcuucaucgagggcggcuggaccggcaugguggacggcugguacggcuaccaccaccagaacgagcagggcagcggcuacgccgccgaccagaagagcacccagaacgccaucaacggcaucaccaacaaggugaacagcgugaucgagaagaugaacacccaguucaccgccgugggcaaggaguucaacaagcuggagagaagaauggagaaccugaacaagaagguggacgacggcuuccuggacaucuggaccuacaacgccgagcugcuggugcugcuggagaacgagagaacccuggacuuccacgacagcaacgugaagaaccuguacgagaaggugaagagccagcugaagaacaacgccaaggagaucggcaacggcugcuucgaguucuaccacaagugcaacaacgagugcauggagagcgugaagaacggcaccuacgacuaccccaaguacagcgaggagagcaagcugaacagagagaagaucgacggcgugaagcuggagagcaugggcguguaccagauccuggccaucuacagcaccguggccagcagccuggugcugcuggugagccugggcgccaucagcuucuggaugugcagcaacggcagccugcagugcagaaucugcaucuga

SEQ ID NO: 160860 - RNA, 1698 nt, Artificial Sequence
  derived and/or modified CDS sequence (opt4) from hemagglutinin__InfluenzaA__ABD78093
augaaggccaagcugcuggugcugcugugcaccuucaccgccaccuacgccgacaccaucugcaucggcuaccacgccaacaacagcaccgacaccguggacaccgugcuggagaagaacgugaccgugacccacagcgugaaccugcuggaggacagccacaacggcaagcugugccugcugaagggcaucgccccccugcagcugggcaacugcagcguggccggcuggauccugggcaaccccgagugcgagcugcugaucagcaaggagagcuggagcuacaucguggagacccccaaccccgagaacggcaccugcuaccccggcuacuucgccgacuacgaggagcugagagagcagcugagcagcgugagcagcuucgagagauucgagaucuuccccaagggcagcagcuggcccaaccacaccgugaccggcgugagcgccagcugcagccacaacggcaagagcagcuucuacagaaaccugcuguggcugaccggcaagaacggccuguaccccaaccugagcaugagcuacgugaacaacaaggagaaggaggugcuggugcuguggggcgugcaccacccccccaacaucggcgaccagagagcccuguaccacaccgagaacgccuacgugagcguggugagcagccacuacagcagaagauucacccccgagaucgccaagagacccaaggugagagaccaggagggcagaaucaacuacuacuggacccugcuggagcccggcgacaccaucaucuucgaggccaacggcaaccugaucgcccccugguacgccuucgcccugagcagaggcuucggcagcggcaucaucaccagcaacgcccccaugggcgagugcgacgccaagugccagaccccccagggcgccaucaacagcagccugcccuuccagaacgugcaccccgugaccaucggcgagugccccaaguacgugagaagcgccaagcugagaauggugaccggccugagaaacauccccagcauccagagcagaggccuguucggcgccaucgccggcuucaucgagggcggcuggaccggcaugguggacggcugguacggcuaccaccaccagaacgagcagggcagcggcuacgccgccgaccagaagagcacccagaacgccaucaacggcaucaccaacaaggugaacagcgugaucgagaagaugaacacccaguucaccgccgugggcaaggaguucaacaagcuggagagaagaauggagaaccugaacaagaagguggacgacggcuuccuggacaucuggaccuacaacgccgagcugcuggugcugcuggagaacgagagaacccuggacuuccacgacagcaacgugaagaaccuguacgagaaggugaagagccagcugaagaacaacgccaaggagaucggcaacggcugcuucgaguucuaccacaagugcaacaacgagugcauggagagcgugaagaacggcaccuacgacuaccccaaguacagcgaggagagcaagcugaacagagagaagaucgacggcgugaagcuggagagcaugggcguguaccagauccuggccaucuacagcaccguggccagcagccuggugcugcuggugagccugggcgccaucagcuucuggaugugcagcaacggcagccugcagugcagaaucugcaucuga

SEQ ID NO: 160861 - RNA, 1701 nt, Artificial Sequence
  derived and/or modified CDS sequence (opt4) from hemagglutinin__InfluenzaA__ABD78115
augaagaccaucaucgcccugagcuacauccugugccugguguucgcccagaagcugcccggcaacgacaacagcaccgccacccugugccugggccaccacgccgugcccaacggcacccuggugaagaccaucaccaacgaccagaucgaggugaccaacgccaccgagcuggugcagagcagcagcaccggcagaaucugcgacagcccccacagaauccuggacggcaagaacugcacccugaucgacgcccugcugggcgacccccacugcgacggcuuccagaacaaggagugggaccuguucguggagagaagcaaggccuacagcgacugcuaccccuacgacgugcccgacuacgccagccugagaagccugguggccagcagcggcacccuggaguucaccaacgagggcuucaacuggaccggcguggcccaggacggcaccagcuacgccugcaagagaggcagcgugaagagcuucuucagcagacugaacuggcugcacaagcuggaguacaaguaccccgcccugaacgugaccaugcccaacaacgacaaguucgacaagcuguacaucuggggcgugcaccaccccagcaccgacagcgaccagaccagccuguacgugcaggccagcggcagagugaccgugagcaccaagagaagccagcagaccgugauccccaacaucggcagcagacccugggugagaggcgugagcagcagaaucagcaucuacuggaccaucgugaagcccggcgacauccugcugaucaacagcaccggcaaccugaucgcccccagaggcuacuucaagaucagaagcggcaagagcagcaucaugagaagcgacgcccccaucggcaacugcaacagcgagugcaucacccccaacggcagcauccccaacgacaagcccuuccagaacgugaacagaaucaccuacggcgccugccccagauacgugaagcagaacacccugaagcuggccaccggcaugagaaacgugcccgagaagcagaccagaggcaucuucggcgccaucgccggcuucaucgagaacggcugggagggcaugguggacggcugguacggcuucagacaccagaacagcgagggcaccggccaggccgccgaccugaagagcacccaggccgccaucaaccagaucaacggcaagcugaacagacugaucgagaagaccaacgagaaguuccaccagaucgagaaggaguucagcgagguggagggcagaauccaggaccuggagaaguacguggaggacaccaagaucgaccuguggagcuacaacgccgagcugcugguggcccuggagaaccagcacaccaucgaccugaccgacagcgagaugaacaagcuguucgagagaaccagaaagcagcugagagagaacgccgaggacaugggcaacggcugcuucaagaucuaccacaagugcgacaacgccugcaucggcagcaucagaaacggcaccuacgaccacgacguguacagaaacgaggcccugaacaacagauuccagaucaagggcguggagcugaagagcggcuacaaggacuggauccuguggaucagcuucgccaucagcugcuuccugcugugcguggugcugcugggcuucaucaugugggccugccagaagggcaacaucagaugcaacaucugcaucuga

SEQ ID NO: 160862 - RNA, 1701 nt, Artificial Sequence
  derived and/or modified CDS sequence (opt4) from hemagglutinin__InfluenzaA__ABD78126
augaagaccaucaucgcccugagcuacauccugugccugguguucgcccagaagcugcccggcaacgacaacagcaccgccacccugugccugggccaccacgccgugcccaacggcacccuggugaagaccaucaccaacgaccagaucgaggugaccaacgccaccgagcuggugcagagcagcagcaccggcagaaucugcgacagcccccacagaauccuggacggcaagaacugcacccugaucgacgcccugcugggcgacccccacugcgacggcuuccagaacaaggagugggaccuguucguggagagaagcaaggccuacagcgacugcuaccccuacgacgugcccgacuacgccagccugagaagccugguggccagcagcggcacccuggaguucaccaacgagggcuucaacuggaccggcguggcccaggacggcaccagcuacgccugcaagagaggcagcgugaagagcuucuucagcagacugaacuggcugcacaagcuggaguacaaguaccccgcccugaacgugaccaugcccaacaacgacaaguucgacaagcuguacaucuggggcgugcaccaccccagcaccgacagcgaccagaccagccuguacgugcaggccagcggcagagugaccgugagcaccaagagaagccagcagaccgugauccccaacaucggcagcagacccugggugagaggcgugagcagcaucaucagcaucuacuggaccaucgugaagcccggcgacauccugcugaucaacagcaccggcaaccugaucgcccccagaggcuacuucaagaucagaagcggcaagagcagcaucaugagaagcgacgcccccaucggcaacugcaacagcgagugcaucacccccaacggcagcauccccaacgacaagcccuuccagaacgugaacagaaucaccuacggcgccugccccagauacgugaagcagaacacccugaagcuggccaccggcaugagaaacgugcccgagaagcagaccagaggcaucuucggcgccaucgccggcuucaucgagaacggcugggagggcaugguggacggcugguacggcuucagacaccagaacagcgagggcaccggccaggccgccgaccugaagagcacccaggccgccaucaaccagaucaacggcaagcugaacagacugaucgagaagaccaacgagaaguuccaccagaucgagaaggaguucagcgagguggagggcagaauccaggaccuggagaaguacguggaggacaccaagaucgaccuguggagcuacaacgccgagcugcugguggcccuggagaaccagcacaccaucgaccugaccgacagcgagaugaacaagcuguucgagagaaccagaaagcagcugagagagaacgccgaggacaugggcaacggcugcuucaagaucuaccacaagugcgacaacgccugcaucggcagcaucagaaacggcaccuacgaccacgacguguacagagacgaggcccugaacaacagauuccagaucaagggcguggagcugaagagcggcuacaaggacuggauccuguggaucagcuucgccaucagcugcuuccugcugugcguggugcugcugggcuucaucaugugggccugccagaagggcaacaucagaugcaacaucugcaucuga

SEQ ID NO: 160863 - RNA, 1701 nt, Artificial Sequence
  derived and/or modified CDS sequence (opt4) from hemagglutinin__InfluenzaA__ABD79032
augaagaccaucaucgcccugagcuacaucuucugccuggugcugggccaggacuuccccggcaacgacaacagcaccgccacccugugccugggccaccacgccgugcccaacggcacccuggugaagaccaucaccaacgaccagaucgaggugaccaacgccaccgagcuggugcagagcagcagcaccggcaagaucugcaacaacccccacagaauccuggacggcaucgacugcacccugaucgacgcccugcugggcgacccccacugcgacggcuuccagaacgagaccugggaccuguucguggagagaagcaaggccuucagcaacugcuaccccuacgacgugcccgacuacgccagccugagaagccugguggccagcagcggcacccuggaguucaucagcgagggcuucaccuggaccggcgugacccagaacggcggcagcaacgccugcaagagaggccccgacaucggcuucuucagcagacugaacuggcuguacaagagcggcagcaccuaccccgugcugaacgugaccaugcccaacaacgacaacuucgacaagcuguacaucuggggcgugcaccaccccagcaccgaccaggagcagaccagccuguacgugcaggccagcggcagagugaccgugagcaccaagagaagccagcagaccaucauccccaacaucggcagcagacccugggugagaggccugagcagcagaaucagcaucuacuggaccaucgugaagcccggcgacauccuggugaucaacagcaacggcaaccugaucgcccccagaggcuacuucaagaugagaaccggcaagagcagcaucaugagaagcgacgcccccaucggcaccugcaucagcgagugcaucacccccaacggcagcauccccaacgacaagcccuuccagaacgugaacaagaucaccuacggcgccugccccaaguacgugaagcagaacacccugaagcuggccaccggcaugagaaacgugcccgagaagcagaccagaggccuguucagcgccaucgccggcuucaucgagaacggcugggagggcaugaucgacggcugguacggcuucagacaccagaacagcgagggcaccggccaggccgccgaccugaagagcacccaggccgccaucgaccagaucaacggcaagcugaacagagugaucgagaagaccaacgagaaguuccaccagaucgagaaggaguucagcgagguggagggcagaauccaggaccuggagaaguacguggaggacaccaagaucgaccuguggagcuacaacgccgagcugcugguggcccuggagaaccagcacaccaucgaccugaccgacagcgagaugaacaagcuguucgagaagaccagaagacagcugagagagaacgccgaggacaugggcaacggcugcuucaagaucuaccacaagugcgacaacgccugcaucggcagcaucagaaacggcaccuacgaccacgacguguacagagacgaggcccugaacaacagauuccagaucaagggcguggagcugaagagcggcuacaaggacuggauccuguggaucagcuucgccaucagcugcuuccugcugugcguggugcugcugggcuucaucaugugggccugccagaagggcaacaucagaugcaacaucugcaucuga

SEQ ID NO: 160864 - RNA, 1701 nt, Artificial Sequence
  derived and/or modified CDS sequence (opt4) from hemagglutinin__InfluenzaA__ABD79112
augaaggccaagcugcugauccugcugugcgcccugagcgccaccgacgccgacaccaucugcaucggcuaccacgccaacaacagcaccgacaccguggacaccgugcuggagaagaacgugaccgugacccacagcgugaaccugcuggaggacagccacaacggcaagcugugcagacugaagggcaucgccccccugcagcugggcaagugcaacaucgccggcuggauccugggcaaccccgagugcgagagccugcugagcaagagaagcuggagcuacaucgccgagacccccaacagcgagaacggcgccugcuaccccggcgacuucgccgacuacgaggagcugagagagcagcugagcagcgugagcagcuucgagagauucgagaucuuccccaagggcagaagcuggcccgagcacaacaucgacaucggcgugaccgccgccugcagccacgccggcaagagcagcuucuacaagaaccugcuguggcugaccgagaaggacggcagcuaccccaaccugaacaagagcuacgugaacaagaaggagaaggaggugcugauccuguggggcgugcaccacccccccaacaucgagaaccagaagacccuguacagaaaggagaacgccuacgugagcguggugagcagcaacuacaacagaagauucacccccgagaucgccgagagacccaaggugagaggccaggccggcagaaucaacuacuacuggacccugcuggagcccggcgacaccaucaucuucgaggccaacggcaaccugaucgcccccugguacgccuucgcccugaacagaggcaucggcagcggcaucaucaccagcaacgccagcauggacgagugcgacaccaagugccagaccccccagggcgccaucaacagcagccugcccuuccagaacauccaccccuucaccaucggcgagugccccaaguacgugagaagcaccaagcugagaauggugaccggccugagaaacauccccagcauccagagcagaggccuguucggcgccaucgccggcuucaucgagggcggcugggacggcaugaucgacggcugguacggcuaccaccaccagaacgagcagggcagcggcuacgccgccgaccagaagagcacccagaacgccaucaacggcaucaccaacaaggugaacagcgugaucgagaagaugaacacccaguucaccgccgugggcaaggaguucaacaagcuggagaagagaauggagaaccugaacaagaagguggacgacggcuuccuggacaucuggaccuacaacgccgagcugcuggugcugcuggagaacgagagaacccuggacuuccacgacagcaacgugaagaaccuguacgagaaggugaagaaccagcugagaaacaacgccaaggagaucggcaacggcugcuucgaguucuaccacaagugcaacaacgagugcauggagagcgugaagaacggcaccuacgacuaccccaaguucagcgaggagagcaagcugaacagagagaagaucgacggcgugaagcuggagagcaugggcguguaccagauccuggccaucuacagcaccguggccagcagccuggugcugcuggugagccugggcgccaucagcuucuggaugugcagcaacggcagccugcagugcagaaucugcaucuga

SEQ ID NO: 160865 - RNA, 1701 nt, Artificial Sequence
  derived and/or modified CDS sequence (opt4) from hemagglutinin__InfluenzaA__ABD79123
augaagaccaucaucgcccugagcuacauccugugccugguguucgcccagaagcugcccggcaacgacaacagcaccgccacccugugccugggccaccacgccgugcccaacggcacccuggugaagaccaucaccaacgaccagaucgaggugaccaacgccaccgagcuggugcagagcagcagcaccggcagaaucugcgacagcccccaccagauccuggacggcaagaacugcacccugaucgacgcccugcugggcgacccccacugcgacggcuuccagaacaaggagugggaccuguucguggagagaagcaccgccuacagcaacugcuaccccuacgacgugcccgacuacgccagccugagaagccugguggccagcagcggcacccuggaguucaccaaggagggcuucaacuggaccggcguggcccaggacggcaccagcuacgccugcaagagaggcagcgugaagagcuucuucagcagacugaacuggcugcacaagcuggaguacaaguaccccgcccugaacgugaccaugcccaacaacgacaaguucgacaagcuguacaucuggggcgugcaccaccccagcaccgacagcgaccagaccagccuguacgugcaggccagcggcagagugaccgugagcaccaagagaagccagcagaccgugauccccaacaucggcagcagacccugggugagaggcgugagcagcagaaucagcaucuacuggaccaucgugaagcccggcgacauccugcugaucaacagcaccggcaaccugaucgcccccagaggcuacuucaagaucagaagcggcaagagcagcaucaugagaagcgacgcccccaucgacaacugcaacagcgagugcaucacccccaacggcagcaucagcaacgacaagcccuuccagaacgugaacagaaucaccuacggcgccugccccagauacgugaagcagaacacccugaagcuggccaccggcaugagaaacgugcccgagaagcagaccagaggcaucuucggcgccaucgccggcuucaucgagaacggcugggagggcaugguggacggcugguacggcuucagacaccagaacagcgagggcaccggccaggccgccgaccugaagagcacccaggccgccaucaaccagaucaacggcaagcugaacagacugaucgagaagaccaacgagaaguuccaccagaucgagaaggaguucagcgagguggagggcagaauccaggaccuggagaaguacguggaggacaccaagaucgaccuguggagcuacaacgccgagcugcugguggcccuggagaaccagcacaccaucgaccugaccgacagcgagaugaacaagcuguucgagagaaccagaaagcagcugagagagaacgccgaggacaugggcaacggcugcuucagaaucuaccacaagugcgacaacgccugcaucggcagcaucagaaacggcaccuacgaccacgacguguacagagacgaggcccugaacaacagauuccagaucaagggcguggagcugaagagcggcuacaaggacuggauccuguggaucagcuucgccaucagcugcuuccugcugugcguggugcugcugggcuucaucaugugggccugccagaagggcaacaucagaugcaacaucugcaucuga

SEQ ID NO: 160866 - RNA, 1701 nt, Artificial Sequence
  derived and/or modified CDS sequence (opt4) from hemagglutinin__InfluenzaA__ABD79134
augaagaccaucaucgcccugagcuacauccugugccugguguucgcccagaagcugcccggcaacgacaacagcaccgccacccugugccugggccaccacgccgugcccaacggcacccuggugaagaccaucaccaacgaccagaucgaggugaccaacgccaccgagcuggugcagagcagcagcaccggcagaaucugcgacagcccccaccagauccuggacggcaagaacugcacccugaucgacgcccugcugggcgacccccacugcgacggcuuccagaacaagaagugggaccuguucguggagagaagcaccgccuacagcaacugcuaccccuacgacgugcccgacuacgccagccugagaagccugguggccagcagcggcacccuggaguucaccaaggagggcuucaacuggaccggcguggcccaggacggcaccagcuacgccugcaagagaggcagcgugaagagcuucuucagcagacugaacuggcugcacaagcuggaguacaaguaccccgcccugaacgugaccaugcccaacaacgacaaguucgacaagcuguacaucuggggcgugcaccaccccagcaccgacagcgaccagaccagccuguacgugcaggccagcggcagagugaccgugagcaccaagagaagccagcagaccgugauccccaacaucggcagcagacccugggugagaggcgugagcagcagaaucagcaucuacuggaccaucgugaagcccggcgacauccugcugaucaacagcaccggcaaccugaucgcccccagaggcuacuucaagaucagaagcggcaagagcagcaucaugagaagcgacgcccccaucgacaacugcaacagcgagugcaucacccccaacggcagcaucagcaacgacaagcccuuccagaacgugaacagaaucaccuacggcgccugccccagauacgugaagcagaacacccugaagcuggccaccggcaugagaaacgugcccgagaagcagaccagaggcaucuucggcgccaucgccggcuucaucgagaacggcugggagggcaugguggacggcugguacggcuucagacaccagaacagcgagggcaccggccaggccgccgaccugaagagcacccaggccgccaucaaccagaucaacggcaagcugaacagacugaucgagaagaccaacgagaaguuccaccagaucgagaaggaguucagcgagguggagggcagaauccaggaccuggagaaguacguggaggacaccaagaucgaccuguggagcuacaacgccgagcugcugguggcccuggagaaccagcacaccaucgaccugaccgacagcgagaugaacaagcuguucgagagaaccagaaagcagcugagagagaacgccgaggacaugggcaacggcugcuucaagaucuaccacaagugcgacaacgccugcaucggcagcaucagaaacggcaccuacgaccacgacguguacagagacgaggcccugaacaacagauuccagaucaagggcguggagcugaagagcggcuacaaggacuggauccuguggaucagcuucgccaucagcugcuuccugcugugcguggugcugcugggcuucaucaugugggccugccagaagggcaacaucagaugcaacaucugcaucuga

SEQ ID NO: 160867 - RNA, 1701 nt, Artificial Sequence
  derived and/or modified CDS sequence (opt4) from hemagglutinin__InfluenzaA__ABD79145
augaagaccaucaucgcccugagcuacauccugugccugguguucgcccagaagcugcccggcaacgacaacagcaccgccacccugugccugggccaccacgccgugcccaacggcacccuggugaagaccaucaccaacgaccagaucgaggugaccaacgccaccgagcuggugcagagcagcagcaccggcagaaucugcgacagcccccaccagauccuggacggcaagaacugcacccugaucgacgcccugcugggcgacccccacugcgacggcuuccagaacaaggagugggaccuguucguggagagaagcaccgccuacagcaacugcuaccccuacgacgugcccgacuacgccagccugagaagccugguggccagcagcggcacccuggaguucaccaaggagggcuucaacuggaccggcguggcccaggacggcaccagcuacgccugcaagagaggcagcgugaagagcuucuucagcagacugaacuggcugcacaagcuggaguacaaguaccccgcccugaacgugaccaugcccaacaacgacaaguucgacaagcuguacaucuggggcgugcaccaccccagcaccgacagcgaccagaccagccuguacgugcaggccagcggcagagugaccgugagcaccaagagaagccagcagaccgugauccccaacaucggcagcagacccugggugagaggcgugagcagcagaaucagcaucuacuggaccaucgugaagcccggcgacauccugcugaucaacagcaccggcaaccugaucgcccccagaggcuacuucaagaucagaagcggcaagagcagcaucaugagaagcgacgcccccaucgacaacugcaacagcgagugcaucacccccaacggcagcaucagcaacgacaagcccuuccagaacgugaacagaaucaccuacggcgccugccccagauacgugaagcagaacacccugaagcuggccaccggcaugagaaacgugcccgagaagcagaccagaggcaucuucggcgccaucgccggcuucaucgagaacggcugggagggcaugguggacggcugguacggcuucagacaccagaacagcgagggcaccggccaggccgccgaccugaagagcacccaggccgccaucaaccagaucaacggcaagcugaacagacugaucgagaagaccaacgagaaguuccaccagaucgagaaggaguucagcgagguggagggcagaauccaggaccuggagaaguacguggaggacaccaagaucgaccuguggagcuacaacgccgagcugcugguggcccuggagaaccagcacaccaucgaccugaccgacagcgagaugaacaagcuguucgagagaaccagaaagcagcugagagagaacgccgaggacaugggcaacggcugcuucaagaucuaccacaagugcgacaacgccugcaucggcagcaucagaaacggcaccuacgaccacgacguguacagagacgaggcccugaacaacagauuccagaucaagggcguggagcugaagagcggcuacaaggacuggauccuguggaucagcuucgccaucagcugcuuccugcugugcguggugcugcugggcuucaucaugugggccugccagaagggcaacaucagaugcaacaucugcaucuga

SEQ ID NO: 160868 - RNA, 1701 nt, Artificial Sequence; identical to SEQ ID NO: 160867
  derived and/or modified CDS sequence (opt4) from hemagglutinin__InfluenzaA__ABD79156

SEQ ID NO: 160869 - RNA, 1701 nt, Artificial Sequence; identical to SEQ ID NO: 160083
  derived and/or modified CDS sequence (opt4) from hemagglutinin__InfluenzaA__ABD79167

SEQ ID NO: 160870 - RNA, 1701 nt, Artificial Sequence; identical to SEQ ID NO: 160867
  derived and/or modified CDS sequence (opt4) from hemagglutinin__InfluenzaA__ABD79178

SEQ ID NO: 160871 - RNA, 1701 nt, Artificial Sequence
  derived and/or modified CDS sequence (opt4) from hemagglutinin__InfluenzaA__ABD79189
augaagaccaucaucgcccugagcuacauccugugccugguguucgcccagaagcugcccggcaacgacaacagcaccgccacccugugccugggccaccacgccgugcccaacggcacccuggugaagaccaucaccaacgaccagaucgaggugaccaacgccaccgagcuggugcagagcagcagcaccggcagaaucugcgacagcccccaccagauccuggacggcaagaacugcacccugaucgacgcccugcugggcgacccccacugcgacggcuuccagaacaaggagugggaccuguucguggagagaagcaccgccuacagcaacugcuaccccuacgacgugcccgacuacgccagccugagaagccugguggccagcagcggcacccuggaguucaccaaggagggcuucaacuggaccggcguggcccaggacggcaccagcuacgccugcaagagaggcagcgugaagagcuucuucagcagacugaacuggcugcacaagcuggaguacaaguaccccgcccugaacgugaccaugcccaacaacgacaaguucgacaagcuguacaucuggggcgugcaccaccccagcaccgacagcgaccagaccagccuguacgugcaggccagcggcagagugaccgugagcaccaagagaagccagcagaccgugauccccaacaucggcagcagacccugggugagaggcgugagcagcagaaucagcaucuacuggaccguggugaagcccggcgacauccugcugaucaacagcaccggcaaccugaucgcccccagaggcuacuucaagaucagaagcggcaagagcagcaucaugagaagcgacgcccccaucgacagcugcaacagcgagugcaucacccccaacggcagcaucagcaacgacaagcccuuccagaacgugaacagaaucaccuacggcgccugccccagauacgugaagcagaacacccugaagcuggccaccggcaugagaaacgugcccgagaagcagaccagaggcaucuucggcgccaucgccggcuucaucgagaacggcugggagggcaugguggacggcugguacggcuucagacaccagaacagcgagggcaccggccaggccgccgaccugaagagcacccaggccgccaucaaccagaucaacggcaagcugaacagacugaucgagaagaccaacgagaaguuccaccagaucgagaaggaguucagcgagguggagggcagaauccaggaccuggagaaguacguggaggacaccaagaucgaccuguggagcuacaacgccgagcugcugguggcccuggagaaccagcacaccaucgaccugaccgacagcgagaugaacaagcuguucgagagaaccagaaagcagcugagagagaacgccgaggacaugggcaacggcugcuucaagaucuaccacaagugcgacaacgccugcaucggcagcaucagaaacggcaccuacgaccacgacguguacagagacgaggcccugaacaacagauuccagaucaagggcguggagcugaagagcggcuacaaggacuggauccuguggaucagcuucgccaucagcugcuuccugcugugcguggugcugcugggcuucaucaugugggccugccagaagggcaacaucagaugcaacaucugcaucuga

SEQ ID NO: 160872 - RNA, 1701 nt, Artificial Sequence; identical to SEQ ID NO: 160867
  derived and/or modified CDS sequence (opt4) from hemagglutinin__InfluenzaA__ABD79200

SEQ ID NO: 160873 - RNA, 1701 nt, Artificial Sequence
  derived and/or modified CDS sequence (opt4) from hemagglutinin__InfluenzaA__ABD79211
augaagaccaucaucgcccugagcuacauccugugccugguguucgcccagaagcugcccggcaacgacaacagcaccgccacccugugccugggccaccacgccgugcccaacggcacccuggugaagaccaucaccaacgaccagaucgaggugaccaacgccaccgagcuggugcagagcagcagcaccggcagaaucugcgacagcccccaccagauccuggacggcaagaacugcacccugaucgacgcccugcugggcgacccccacugcgacggcuuccagaacaaggagugggaccuguucguggagagaagcaccgccuacagcaacugcuaccccuacgacgugcccgacuacgccagccugagaagccugguggccagcagcggcacccuggaguucaccaaggagggcuucaacuggaccggcguggcccaggacggcaccagcuacgccugcaagagaggcagcgugaagagcuucuucagcagacugaacuggcugcacaagcuggaguacaaguaccccgcccugaacgugaccaugcccaacaacgacaaguucgacaagcuguacaucuggggcgugcaccaccccagcaccgacagcgaccagaccagccuguacgugcaggccagcggcagagugaccgugagcaccaagagaagccagcagaccgugauccccaacaucggcagcagacccuggaucagaggcgugagcagcagaaucagcaucuacuggaccaucgugaagcccggcgacauccugcugaucaacagcaccggcaaccugaucgcccccagaggcuacuucaagaucagaagcggcaagagcagcaucaugagaagcgacgcccccaucgacaacugcaacagcgagugcaucacccccaacggcagcaucagcaacgacaagcccuuccagaacgugaacagaaucaccuacggcgccugccccagauacgugaagcagaacacccugaagcuggccaccggcaugagaaacgugcccgagaagcagaccagaggcaucuucggcgccaucgccggcuucaucgagaacggcugggagggcaugguggacggcugguacggcuucagacaccagaacagcgagggcaccggccaggccgccgaccugaagagcacccaggccgccaucaaccagaucaacggcaagcugaacagacugaucgagaagaccaacgagaaguuccaccagaucgagaaggaguucagcgagguggagggcagaauccaggaccuggagaaguacguggaggacaccaagaucgaccuguggagcuacaacgccgagcugcugguggcccuggagaaccagcacaccaucgaccugaccgacagcgagaugaacaagcuguucgagagaaccagaaagcagcugagagagaacgccgaggacaugggcaacggcugcuucaagaucuaccacaagugcgacaacgccugcaucggcagcaucagaaacggcaccuacgaccacgacguguacagagacgaggcccugaacaacagauuccagaucaagggcguggagcugaagagcggcuacaaggacuggauccuguggaucagcuucgccaucagcugcuuccugcugugcguggugcugcugggcuucaucaugugggccugccagaagggcaacaucagaugcaacaucugcaucuga

SEQ ID NO: 160874 - RNA, 1701 nt, Artificial Sequence; identical to SEQ ID NO: 160083
  derived and/or modified CDS sequence (opt4) from hemagglutinin__InfluenzaA__ABD79222

SEQ ID NO: 160875 - RNA, 1701 nt, Artificial Sequence; identical to SEQ ID NO: 160083
  derived and/or modified CDS sequence (opt4) from hemagglutinin__InfluenzaA__ABD79233

SEQ ID NO: 160876 - RNA, 1701 nt, Artificial Sequence
  derived and/or modified CDS sequence (opt4) from hemagglutinin__InfluenzaA__ABD79244
augaagaccaucaucgcccugagcuacauccugugccugguguucgcccagaagcugcccggcaacgacaacagcaccgccacccugugccugggccaccacgccgugcccaacggcacccuggugaagaccaucaccaacgaccagaucgaggugaccaacgccaccgagcuggugcagagcagcagcaccggcagaaucugcgacagcccccaccagauccuggacggcaagaacugcacccugaucgacgcccugcugggcgacccccacugcgacggcuucaagaacaaggagugggaccuguucguggagagaagcaccgccuacagcaacugcuaccccuacgacgugcccgacuacgccagccugagaagccugguggccagcagcggcacccuggaguucaccaacgagggcuucaacuggaccggcguggcccaggacggcaccagcuacgccugcaagagaggcagcgugaagagcuucuucagcagacugaacuggcugcacaagcuggaguacaaguaccccgcccugaacgugaccaugcccaacaacgacaaguucgacaagcuguacaucuggggcgugcaccaccccagcaccgacagcgaccagaccagccuguacgugcaggccagcggcagagugaccgugagcaccaagagaagccagcagaccgugauccccaacaucggcagcagacccugggugagaggcgugagcagcagaaucagcaucuacuggaccaucgugaagcccggcgacauccugcugaucaacagcaccggcaaccugaucgcccccagaggcuacuucaagaucagaagcggcaagagcagcaucaugagaagcgacgcccccaucgacaacugcaacagcgagugcaucacccccaacggcagcauccccaacgacaagcccuuccagaacgugaacagaaucaccuacggcgccugccccagauacgugaagcagaacacccugaagcuggccaccggcaugagaaacgugcccgagaagcagaccagaggcaucuucggcgccaucgccggcuucaucgagaacggcugggagggcaugguggacggcugguacggcuucagacaccagaacagcgagggcaccggccaggccgccgaccugaagagcacccaggccgccaucaaccagaucaacggcaagcugaacagacugaucgagaagaccaacgagaaguuccaccagaucgagaaggaguucagcgagguggagggcagaauccaggaccuggagaaguacguggaggacaccaagaucgaccuguggagcuacaacgccgagcugcugguggcccuggagaaccagcacaccaucgaccugaccgacagcgagaugaacaagcuguucgagagaaccagaaagcagcugagagagaacgccgaggacaugggcaacggcugcuucaagaucuaccacaagugcgacaacgccugcaucggcagcaucagaaacggcaccuacgaccacgacguguacagagacgaggcccugaacaacagauuccagaucaagggcguggagcugaagagcggcuacaaggacuggauccuguggaucagcuucgccaucagcugcuuccugcugugcguggugcugcugggcuucaucaugugggccugccagaagggcaacaucagaugcaacaucugcaucuga

SEQ ID NO: 160877 - RNA, 1701 nt, Artificial Sequence; identical to SEQ ID NO: 160303
  derived and/or modified CDS sequence (opt4) from hemagglutinin__InfluenzaA__ABD94734

SEQ ID NO: 160878 - RNA, 1701 nt, Artificial Sequence; identical to SEQ ID NO: 160690
  derived and/or modified CDS sequence (opt4) from hemagglutinin__InfluenzaA__ABD94745

SEQ ID NO: 160879 - RNA, 1701 nt, Artificial Sequence
  derived and/or modified CDS sequence (opt4) from hemagglutinin__InfluenzaA__ABD94767
augaagaccaucaucgcccugagcuacauccugugccugguguucgcccagaagcugcccgugaacgacaacagcaccgccacccugugccugggccaccacgccgugcccaacggcacccuggugaagaccaucaccaacgacaacaucgaggugaccaacgccaccgagcuggugcagagcagcagcaccggcagaaucugcgacagcccccaccagauccuggacggcgagaacugcacccugaucgacgcccugcugggcgacccccacugcgacggcuuccagaacaaggagugggaccuguucguggagagaagcaccgccuacagcaacugcuaccccuacgacgugcccgacuacgccagccugagaagccugguggccagcagcggcacccuggaguucaacaacgagagcuucaacuggaccggcguggaccagaacggcaccagcagcgccugcaagagaagaagcaacaagagcuucuucagcagacugaacuggcugcaccagcugaaguacaaguaccccgcccugaacgugaccaugcccaacaacgagaaguucgacaagcuguacaucuggggcgugcaccaccccagcaccgacagcgaccagaucagccuguacgcccaggccagcggcagagugaccgugagcaccaagagaagccagcagaacgugauccccaacaucggcagcagacccugggugagaggcgugagcagcagaaucagcaucuacuggaccaucgugaagcccggcgacauccugcugaucaacagcaccggcaaccugaucgcccccagaggcuacuucaagaucagaagcggcaagagcagcaucaugagaagcaacgcccccaucggcaagugcaacagcgagugcaucacccccaacggcagcauccccaacgacaagcccuuccagaacgugaacagaaucaccuacggcgccugccccagauacgugaagcagaacacccugaagcuggccaccggcaugagaaacgugcccgagaagcagaccagaggcaucuucggcgccaucgccggcuucaucgagaacggcugggagggcaugguggacggcugguacggcuucagacaccagaacagcgagggcaccggccaggccgccgaccugaagagcacccaggccgccaucaaccagaucaacggcaagcugaacagacugaucgagaagaccaacgagaaguuccaccagaucgagaaggaguucagcgagguggagggcagaauccaggaccuggagaaguacguggaggacaccaagaucgaccuguggagcuacaacgccgagcugcugguggcccuggagaaccagcacaccaucgaccugaccgacagcgagaugaacaagcuguucgagagaaccagaaagcagcugagagagaacgccgaggacaugggcaacggcugcuucaagaucuaccacaagugcgacaacgccugcaucggcagcaucagaaacggcaccuacgaccacgacguguacagagacgaggcccugaacaacagauuccagaucaagggcguggagcugaagagcggcuacaaggacuggauccuguggaucagcuucgccaucagcugcuuccugcugugcguggugcugcugggcuucaucaugugggccugccagaagggcaacaucagaugcaacaucugcaucuga

SEQ ID NO: 160880 - RNA, 1698 nt, Artificial Sequence; identical to SEQ ID NO: 160860
  derived and/or modified CDS sequence (opt4) from hemagglutinin__InfluenzaA__ABD94778

SEQ ID NO: 160881 - RNA, 1698 nt, Artificial Sequence; identical to SEQ ID NO: 160860
  derived and/or modified CDS sequence (opt4) from hemagglutinin__InfluenzaA__ABD94789

SEQ ID NO: 160882 - RNA, 1701 nt, Artificial Sequence
  derived and/or modified CDS sequence (opt4) from hemagglutinin__InfluenzaA__ABD94822
augaagaccaucaucgcccugagcuacauccugugccugguguucgcccagaagauccccggcaacgacaacagcaccgccacccugugccugggccaccacgccgugcccaacggcacccuggugaagaccaucaccaacgaccagaucgaggugaccaacgccaccgagcuggugcagagcagcagcaccggcagaaucugcgacagcccccacagaauccuggacggcgagaacugcacccugaucgacgcccugcugggcgacccccacugcgacggcuuccagaacaaggagugggaccuguucguggagagaagcaaggccuacagcaacugcuaccccuacgacgugcccgacuacgccagccugagaagccugguggccagcagcggcacccuggaguucaacaacgagagcuucaacuggaccggcguggcccagaacggcaccagcuacgccugcaagagaagcagcaucaagagcuucuucagcagacugaacuggcugcaccagcugaaguacaaguaccccgcccugaacgugaccaugcccaacaacgacaaguucgacaagcuguacaucuggggcgugcaccaccccagcaccgacagcgaccagaccagccuguacgcccaggccagcggcagagugaccgugagcaccaagagaagccagcagaccgugauccccaacaucggcagcagacccugggugagaggcgugagcagcagaaucagcaucuacuggaccaucgugaagcccggcgacauccugcugaucaacagcaccggcaaccugaucgcccccagaggcuacuucaagaucagaagcggcaagagcagcaucaugagaagcgacgcccccaucggcaagugcaacagcgagugcaucacccccaacggcagcauccccaacgacaagcccuuccagaacgugaacagaaucaccuacggcgccugccccagauacgugaagcagaacacccugaagcuggccaccggcaugagaaacgugcccgagaagcagaccagaggcaucuucggcgccaucgccggcuucaucgagaacggcugggagggcaugguggacggcugguacggcuucagacaccagaacagcgagggcaccggccaggccgccgaccugaagagcacccaggccgccaucaaccagaucaacggcaagcugaacagacugaucgagaagaccaacgagaaguuccaccagaucgagaaggaguucagcgagguggagggcagaauccaggaccuggagaaguacguggaggacaccaagaucgaccuguggagcuacaacgccgagcugcugguggcccuggagaaccagcacaccaucgaccugaccgacagcgagaugaacaagcuguucgagagaaccagaaagcagcugagagagaacgccgaggacaugggcaacggcugcuucaagaucuaccacaagugcgacaacgccugcaucggcagcaucagaaacggcaccuacgaccacgacguguacagagacgaggcccugaacaacagauuccagaucaagggcguggagcugaagagcggcuacaaggacuggauccuguggaucagcuucgccaucagcugcuuccugcugugcguggugcugcugggcuucaucaugugggccugccagaagggcaacaucagaugcaacaucugcaucuga

SEQ ID NO: 160883 - RNA, 1701 nt, Artificial Sequence
  derived and/or modified CDS sequence (opt4) from hemagglutinin__InfluenzaA__ABD94833
augaagaccaucaucgcccugagcuacauccugugccugguguucgcccagaagcugcccggcaacgacaacagcaccgccacccugugccugggccaccacgccgugcccaacggcacccuggugaagaccaucaccaacgaccagaucgaggugaccaacgccaccgagcuggugcagagcagcagcaccggcagaaucugcgacagcccccacagaauccuggacggcaagaacugcacccugaucgacgcccugcugggcgacccccacugcgacggcuuccagaacaaggagugggaccuguucguggagagaagcaaggccuacagcgacugcuaccccuacgacgugcccgacuacgccagccugagaagccugguggccagcagcggcacccuggaguucaccaacgagggcuucaacuggaccggcguggcccaggacggcaccagcuacgccugcaagagaggcagcgugaagagcuucuucagcagacugaacuggcugcacaagcuggaguacaaguaccccgcccugaacgugaccaugcccaacaacgacaaguucgacaagcuguacaucuggggcgugcaccaccccagcaccgacagcgaccagaccagccuguacgugcaggccagcggcagagugaccgugagcaccaagagaagccagcagaccgugauccccaacaucggcagcagacccugggugagaggcgugagcagcagaaucagcaucuacuggaccaucgugaagcccggcgacauccugcugaucaacagcaccggcaaccugaucgcccccagaggcuacuucaagaucagaagcggcaagagcagcaucaugagaagcgacgcccccaucggcaacugcaacagcgagugcaucacccccaacggcagcauccccaacgacaagcccuuccagaacgugaacagaaucaccuacggcgccugccccagauacgugaagcagaacacccugaagcuggccaccggcaugagaaacgugcccgagaagcagaccagaggcaucuucggcgccaucgccggcuucaucgagaacggcugggagggcaugguggacggcugguacggcuucagacaccagaacagcgagggcaccggccaggccgccgaccugaagagcacccaggccgccaucaaccagaucaacggcaagcugaacagacugaucgagaagaccaacgagaaguuccaccagaucgagaaggaguucagcgagguggagggcagaauccaggaccuggagaaguacguggaggacaccaagaucgaccuguggagcuacaacgccgagcugcugguggcccuggagaaccagcacaccaucgaccugaccgacagcgagaugaacaagcuguucgagagaaccagaaagcagcugagagagaacgccgaggacaugggcaacggcugcuucaagaucuaccacaagugcgacaacgccugcaucggcagcaucagaaacggcaccuacgaccacgacguguacagagacgaggcccugaacaacagauuccagaucaagggcguggagcugaagagcggcuacaaggacuggauccuguggaucagcuucgccaucagcugcuuccugcugugcguggugcugcugggcuucaucaugugggccugccagaagggcaacaucagaugcaacaucugcaucuga

SEQ ID NO: 160884 - RNA, 1701 nt, Artificial Sequence
  derived and/or modified CDS sequence (opt4) from hemagglutinin__InfluenzaA__ABD94844
augaagaccaucaucgcccugagcuacauccugugcaugguguucgcccagaagcugcccggcaacgacaacagcaccgccacccugugccugggccaccacgccgugcccaacggcacccuggugaagaccaucaccaacgaccagaucgaggugaccaacgccaccgagcuggugcagagcagcagcaccggcagaaucugcgacagcccccacagaauccuggacggcaagaacugcacccugaucgacgcccugcugggcgacccccacugcgacggcuuccagaacaaggagugggaccuguucguggagagaagcaaggccuacagcaacugcuaccccuacgacgugcccgacuacgccagccugagaagccugguggccagcagcggcacccuggaguucaacaacgagagcuucaacuggaccggcguggcccagaacggcaccagcuacgccugcaagagaagaagcgugaagagcuucuucagcagacugaacuggcugcacaagcuggaguacaaguaccccgcccugaacgugaccaugcccaacaacgacaaguucgacaagcuguacaucuggggcgugcaccaccccagcaccgacagcgaccagaccagccuguacgugcaggccagcggcagagugaccgugagcaccaagagaagccagcagaccgugauccccaacaucggcagcagacccugggugagaggcgugagcagcaucaucagcaucuacuggaccaucgugaagcccggcgacauccugcugaucaacagcaccggcaaccugaucgcccccagaggcuacuucaagaucagaagcggcaagagcagcaucaugagaagcgacgcccccaucggcaacugcaacagcgagugcaucacccccaacggcagcauccccaacgacaagcccuuccagaacgugaacagaaucaccuacggcgccugccccagauacgugaagcagaacacccugaagcuggccaccggcaugagaaacgugcccgagaagcagaccagaggcaucuucggcgccaucgccggcuucaucgagaacggcugggagggcaugguggacggcugguacggcuucagacaccagaacagcgagggcaccggccaggccgccgaccugaagagcacccaggccgccaucaaccagaucaacggcaagcugaacagacugaucgagaagaccaacgagaaguuccaccagaucgagaaggaguucagcgagguggagggcagaauccaggaccuggagaaguacguggaggacaccaagaucgaccuguggagcuacaacgccgagcugcugguggcccuggagaaccagcacaccaucgaccugaccgacagcgagaugaacaagcuguucgagagaaccagaaagcagcugagagagaacgccgaggacaugggcaacggcugcuucaagaucuaccacaagugcgacaacgccugcaucggcagcaucagaaacggcaccuacgaccacgacguguacagagacgaggcccugaacaacagauuccagaucaagggcguggagcugaagagcggcuacaaggacuggauccuguggaucagcuucgccaucagcugcuuccugcugugcguggugcugcugggcuucaucaugugggccugccagaagggcaacaucagaugcaacaucugcaucuga

SEQ ID NO: 160885 - RNA, 1701 nt, Artificial Sequence
  derived and/or modified CDS sequence (opt4) from hemagglutinin__InfluenzaA__ABD94855
augaagaccaucaucgcccugagcuacauccugugccugguguucgcccagaagcugcccggcaacgacaacagcaccgccacccugugccugggccaccacgccgugcccaacggcacccuggugaagaccaucaccaacgaccagaucgaggugaccaacgccaccgagcuggugcagggcagcagcaccggcagaaucugcgacagcccccacagaauccuggacggcaagaacugcacccugaucgacgcccugcugggcgacccccacugcgacggcuuccagaacaaggagugggaccuguucguggagagaagcaaggccuacagcaacugcuaccccuacgacgugcccgacuacgccagccugagaagccugguggccagcagcggcacccuggaguucaacaacgagagcuucaacuggaccggcguggcccagaacggcaccagcuacgccugcaagagaggcagcgugaagagcuucuucagcagacugaacuggcugcacaagcuggaguacaaguaccccgcccugaacgugaccaugcccaacaacgacaaguucgacaagcuguacaucuggggcgugcaccaccccagcaccgacagcgaccagaccagccuguacgugcaggccagcggcagagugaccgugagcaccaagagaagccagcagaccgugauccccaacaucggcagcagacccugggugagaggcgugagcagcagaaucagcaucuacuggaccaucgugaagcccggcgacauccugcugaucaacagcaccggcaaccugaucgcccccagaggcuacuucaagaucagaagcggcaagagcagcaucaugagaagcgacgcccccaucgacaacugcaacagcgagugcaucacccccaacggcagcauccccaacgacaagcccuuccagaacgugaacagaaucaccuacggcgccugccccagauacgugaagcagaacacccugaagcuggccaccggcaugagaaacgugcccgagaagcagaccagaggcaucuucggcgccaucgccggcuucaucgagaacggcugggagggcaugguggacggcugguacggcuucagacaccagaacagcgagggcaccggccaggccgccgaccugaagagcacccaggccgccaucaaccagaucaacggcaagcugaacagacugaucgagaagaccaacgagaaguuccaccagaucgagaaggaguucagcgagguggagggcagaauccaggaccuggagaaguacguggaggacaccaagaucgaccuguggagcuacaacgccgagcugcugguggcccuggagaaccagcacaccaucgaccugaccgacagcgagaugaacaagcuguucgagagaaccagaaagcagcugagagagaacgccgaggacaugggcaacggcugcuucaagaucuaccacaagugcgacaacgccugcaucggcagcaucagaaacggcaccuacgaccacgacguguacagagacgaggcccugaacaacagauuccagaucaagggcguggagcugaagagcggcuacaaggacuggauccuguggaucagcuucgccaucagcugcuuccugcugugcguggugcugcugggcuucaucaugugggccugccagaagggcaacaucagaugcaacaucugcaucuga

SEQ ID NO: 160886 - RNA, 1701 nt, Artificial Sequence
  derived and/or modified CDS sequence (opt4) from hemagglutinin__InfluenzaA__ABD94866
augaagaccaucaucgcccugagcuacaucagcugccugguguucgcccagaagcugcccggcaacgacaacagcaccgccacccugugccugggccaccacgccgugcccaacggcacccuggugaagaccaucaccaacgaccagaucgaggugaccaacgccaccgagcuggugcagagcagcagcaccggcagaaucugcgacggcccccaccagauccuggacggcaagaacugcacccugaucgacgcccugcugggcgacccccacugcgacggcuuccagaacaaggagugggaccuguucguggagagaagcaaggccuacagcaacugcuaccccuacgacgugcccgacuacgccagccugagaagccugguggccagcagcggcacccuggaguucaccaacgagagcuucaacuggaccggcguggcccagaacggcaccagcuacgccugcaagagaggcagcgugaagagcuucuucagcagacugaacuggcugcacaagcuggaguacaaguaccccgcccugaacgugaccaugcccaacaacgacaaguucgacaagcuguacaucuggggcgugcaccaccccagcaccgacagcgaccagaccagccuguacgugcagagcagcggcagaaucaccgugagcaccaagagaagccagcagaccgugacccccaacaucggcagcagacccugggugagaggcgugagcagcagaaucagcaucuacuggaccaucgugaagcccggcgacauccugcugaucaccagcaccggcaaccugaucgcccccagaggcuacuucaagaucagaagaggcaagagcagcaucaugagaagcgacgcccccaucgacaacugcaacagcgagugcaucacccccaacggcagcauccccaacgacaagcccuuccagaacgugaacagaaucaccuacggcgccugccccagauacgugaagcagaacacccugaagcuggccaccggcaugagaaacgugcccgagaagcagaccagaggcaucuucggcgccaucgccggcuucaucgagaacggcugggagggcaugguggacggcugguacggcuucagacaccagaacagcgagggcaccggccaggccgccgaccugaagagcacccaggccgccaucaaccagaucaacggcaagcugaacagacugaucgagaagaccaacgagaaguuccaccagaucgagaaggaguucagcgagguggagggcagaauccaggaccuggagaaguacguggaggacaccaagaucgaccuguggagcuacaacgccgagcugcugguggcccuggagaaccagcacaccaucgaccugaccgacagcgagaugaacaagcuguucgagagaaccagaaagcagcugagagagaacgccgaggacaugggcaacggcugcuucaagaucuaccacaagugcgacaacgccugcaucggcagcaucagaaacggcaccuacgaccacgacguguacagagacgaggcccugaacaacagauuccagaucaagggcguggagcugaagagcggcuacaaggacuggauccuguggaucagcuucgccaucagcugcuuccugcugugcguggugcugcugggcuucaucaugugggccugccagaagggcaacaucagaugcaacaucugcaucuga

SEQ ID NO: 160887 - RNA, 1701 nt, Artificial Sequence
  derived and/or modified CDS sequence (opt4) from hemagglutinin__InfluenzaA__ABD94877
augaagaccaucaucgcccugagcuacauccugugccugguguucgcccagaagcugcccggcaacgacaacagcaccgccacccugugccugggccaccacgccgugcccaacggcacccuggugaagaccaucaccaacgaccagaucgaggugaccaacgccaccgagcuggugcagagcagcagcaccggcagaaucugcgacagcccccacagaauccuggacggcaagaacugcacccugaucgacgcccugcugggcgacccccacugcgacggcuuccagaacaaggagugggaccuguucguggagagaagcaaggccuacagcaacugcuaccccuacgacgugcccgacuacgccagccugagaagccugguggccagcagcggcacccuggaguucaacaacgagagcuucaacuggaccggcguggcccagaacggcaccagcuacgccugcaagagaagaagcgugaagagcuucuucagcagacugaacuggcugcacaagcuggaguacaaguaccccgcccugaacgugaccaugcccaacaacgacaaguucgacaagcuguacaucuggggcgugcaccaccccagcaccgacagcgaccagaccagccuguacgugcaggccagcggcagagugaccgugagcaccaagagaagccagcagaccgugauccccaacaucggcagcagacccugggugagaggcgugagcagcagaaucagcaucuacuggaccaucgugaagcccggcgacauccugcugaucaacagcaccggcaaccugaucgcccccagaggcuacuucaagaucagaagcggcaagagcagcaucaugagaagcgacgcccccaucgacaacugcaacagcgagugcaucacccccaacggcagcauccccaacgacaagcccuuccagaacgugaacagaaucaccuacggcgccugccccagauacgugaagcagaacacccugaagcuggccaccggcaugagaaacgugcccgagaagcagaccagaggcaucuucggcgccaucgccggcuucaucgagaacggcugggagggcaugguggacggcugguacggcuucagacaccagaacagcgagggcaccggccaggccgccgaccugaagagcacccaggccgccaucaaccagaucaacggcaagcugaacagacugaucgagaagaccaacgagaaguuccaccagaucgagaaggaguucagcgagguggagggcagaauccaggaccuggagaaguacguggaggacaccaagaucgaccuguggagcuacaacgccgagcugcugguggcccuggagaaccagcacaccaucgaccugaccgacagcgagaugaacaagcuguucgagagaaccagaaagcagcugagagagaacgccgaggacaugggcaacggcugcuucaagaucuaccacaagugcgacaacgccugcaucggcagcaucagaaacggcaccuacgaccacgacguguacagagacgaggcccugaacaacagauuccagaucaagggcguggagcugaagagcggcuacaaggacuggauccuguggaucagcuucgccaucagcugcuuccugcugugcguggugcugcugggcuucaucaugugggccugccagaagggcaacaucagaugcaacaucugcaucuga

SEQ ID NO: 160888 - RNA, 1701 nt, Artificial Sequence
  derived and/or modified CDS sequence (opt4) from hemagglutinin__InfluenzaA__ABD94888
augaagaccaucaucgcccugagcuacauccugugccugguguucgcccagaagcugcccggcaacgacaacagcaccgccacccugugccugggccaccacgccgugcccaacggcacccuggugaagaccaucaccaacgaccagaucgaggugaccaacgccaccgagcuggugcagagcagcagcaccggcagaaucugcgacagcccccacagaauccuggacggcaagaacugcacccugaucgacgcccugcugggcgacccccacugcgacggcuucaagaacaaggagugggaccuguucguggagagaagcaccgccuacagcaacugcuaccccuacgacgugcccgacuacgccagccugagaagccugguggccagcagcggcacccuggaguucaccaacgagggcuucaacuggaccggcguggcccaggacggcaccagcuacgccugcaagagaggcagcgugaagagcuucuucagcagacugaacuggcugcacaagcuggaguacaaguaccccgcccugaacgugaccaugcccaacaacgacaaguucgacaagcuguacaucuggggcgugcaccaccccagcaccgacagcgaccagaccagccuguacgugcaggccagcggcagagugaccgugagcaccaagagaagccagcagaccgugauccccaacaucggcagcagacccugggugagaggcgugagcagcagaaucagcaucuacuggaccaucgugaagcccggcgacauccugcugaucaacagcaccggcaaccugaucgcccccagaggcuacuucaagaucagaagcggcaagagcagcaucaugagaagcgacgcccccaucgacaacugcaacagcgagugcaucacccccaacggcagcauccccaacgacaagcccuuccagaacgugaacagaaucaccuacggcgccugccccagauacgugaagcagaacacccugaagcuggccaccggcaugagaaacgugcccgagaagcagaccagaggcaucuucggcgccaucgccggcuucaucgagaacggcugggagggcaugguggacggcugguacggcuucagacaccagaacagcgagggcaccggccaggccgccgaccugaagagcacccaggccgccaucaaccagaucaacggcaagcugaacagacugaucgagaagaccaacgagaaguuccaccagaucgagaaggaguucagcgagguggagggcagaauccaggaccuggagaaguacguggaggacaccaagaucgaccuguggagcuacaacgccgagcugcugguggcccuggagaaccagcacaccaucgaccugaccgacagcgagaugaacaagcuguucgagagaaccagaaagcagcugagagagaacgccgaggacaugggcaacggcugcuucaagaucuaccacaagugcgacaacgccugcaucggcagcaucagaaacggcaccuacgaccacgacguguacagagacgaggcccugaacaacagauuccagaucaagggcguggagcugaagagcggcuacaaggacuggauccuguggaucagcuucgccaucagcugcuuccugcugugcguggugcugcugggcuucaucaugugggccugccagaagggcaacaucagaugcaacaucugcaucuga

SEQ ID NO: 160889 - RNA, 1701 nt, Artificial Sequence; identical to SEQ ID NO: 160867
  derived and/or modified CDS sequence (opt4) from hemagglutinin__InfluenzaA__ABD94899

SEQ ID NO: 160890 - RNA, 1701 nt, Artificial Sequence
  derived and/or modified CDS sequence (opt4) from hemagglutinin__InfluenzaA__ABD94910
augaagaccaucaucgcccugagcuacauccugugccugguguucgcccagaagcugcccggcaacgacaacagcaccgccacccugugccugggccaccacgccgugcccaacggcacccuggugaagaccaucaccaacgaccagaucgaggugaccaacgccaccgagcuggugcagaacagcagcaccggcagaaucugcgacagcccccacagaauccuggacggcaagaacugcacccugaucgacgcccugcugggcgacccccacugcgacggcuuccagaacaaggagugggaccuguucguggagagaagcaaggccuacagcaacugcuaccccuacgacgugcccgacuacgccagccugagaagccugguggccagcagcggcacccuggaguucaacaacgagagcuucaacuggaccggcguggcccagaacggcaccagcuacgccugcaagagaagaagcgugaagagcuucuucagcagacugaacuggcugcacaagcuggaguacaaguaccccgcccugaacgugaccaugcccaacaacgacaaguucgacaagcuguacaucuggggcgugcaccaccccagcaccgacagcgaccagaccagccuguacgugcaggccagcggcagagugaccgugagcaccaagagaagccagcagaccgugauccccaacaucggcagcagacccugggugagaggcgugagcagcagaaucagcaucuacuggaccaucgugaagcccggcgacauccugcugaucaacagcaccggcaaccugaucgcccccagaggcuacuucaagaucagaagcggcaagagcagcaucaugagaagcgacgcccccaucggcaacugcaacagcgagugcaucacccccaacggcagcauccccaacgacaagcccuuccagaacgugaacagaaucaccuacggcgccugccccagauacgugaagcagaacacccugaagcuggccaccggcaugagaaacgugcccgagaagcagaccagaggcaucuucggcgccaucgccggcuucaucgagaacggcugggagggcaugguggacggcugguacggcuucagacaccagaacagcgagggcaccggccaggccgccgaccugaagagcacccaggccgccaucaaccagaucaacggcaagcugaacagacugaucgagaagaccaacgagaaguuccaccagaucgagaaggaguucagcgagguggagggcagaauccaggaccuggagaaguacguggaggacaccaagaucgaccuguggagcuacaacgccgagcugcugguggcccuggagaaccagcacaccaucgaccugaccgacagcgagaugaacaagcuguucgagagaaccagaaagcagcugagagagaacgccgaggacaugggcaacggcugcuucagaaucuaccacaagugcgacaacgccugcaucggcagcaucagaaacggcaccuacgaccacgacguguacagagacgaggcccugaacaacagauuccagaucaagggcguggagcugaagagcggcuacaaggacuggauccuguggaucagcuucgccaucagcugcuuccugcugugcguggugcugcugggcuucaucaugugggccugccagaagggcaacaucagaugcaacaucugcaucuga

SEQ ID NO: 160891 - RNA, 1701 nt, Artificial Sequence
  derived and/or modified CDS sequence (opt4) from hemagglutinin__InfluenzaA__ABD94921
augaagaccaucaucgcccugagcuacauccugugccugguguucgcccagaagcugcccggcaacgacaacagcaccgccacccugugccugggccaccacgccgugcccaacggcacccuggugaagaccaucaccaacgaccagaucgaggugaccaacgccaccgagcuggugcagagcagcagcaccggcagaaucugcgacggcccccaccagauccuggacggcaagaacugcacccugaucgacgcccugcugggcgacccccacugcgacggcuuccagaacaaggagugggaccuguucguggagagaagcaaggccuacagcaacugcuaccccuacgacgugcccgacuacgccagccugagaagccugguggccagcagcggcacccuggaguucaccaacgagagcuucaacuggaccggcguggcccagaacggcaccagcuacgccugcaagagaggcagcgugaagagcuucuucagcagacugaacuggcugcacaagcuggaguacaaguaccccgcccugaacgugaccaugcccaacaacgacaaguucgacaagcuguacaucuggggcgugcaccaccccagcaccgacagcgaccagaccagccuguacgugcagagcagcggcagagugaccgugagcaccaagagaagccagcagaccgugacccccaacaucggcagcagacccugggugagaggcgugagcagcagaaucagcaucuacuggaccaucgugaagcccggcgacauccugcugaucaacagcaccggcaaccugaucgcccccagaggcuacuucaagaucagaagaggcaagagcagcaucaugagaagcgacgcccccaucgacaacugcaacagcgagugcaucacccccaacggcagcauccccaacgacaagcccuuccagaacgugaacagaaucaccuacggcgccugccccagauacgugaagcagaacacccugaagcuggccaccggcaugagaaacgugcccgagaagcagaccagaggcaucuucggcgccaucgccggcuucaucgagaacggcugggagggcaugguggacggcugguacggcuucagacaccagaacagcgagggcaccggccaggccgccgaccugaagagcacccaggccgccaucaaccagaucaacggcaagcugaacagacugaucgagaagaccaacgagaaguuccaccagaucgagaaggaguucagcgagguggagggcagaauccaggaccuggagaaguacguggaggacaccaagaucgaccuguggagcuacaacgccgagcugcugguggcccuggagaaccagcacaccaucgaccugaccgacagcgagaugaacaagcuguucgagagaaccagaaagcagcugagagagaacgccgaggacaugggcaacggcugcuucaagaucuaccacaagugcgacaacgccugcaucggcagcaucagaaacggcaccuacgaccacgacguguacagagacgaggcccugaacaacagauuccagaucaagggcguggagcugaagagcggcuacaaggacuggauccuguggaucagcuucgccaucagcugcuuccugcugugcguggugcugcugggcuucaucaugugggccugccagaagggcaacaucagaugcaacaucugcaucuga

SEQ ID NO: 160892 - RNA, 1701 nt, Artificial Sequence; identical to SEQ ID NO: 160867
  derived and/or modified CDS sequence (opt4) from hemagglutinin__InfluenzaA__ABD94932

SEQ ID NO: 160893 - RNA, 1698 nt, Artificial Sequence
  derived and/or modified CDS sequence (opt4) from hemagglutinin__InfluenzaA__ABD94943
augaaggugaagcugcugauccugcugugcaccuucaccgccaccuacgccgacaccaucugcaucggcuaccacgccaacaacagcaccgacaccguggacaccgugcuggagaagaacgugaccgugacccacagcgugaaccugcuggaggacagccacaacggcaagcugugccugcugaagggcaucgccccccugcagcugggcaacugcagcguggccggcuggauccugggcaaccccgagugcgagcugcugaucagcaaggagagcuggagcuacaucguggagacccccaaccccgagaacggcgccugcuaccccggcuacuucgccgacuacgaggagcugagagagcagcugagcagcgugagcagcuucgagagauucgagaucuuccccaaggagagcagcuggcccaaccacaccgugaccggcgugagcgccagcugcagccacaacggcaagagcagcuucuacagaaaccugcuguggcugaccggcaagaacggccuguaccccaaccugagcaagagcuacgccaacaacaagaagaaggaggugcugauccuguggggcgugcaccacccccccaacaucggcgaccagagaacccuguaccacaccgagaacgccuacgugagcguggugagcagccacuacagcagaagauucacccccgagaucaccaagagacccaaggugagagaccaggagggcagaaucaacuacuacuggacccugcuggagcccggcgacaccaucaucuucgaggccaacggcaaccugaucgcccccugguacgccuucgcccugagcagaggcuucggcagcggcaucaucaccagcaacgcccccauggacgagugcgacgccaagugccagaccccccagggcgccaucaacagcagccugcccuuccagaacgugcaccccgugaccaucggcgagugccccaaguacgugagaagcgccaagcugagaauggugaccggccugagaaacauccccagcauccagagcagaggccuguucggcgccaucgccggcuucaucgagggcggcuggaccggcaugguggacggcugguacggcuaccaccaccagaacgagcagggcagcggcuacgccgccgaccagaagagcacccagaacgccaucaacggcaucaccaacaaggugaacagcgugaucgagaagaugaacacccaguucaccgccgugggcaaggaguucaacaagcuggagagaagaauggagaaccugaacaagaagguggacgacggcuuccuggacaucuggaccuacaacgccgagcugcuggugcugcuggagaacgagagaacccuggacuuccacgacagcaacgugaagaaccuguacgagaaggugaagagccagcugaagaacaacgccaaggagaucggcaacggcugcuucgaguucuaccacaagugcaacaacgagugcauggagagcgugaagaacggcaccuacgacuaccccaaguacagcgaggagagcaagcugaacagagagaagaucgacggcgugaagcuggacagcaugggcguguaccagauccuggccaucuacagcaccguggccagcagccuggugcugcuggugagccugggcgccaucagcuucuggaugugcagcaacggcagccugcagugcagaaucugcaucuga

SEQ ID NO: 160894 - RNA, 1701 nt, Artificial Sequence; identical to SEQ ID NO: 160693
  derived and/or modified CDS sequence (opt4) from hemagglutinin__InfluenzaA__ABD94954

SEQ ID NO: 160895 - RNA, 1698 nt, Artificial Sequence; identical to SEQ ID NO: 160802
  derived and/or modified CDS sequence (opt4) from hemagglutinin__InfluenzaA__ABD94965

SEQ ID NO: 160896 - RNA, 1698 nt, Artificial Sequence; identical to SEQ ID NO: 160801
  derived and/or modified CDS sequence (opt4) from hemagglutinin__InfluenzaA__ABD94987

SEQ ID NO: 160897 - RNA, 1698 nt, Artificial Sequence; identical to SEQ ID NO: 160801
  derived and/or modified CDS sequence (opt4) from hemagglutinin__InfluenzaA__ABD94998

SEQ ID NO: 160898 - RNA, 1698 nt, Artificial Sequence; identical to SEQ ID NO: 160801
  derived and/or modified CDS sequence (opt4) from hemagglutinin__InfluenzaA__ABD95009

SEQ ID NO: 160899 - RNA, 1698 nt, Artificial Sequence; identical to SEQ ID NO: 160802
  derived and/or modified CDS sequence (opt4) from hemagglutinin__InfluenzaA__ABD95020

SEQ ID NO: 160900 - RNA, 1698 nt, Artificial Sequence
  derived and/or modified CDS sequence (opt4) from hemagglutinin__InfluenzaA__ABD95031
augaaggugaagcugcuggugcugcugugcaccuucaccgccaccuacgccgacaccaucugcaucggcuaccacgccaacaacagcaccgacaccguggacaccgugcuggagaagaacgugaccgugacccacagcgugaaccugcuggaggacagccacaacggcaagcugugccugcugaagggcaucgccccccugcagcugggcaacugcagcguggccggcuggauccugggcaaccccgagugcgagcugcugaucagcaaggagagcuggagcuacaucguggagacccccaaccccgagaacggcaccugcuaccccggcuacuucaccgacuacgaggagcugagagagcagcugagcagcgugagcagcuucgagagauucgagaucuuccccaaggagagcagcuggcccaaccacaccgugaccggcgugagcgccagcugcagccacaacggcaagagcagcuucuacagaaaccugcuguggcugaccggcaagaacggccuguaccccaaccugagaagaagcuacgccaacaacaaggagaaggaggugcuggugcuguggggcgugcaccacccccccaacaucggcgaccagaaggcccuguaccacaccgagaacgccuacgugagcguggugagcagccacuacagcagaagauucacccccgagaucgccaagagacccaaggugagaggccaggagggcagaaucaacuacuacuggacccugcuggagcccggcgacaccaucaucuucgaggccaacggcaaccugaucgcccccagauacgccuucgcccugagcagaggcuucggcagcggcaucaucaccagcaacgcccccauggacgagugcgacgccaagugccagaccccccagggcgccaucaacagcagccugcccuuccagaacgugcaccccgugaccaucggcgagugccccaaguacgugagaagcgccaagcugagaauggugaccggccugagaaacauccccagcauccagagcagaggccuguucggcgccaucgccggcuucaucgagggcggcuggaccggcaugguggacggcugguacggcuaccaccaccagaacgagcagggcagcggcuacgccgccgaccagaagagcacccagaacgccaucaacggcaucaccaacaaggugaacagcaucaucgagaagaugaacacccaguucaccgccgugggcaaggaguucaacaagcuggagagaagaauggagaaccugaacaagaagguggacgacggcuuccuggacaucuggaccuacaacgccgagcugcuggugcugcuggagaacgagagaacccuggacuuccacgacagcaacgugaagaaccuguacgagaaggugaagagccagcugaagaacaacgccaaggagaucggcaacggcugcuucgaguucuaccacaagugcaacaacgagugcauggagagcgugaagaacggcaccuacgacuaccccaaguacagcgaggagagcaagcugaacagagagaagaucgacggcgugaagcuggagagcaugggcguguaccagauccuggccaucuacagcaccguggccagcagccuggugcugcuggugagccugggcgccaucagcuucuggaugugcagcaacggcagccugcagugcagaaucugcaucuga

SEQ ID NO: 160901 - RNA, 1698 nt, Artificial Sequence
  derived and/or modified CDS sequence (opt4) from hemagglutinin__InfluenzaA__ABD95042
augaaggccaagcugcuggugcugcugugcaccuucaccgccaccuacgccgacaccaucugcaucggcuaccacgccaacaacagcaccgacaccguggacaccgugcuggagaagaacgugaccgugacccacagcgugaaccugcuggaggacagccacaacggcaagcugugccugcugaagggcaucgccccccugcagcugggcaacugcagcguggccggcuggauccugggcaaccccgagugcgagcugcugaucagcaaggagagcuggagcuacaucguggagacccccaaccccgagaacggcaccugcuaccccggcuacuucgccgacuacgaggagcugagagagcagcugagcagcgugagcagcuucgagagauucgagaucuuccccaagggcagcagcuggcccaaccacaccgugaccggcgugagcgccagcugcagccacaacggcaagagcagcuucuacagaaaccugcuguggcugaccggcaagaacggccuguaccccaaccugagcaugagcuacgugaacaacaagggcaaggaggugcuggugcuguggggcgugcaccacccccccaacaucggcgaccagagagcccuguaccacaccgagaacgccuacgugagcguggugagcagccacuacagcagaagauucacccccgagaucgccaagagacccaaggugagagaccaggagggcagaaucaacuacuacuggacccugcuggagcccggcgacaccaucaucuucgaggccaacggcaaccugaucgcccccugguacgccuucgcccugagcagaggcuucggcagcggcaucaucaccagcaacgcccccaugggcgagugcgacgccaagugccagaccccccagggcgccaucaacagcagccugcccuuccagaacgugcaccccgugaccaucggcgagugccccaaguacgugagaagcgccaagcugagaauggugaccggccugagaaacauccccagcauccagagcagaggccuguucggcgccaucgccggcuucaucgagggcggcuggaccggcaugguggacggcugguacggcuaccaccaccagaacgagcagggcagcggcuacgccgccgaccagaagagcacccagaacgccaucaacggcaucaccaacaaggugaacagcgugaucgagaagaugaacacccaguucaccgccgugggcaaggaguucaacaagcuggagagaagaauggagaaccugaacaagaagguggacgacggcuuccuggacaucuggaccuacaacgccgagcugcuggugcugcuggagaacgagagaacccuggacuuccacgacagcaacgugaagaaccuguacgagaaggugaagagccagcugaagaacaacgccaaggagaucggcaacggcugcuucgaguucuaccacaagugcaacaacgagugcauggagagcgugaagaacggcaccuacgacuaccccaaguacagcgaggagagcaagcugaacagagagaagaucgacggcgugaagcuggagagcaugggcguguaccagauccuggccaucuacagcaccguggccagcagccuggugcugcuggugagccugggcgccaucagcuucuggaugugcagcaacggcagccugcagugcagaaucugcaucuga

SEQ ID NO: 160902 - RNA, 1698 nt, Artificial Sequence; identical to SEQ ID NO: 160901
  derived and/or modified CDS sequence (opt4) from hemagglutinin__InfluenzaA__ABD95053

SEQ ID NO: 160903 - RNA, 1698 nt, Artificial Sequence; identical to SEQ ID NO: 160860
  derived and/or modified CDS sequence (opt4) from hemagglutinin__InfluenzaA__ABD95064

SEQ ID NO: 160904 - RNA, 1698 nt, Artificial Sequence
  derived and/or modified CDS sequence (opt4) from hemagglutinin__InfluenzaA__ABD95075
augaaggccaagcugcuggugcugcugugcaccuucaccgccaccuacgccgacaccaucugcaucggcuaccacgccaacaacagcaccgacaccguggacaccgugcuggagaagaacgugaccgugacccacagcgugaaccugcuggaggacagccacaacggcaagcugugccugcugaagggcaucgccccccugcagcugggcaacugcagcguggccggcuggauccugggcaaccccgagugcgagcugcugaucagcaaggagagcuggagcuacaucguggagacccccaaccccgagaacggcaccugcuaccccggcuacuucgccgacuacgaggagcugagagagcagcugagcagcgugagcagcuucgagagauucgagaucuuccccaagggcagcagcuggcccaaccacaccgugaccggcgugagcgccagcugcagccacaacggcaagagcagcuucuacagaaaccugcuguggcugaccggcaagaacggccuguaccccaaccugagcaugagcuacgugaacaacaaggagaaggaggugcuggugcuguggggcgugcaccacccccccaacaucggcgaccagagagcccuguaccacaccgagaacgccuacgugagcguggugagcagccacuacagcagaagauucacccccgagaucgccaagagacccaaggugagagaccaggagggcagaaucaacuacuacuggacccugcuggagcccggcgacaccaucaucuucgaggccaacggcaaccugaucgcccccugguacgccuucgcccugagcaagggcuucggcagcggcaucaucaccagcaacgcccccaugggcgagugcgacgccaagugccagaccccccagggcgccaucaacagcagccugcccuuccagaacgugcaccccgugaccaucggcgagugccccaaguacgugagaagcgccaagcugagaauggugaccggccugagaaacauccccagcauccagagcagaggccuguucggcgccaucgccggcuucaucgagggcggcuggaccggcaugguggacggcugguacggcuaccaccaccagaacgagcagggcagcggcuacgccgccgaccagaagagcacccagaacgccaucaacggcaucaccaacaaggugaacagcgugaucgagaagaugaacacccaguucaccgccgugggcaaggaguucaacaagcuggagagaagaauggagaaccugaacaagaagguggacgacggcuuccuggacaucuggaccuacaacgccgagcugcuggugcugcuggagaacgagagaacccuggacuuccacgacagcaacgugaagaaccuguacgagaaggugaagagccagcugaagaacaacgccaaggagaucggcaacggcugcuucgaguucuaccacaagugcaacaacgagugcauggagagcgugaagaacggcaccuacgacuaccccaaguacagcgaggagagcaagcugaacagagagaagaucgacggcgugaagcuggagagcaugggcguguaccagauccuggccaucuacagcaccguggccagcagccuggugcugcuggugagccugggcgccaucagcuucuggaugugcagcaacggcagccugcagugcagaaucugcaucuga

SEQ ID NO: 160905 - RNA, 1698 nt, Artificial Sequence; identical to SEQ ID NO: 160901
  derived and/or modified CDS sequence (opt4) from hemagglutinin__InfluenzaA__ABD95086

SEQ ID NO: 160906 - RNA, 1698 nt, Artificial Sequence; identical to SEQ ID NO: 160860
  derived and/or modified CDS sequence (opt4) from hemagglutinin__InfluenzaA__ABD95097

SEQ ID NO: 160907 - RNA, 1698 nt, Artificial Sequence
  derived and/or modified CDS sequence (opt4) from hemagglutinin__InfluenzaA__ABD95119
augaaggccaagcugcugauccugcugugcaccuucaccgccaccuacgccgacaccaucugcaucggcuaccacgccaacaacagcaccgacaccguggacaccgugcuggagaagaacgugaccgugacccacagcgugaaccugcuggaggacagccacaacggcaagcugugccugcugaagggcaucgccccccugcagcugggcaacugcagcguggccggcuggauccugggcaaccccgagugcgagcugcugaucagcaaggagagcuggagcuacaucguggagacccccaaccccgagaacggcaccugcuaccccggcuacuucgccgacuacgaggagcugagagagcagcugagcagcgugagcagcuucgagagauucgagaucuuccccaagggcagcagcuggcccaaccacaccgugaccggcgugagcgccagcugcagccacaacggcaagagcagcuucuacagaaaccugcuguggcugaccggcaagaacggccuguaccccaaccugagcaugagcuacgugaacaacaaggagaaggaggugcuggugcuguggggcgugcaccacccccccaacaucggcgaccagagagcccuguaccacaccgagaacgccuacgugagcguggugagcagccacuacagcagaagauucacccccgagaucgccaagagacccaaggugagagaccaggagggcagaaucaacuacuacuggacccugcuggagcccggcgacaccaucaucuucgaggccaacggcaaccugaucgcccccugguacgccuucgcccugagcagaggcuucggcagcggcaucaucaccagcaacgcccccaugggcgagugcgacgccaagugccagaccccccagggcgccaucaacagcagccugcccuuccagaacgugcaccccgugaccaucggcgagugccccaaguacgugagaagcgccaagcugagaauggugaccggccugagaaacauccccagcauccagagcagaggccuguucggcgccaucgccggcuucaucgagggcggcuggaccggcaugguggacggcugguacggcuaccaccaccagaacgagcagggcagcggcuacgccgccgaccagaagagcacccagaacgccaucaacggcaucaccaacaaggugaacagcgugaucgagaagaugaacacccaguucaccgccgugggcaaggaguucaacaagcuggagagaagaauggagaaccugaacaagaagguggacgacggcuuccuggacaucuggaccuacaacgccgagcugcuggugcugcuggagaacgagagaacccuggacuuccacgacagcaacgugaagaaccuguacgagaaggugaagagccagcugaagaacaacgccaaggagaucggcaacggcugcuucgaguucuaccacaagugcaacaacgagugcauggagagcgugaagaacggcaccuacgacuaccccaaguacagcgaggagagcaagcugaacagagagaagaucgacggcgugaagcuggagagcaugggcguguaccagauccuggccaucuacagcaccguggccagcagccuggugcugcuggugagccugggcgccaucagcuucuggaugugcagcaacggcagccugcagugcagaaucugcaucuga

SEQ ID NO: 160908 - RNA, 1698 nt, Artificial Sequence
  derived and/or modified CDS sequence (opt4) from hemagglutinin__InfluenzaA__ABD95130
augaaggccaagcugcuggugcugcugugcaccuucaccgccaccuacgccgacaccaucugcaucggcuaccacgccaacaacagcaccgacaccguggacaccgugcuggagaagaacgugaccgugacccacagcgugaaccugcuggaggacagccacaacggcaagcugugccugcugaagggcaucgccccccugcagcugggcaacugcagcguggccggcuggauccugggcaaccccgagugcgagcugcugaucagcaaggagagcuggagcuacaucguggagacccccaaccccgagaacggcaccugcuaccccggcuacuucgccgacuacgaggagcugagagagcagcugagcagcgugagcagcuucgagagauucgagaucuuccccaagggcagcagcuggcccaaccacaccgugaccggcgugagcgccagcugcagccacaacggcaagagcagcuucuacagaaaccugcuguggcugaccggcaagaacggcagcuaccccaaccugagcaugagcuacgugaacaacaaggagaaggaggugcuggugcuguggggcgugcaccacccccccaacaucggcgaccagagagcccuguaccacaccgagaacgccuacgugagcguggugagcagccacuacagcagaagauucacccccgagaucgccaagagacccaaggugagagaccaggagggcagaaucaacuacuacuggacccugcuggagcccggcgacaccaucaucuucgaggccaacggcaaccugaucgcccccugguacgccuucgcccugagcagaggcuucggcagcggcaucaucaccagcaacgcccccaugggcgagugcgacgccaagugccagaccccccagggcgccaucaacagcagccugcccuuccagaacgugcaccccgugaccaucggcgagugccccaaguacgugagaagcgccaagcugagaauggugaccggccugagaaacauccccagcauccagagcagaggccuguucggcgccaucgccggcuucaucgagggcggcuggaccggcaugguggacggcugguacggcuaccaccaccagaacgagcagggcagcggcuacgccgccgaccagaagagcacccagaacgccaucaacggcaucaccaacaaggugaacagcgugaucgagaagaugaacacccaguucaccgccgugggcaaggaguucaacaagcuggagagaagaauggagaaccugaacaagaagguggacgacggcuuccuggacaucuggaccuacaacgccgagcugcuggugcugcuggagaacgagagaacccuggacuuccacgacagcaacgugaagaaccuguacgagaaggugaagagccagcugaagaacaacgccaaggagaucggcaacggcugcuucgaguucuaccacaagugcaacaacgagugcauggagagcgugaagaacggcaccuacgacuaccccaaguacagcgaggagagcaagcugaacagagagaagaucgacggcgugaagcuggagagcaugggcguguaccagauccuggccaucuacagcaccguggccagcagccuggugcugcuggugagccugggcgccaucagcuucuggaugugcagcaacggcagccugcagugcagaaucugcaucuga

SEQ ID NO: 160909 - RNA, 1698 nt, Artificial Sequence; identical to SEQ ID NO: 160860
  derived and/or modified CDS sequence (opt4) from hemagglutinin__InfluenzaA__ABD95141

SEQ ID NO: 160910 - RNA, 1698 nt, Artificial Sequence; identical to SEQ ID NO: 160860
  derived and/or modified CDS sequence (opt4) from hemagglutinin__InfluenzaA__ABD95152

SEQ ID NO: 160911 - RNA, 1698 nt, Artificial Sequence; identical to SEQ ID NO: 160907
  derived and/or modified CDS sequence (opt4) from hemagglutinin__InfluenzaA__ABD95163

SEQ ID NO: 160912 - RNA, 1698 nt, Artificial Sequence; identical to SEQ ID NO: 160901
  derived and/or modified CDS sequence (opt4) from hemagglutinin__InfluenzaA__ABD95174

SEQ ID NO: 160913 - RNA, 1698 nt, Artificial Sequence
  derived and/or modified CDS sequence (opt4) from hemagglutinin__InfluenzaA__ABD95185
augaaggccaagcugcuggugcugcugugcaccuucaccgccaccuacgccgacaccaucugcaucggcuaccacgccaacaacagcaccgacaccguggacaccgugcuggagaagaacgugaccgugacccacagcgugaaccugcuggaggacagccacaacggcaagcugugccugcugaagggcaucgccccccugcagcugggcaacugcagcguggccggcuggauccugggcaaccccgagugcgagcugcugaucagcaaggagagcuggagcuacaucguggagacccccaaccccgagaacggcaccugcuaccccggcuacuucgccgacuacgaggagcugagagagcagcugagcagcgugagcagcuucgagagauucgagaucuuccccaagggcagcagcuggcccaaccacaccgugaccggcgugagcgccagcugcagccacaacggcgagagcagcuucuacagaaaccugcuguggcugaccggcaagaacggccuguaccccaaccugagcaugagcuacgugaacaacaaggagaaggaggugcuggugcuguggggcgugcaccacccccccaacaucggcgaccagagagcccuguaccacaccgagaacgccuacgugagcguggugagcagccacuacagcagaagauucacccccgagaucgccaagagacccaaggugagagaccaggagggcagaaucaacuacuacuggacccugcuggagcccggcgacaccaucaucuucgaggccaacggcaaccugaucgcccccugguacgccuucgcccugagcagaggcuucggcagcggcaucaucaccagcaacgcccccaugggcgagugcgacgccaagugccagaccccccagggcgccaucaacagcagccugcccuuccagaacgugcaccccgugaccaucggcgagugccccaaguacgugagaagcgccaagcugagaauggugaccggccugagaaacauccccagcauccagagcagaggccuguucggcgccaucgccggcuucaucgagggcggcuggaccggcaugguggacggcugguacggcuaccaccaccagaacgagcagggcagcggcuacgccgccgaccagaagagcacccagaacgccaucaacggcaucaccaacaaggugaacagcgugaucgagaagaugaacacccaguucaccgccgugggcaaggaguucaacaagcuggagagaagaauggagaaccugaacaagaagguggacgacggcuuccuggacaucuggaccuacaacgccgagcugcuggugcugcuggagaacgagagaacccuggacuuccacgacagcaacgugaagaaccuguacgagaaggugaagagccagcugaagaacaacgccaaggagaucggcaacggcugcuucgaguucuaccacaagugcaacaacgagugcauggagagcgugaagaacggcaccuacgacuaccccaaguacagcgaggagagcaagcugaacagagagaagaucgacggcgugaagcuggagagcaugggcguguaccagauccuggccaucuacagcaccguggccagcagccuggugcugcuggugagccugggcgccaucagcuucuggaugugcagcaacggcagccugcagugcagaaucugcaucuga

SEQ ID NO: 160914 - RNA, 1698 nt, Artificial Sequence; identical to SEQ ID NO: 160901
  derived and/or modified CDS sequence (opt4) from hemagglutinin__InfluenzaA__ABD95196

SEQ ID NO: 160915 - RNA, 1698 nt, Artificial Sequence; identical to SEQ ID NO: 160359
  derived and/or modified CDS sequence (opt4) from hemagglutinin__InfluenzaA__ABD95207

SEQ ID NO: 160916 - RNA, 1698 nt, Artificial Sequence; identical to SEQ ID NO: 160860
  derived and/or modified CDS sequence (opt4) from hemagglutinin__InfluenzaA__ABD95218

SEQ ID NO: 160917 - RNA, 1698 nt, Artificial Sequence; identical to SEQ ID NO: 160907
  derived and/or modified CDS sequence (opt4) from hemagglutinin__InfluenzaA__ABD95229

SEQ ID NO: 160918 - RNA, 1698 nt, Artificial Sequence; identical to SEQ ID NO: 160860
  derived and/or modified CDS sequence (opt4) from hemagglutinin__InfluenzaA__ABD95240

SEQ ID NO: 160919 - RNA, 1698 nt, Artificial Sequence; identical to SEQ ID NO: 160901
  derived and/or modified CDS sequence (opt4) from hemagglutinin__InfluenzaA__ABD95251

SEQ ID NO: 160920 - RNA, 1698 nt, Artificial Sequence; identical to SEQ ID NO: 160359
  derived and/or modified CDS sequence (opt4) from hemagglutinin__InfluenzaA__ABD95262

SEQ ID NO: 160921 - RNA, 1698 nt, Artificial Sequence; identical to SEQ ID NO: 160860
  derived and/or modified CDS sequence (opt4) from hemagglutinin__InfluenzaA__ABD95273

SEQ ID NO: 160922 - RNA, 1698 nt, Artificial Sequence; identical to SEQ ID NO: 160356
  derived and/or modified CDS sequence (opt4) from hemagglutinin__InfluenzaA__ABD95284

SEQ ID NO: 160923 - RNA, 1698 nt, Artificial Sequence; identical to SEQ ID NO: 160860
  derived and/or modified CDS sequence (opt4) from hemagglutinin__InfluenzaA__ABD95295

SEQ ID NO: 160924 - RNA, 1698 nt, Artificial Sequence
  derived and/or modified CDS sequence (opt4) from hemagglutinin__InfluenzaA__ABD95306
augaaggccaagcugcuggugcugcugugcaccuucaccgccaccuacgccgacaccaucugcaucggcuaccacgccaacaacagcaccgacaccguggacaccgugcuggagaagaacgugaccgugacccacagcgugaaccugcuggaggacagccacaacggcaagcugugccugcugaagggcaucgccccccugcagcugggcaacugcagcguggccggcuggauccugggcaaccccgagugcgagcugcugaucagcaaggagagcuggagcuacaucguggagacccccaaccccgagaacggcaccugcuaccccggcuacuucgccgacuacgaggagcugagagagcagcugagcagcgugagcagcuucgagagauucgagaucuuccccaagggcagcagcuggcccaaccacaccgugaccggcgugagcgccagcugcagccacaacggcaagagcagcuucuacagaaaccugcuguggcugaccggcaagaacggccuguaccccaaccugagcaugagcuacgugaacaacaaggagaaggagauccuggugcuguggggcgugcaccacccccccaacaucggcgaccagagagcccuguaccacaccgagaacgccuacgugagcguggugagcagccacuacagcagaagauucacccccgagaucgccaagagacccaaggugagagaccaggagggcagaaucaacuacuacuggacccugcuggagcccggcgacaccaucaucuucgaggccaacggcaaccugaucgcccccugguacgccuucgcccugagcagaggcuucggcagcggcaucaucaccagcaacgcccccaugggcgagugcgacgccaagugccagaccccccagggcgccaucaacagcagccugcccuuccagaacgugcaccccgugaccaucggcgagugccccaaguacgugagaagcgccaagcugagaauggugaccggccugagaaacauccccagcauccagagcagaggccuguucggcgccaucgccggcuucaucgagggcggcuggaccggcaugguggacggcugguacggcuaccaccaccagaacgagcagggcagcggcuacgccgccgaccagaagagcacccagaacgccaucaacggcaucaccaacaaggugaacagcgugaucgagaagaugaacacccaguucaccgccgugggcaaggaguucaacaagcuggagagaagaauggagaaccugaacaagaagguggacgacggcuuccuggacaucuggaccuacaacgccgagcugcuggugcugcuggagaacgagagaacccuggacuuccacgacagcaacgugaagaaccuguacgagaaggugaagagccagcugaagaacaacgccaaggagaucggcaacggcugcuucgaguucuaccacaagugcaacaacgagugcauggagagcgugaagaacggcaccuacgacuaccccaaguacagcgaggagagcaagcugaacagagagaagaucgacggcgugaagcuggagagcaugggcguguaccagauccuggccaucuacagcaccguggccagcagccuggugcugcuggugagccugggcgccaucagcuucuggaugugcagcaacggcagccugcagugcagaaucugcaucuga

SEQ ID NO: 160925 - RNA, 1698 nt, Artificial Sequence; identical to SEQ ID NO: 160901
  derived and/or modified CDS sequence (opt4) from hemagglutinin__InfluenzaA__ABD95328

SEQ ID NO: 160926 - RNA, 1701 nt, Artificial Sequence
  derived and/or modified CDS sequence (opt4) from hemagglutinin__InfluenzaA__ABD95339
augaaggccaagcugcuggugcugcugugcgcccugagcgccaccgacgccgacaccaucugcaucggcuaccacgccaacaacagcaccgacaccguggacaccgugcuggagaagaacgugaccgugacccacagcgugaaccugcuggaggacagccacaacggcaagcugugcagacugaagggcaucgccccccugcagcugggcaagugcagcaucgccggcuggauccugggcaaccccgagugcgagagccuguucagcaagaagagcuggagcuacaucgccgagacccccaacagcgagaacggcaccugcuaccccggcuacuucgccgacuacgaggagcugagagagcagcugagcagcgugagcagcuucgagagauucgagaucuuccccaaggagagcagcuggcccaagcacagcgugaccagaggcgugaccgccagcugcagccacaagggcaagagcagcuucuacagaaaccugcuguggcugaccgagaagaacggcagcuaccccaaccugagcaagagcuacgugaacgacaaggagaaggaggugcuggugcuguggggcgugcaccaccccagcaacaucgaggaccagaagaccaucuacagaaaggagaacgccuacgugagcguggugagcagccacuacaacagaagauucacccccgagaucgccaagagacccaaggugagagaccaggagggcagaaucaacuacuacuggacccugcuggagcccggcgacaccaucaucuucgaggccaacggcaaccugaucgcccccugguacgccuucgcccugagcagaggcuucggcagcggcaucaucaccagcaacgugagcauggacgagugcgacgccaagugccagaccccccagggcgccaucaacagcagccugcccuuccagaacgugcaccccgugaccaucggcgagugccccaaguacgugagaagcaccaagcugagaauggugaccggccugagaaacauccccagcauccagagcagaggccuguucggcgccaucgccggcuucaucgagggcggcuggaccggcaugaucgacggcugguacggcuaccaccaccagaacgagcagggcagcggcuacgccgccgaccagaagagcacccagaacgccaucaacggcaucaccaacaaggugaacagcgugaucgagaagaugaacacccaguucaccgccgugggcaaggaguucaacaagcuggagaagagaauggagaaccugaacaagaagguggacgacggcuuccuggacaucuggaccuacaacgccgagcugcuggugcugcuggagaacgagagaacccuggacuuccacgacagcaacgugaagaaccuguacgagaaggugaagagccagcugaagaacaacgccaaggagaucggcaacggcugcuucgaguucuaccacaagugcaacaacgagugcauggagagcgugaagaacggcaccuacgacuaccccaaguacagcgaggagagcaagcugaacagagagaagaucgacggcgugaagcuggagagcaugggcguguaccagauccuggccaucuacagcaccguggccagcagccuggugcugcuggugagccugggcgccaucagcuucuggaugugcagcaacggcagccugcagugcagaaucugcaucuga

SEQ ID NO: 160927 - RNA, 1698 nt, Artificial Sequence; identical to SEQ ID NO: 160802
  derived and/or modified CDS sequence (opt4) from hemagglutinin__InfluenzaA__ABE11657

SEQ ID NO: 160928 - RNA, 1698 nt, Artificial Sequence
  derived and/or modified CDS sequence (opt4) from hemagglutinin__InfluenzaA__ABE11668
augaaggccaagcugcuggugcugcugugcaccuucaccgccaccuacgccgacaccaucugcaucggcuaccacgccaacaacagcaccgacaccguggacaccgugcuggagaagaacgugaccgugacccacagcgugaaccugcuggaggacagccacaacggcaagcugugccugcugaagggcaucgccccccugcagcugggcaacugcagcguggccggcuggauccugggcaaccccgagugcgagcugcugaucagcaaggagagcuggagcuacaucguggagacccccaaccccgagaacggcaccugcuaccccggcuacuucgccgacuacgaggagcugagagagcagcugagcagcgugagcagcuucgagagauucgagaucuuccccaaggagagcagcuggcccaaccacaccgugaccggcgugagcgccagcugcagccacaacggcaagagcagcuucuacagaaaccugcuguggcugaccggcaagaacggccuguaccccaaccugagcaugagcuacgugaacaacaaggagaaggaggugcuggugcuguggggcgugcaccacccccccaacaucggcgaccagagagcccuguaccacaccgagaacgccuacgugagcguggugagcagccacuacagcagaagauucacccccgagaucgccaagagacccaaggugagagaccaggagggcagaaucaacuacuacuggacccugcuggagcccggcgacaccaucaucuucgaggccaacggcaaccugaucgcccccugguacgccuucgcccugagcagaggcuucggcagcggcaucaucaccagcaacgcccccauggacgagugcgacgccaagugccagaccccccagggcgccaucaacagcagccugcccuuccagaacgugcaccccgugaccaucggcgagugccccaaguacgugagaagcgccaagcugagaauggugaccggccugagaaacauccccagcauccagagcagaggccuguucggcgccaucgccggcuucaucgagggcggcuggaccggcaugguggacggcugguacggcuaccaccaccagaacgagcagggcagcggcuacgccgccgaccagaagagcacccagaacgccaucaacggcaucaccaacaaggugaacagcgugaucgagaagaugaacacccaguucaccgccgugggcaaggaguucaacaagcuggagagaagaauggagaaccugaacaagaagguggacgacggcuuccuggacaucuggaccuacaacgccgagcugcuggugcugcuggagaacgagagaacccuggacuuccacgacagcaacgugaagaaccuguacgagaaggugaagagccagcugaagaacaacgccaaggagaucggcaacggcugcuucgaguucuaccacaagugcaacaacgagugcauggagagcgugaagaacggcaccuacgacuaccccaaguacagcgaggagagcaagcugaacagagagaagaucgacggcgugaagcuggagagcaugggcguguaccagauccuggccaucuacagcaccguggccagcagccuggugcugcuggugagccugggcgccaucagcuucuggaugugcagcaacggcagccugcagugcagaaucugcaucuga

SEQ ID NO: 160929 - RNA, 1698 nt, Artificial Sequence
  derived and/or modified CDS sequence (opt4) from hemagglutinin__InfluenzaA__ABE11679
augaaggugaagcugcuggugcugcugugcaccuucaccgccaccuacgccgacaccaucugcaucggcuaccacgccaacaacagcaccgacaccguggacaccgugcuggagaagaacgugaccgugacccacagcgugaaccugcuggaggacagccacaacggcaagcugugccugcugaagggcaucgccccccugcagcugggcaacugcagcguggccggcuggauccugggcaaccccgagugcgagcugcugaucagcaaggagagcuggagcuacaucguggagacccccaaccccgagaacggcaccugcuaccccggcuacuucgccgacuacgaggagcugagagagcagcugagcagcgugagcagcuucgagagauucgagaucuuccccaaggagagcagcuggcccaaccacaccgugaccggcgugagcgccagcugcagccacaacggcaagagcagcuucuacagaaaccugcuguggcugaccggcagaaacggccuguaccccaaccugagcaagagcuacgccaacaacaaggagaaggaggugcuggugcuguggggcgugcaccacccccccaacaucggcgaccagagagcccuguaccacaccgagaacgccuacgugagcguggugagcagccacuacagcagaagauucacccccgagaucgccaagagacccaaggugagagaccaggagggcagaaucaacuacuacuggacccugcuggagcccggcgacaccaucaucuucgaggccaacggcaaccugaucgcccccagauacgccuucgcccugagcagaggcuucggcagcggcaucaucaccagcaacgcccccauggacgagugcgacgccaagugccagaccccccagggcgccaucaacagcagccugcccuuccagaacgugcaccccgugaccaucggcgagugccccaaguacgugagaagcgccaagcugagaauggugaccggccugagaaacauccccagcauccagagcagaggccuguucggcgccaucgccggcuucaucgagggcggcuggaccggcaugguggacggcugguacggcuaccaccaccagaacgagcagggcagcggcuacgccgccgaccagaagagcacccagaacgccaucaacggcaucaccaacaaggugaacagcgugaucgagaagaugaacacccaguucaccgccgugggcaaggaguucaacaagcuggagagaagaauggagaaccugaacaagaagguggacgacggcuuccuggacaucuggaccuacaacgccgagcugcuggugcugcuggagaacgagagaacccuggacuuccacgacagcaacgugaagaaccuguacgagaaggugaagagccagcugaagaacaacgccaaggagaucggcaacggcugcuucgaguucuaccacaagugcaacgacgagugcauggagagcgugaagaacggcaccuacgacuaccccaaguacagcgaggagagcaagcugaacagagagaagaucgacggcgugaagcuggagagcaugggcguguaccagauccuggccaucuacagcaccguggccagcagccuggugcugcuggugagccugggcgccaucagcuucuggaugugcagcaacggcagccugcagugcagaaucugcaucuga

SEQ ID NO: 160930 - RNA, 1698 nt, Artificial Sequence
  derived and/or modified CDS sequence (opt4) from hemagglutinin__InfluenzaA__ABE11690
augaaggccaagcugcuggugcugcugugcaccuucaccgccaccuacgccgacaccaucugcaucggcuaccacgccaacaacagcaccgacaccguggacaccgugcuggagaagaacgugaccgugacccacagcgugaaccugcuggaggacagccacaacggcaagcugugccugcugaagggcaucgccccccugcagcugggcaacugcagcguggccggcuggauccugggcaaccccgagugcgagcugcugaucagcaaggagagcuggagcuacaucguggagacccccaaccccgagaacggcaccugcuaccccggcuacuucgccgacuacgaggagcugagagagcagcugagcagcgugagcagcuucgagagauucgagaucuuccccaagggcagcagcuggcccaaccacaccgugaccggcgugagcgccagcugcagccacaacggcaagagcagcuucuacagaaaccugcuguggcugaccggcaagaacggccuguaccccaaccugagcaugagcuacgugaacaacaaggagaaggaggugcuggugcuguggggcgugcaccacccccccaacaucggcaaccagagagcccuguaccacaccgagaacgccuacgugagcguggugagcagccacuacagcagaagauucacccccgagaucgccaagagacccaaggugagagaccaggagggcagaaucaacuacuacuggacccugcuggagcccggcgacaccaucaucuucgaggccaacggcaaccugaucgcccccugguacgccuucgcccugagcagaggcuucggcagcggcaucaucaccagcaacgcccccaugggcgagugcgacgccaagugccagaccccccagggcgccaucaacagcagccugcccuuccagaacgugcaccccgugaccaucggcgagugccccaaguacgugagaagcgccaagcugagaauggugaccggccugagaaacauccccagcauccagagcagaggccuguucggcgccaucgccggcuucaucgagggcggcuggaccggcaugguggacggcugguacggcuaccaccaccagaacgagcagggcagcggcuacgccgccgaccagaagagcacccagaacgccaucaacggcaucaccaacaaggugaacagcgugaucgagaagaugaacacccaguucaccgccgugggcaaggaguucaacaagcuggagagaagaauggagaaccugaacaagaagguggacgacggcuuccuggacaucuggaccuacaacgccgagcugcuggugcugcuggagaacgagagaacccuggacuuccacgacagcaacgugaagaaccuguacgagaaggugaagagccagcugaagaacaacgccaaggagaucggcaacggcugcuucgaguucuaccacaagugcaacaacgagugcauggagagcgugaagaacggcaccuacgacuaccccaaguacagcgaggagagcaagcugaacagagagaagaucgacggcgugaagcuggagagcaugggcguguaccagauccuggccaucuacagcaccguggccagcagccuggugcugcuggugagccugggcgccaucagcuucuggaugugcagcaacggcagccugcagugcagaaucugcaucuga

SEQ ID NO: 160931 - RNA, 1698 nt, Artificial Sequence
  derived and/or modified CDS sequence (opt4) from hemagglutinin__InfluenzaA__ABE11701
augaaggccaagcugcuggugcugcugugcaccuucaccgccaccuacgccgacaccaucugcaucggcuaccacgccaacaacagcaccgacaccguggacaccgugcuggagaagaacgugaccgugacccacagcgugaaccugcuggaggacagccacaacggcaagcugugccugcugaagggcaucgccccccugcagcugggcaacugcagcguggccggcuggauccugggcaaccccgagugcgagcugcugaucagcaaggagagcuggagcuacaucguggagacccccaaccccgagaacggcaccugcuaccccggcuacuucgccgacuacgaggagcugagagagcagcugagcagcgugagcagcuucgagagauucgagaucuuccccaagggcagcagcuggcccaaccacaccgugaccggcgugagcgccagcugcagccacaacggcaagagcagcuucuacagaaaccugcuguggcugaccggcaagaacggccuguaccccaaccugagcaugagcuacgugaacaacaaggagaaggaggugcuggugcuguggggcgugcaccacccccccaacaucggcgaccagaaggcccuguaccacaccgagaacgccuacgugagcguggugagcagccacuacagcagaagauucacccccgagaucgccaagagacccaaggugagagaccaggagggcagaaucaacuacuacuggacccugcuggagcccggcgacaccaucaucuucgaggccaacggcaaccugaucgcccccugguacgccuucgcccugagcagaggcuucggcagcggcaucaucaccagcaacgcccccaugggcgagugcgacgccaagugccagaccccccagggcgccaucaacagcagccugcccuuccagaacgugcaccccgugaccaucggcgagugccccaaguacgugagaagcgccaagcugagaauggugaccggccugagaaacauccccagcauccagagcagaggccuguucggcgccaucgccggcuucaucgagggcggcuggaccggcaugguggacggcugguacggcuaccaccaccagaacgagcagggcagcggcuacgccgccgaccagaagagcacccagaacgccaucaacggcaucaccaacaaggugaacagcaucaucgagaagaugaacacccaguucaccgccgugggcaaggaguucaacaagcuggagagaagaauggagaaccugaacaagaagguggacgacggcuuccuggacaucuggaccuacaacgccgagcugcuggugcugcuggagaacgagagaacccuggacuuccacgacagcaacgugaagaaccuguacgagaaggugaagagccagcugaagaacaacgccaaggagaucggcaacggcugcuucgaguucuaccacaagugcaacaacgagugcauggagagcgugaagaacggcaccuacgacuaccccaaguacagcgaggagagcaagcugaacagagagaagaucgacggcgugaagcuggagagcaugggcguguaccagauccuggccaucuacagcaccguggccagcagccuggugcugcuggugagccugggcgccaucagcuucuggaugugcagcaacggcagccugcagugcagaaucugcaucuga

SEQ ID NO: 160932 - RNA, 1698 nt, Artificial Sequence; identical to SEQ ID NO: 160860
  derived and/or modified CDS sequence (opt4) from hemagglutinin__InfluenzaA__ABE11712

SEQ ID NO: 160933 - RNA, 1698 nt, Artificial Sequence; identical to SEQ ID NO: 160901
  derived and/or modified CDS sequence (opt4) from hemagglutinin__InfluenzaA__ABE11723

SEQ ID NO: 160934 - RNA, 1698 nt, Artificial Sequence; identical to SEQ ID NO: 160907
  derived and/or modified CDS sequence (opt4) from hemagglutinin__InfluenzaA__ABE11734

SEQ ID NO: 160935 - RNA, 1698 nt, Artificial Sequence; identical to SEQ ID NO: 160860
  derived and/or modified CDS sequence (opt4) from hemagglutinin__InfluenzaA__ABE11812

SEQ ID NO: 160936 - RNA, 1698 nt, Artificial Sequence; identical to SEQ ID NO: 160901
  derived and/or modified CDS sequence (opt4) from hemagglutinin__InfluenzaA__ABE11823

SEQ ID NO: 160937 - RNA, 1698 nt, Artificial Sequence; identical to SEQ ID NO: 160901
  derived and/or modified CDS sequence (opt4) from hemagglutinin__InfluenzaA__ABE11834

SEQ ID NO: 160938 - RNA, 1698 nt, Artificial Sequence; identical to SEQ ID NO: 160901
  derived and/or modified CDS sequence (opt4) from hemagglutinin__InfluenzaA__ABE11845

SEQ ID NO: 160939 - RNA, 1698 nt, Artificial Sequence; identical to SEQ ID NO: 160907
  derived and/or modified CDS sequence (opt4) from hemagglutinin__InfluenzaA__ABE11856

SEQ ID NO: 160940 - RNA, 1701 nt, Artificial Sequence
  derived and/or modified CDS sequence (opt4) from hemagglutinin__InfluenzaA__ABE11900
augaaggccaagcugcuggugcugcugugcgccuucaccgccaccuacgccgacaccaucugcaucggcuaccacgccaacaacagcaccgacaccguggacaccgugcuggagaagaacgugaccgugacccacagcgugaaccugcuggaggacagccacaacggcaagcugugcagacugaagggcaccgccccccugcagcugggcaacugcagcguggccggcuggauccugggcaaccccgagugcgagagccuguucagcaaggagagcuggagcuacaucgccgagacccccaaccccgagaacggcaccugcuaccccggcuacuucgccgacuacgaggagcugagagagcagcugagcagcgugagcagcuucgagagauucgagaucuuccccaaggagagcagcuggcccaaccacaccgugaccaagggcgugaccgccagcugcagccacaacggcaagagcagcuucuacaagaaccugcuguggcugaccgagaagaacggccuguaccccaaccugagcaagagcuacgugaacaacaaggagaaggaggugcuggugcuguggggcgugcaccaccccagcaacaucggcgaccagagagccaucuaccacaccgagaacgccuacgugagcguggugagcagccacuacagcagaagauucacccccgagaucgccaagagacccaaggugagagaccaggagggcagaaucaacuacuacuggacccugcuggagcccggcgacaccaucaucuucgaggccaacggcaaccugaucgcccccugguacgccuucgcccugagcagaggcuucggcagcggcaucaucaccagcaacgccagcaugggcgagugcgacgccaagugccagaccccccagggcgccaucaacagcagccugcccuuccagaacgugcaccccgugaccaucggcgagugccccaaguacgugagaagcaccaagcugagaauggugaccggccugagaaacauccccagcauccagagcagaggccuguucggcgccaucgccggcuucaucgagggcggcuggaccggcaugaucgacggcugguacggcuaccaccaccagaacgagcagggcagcggcuacgccgccgaccagaagagcacccagaacgccaucaacggcaucaccaacaaggugaacagcgugaucgagaagaugaacacccaguucaccgccgugggcaaggaguucaacaagcuggagagaagaauggagaaccugaacaagaagguggacgacggcuuccuggacaucuggaccuacaacgccgagcugcuggugcugcuggagaacgagagaacccuggacuuccacgacagcaacgugaagaaccuguacgagaaggugaagacccagcugaagaacaacgccaaggagaucggcaacggcugcuucgaguucuaccacaagugcaacaacgagugcauggagagcgugaagaacggcaccuacgacuaccccaaguacagcgaggagagcaagcugaacagagagaagaucgacggcgugaagcuggagagcaugggcguguaccagauccuggccaucuacagcaccguggccagcagccuggugcugcugaucagccugggcgccaucagcuucuggaugugcagcaacggcagccugcagugcagaaucugcaucuga

SEQ ID NO: 160941 - RNA, 1701 nt, Artificial Sequence
  derived and/or modified CDS sequence (opt4) from hemagglutinin__InfluenzaA__ABE11942
augaaggccaagcugcuggugcugcugugcgccuucaccgccaccuacgccgacaccaucugcaucggcuaccacgccaacaacagcaccgacaccguggacaccgugcuggagaagaacgugaccgugacccacagcgugaaccugcuggaggacagccacaacggcaagcugugcagacugaagggcaccgccccccugcagcugggcaacugcagcguggccggcuggauccugggcaaccccgagugcgagagccuguucagcaaggagagcuggagcuacaucgccgagacccccaaccccgagaacggcaccugcuaccccggcuacuucgccgacuacgaggagcugagagagcagcugagcagcgugagcagcuucgagagauucgagaucuuccccaaggagagcagcuggcccaaccacaccgugaccaagggcgugaccgccagcugcagccacaacggcaagagcagcuucuacaagaaccugcuguggcugaccgagaagaacggccuguaccccagccugagcaagagcuacgugaacaacaaggagaaggaggugcuggugcuguggggcgugcaccaccccagcaacaucggcgaccagagagccaucuaccacaccgagaacgccuacgugagcguggugagcagccacuacagcagaagauucacccccgagaucgccaagagacccaaggugagagaccaggagggcagaaucaacuacuacuggacccugcuggagcccggcgacaccaucaucuucgaggccaacggcaaccugaucgcccccugguacgccuucgcccugagcagaggcuucggcagcggcaucaucaccagcaacgccagcaugggcgagugcgacgccaagugccagaccccccagggcgccaucaacagcagccugcccuuccagaacgugcaccccgugaccaucggcgagugccccaaguacgugagaagcaccaagcugagaauggugaccggccugagaaacauccccagcauccagagcagaggccuguucggcgccaucgccggcuucaucgagggcggcuggaccggcaugaucgacggcugguacggcuaccaccaccagaacgagcagggcagcggcuacgccgccgaccagaagagcacccagaacgccaucaacggcaucaccaacaaggugaacagcgugaucgagaagaugaacacccaguucaccgccgugggcaaggaguucaacaagcuggagagaagaauggagaaccugaacaagaagguggacgacggcuuccuggacaucuggaccuacaacgccgagcugcuggugcugcuggagaacgagagaacccuggacuuccacgacagcaacgugaagaaccuguacgagaaggugaagacccagcugaagaacaacgccaaggagaucggcaacggcugcuucgaguucuaccacaagugcaacaacgagugcauggagagcgugaagaacggcaccuacgacuaccccaaguacagcgaggagagcaagcugaacagagagaagaucgacggcgugaagcuggagagcaugggcguguaccagauccuggccaucuacagcaccguggccagcagccuggugcugcuggugagccugggcgccaucagcuucuggaugugcagcaacggcagccugcagugcagaaucugcaucuga

SEQ ID NO: 160942 - RNA, 1701 nt, Artificial Sequence
  derived and/or modified CDS sequence (opt4) from hemagglutinin__InfluenzaA__ABE12078
augaagaccaucaucgcccugagcuacauccugugccugguguucgcccagaagcugcccggcaacgacaacagcaccgccacccugugccugggccaccacgccgugcccaacggcacccuggugaagaccaucaccaacgaccagaucgaggugaccaacgccaccgagcuggugcagagcagcagcaccggcggcaucugcgacagcccccaccagauccuggacggcgagaacugcacccugaucgacgcccugcugggcgacccccacugcgacggcuuccagaacaaggagugggaccuguucguggagagaagcaaggccuacagcaacugcuaccccuacgacgugcccgacuacgccagccugagaagccugguggccagcagcggcacccuggaguucaacaacgagagcuucaacuggaccggcguggcccagaacggcaccagcagcgccugcaagagaagaagcaacaagagcuucuucagcagacugaacuggcugcaccagcugaaguacaaguaccccgcccugaacgugaccaugcccaacaacgagaaguucgacaagcuguacaucuggggcgugcaccaccccagcaccgacagcgaccagaucagccuguacgcccaggcccccggcagagugaccgugagcaccaagagaagccagcagaccgugauccccaacaucggcagcagacccugggugagaggcgugagcagcagaaucagcaucuacuggaccaucgugaagcccggcgacauccugcugaucaacugcaccggcaaccugaucgcccccagaggcuacuucaagaucagaagcggcaagagcagcaucaugagaagcgacgccagcaucggcaagugcaacagcgagugcaucacccccaacggcagcauccccaacgacaagcccuuccagaacgugaacagaaucaccuacggcgccugccccagauacgugaagcagaacacccugaagcuggccaccggcaugagaaacgugcccgagaagcagaccagaggcaucuucggcgccaucgccggcuucaucgagaacggcugggagggcaugguggacggcugguacggcuucagacaccagaacagcgagggcaccggccaggccgccgaccugaagagcacccaggccgccaucaaccagaucaacggcaagcugaacagacugaucgagaagaccaacgagaaguuccaccagaucgagaaggaguucagcgagguggagggcagaauccaggaccuggagaaguacguggaggacaccaagaucgaccuguggagcuacaacgccgagcugcugguggcccuggagaaccagcacaccaucgaccugaccgacagcgagaugaacaagcuguucgagaagaccaagaagcagcugagagagaacgccgaggacaugggcaacggcugcuucaagaucuaccacaagugcgacaacgccugcaucggcagcaucagaaacggcaccuacgaccacgacguguacagagacgaggcccugaacaacagauuccagaucaagggcguggagcugaagagcggcuacaaggacuggauccuguggaucagcuucgccaucagcugcuuccugcugugcguggugcugcugggcuucaucaugugggccugccagaagggcaacaucagaugcagcaucugcaucuga

SEQ ID NO: 160943 - RNA, 1701 nt, Artificial Sequence; identical to SEQ ID NO: 160837
  derived and/or modified CDS sequence (opt4) from hemagglutinin__InfluenzaA__ABE12123

SEQ ID NO: 160944 - RNA, 1698 nt, Artificial Sequence; identical to SEQ ID NO: 160860
  derived and/or modified CDS sequence (opt4) from hemagglutinin__InfluenzaA__ABE12248

SEQ ID NO: 160945 - RNA, 1701 nt, Artificial Sequence
  derived and/or modified CDS sequence (opt4) from hemagglutinin__InfluenzaA__ABE12623
augaagaccaucaucgcccugagcuacaucuucugccuggugcugggccaggaccugcccggcaacgacaacagcaccgccacccugugccugggccaccacgccgugcccaacggcacccuggugaagaccaucaccaacgaccagaucgaggugaccaacgccaccgagcuggugcagagcagcagcaccggcaagaucugcaacaacccccacagaauccuggacggcaucgacugcacccugaucgacgcccugcugggcgacccccacugcgacggcuuccagaacgagaccugggaccuguucguggagagaagcaaggccuucagcaacugcuaccccuacgacgugcccgacuacgccagccugagaagccugguggccagcagcggcacccuggaguucaucaacgagggcuucaccuggaccggcgugacccagaacggcggcagcaacgccugcaagagaggccccgacagcggcuucuucagcagacugaacuggcuguacaagagcggcagcaccuaccccgugcugaacgugaccaugcccaacaacgacaacuucgacaagcuguacaucuggggcgugcaccaccccagcaccaaccaggagcagaccagccuguacgugcaggccagcggcagagugaccgugagcaccaagagaagccagcagaccaucauccccaacaucggcagcagacccugggugagaggccugagcagcagaaucagcaucuacuggaccaucgugaagcccggcgacauccuggugaucaacagcaacggcaaccugaucgcccccagaggcuacuucaagaugagaaccggcaagagcagcaucaugagaagcgacgcccccaucggcaccugcaucagcgagugcaucacccccaacggcagcauccccaacgacaagcccuuccagaacgugaacaagaucaccuacggcgccugccccaaguacgugaagcagaacacccugaagcuggccaccggcaugagaaacgugcccgagaagcagaccagaggccuguucggcgccaucgccggcuucaucgagaacggcugggagggcaugaucgacggcugguacggcuucagacaccagaacagcgagggcaccggccaggccgccgaccugaagagcacccaggccgccaucgaccagaucaacggcaagcugaacagagugaucgagaagaccaacgagaaguuccaccagaucgagaaggaguucagcgagguggagggcagaauccaggaccuggagaaguacguggaggacaccaagaucgaccuguggagcuacaacgccgagcugcugguggcccuggagaaccagcacaccaucgaccugaccgacagcgagaugaacaagcuguucgagaagaccagaagacagcugagagagaacgccgaggacaugggcaacggcugcuucagaaucuaccacaagugcgacaacgccugcaucggcagcaucagaaacggcaccuacgaccacgacguguacagagacgaggcccugaacaacagauuccagaucaagggcguggagcugaagagcggcuacaaggacuggauccuguggaucagcuucgccaucagcugcuuccugcugugcguggugcugcugggcuucaucaugugggccugccagaagggcaacaucagaugcaacaucugcaucuga

SEQ ID NO: 160946 - RNA, 1701 nt, Artificial Sequence; identical to SEQ ID NO: 160890
  derived and/or modified CDS sequence (opt4) from hemagglutinin__InfluenzaA__ABE12645

SEQ ID NO: 160947 - RNA, 1701 nt, Artificial Sequence; identical to SEQ ID NO: 160867
  derived and/or modified CDS sequence (opt4) from hemagglutinin__InfluenzaA__ABE13076

SEQ ID NO: 160948 - RNA, 1701 nt, Artificial Sequence; identical to SEQ ID NO: 160843
  derived and/or modified CDS sequence (opt4) from hemagglutinin__InfluenzaA__ABE13323

SEQ ID NO: 160949 - RNA, 1701 nt, Artificial Sequence
  derived and/or modified CDS sequence (opt4) from hemagglutinin__InfluenzaA__ABE13471
augaagaccaucaucgcccugagcuacauccugugccugguguucgcccagaagcugcccggcaacgacaacagcaccgccacccugugccugggccaccacgccgugcccaacggcacccuggugaagaccaucaccaacgaccagaucgaggugaccaacgccaccgagcuggugcagaacagcagcaccggcagaaucugcgacagcccccacagaauccuggacggcaagaacugcacccugaucgacgcccugcugggcgacccccacugcgacggcuuccagaacaaggagugggaccuguucguggagagaagcaaggccuacagcaacugcuaccccuacgacgugcccgacuacgccagccugagaagccugguggccagcagcggcacccuggaguucuacaacgagagcuucaacuggaccggcguggcccagaacggcaccagcuacgccugcaagagaagaagcgugaagagcuucuucagcagacugaacuggcugcacaagcuggaguacaaguaccccgcccugaacgugaccaugcccaacaacgacaaguucgacaagcuguacaucuggggcgugcaccaccccagcaccgacagcgaccagaccagccuguacgugcaggccagcggcagagugaccgugagcaccaagagaagccagcagaccgugauccccaacaucggcagcagacccugggugagaggcgugagcagcagaaucagcaucuacuggaccaucgugaagcccggcgacauccugcugaucaacagcaccggcaaccugaucgcccccagaggcuacuucaagaucagaagcggcaagagcagcaucaugagaagcgacgcccccaucggcaacugcaacagcgagugcaucacccccaacggcagcauccccaacgacaagcccuuccagaacgugaacagaaucaccuacggcgccugccccagauacgugaagcagaacacccugaagcuggccaccggcaugagaaacgugcccgagaagcagaccagaggcaucuucggcgccaucgccggcuucaucgagaacggcugggagggcaugguggacggcugguacggcuucagacaccagaacagcgagggcaccggccaggccgccgaccugaagagcacccaggccgccaucaaccagaucaacggcaagcugaacagacugaucgagaagaccaacgagaaguuccaccagaucgagaaggaguucagcgagguggagggcagaauccaggaccuggagaaguacguggaggacaccaagaucgaccuguggagcuacaacgccgagcugcugguggcccuggagaaccagcacaccaucgaccugaccgacagcgagaugaacaagcuguucgagagaaccagaaagcagcugagagagaacgccgaggacaugggcaacggcugcuucagaaucuaccacaagugcgacaacgccugcaucggcagcaucagaaacggcaccuacgaccacgacguguacagagacgaggcccugaacaacagauuccagaucaagggcguggagcugaagagcggcuacaaggacuggauccuguggaucagcuucgccaucagcugcuuccugcugugcguggugcugcugggcuucaucaugugggccugccagaagggcaacaucagaugcaacaucugcaucuga

SEQ ID NO: 160950 - RNA, 1701 nt, Artificial Sequence
  derived and/or modified CDS sequence (opt4) from hemagglutinin__InfluenzaA__ABE13555
augaagaccaucaucgcccugagcuacauccugugccugguguucgcccagaagcugcccggcaacgacaacagcaccgccacccugugccugggccaccacgccgugcccaacggcacccuggugaagaccaucaccaacgaccagaucgaggugaccaacgccaccgagcuggugcagggcagcagcaccggcagaaucugcgacagcccccacagaauccuggacggcaagaacugcacccugaucgacgcccugcugggcgacccccacugcgacggcuuccagaacaaggagugggaccuguucguggagagaagcaaggccuacagcaacugcuaccccuacgacgugcccgacuacgccagccugagaagccugguggccagcagcggcacccuggaguucaacaacgagagcuucaacuggaccggcguggcccagaacggcaccagcuacgccugcaagagaagaagcgugaagagcuucuucagcagacugaacuggcugcacaagcuggaguacaaguaccccgcccugaacgugaccaugcccaacaacgacaaguucgacaagcuguacaucuggggcgugcaccaccccagcaccgacagcgaccagaccagccuguacgugcaggccagcggcagagugaccgugagcaccaagagaagccagcagaccgugauccccaacaucggcagcagacccugggugagaggcgugagcagcagaaucagcaucuacuggaccaucgugaagcccggcgacauccugcugaucagcagcaccggcaaccugaucgcccccagaggcuacuucaagaucagaagcggcaagagcagcaucaugagaagcgacgcccccaucgacaacugcaacagcgagugcaucacccccaacggcagcauccccaacgacaagcccuuccagaacgugaacagaaucaccuacggcgccugccccagauacgugaagcagaacacccugaagcuggccaccggcaugagaaacgugcccgagaagcagaccaagggcaucuucggcgccaucgccggcuucaucgagaacggcugggagggcaugguggacggcugguacggcuucagacaccagaacagcgagggcaccggccaggccgccgaccugaagagcacccaggccgccaucaaccagaucaacggcaagcugaacagacugaucgagaagaccaacgagaaguuccaccagaucgagaaggaguucagcgagguggagggcagaauccaggaccuggagaaguacguggaggacaccaagaucgaccuguggagcuacaacgccgagcugcugguggcccuggagaaccagcacaccaucgaccugaccgacagcgagaugaacaagcuguucgagagaaccagaaagcagcugagagagaacgccgaggacaugggcaacggcugcuucaagaucuaccacaagugcgacaacgccugcaucggcagcaucagaaacggcaccuacgaccacgacguguacagagacgaggcccugaacaacagauuccagaucaagggcguggagcugaagagcggcuacaaggacuggauccuguggaucagcuucgccaugagcugcuuccugcugugcguggugcugcugggcuucaucaugugggccugccagaagggcaacaucagaugcaacaucugcaucuga

SEQ ID NO: 160951 - RNA, 1701 nt, Artificial Sequence
  derived and/or modified CDS sequence (opt4) from hemagglutinin__InfluenzaA__ABE13606
augaagaccaucaucgcccugagcuacauccugugccugguguucgcccagaagcugcccggcaacgacaacagcaccgccacccugugccugggccaccacgccgugcccaacggcacccuggugaagaccaucaccaacgaccagaucgaggugaccaacgccaccgagauggugcagagcagcagcaccggcagaaucugcgacagcccccacagaauccuggacggcaagaacugcacccugaucgacgcccugcugggcgacccccacugcgacggcuuccagaacaaggagugggaccuguucguggagagaagcaaggccuacagcaacugcuaccccuacgacgugcccgacuacgccagccugagaagccugguggccagcagcggcacccuggaguucaccaacgagggcuucaacuggaccggcguggcccaggacggcaccagcuacgccugcaagagaggcagcgugaagagcuucuucagcagacugaacuggcugcacaagcuggaguacaaguaccccgcccugaacgugaccaugcccaacaacgacaaguucgacaagcuguacaucuggggcgugcaccaccccagcaccgacagcgaccagaccagccuguacgugcaggccagcggcagagugaccgugagcaccaagagaagccagcagaccgugauccccaacaucggcagcagacccugggugagaggcgugagcagcagaaucagcaucuacuggaccaucgugaagcccggcgacauccugcugaucaacagcaccggcaaccugaucgcccccagaggcuacuucaagaucagaagcggcaagagcagcaucaugagaagcgacgcccccaucggcaacugcaacagcgagugcaucacccccaacggcagcauccccaacgacaagcccuuccagaacgugaacagaaucaccuacggcgccugccccagauacgugaagcagaacacccugaagcuggccaccggcaugagaaacgugcccgagaagcagaccagaggcaucuucggcgccaucgccggcuucaucgagaacggcugggagggcaugguggacggcugguacggcuucagacaccagaacagcgagggcaccggccaggccgccgaccugaagagcacccaggccgccaucaaccagaucaacggcaagcugaacagacugaucgagaagaccaacgagaaguuccaccagaucgagaaggaguucagcgagguggagggcagaauccaggaccuggagaaguacguggaggacaccaagaucgaccuguggagcuacaacgccgagcugcugaucgcccuggagaaccagcacaccaucgaccugaccgacagcgagaugaacaagcuguucgagagaaccagaaagcagcugagagagaacgccgaggacaugggcaacggcugcuucaagaucuaccacaagugcgacaacgccugcaucggcagcaucagaaacggcaccuacgaccacgacguguacagagacgaggcccugaacaacagauuccagaucaagggcguggagcugaagagcggcuacaaggacuggauccuguggaucagcuucgccaucagcugcuuccugcugugcguggugcugcugggcuucaucaugugggccugccagaagggcaacaucagaugcaacaucugcaucuga

SEQ ID NO: 160952 - RNA, 1701 nt, Artificial Sequence
  derived and/or modified CDS sequence (opt4) from hemagglutinin__InfluenzaA__ABE13628
augaagaccaucaucgcccugagcuacauccugugccugguguucgcccagaagcugcccggcaacgacaacagcaccgccacccugugccugggccaccacgccgugcccaacggcacccuggugaagaccaucaccaacgaccagaucgaggugaccaacgccaccgagcuggugcagagcagcagcaccggcagaaucugcgacagcccccacagaauccuggacggcaagaacugcacccugaucgacgcccugcugggcgacccccacugcgacggcuuccagaacaaggagugggaccuguucguggagagaagcaaggccuacagcaacugcuaccccuacgacgugcccgacuacgccagccugagaagccugguggccagcagcggcacccuggaguucaccaacgagggcuucaacuggaccggcguggcccaggacggcaagagcuacgccugcaagagaggcagcgugaacagcuucuucagcagacugaacuggcugcacaagcuggaguacaaguaccccgcccugaacgugaccaugcccaacaacgacaaguucgacaagcuguacaucuggggcgugcaccaccccagcaccgacagcgaccagaccagccuguacgugcaggccagcggcagagugaccgugagcaccaagagaagccagcagaccgugauccccaacaucggcagcagacccugggugagaggcaucagcagcagaaucagcaucuacuggaccaucgugaagcccggcgacauccugcugaucaacagcaccggcaaccugaucgcccccagaggcuacuucaagaucagaaacggcaagagcagcaucaugagaagcgacgcccccaucgacaacugcaacagcgagugcaucacccccaacggcagcauccccaacgacaagcccuuccagaacgugaacagaaucaccuacggcgccugccccagauacgugaagcagaacacccugaagcuggccaccggcaugagaaacgugcccgagaagcagaccagaggcaucuucggcgccaucgccggcuucaucgagaacggcugggagggcaugguggacggcugguacggcuucagacaccagaacagcgagggcaccggccaggccgccgaccugaagagcacccaggccgccaucgaccagaucaacggcaagcugaacagacugaucgagaagaccaacgagaaguuccaccagaucgagaaggaguucagcgagguggagggcagaauccaggaccuggagaaguacguggaggacaccaagaucgaccuguggagcuacaacgccgagcugcugguggcccuggagaaccagcacaccaucgaccugaccgacagcgagaugaacaagcuguucgagagaaccagaaagcagcugagagagaacgccgaggacaugggcaacggcugcuucaagaucuaccacaagugcgacaacgccugcaucggcagcaucagaaacggcaccuacgaccacgacguguacagagacgaggcccugaacaacagauuccagaucaagggcguggagcugaagagcggcuacaaggacuggauccuguggaucagcuucgccaucagcugcuuccugcugugcguggugcugcugggcuucaucaugugggccugccagaagggcaacaucagaugcaacaucugcaucuga

SEQ ID NO: 160953 - RNA, 1701 nt, Artificial Sequence
  derived and/or modified CDS sequence (opt4) from hemagglutinin__InfluenzaA__ABE13824
augaagaccaucaucgcccugagcuacauccugugccagguguucgcccagaagcugcccggcaacgacaacagcaccgccacccugugccugggccaccacgccgugcccaacggcacccuggugaagaccaucaccaacgaccagaucgaggugaccaacgccaccgagcuggugcagagcagcagcaccggcagaaucugcgacagcccccacagaauccuggacggcaagaacugcacccugaucgacgcccugcugggcgacccccacugcgacggcuuccagaacaaggagugggaccuguucguggagagaagcaaggccuacagcaacugcuaccccuacgacgugcccgacuacgccagccugagaagccugguggccagcagcggcacccuggaguucaccaacgagggcuucaacuggaccggcguggcccaggacggcaagagcuacgccugcaagagaggcagcgugaacagcuucuucagcagacugaacuggcugcacaagcuggaguacaaguaccccgcccugaacgugaccaugcccaacaacgacaaguucgacaagcuguacaucuggggcgugcaccaccccagcaccgacagcgaccagaccagccuguacgugcaggccagcggcagagugaccgugagcaccaagagaagccagcagaccgugauccccaacaucggcagcagacccugggugagaggcaucagcagcagaaucagcaucuacuggaccaucgugaagcccggcgacauccugcugaucaacagcaccggcaaccugaucgcccccagaggcuacuucaagaucagaaacggcaagagcagcaucaugagaagcgacgcccccaucgacaacugcaacagcgagugcaucacccccaacggcagcauccccaacgacaagcccuuccagaacgugaacagaaucaccuacggcgccugccccagauacgugaagcagaacacccugaagcuggccaccggcaugagaaacgugcccgagaagcagaccagaggcaucuucggcgccaucgccggcuucaucgagaacggcugggagggcaugguggacggcugguacggcuucagacaccagaacagcgagggcaccggccaggccgccgaccugaagagcacccaggccgccaucgaccagaucaacggcaagcugaacagacugaucgagaagaccaacgagaaguuccaccagaucgagaaggaguucagcgagguggagggcagaauccaggaccuggagaaguacguggaggacaccaagaucgaccuguggagcuacaacgccgagcugcugguggcccuggagaaccagcacaccaucgaccugaccgacagcgagaugaacaagcuguucgagagaaccagaaagcagcugagagagaacgccgaggacaugggcaacggcugcuucaagaucuaccacaagugcgacaacgccugcaucggcagcaucagaaacggcaccuacgaccacgacguguacagagacgaggcccugaacaacagauuccagaucaagggcguggagcugaagagcggcuacaaggacuggauccuguggaucagcuucgccaucagcugcuuccugcugugcguggugcugcugggcuucaucaugugggccugccagaagggcaacaucagaugcaacaucugcaucuga

SEQ ID NO: 160954 - RNA, 1701 nt, Artificial Sequence; identical to SEQ ID NO: 160953
  derived and/or modified CDS sequence (opt4) from hemagglutinin__InfluenzaA__ABE14019

SEQ ID NO: 160955 - RNA, 1701 nt, Artificial Sequence
  derived and/or modified CDS sequence (opt4) from hemagglutinin__InfluenzaA__ABE14030
augaagaccaucaucgcccugagcuacauccugugccugguguucgcccagaagcugcccggcaacgacaacagcaccgccacccugugccugggccaccacgccgugcccaacggcacccuggugaagaccaucaccaacgaccagaucgaggugaccaacgccaccgagcuggugcagagcagcagcaucggcagaaucugcgacagcccccacagaauccuggacggcaagaacugcacccugaucgacgcccugcugggcgacccccacugcgacggcuuccagaacaaggagugggaccuguucguggagagaagcaaggccuacagcaacugcuaccccuacgacgugcccgacuacgccagccugagaagccugguggccagcagcggcacccuggaguucaccaacgagggcuucaacuggaccggcguggcccaggacggcaagagcuacgccugcaagagaggcagcgugaacagcuucuucagcagacugaacuggcugcacaagcuggaguacaaguaccccgcccugaacgugaccaugcccaacaacgacaaguucgacaagcuguacaucuggggcgugcaccaccccagcaccgacagcgaccagaccagccuguacgugcaggccagcggcagagugaccgugagcaccaagagaagccagcagaccgugauccccaacaucggcagcagacccugggugagaggcaucagcagcagaaucagcaucuacuggaccaucgugaagcccggcgacauccugcugaucaacagcaccggcaaccugaucgcccccagaggcuacuucaagaucagaaacggcaagagcagcaucaugagaagcgacgcccccaucgacaacugcaacagcgagugcaucacccccaacggcagcauccccaacgacaagcccuuccagaacgugaacagaaucaccuacggcgccugccccagauacgugaagcagaacacccugaagcuggccaccggcaugagaaacgugcccgagaagcagaccagaggcaucuucggcgccaucgccggcuucaucgagaacggcugggagggcaugguggacggcugguacggcuucagacaccagaacagcgagggcaccggccaggccgccgaccugaagagcacccaggccgccaucgaccagaucaacggcaagcugaacagacugaucgagaagaccaacgagaaguuccaccagaucgagaaggaguucagcgagguggagggcagaauccaggaccuggagaaguacguggaggacaccaagaucgaccuguggagcuacaacgccgagcugcugguggcccuggagaaccagcacaccaucgaccugaccgacagcgagaugaacaagcuguucgagagaaccagaaagcagcugagagagaacgccgaggacaugggcaacggcugcuucaagaucuaccacaagugcgacaacgccugcaucggcagcaucagaaacggcaccuacgaccacgacguguacagagacgaggcccugaacaacagauuccagaucaagggcguggagcugaagagcggcuacaaggacuggauccuguggaucagcuucgccaucagcugcuuccugcugugcguggugcugcugggcuucaucaugugggccugccagaagggcaacaucagaugcaacaucugcaucuga

SEQ ID NO: 160956 - RNA, 1701 nt, Artificial Sequence; identical to SEQ ID NO: 160952
  derived and/or modified CDS sequence (opt4) from hemagglutinin__InfluenzaA__ABE14041

SEQ ID NO: 160957 - RNA, 1701 nt, Artificial Sequence; identical to SEQ ID NO: 160953
  derived and/or modified CDS sequence (opt4) from hemagglutinin__InfluenzaA__ABE14063

SEQ ID NO: 160958 - RNA, 1701 nt, Artificial Sequence
  derived and/or modified CDS sequence (opt4) from hemagglutinin__InfluenzaA__ABE14124
augaagaccaucaucgcccugagcuacauccugugccugguguucgcccagaagcugcccggcaacgacaacagcaccgccacccugugccugggccaccacgccgugcccaacggcacccuggugaagaccaucaccaacgaccagaucgaggugaccaacgccaccgagcuggugcagagcagcagcaccggcagaaucugcgacagcccccacagaauccuggacggcaagaacugcacccugaucgacgcccugcugggcgacccccacugcgacggcuuccagaacaaggagugggaccuguucguggagagaagcaaggccuacagcaacugcuaccccuacgacgugcccgacuacgccagccugagaagccugguggccagcagcggcacccuggaguucaccaacgagggcuucaacuggaccggcguggcccaggacggcaccagcuacgccugcaagagaggcagcgugaagagcuucuucagcagacugaacuggcugcacaagcuggaguacaaguaccccgcccugaacgugaccaugcccaacaacgacaaguucgacaagcuguacaucuggggcgugcaccaccccagcaccgacagcgaccagaccagccuguacgugcaggccagcggcagagugaccgugagcaccaagagaagccagcagaccgugauccccaacaucggcagcagacccugggugagaggcgugagcagcagaaucagcaucuacuggaccaucgugaagcccggcgacauccugcugaucaacagcaccggcaaccugaucgcccccagaggcuacuucaagaucagaagcggcaagagcagcaucaugagaagcgacgcccccaucggcaacugcaacagcgagugcaucacccccaacggcagcauccccaacgacaagcccuuccagaacgugaacagaaucaccuacggcgccugccccagauacgugaagcagaacacccugaagcuggccaccggcaugagaaacgugcccgagaagcagaccagaggcaucuucggcgccaucgccggcuucaucgagaacggcugggagggcaugguggacggcugguacggcuucagacaccagaacagcgagggcaccggccaggccgccgaccugaagagcacccaggccgccaucaaccagaucaacggcaagcugaacagacugaucgagaagaccaacgagaaguuccaccagaucgagaaggaguucagcgagguggagggcagaauccaggaccuggagaaguacguggaggacaccaagaucgaccuguggagcuacaacgccgagcugcugaucgcccuggagaaccagcacaccaucgaccugaccgacagcgagaugaacaagcuguucgagagaaccagaaagcagcugagagagaacgccgaggacaugggcaacggcugcuucaagaucuaccacaagugcgacaacgccugcaucggcagcaucagaaacggcaccuacgaccacgacguguacagagacgaggcccugaacaacagauuccagaucaagggcguggagcugaagagcggcuacaaggacuggauccuguggaucagcuucgccaucagcugcuuccugcugugcguggugcugcugggcuucaucaugugggccugccagaagggcaacaucagaugcaacaucugcaucuga

SEQ ID NO: 160959 - RNA, 1701 nt, Artificial Sequence
  derived and/or modified CDS sequence (opt4) from hemagglutinin__InfluenzaA__ABE14464
augaagaccaucaucgcccugagcuacauccugugccagguguucgcccagaagcugcccggcaacgacaacagcaccgccacccugugccugggccaccacgccgugcccaacggcacccuggugaagaccaucaccaacgaccagaucgaggugaccaacgccaccgagcuggugcagagcagcagcaccggcagaaucugcgacagcccccacagaauccuggacggcaagaacugcacccugaucgacgcccugcugggcgacccccacugcgacggcuuccagaacaaggagugggaccuguucguggagagaagcaaggccuacagcaacugcuaccccuacgacgugcccgacuacgccagccugagaagccugguggccagcagcggcacccuggaguucaccaacgagggcuucaacuggaccggcguggcccaggacggcaagagcuacgccugcaagagaggcagcgugaacagcuucuucagcagacugaacuggcugcacaagcuggaguacaaguaccccgcccugaacgugaccaugcccaacaacgacaaguucgacaagcuguacaucuggggcgugcaccaccccagcaccgacagcgaccagaccagccuguacgugcaggccagcggcagagugaccgugagcaccaagagaagccagcagaccgugauccccaacaucggcagcagacccugggugagaggcaucagcagcagaaucagcaucuacuggaccaucgugaagcccggcgacauccugcugaucaacagcaccggcaaccugaucgcccccagaggcuacuucaagaucagaaacggcaagagcagcaucaugagaagcgacgcccccaucgacaacugcaacagcgagugcaucacccccaacggcagcauccccaacgacaagcccuuccagaacgugaacagaaucaccuacggcgccugccccagauacgugaagcagaacacccugaagcuggccaccggcaugagaaacgugcccgagaagcagaccagaggcaucuucggcgccaucgccggcuucaucgagaacggcugggagggcaugaucgacggcugguacggcuucagacaccagaacagcgagggcaccggccaggccgccgaccugaagagcacccaggccgccaucgaccagaucaacggcaagcugaacagacugaucgagaagaccaacgagaaguuccaccagaucgagaaggaguucagcgagguggagggcagaauccaggaccuggagaaguacguggaggacaccaagaucgaccuguggagcuacaacgccgagcugcugguggcccuggagaaccagcacaccaucgaccugaccgacagcgagaugaacaagcuguucgagagaaccagaaagcagcugagagagaacgccgaggacaugggcaacggcugcuucaagaucuaccacaagugcgacaacgccugcaucggcagcaucagaaacggcaccuacgaccacgacguguacagagacgaggcccugaacaacagauuccagaucaagggcguggagcugaagagcggcuacaaggacuggauccuguggaucagcuucgccaucagcugcuuccugcugugcguggugcugcugggcuucaucaugugggccugccagaagggcaacaucagaugcaacaucugcaucuga

SEQ ID NO: 160960 - RNA, 1701 nt, Artificial Sequence
  derived and/or modified CDS sequence (opt4) from hemagglutinin__InfluenzaA__ABE14840
augaagaccaucaucgcccugagcuacauccugugccugguguucgcccagaagcugcccagaaacgacaacagcaccgccacccugugccugggccaccacgccgugcccaacggcacccuggugaagaccaucaccaacgaccagaucgaggugaccaacgccaccgagcuggugcagagcagcagcaccggcagaaucugcgacagcccccacagaauccuggacggcaagaacugcacccugaucgacgcccugcugggcgacccccacugcgacggcuuccagaacaaggagugggaccuguucguggagagaagcaaggccuacagcaacugcuaccccuacgacgugcccgacuacgccagccugagaagccugguggccagcagcggcacccuggaguucaccaacgagggcuucaacuggaccggcguggcccaggacggcaagagcuacgccugcaagagaggcagcgugaacagcuucuucagcagacugaacuggcugcacaagcuggaguacaaguaccccgcccugaacgugaccaugcccaacaacgacaaguucgacaagcuguacaucuggggcgugcaccaccccagcaccgacagcgaccagaccagccuguacgugcaggccagcggcagagugaccgugagcaccaagagaagccagcagaccgugauccccaacaucggcagcagacccugggugagaggcaucagcagcagaaucagcaucuacuggaccaucgugaagcccggcgacauccugcugaucagcagcaccggcaaccugaucgcccccagaggcuacuucaagaucagaaacggcaagagcagcaucaugagaagcgacgcccccaucgacaacugcaacagcgagugcaucacccccaacggcagcauccccaacgacaagcccuuccagaacgugaacagaaucaccuacggcgccugccccagauacgugaagcagaacacccugaagcuggccaccggcaugagaaacgugcccgagaagcagaccagaggcaucuucggcgccaucgccggcuucaucgagaacggcugggagggcaugguggacggcugguacggcuucagacaccagaacagcgagggcaccggccaggccgccgaccugaagagcacccaggccgccaucgaccagaucaacggcaagcugaacagacugaucgagaagaccaacgagaaguuccaccagaucgagaaggaguucagcgagguggagggcagaauccaggaccuggagaaguacguggaggacaccaagaucgaccuguggagcuacaacgccgagcugcugguggcccuggagaaccagcacaccaucgaccugaccgacagcgagaugaacaagcuguucgagagaaccagaaagcagcugagagagaacgccgaggacaugggcaacggcugcuucaagaucuaccacaagugcgacaacgccugcaucggcagcaucagaaacggcaccuacgaccacgacguguacagagacgaggcccugaacaacagauuccagaucaagggcguggagcugaagagcggcuacaaggacuggauccuguggaucagcuucgccaucagcugcuuccugcugugcguggugcugcugggcuucaucaugugggccugccagaagggcaacaucagaugcagcaucugcaucuga

SEQ ID NO: 160961 - RNA, 1701 nt, Artificial Sequence
  derived and/or modified CDS sequence (opt4) from hemagglutinin__InfluenzaA__ABE15578
augaagaccaucaucgcccugagcuacauccugugccugguguucgcccagaagcugcccggcaacgacaacagcaccgccacccugugccugggccaccacgccgugcccaacggcacccuggugaagaccaucaccaacgaccagaucgaggugaccaacgccaccgagcuggugcagagcagcagcaccggcagaaucugcgacagcccccacagaauccuggacggcaagaacugcacccugaucgacgcccugcugggcgacccccacugcgacggcuuccagaacaaggagugggaccuguucguggagagaagcaaggccuacagcaacugcuaccccuacgacgugcccgacuacgccagccugagaagccugguggccagcagcggcacccuggaguucaccaacgagggcuucaacuggaccggcguggcccaggacggcaagagcuacgccugcaagagaggcagcgugaacagcuucuucagcagacugaacuggcugcacaagcuggaguacaaguaccccgcccugaacgugaccaugcccaacaacgacaaguucgacaagcuguacaucuggggcgugcaccaccccagcaccgacagcgaccagaccagccuguacgugcaggccagcggcagagugaccgugagcaccaagagaagccagcagaccgugauccccaacaucggcagcagacccugggugagaggcaucagcagcagaaucagcaucuacuggaccaucgugaagcccggcgacauccugcugaucaacagcaccggcaaccugaucgcccccagaggcuacuucaagaucagaaacggcaagagcagcaucaugagaagcgacgcccccaucgacaacugcaacagcgagugcaucacccccaacggcagcauccccaacgacaagcccuuccagaacgugaacagaaucaccuacggcgccugccccagauacgugaagcagaacacccugaagcuggccaccggcaugagaaacgugcccgagaagcagaccagaggcaucuucggcgccaucgccggcuucaucgagaacggcugggagggcaugguggacggcugguacggcuucagacaccagaacagcgagggcaccggccaggccgccgaccugaagagcacccaggccgccaucgaccagaucaacggcaagcugaacagacugaucgagaagaccaacgagaaguuccaccagaucgagaaggaguucagcgagguggagggcagaauccaggaccuggagaaguacguggaggacaccaagaucgaccuguggagcuacaacgccgagcugcugguggcccuggagaaccagcacaccaucgaccugaccgacagcgagaugaacaagcuguucgagagaaccagaaagcagcugagagagaacgccgaggacaugggcaacggcugcuucaagaucuaccacaagugcgacaacgccugcaucggcagcaucagaaacggcaccuacgaccacgacguguacagagacgaggcccugaacaacagauuccagaucaagggcguggagcugaagagcggcuacaaggacuggauccuguggaucagcuucgccaucagcugcuuccugcugugcguggugcugcugggcuucaucaugugggccugccagaagggcaacaucagaugcagcaucugcaucuga

SEQ ID NO: 160962 - RNA, 1701 nt, Artificial Sequence
  derived and/or modified CDS sequence (opt4) from hemagglutinin__InfluenzaA__ABE26991
augaaggccaagcugcuggugcugcugugcgccuucaccgccaccuacgccgacaccaucugcaucggcuaccacgccaacaacagcaccgacaccguggacaccgugcuggagaagaacgugaccgugacccacagcgugaaccugcuggaggacagccacaacggcaagcugugcagacugaagggcaccgccccccugcagcugggcaacugcagcguggccggcuggauccugggcaaccccgagugcgagagccuguucagcaaggagagcuggagcuacaucgccgagacccccaaccccgagaacggcaccugcuaccccggcuacuucgccgacuacgaggagcugagagagcagcugagcagcgugagcagcuucgagagauucgagaucuuccccaaggagagcagcuggcccaaccacaccgugaccaagggcgugaccgccagcugcagccacaacggcaagagcagcuucuacaagaaccugcuguggcugaccgagaagaacggccuguaccccaaccugagcaagagcuacgugaacaacaaggagaaggaggugcuggugcuguggggcgugcaccaccccagcaacaucggcgaccagagagccaucuaccacaccgagaacgccuacgugagcguggugagcagccacuacagcagaagauucacccccgagaucgccaagagacccaaggugagagaccaggagggcagaaucaacuacuacuggacccugcuggagcccggcgacaccaucaucuucgaggccaacggcaaccugaucgcccccugguacgccuucgcccugagcagaggcuucggcagcggcaucaucaccagcaacgccagcaugggcgacugcgacgccaagugccagaccccccagggcgccaucaacagcagccugcccuuccagaacgugcaccccgugaccaucggcgagugccccaaguacgugagaagcaccaagcugagaauggugaccggccugagaaacauccccagcauccagagcagaggccuguucggcgccaucgccggcuucaucgagggcggcuggaccggcaugaucgacggcugguacggcuaccaccaccagaacgagcagggcagcggcuacgccgccgacaagaagagcacccagaacgccaucgacggcaucaccaacaaggugaacagcgugaucgagaagaugaacacccaguucaccgccgugggcaaggaguucaacaagcuggagagaagaauggagaaccugaacaagaagguggacgacggcuuccuggacaucuggaccuacaacgccgagcugcuggugcugcuggagaacgagagaacccuggacuuccacgacagcaacgugaagaaccuguacgagaaggugaagaaccagcugaagaacaacgccaaggagaucggcaacggcugcuucgaguucuaccacaagugcaacaacgagugcauggagagcgugaagaacggcaccuacgacuaccccaaguacagcgaggagagcacccugaagagagagaagaucgacggcgugaagcuggagagcaugggcguguaccagauccuggccaucuacagcaccguggccagcagccuggugcugcuggugagccugggcgccaucagcuucuggaugugcagcaacggcagccugcagugcagaaucugcaucuga

SEQ ID NO: 160963 - RNA, 1701 nt, Artificial Sequence
  derived and/or modified CDS sequence (opt4) from hemagglutinin__InfluenzaA__ABF47550
augaagaccaucaucgcccugagcuacaucuucugccugguguucgcccagaagcugcccggcaacgacaacagcaccgccacccugugccugggccaccacgccgugcccaacggcacccuggugaagaccaucaccaacgaccagaucgaggugaccaacgccaccgagcuggugcagagcagcagcaccggcagaaucugcgacagcccccacagaauccuggacggcaagaacugcacccugaucgacgcccugcugggcgacccccacugcgacggcuuccagaacgagaagugggaccuguucguggagagaagcaaggccuacagcaacugcuaccccuacgacgugcccgacuacgccagccugagaagccugguggccagcagcggcacccuggaguucaucaacgaggacuucaacuggaccggcgugacccagagcggcggcagcuacgccugcaagagaggcagcgugaacagcuucuucagcagacugaacuggcugcacgagagcgaguacaaguaccccgcccugaacgugaccaugcccaacaacggcaaguucgacaagcuguacaucuggggcgugcaccaccccagcaccgacagagagcagaccaaccuguacgugagagccagcggcagagugaccgugagcaccaagagaagccagcagaccgugauccccaacaucggcagcagacccugggugagaggccugagcagcagaaucagcaucuacuggaccaucgugaagcccggcgacauccugcugaucaacagcaccggcaaccugaucgcccccagaggcuacuucaagaucagaaccggcaagagcagcaucaugagaagcgacgcccccaucggcaccugcagcagcgagugcaucacccccaacggcagcauccccaacgacaagcccuuccagaacgugaacaagaucaccuacggcgccugccccagauacgugaagcagaacacccugaagcuggccaccggcaugagaaacgugcccgagaagcagaccagaggcaucuucggcgccaucgccggcuucaucgagaacggcugggagggcaugguggacggcugguacggcuucagacaccagaacagcgagggcaccggccaggccgccgaccugaagagcacccaggccgccaucgaccagaucaacggcaagcugaacagacugaucgagaagaccaacgagaaguuccaccagaucgagaaggaguucagcgagguggagggcagaauccaggaccuggagaaguacguggaggacaccaagaucgaccuguggagcuacaacgccgagcugcugguggcccuggagaaccagcacaccaucgaccugaccgacagcgagaugaacaagcuguucgagaagaccagaaagcagcugagagagaacgccgaggacaugggcaacggcugcuucaagaucuaccacaagugcgacaacgccugcaucggcagcaucagaaacggcaccuacgaccacgacguguacagagacgaggcccugaacaacagauuccagaucaagggcguggagcugaagagcggcuacaaggacuggauccuguggaucagcuucgccaucagcugcuuccugcugugcguggugcugcugggcuucaucaugugggccugccagaagggcaacaucagaugcaacaucugcaucuga

SEQ ID NO: 160964 - RNA, 1698 nt, Artificial Sequence
  derived and/or modified CDS sequence (opt4) from hemagglutinin__InfluenzaA__ABF47561
augaaggccaagcugcuggugcugcugugcaccuucaccgccaccuacgccgacaccaucugcaucggcuaccacgccaacaacagcaccgacaccguggacaccgugcuggagaagaacgugaccgugacccacagcgugaaccugcuggaggacagccacaacggcaagcugugccugcugaagggcaucgccccccugcagcugggcaacugcagcguggccggcuggauccugggcaaccccgagugcgagcugcugaucagcaaggagagcuggagcuacaucguggagacccccaaccccgagaacggcaccugcuaccccggcuacuucgccgacuacgaggagcugagagagcagcugagcagcgugagcagcuucgagagauucgagaucuuccccaagggcagcagcuggcccaaccacaccgugaccggcgugagcgccagcugcagccacaacggcaagagcagcuucuacagaaaccugcuguggcugaccggcaagaacggccuguaccccaagcugagcaugagcuacgugaacaacaaggagaaggaggugcuggugcuguggggcgugcaccacccccccaacaucggcgaccagagagcccuguaccacaccgagaacgccuacgugagcguggugagcagccacuacagcagaagauucacccccgagaucgccaagagacccaaggugagagaccaggagggcagaaucaacuacuacuggacccugcuggagcccggcgacaccaucaucuucgaggccaacggcaaccugaucgcccccugguacgccuucgcccugagcagaggcuucggcagcggcaucaucaccagcaacgcccccaugggcgagugcgacgccaagugccagaccccccagggcgccaucaacagcagccugcccuuccagaacgugcaccccgugaccaucggcgagugccccaaguacgugagaagcgccaagcugagaauggugaccggccugagaaacauccccagcauccagagcagaggccuguucggcgccaucgccggcuucaucgagggcggcuggaccggcaugguggacggcugguacggcuaccaccaccagaacgagcagggcagcggcuacgccgccgaccagaagagcacccagaacgccaucaacggcaucaccaacaaggugaacagcgugaucgagaagaugaacacccaguucaccgccgugggcaaggaguucaacaagcuggagagaagaauggagaaccugaacaagaagguggacgacggcuuccuggacaucuggaccuacaacgccgagcugcuggugcugcuggagaacgagagaacccuggacuuccacgacagcaacgugaagaaccuguacgagaaggugaagagccagcugaagaacaacgccaaggagaucggcaacggcugcuucgaguucuaccacaagugcaacaacgagugcauggagagcgugaagaacggcaccuacgacuaccccaaguacagcgaggagagcaagcugaacagagagaagaucgacggcgugaagcuggagagcaugggcguguaccagauccuggccaucuacagcaccguggccagcagccuggugcugcuggugagccugggcgccaucagcuucuggaugugcagcaacggcagccugcagugcagaaucugcaucuga

SEQ ID NO: 160965 - RNA, 1698 nt, Artificial Sequence
  derived and/or modified CDS sequence (opt4) from hemagglutinin__InfluenzaA__ABF47572
augaaggccaagcugcuggugcugcugugcaccuucaccgccaccuacgccgacaccaucugcaucggcuaccacgccaacaacagcaccgacaccguggacaccgugcuggagaagaacgugaccgugacccacagcgugaaccugcuggaggacagccacaacggcaagcugugccugcugaagggcaucgccccccugcagcugggcaacugcagcguggccggcuggauccugggcaaccccgagugcgagcugcugaucagcaaggagagcuggagcuacaucguggagacccccaaccccgagaacggcaccugcuaccccggcuacuucgccgacuacgaggagcugagagagcagcugagcagcgugagcagcuucgagagauucgagaucuuccccaagggcagcagcuggcccaaccacaccgugaccggcgugagcgccagcugcagccacaacggcaagagcagcuucuacagaaaccugcuguggcugaccggcaagaacggccuguaccccaaccugagcaugagcuacgugaacaacaaggacaaggaggugcuggugcuguggggcgugcaccacccccccaacaucggcgaccagagagcccuguaccacaccgagaacgccuacgugagcguggugagcagccacuacagcagaagauucacccccgagaucgccaagagacccaaggugagagaccaggagggcagaaucaacuacuacuggacccugcuggagcccggcgacaccaucaucuucgaggccaacggcaaccugaucgcccccugguacgccuucgcccugagcagaggcuucggcagcggcaucaucaccagcaacgcccccaugggcgagugcgacgccaagugccagaccccccagggcgccaucaacagcagccugcccuuccagaacgugcaccccgugaccaucggcgagugccccaaguacgugagaagcgccaagcugagaauggugaccggccugagaaacauccccagcauccagagcagaggccuguucggcgccaucgccggcuucaucgagggcggcuggaccggcaugguggacggcugguacggcuaccaccaccagaacgagcagggcagcggcuacgccgccgaccagaagagcacccagaacgccaucaacggcaucaccaacaaggugaacagcgugaucgagaagaugaacacccaguucaccgccgugggcaaggaguucaacaagcuggagagaagaauggagaaccugaacaagaagguggacgacggcuuccuggacaucuggaccuacaacgccgagcugcuggugcugcuggagaacgagagaacccuggacuuccacgacagcaacgugaagaaccuguacgagaaggugaagagccagcugaagaacaacgccaaggagaucggcaacggcugcuucgaguucuaccacaagugcaacaacgagugcauggagagcgugaagaacggcaccuacgacuaccccaaguacagcgaggagagcaagcugaacagagagaagaucgacggcgugaagcuggagagcaugggcguguaccagauccuggccaucuacagcaccguggccagcagccuggugcugcuggugagccugggcgccaucagcuucuggaugugcagcaacggcagccugcagugcagaaucugcaucuga

SEQ ID NO: 160966 - RNA, 1698 nt, Artificial Sequence; identical to SEQ ID NO: 160860
  derived and/or modified CDS sequence (opt4) from hemagglutinin__InfluenzaA__ABF47583

SEQ ID NO: 160967 - RNA, 1701 nt, Artificial Sequence
  derived and/or modified CDS sequence (opt4) from hemagglutinin__InfluenzaA__ABF47594
augaagaccaucaucgcccugagcuacauccugugccugguguucgcccagaagcugcccggcaacgacaacagcaccgccacccugugccugggccaccacgccgugcccaacggcacccuggugaagaccaucaccaacgaccagaucgaggugaccaacgccaccgagcuggugcagagcagcagcaccggcagaaucugcgacagcccccacagaauccuggacggcaagaacugcacccugaucgacgcccugcugggcgacccccacugcgacggcuuccagaacaaggagugggaccuguucguggagagaagcaaggccuacagcaacugcuaccccuacgacgugcccgacuacgccagccugagaagccugguggccagcagcggcacccuggaguucaacaacgagagcuucaacuggaccggcguggcccagaacggcaccagcuacgccugcaagagaagaagcgugaagagcuucuucagcagacugaacuggcugcacaagcuggaguacaaguaccccgcccagaacgugaccaugcccaacaacgacaaguucgacaagcuguacaucuggggcgugcaccaccccagcaccgacagcgaccagaccagccuguacgugcaggccagcggcagagugaccgugagcaccaagagaagccagcagaccgugauccccaacaucggcagcagacccugggugagaggcgugagcagcagaaucagcaucuacuggaccaucgugaagcccggcgacauccugcugaucaacagcaccggcaaccugaucgcccccagaggcuacuucaagaucagaagcggcaagagcagcaucaugagaagcgacgcccccaucggcaacugcaacagcgagugcaucacccccaacggcagcauccccaacgacaagcccuuccagaacgugaacagaaucaccuacggcgccugccccagauacgugaagcagaacacccugaagcuggccaccggcaugagaaacgugcccgagaagcagaccagaggcaucuucggcgccaucgccggcuucaucgagaacggcugggagggcaugguggacggcugguacggcuucagacaccagaacagcgagggcaccggccaggccgccgaccugaagagcacccaggccgccaucaaccagaucaacggcaagcugaacagacugaucgagaagaccaacgagaaguuccaccagaucgagaaggaguucagcgagguggagggcagaauccaggaccuggagaaguacguggaggacaccaagaucgaccuguggagcuacaacgccgagcugcugguggcccuggagaaccagcacaccaucgaccugaccgacagcgagaugaacaagcuguucgagagaaccagaaagcagcugagagagaacgccgaggacaugggcaacggcugcuucaagaucuaccacaagugcgacaacgccugcaucggcagcaucagaaacggcaccuacgaccacgacguguacagagacgaggcccugaacaacagauuccagaucaagggcguggagcugaagagcggcuacaaggacuggauccuguggaucagcuucgccaucagcugcuuccugcugugcguggugcugcugggcuucaucaugugggccugccagaagggcaacaucagaugcaacaucugcaucuga

SEQ ID NO: 160968 - RNA, 1701 nt, Artificial Sequence
  derived and/or modified CDS sequence (opt4) from hemagglutinin__InfluenzaA__ABF47605
augaaggccaagcugcuggugcugcugugcgccuucaccgccaccuacgccgacaccaucugcaucggcuaccacgccaacaacagcaccgacaccguggacaccgugcuggagaagaacgugaccgugacccacagcgugaaccugcuggaggacagccacaacggcaagcugugcagacugaagggcaccgccccccugcagcugggcaacugcagcguggccggcuggauccugggcaaccccgagugcgagagccuguucagcaaggagagcuggagcuacaucgccgagacccccaaccccgagaacggcaccugcuaccccggcuacuucgccgacuacgaggagcugagagagcagcugagcagcgugagcagcuucgagagauucgagaucuuccccaaggagagcagcuggcccaaccacaccgugaccaagggcgugaccgccagcugcagccacaacggcaagagcagcuucuacaagaaccugcuguggcugaccgagaagaacggccuguaccccaaccugagcaagagcuacgugaacaacaaggagaaggaggugcuggugcuguggggcgugcaccaccccagcaacaucggcgaccagagagccaucuaccacaccgagaacgccuacgugagcguggugagcagccacuacagcagaagauucacccccgagaucgccaagagacccaaggugagagaccaggagggcagaaucaacuacuacuggacccugcuggagcccggcgacaccaucaucuucgaggccagcggcaaccugaucgcccccugguacgccuucgcccugagcagaggcuucggcagcggcaucaucaccagcaacgccagcaugggcgagugcgacgccaagugccagaccccccagggcgccaucaacagcagccugcccuuccagaacgugcaccccgugaccaucggcgagugccccaaguacgugagaagcaccaagcugagaauggugaccggccugagaaacauccccagcauccagagcagaggccuguucggcgccaucgccggcuucaucgagggcggcuggaccggcaugaucgacggcugguacggcuaccaccaccagaacgagcagggcagcggcuacgccgccgacaagaagagcacccagaacgccaucgacggcaucaccaacaaggugaacagcgugaucgagaagaugaacacccaguucaccgccgugggcaaggaguucaacaagcuggagagaagaaucgagaaccugaacaagaagguggacgacggcuuccuggacaucuggaccuacaacgccgagcugcuggugcugcuggagaacgagagaacccuggacuuccacgacagcaacgugaagaaccuguacgagaaggugaagaaccagcugaagaacaacgccaaggagaucggcaacggcugcuucgaguucuaccacaagugcaacaacgagugcauggagagcgugaagaacggcaccuacgacuaccccaaguacagcgaggagagcaagcugaagagagagaagaucgacggcgugaagcuggagagcaugggcguguaccagauccuggccaucuacagcaccguggccagcagccuggugcugcuggugagccugggcgccaucagcuucuggaugugcagcaacggcagccugcagugcagaaucugcaucuga

SEQ ID NO: 160969 - RNA, 1701 nt, Artificial Sequence; identical to SEQ ID NO: 160953
  derived and/or modified CDS sequence (opt4) from hemagglutinin__InfluenzaA__ABF47616

SEQ ID NO: 160970 - RNA, 1701 nt, Artificial Sequence
  derived and/or modified CDS sequence (opt4) from hemagglutinin__InfluenzaA__ABF47627
augaaggccaagcugcuggugcugcugugcgccuucaccgccaccuacgccgacaccaucugcaucggcuaccacgccaacaacagcaccgacaccguggacaccgugcuggagaagaacgugaccgugacccacagcgugaaccugcuggaggacagccacaacggcaagcugugcagacugaagggcaccgccccccugcagcugggcaacugcagcguggccggcuggauccugggcaaccccgagugcgagagccuguucagcaaggagagcuggagcuacaucgccgagacccccaaccccgagaacggcaccugcuaccccggcuacuucgccgacuacgaggagcugagagagcagcugagcagcgugagcagcuucgagagauucgagaucuuccccaaggagagcagcuggcccaaccacaccgugaccaagggcgugaccgccagcugcagccacaacggcaagagcagcuucuacaagaaccugcuguggcugaccgagaagaacggccuguaccccaaccugagcaagagcuacgugaacaacaaggagaaggaggugcuggugcuguggggcgugcaccaccccagcaacaucggcgaccagagagccaucuaccacaccgagaacgccuacgugagcguggugagcagccacuacagcagaagauucacccccgagaucgccaagagacccaaggugagagaccaggagggcagaaucaacuacuacuggacccugcuggagcccggcgacaccaucaucuucgaggccaacggcaaccugaucgcccccugguacgccuucgcccugagcagaggcuucggcagcggcaucaucaccagcaacgccagcaugggcgacugcgacgccaagugccagaccccccagggcgccaucaacagcagccugcccuuccagaacgugcaccccgugaccaucggcgagugccccaaguacgugagaagcaccaagcugagaauggugaccggccugagaaacauccccagcauccagagcagaggccuguucggcgccaucgccggcuucaucgagggcggcuggaccggcaugaucgacggcugguacggcuaccaccaccagaacgagcagggcagcggcuacgccgccgacaagaagagcacccagaacgccaucgacggcaucaccaacaaggugaacagcgugaucgagaagaugaacacccaguucaccgccgugggcaaggaguucaacaagcuggagagaagaauggagaaccugaacaagaagguggacgacggcuuccuggacaucuggaccuacaacgccgagcugcuggugcugcuggagaacgagagaacccuggacuuccacgacagcaacgugaagaaccuguacgagaaggugaagaaccagcugaagaacaacgccaaggagaucggcaacggcugcuucgaguucuaccacaagugcaacaacgagugcauggagagcgugaagaacggcaccuacgacuaccccaaguacagcgaggagagcaagcugaagagagagaagaucgacggcgugaagcuggagagcaugggcguguaccagauccuggccaucuacagcaccguggccagcagccuggugcugcuggugagccugggcgccaucagcuucuggaugugcagcaacggcagccugcagugcagaaucugcaucuga

SEQ ID NO: 160971 - RNA, 1701 nt, Artificial Sequence
  derived and/or modified CDS sequence (opt4) from hemagglutinin__InfluenzaA__ABF47638
augaaggccaagcugcuggugcugcugugcgccuucaccgccaccuacgccgacaccaucugcaucggcuaccacgccaacaacagcaccgacaccguggacaccgugcuggagaagaacgugaccgugacccacagcgugaaccugcuggaggacagccacaacggcaagcugugcagacugaagggcaccgccccccugcagcugggcaacugcagcguggccggcuggauccugggcaaccccgagugcgagagccuguucagcaaggagagcuggagcuacaucgccgagacccccaaccccgagaacggcaccugcuaccccggcuacuucgccgacuacgaggagcugagagagcagcugagcagcgugagcagcuucgagagauucgagaucuuccccaaggagagcagcuggcccaaccacaccgugaccaagggcgugaccgccagcugcagccacaacggcaagagcagcuucuacaagaaccugcuguggcugaccgagaagaacggccuguaccccaaccugagcaagagcuacgugaacaacaaggagaaggaggugcuggugcuguggggcgugcaccaccccagcaacaucggcgaccagagagccaucuaccacaccgagaacgccuacgugagcguggugagcagccacuacagcagaagauucacccccgagaucaccaagagacccaaggugagagaccaggagggcagaaucaacuacuacuggacccugcuggagcccggcgacaccaucaucuucgaggccaacggcaaccugaucgcccccugguacgccuucgcccugagcagaggcuucggcagcggcaucaucaccagcaacgccagcaugggcgagugcgacgccaagugccagaccccccagggcgccaucaacagcagccugcccuuccagaacgugcaccccgugaccaucggcgagugccccaaguacgugagaagcaccaagcugagaauggugaccggccugagaaacauccccagcauccagagcagaggccuguucggcgccaucgccggcuucaucgagggcggcuggaccggcaugaucgacggcugguacggcuaccaccaccagaacgagcagggcagcggcuacgccgccgaccagaagagcacccagaacgccaucgacggcaucaccaacaaggugaacagcgugaucgagaagaugaacacccaguucaccgccgugggcaaggaguucaacaagcuggagagaagaauggagaaccugaacaagaagguggacgacggcuuccuggacaucuggaccuacaacgccgagcugcuggugcugcuggagaacgagagaacccuggacuuccacgacagcaacgugaagaaccuguacgagaaggugaagacccagcugaagaacaacgccaaggagaucggcaacggcugcuucgaguucuaccacaagugcaacaacgagugcauggagagcgugaagaacggcaccuacgacuaccccaaguacagcgaggagagcaagcugaacagagagaagaucgacggcgugaagcuggagagcaugggcguguaccagauccuggccaucuacagcaccguggccagcagccuggugcugcuggugagccugggcgccaucagcuucuggaugugcagcaacggcagccugcagugcagaaucugcaucuga

SEQ ID NO: 160972 - RNA, 1701 nt, Artificial Sequence; identical to SEQ ID NO: 160971
  derived and/or modified CDS sequence (opt4) from hemagglutinin__InfluenzaA__ABF47649

SEQ ID NO: 160973 - RNA, 1701 nt, Artificial Sequence
  derived and/or modified CDS sequence (opt4) from hemagglutinin__InfluenzaA__ABF47660
augaaggccaagcugcuggugcugcugugcgccuucaccgccaccuacgccgacaccaucugcaucggcuaccacgccaacaacagcaccgacaccguggacaccgugcuggagaagaacgugaccgugacccacagcgugaaccugcuggaggacagccacaacggcaagcugugcagacugaagggcaccgccccccugcagcugggcaacugcagcguggccggcuggauccugggcaaccccgagugcgagagccuguucagcaaggagagcuggagcuacaucgccgagacccccaaccccgagaacggcaccugcuaccccggcuacuucgccgacuacgaggagcugagagagcagcugagcagcgugagcagcuucgagagauucgagaucuuccccaaggagagcagcuggcccaaccacaccgugaccaagggcgugaccgccagcugcagccacaacggcaagagcagcuucuacaagaaccugcuguggcugaccgagaagaacggccuguaccccaaccugagcaagagcuacgugaacaacaaggagaaggaggugcuggugcuguggggcauccaccaccccagcaacaucggcgaccagagagccaucuaccacaccgagaacgccuacgugagcguggugagcagccacuacagcagaagauucacccccgagaucgccaagagacccaaggugagagaccaggagggcagaaucaacuacuacuggacccugcuggagcccggcgacaccaucaucuucgaggccaacggcaaccugaucgcccccugguacgccuucgcccugagcagaggcuucggcagcggcaucaucaccagcaacgccagcaugggcgacugcgacgccaagugccagaccccccagggcgccaucaacagcagccugcccuuccagaacgugcaccccgugaccaucggcgagugccccaaguacgugagaagcaccaagcugagaauggugaccggccugagaaacauccccagcauccagagcagaggccuguucggcgccaucgccggcuucaucgagggcggcuggaccggcaugaucgacggcugguacggcuaccaccaccagaacgagcagggcagcggcuacgccgccgacaagaagagcacccagaacgccaucgacggcaucaccaacaaggugaacagcgugaucgagaagaugaacacccaguucaccgccgugggcaaggaguucaacaagcuggagagaagaauggagaaccugaacaagaagguggacgacggcuuccuggacaucuggaccuacaacgccgagcugcuggugcugcuggagaacgagagaacccuggacuuccacgacagcaacgugaagaaccuguacgagaaggugaagacccagcugaagaacaacgccaaggagaucggcaacggcugcuucgaguucuaccacaagugcaacaacgagugcauggagagcgugaagaacggcaccuacgacuaccccaaguacagcgaggagagcaagcugaagagagagaagaucgacggcgugaagcuggagagcaugggcguguaccagauccuggccaucuacagcaccguggccagcagccuggugcugcuggugagccugggcgccaucagcuucuggaugugcagcaacggcagccugcagugcagaaucugcaucuga

SEQ ID NO: 160974 - RNA, 1698 nt, Artificial Sequence
  derived and/or modified CDS sequence (opt4) from hemagglutinin__InfluenzaA__ABF47671
augaaggccaagcugcuggugcugcugugcaccuucaccgccaccuacgccgacaccaucugcaucggcuaccacgccaacaacagcaccgacaccguggacaccgugcuggagaagaacgugaccgugacccacagcgugaaccugcuggaggacagccacaacggcaagcugugccugcugaagggcaucgccccccugcagcugggcaacugcagcguggccggcuggauccugggcaaccccgagugcgagcugcugaucagcaaggagagcuggagcuacaucguggagacccccaaccccgagaacggcaccugcuaccccggcuacuucgccgacuacgaggagcugagagagcagcugagcagcgugagcagcuucgagagauucgagaucuuccccaagggcagcagcuggcccaaccacaccgugaccggcgugagcgccagcugcagccacaacggcaagagcagcuucuacagaaaccugcuguggcugaccggcaagaacggccuguaccccaaccugagcaugagcuacgugaacaacaaggagaaggaggugcuggugcuguggggcgugcaccacccccccaacaucggcgaccagagagcccuguaccacaccgagaacgccuucgugagcguggugagcagccacuacagcagaagauucacccccgagaucgccaagagacccaaggugagagaccaggagggcagaaucaacuacuacuggacccugcuggagcccggcgacaccaucaucuucgaggccaacggcaaccugaucgcccccugguacgccuucgcccugagcagaggcuucggcagcggcaucaucaccagcaacgcccccauggacgagugcgacgccaagugccagaccccccagggcgccaucaacagcagccugcccuuccagaacgugcaccccgugaccaucggcgagugccccaaguacgugagaagcgccaagcugagaauggugaccggccugagaaacauccccagcauccagagcagaggccuguucggcgccaucgccggcuucaucgagggcggcuggaccggcaugguggacggcugguacggcuaccaccaccagaacgagcagggcagcggcuacgccgccgaccagaagagcacccagaacgccaucaacggcaucaccaacaaggugaacagcgugaucgagaagaugaacacccaguucaccgccgugggcaaggaguucaacaagcuggagagaagaauggagaaccugaacaagaagguggacgacggcuuccuggacaucuggaccuacaacgccgagcugcuggugcugcuggagaacgagagaacccuggacuuccacgacagcaacgugaagaaccuguacgagaaggugaagagccagcugaagaacaacgccaaggagaucggcaacggcugcuucgaguucuaccacaagugcaacaacgagugcauggagagcgugaagaacggcaccuacgacuaccccaaguacagcgaggagagcaagcugaacagagagaagaucgacggcgugaagcuggagagcaugggcguguaccagauccuggccaucuacagcaccguggccagcagccuggugcugcuggugagccugggcgccaucagcuucuggaugugcagcaacggcagccugcagugcagaaucugcaucuga

SEQ ID NO: 160975 - RNA, 1701 nt, Artificial Sequence
  derived and/or modified CDS sequence (opt4) from hemagglutinin__InfluenzaA__ABF47693
augaaggccaagcugcuggugcugcugugcgcccugagcgccaccgacgccgacaccaucugcaucggcuaccacgccaacaacagcaccgacaccguggacaccgugcuggagaagaacgugaccgugacccacagcgugaaccugcuggaggacagccacaacggcaagcugugcagacugaagggcaucgccccccugcagcugggcaagugcaacaucgccggcuggauccugggcaaccccgagugcgagagccuguucagcaagaagagcuggagcuacaucgccgagacccccaacagcgagaacggcaccugcuaccccggcuacuucgccgacuacgaggagcugagagagcagcugagcagcgugagcagcuucgagagauucgagaucuuccccaaggagagaagcuggcccaagcacaacgugaccagaggcgugaccgccagcugcagccacaagggcaagagcagcuucuacagaaaccugcuguggcugaccgagaagaacggcagcuaccccaaccugagcaagagcuacgugaacaacaaggagaaggaggugcuggugcuguggggcgugcaccaccccagcaacaucgaggaccagaagaccaucuacagaaaggagaacgccuacgugagcguggugagcagcaacuacaacagaagauucacccccgagaucgccgagagacccaaggugagaggccaggccggcagaaucaacuacuacuggacccugcuggagcccggcgacaccaucaucuucgaggccaacggcaaccugaucgcccccuggcacgccuucgcccugaacagaggcuucggcagcggcaucaucaccagcaacgccagcauggacgagugcgacaccaagugccagaccccccagggcgccaucaacagcagccugcccuuccagaacauccaccccgugaccaucggcgagugccccaaguacgugagaagcaccaagcugagaauggugaccggccugagaaacauccccagcauccagagcagaggccuguucggcgccaucgccggcuucaucgagggcggcuggaccggcaugaucgacggcugguacggcuaccaccaccagaacgagcagggcagcggcuacgccgccgaccagaagagcacccagaacgccaucaacggcaucaccaacaaggugaacagcgugaucgagaagaugaacacccaguucaccgccgugggcaaggaguucaacaagcuggagaagagaauggagaaccugaacaagaagguggacgacggcuuccuggacaucuggaccuacaacgccgagcugcuggugcugcuggagaacgagagaacccuggacuuccacgacagcaacgugaagaaccuguacgagaaggugaagagccagcugaagaacaacgccaaggagaucggcaacggcugcuucgaguucuaccacaagugcaacaacgagugcauggagagcgugaagaacggcaccuacgacuaccccaaguacagcgaggagagcaagcugaacagagagaagaucgacggcgugaagcuggagagcaugggcguguaccagauccuggccaucuacagcaccguggccagcagccuggugcugcuggugagccugggcgccaucagcuucuggaugugcagcaacggcagccugcagugcagaaucugcaucuga

SEQ ID NO: 160976 - RNA, 1701 nt, Artificial Sequence; identical to SEQ ID NO: 160975
  derived and/or modified CDS sequence (opt4) from hemagglutinin__InfluenzaA__ABF47704

SEQ ID NO: 160977 - RNA, 1701 nt, Artificial Sequence
  derived and/or modified CDS sequence (opt4) from hemagglutinin__InfluenzaA__ABF47715
augaaggccaagcugcuggugcugcugugcgcccugagcgccaccgacgccgacaccaucugcaucggcuaccacgccaacaacagcaccgacaccguggacaccgugcuggagaagaacgugaccgugacccacagcgugaaccugcuggaggacagccacaacggcaagcugugcagacugaagggcaucgccccccugcagcugggcaagugcagcaucgccggcuggauccugggcaaccccgagugcgagagccuguucagcaagaagagcuggagcuacaucgccgagacccccaacagcgagaacggcaccugcuaccccggcuacuucgccgacuacgaggagcugagagagcagcugagcagcgugagcagcuucgagagauucgagaucuuccccaaggagagaagcuggcccaagcacaacgugaccagaggcgugaccgccagcugcagccacaagggcaagagcagcuucuacagaaaccugcuguggcugaccgagaagaacggcagcuaccccaaccugagcaagagcuacgugaacaacaaggagaaggaggugcuggugcuguggggcgugcaccaccccagcaacaucgaggaccagaagaccaucuacagaaaggagaacgccuacgugagcguggugagcagcaacuacaacagaagauucacccccgagaucgccgagagacccaaggugagaggccaggccggcagaaucaacuacuacuggacccugcuggagcccggcgacaccaucaucuucgaggccaacggcaaccugaucgcccccuggcacgccuucgcccugaacagaggcuucggcagcggcaucaucaccagcaacgccagcauggacgagugcgacaccaagugccagaccccccagggcgccaucaacagcagccugcccuuccagaacauccaccccgugaccaucggcgagugccccaaguacgugagaagcaccaagcugagaauggugaccggccugagaaacauccccagcauccagagcagaggccuguucggcgccaucgccggcuucaucgagggcggcuggaccggcaugaucgacggcugguacggcuaccaccaccagaacgagcagggcagcggcuacgccgccgaccagaagagcacccagaacgccaucaacggcaucaccaacaaggugaacagcgugaucgagaagaugaacacccaguucaccgccgugggcaaggaguucaacaagcuggagaagagaauggagaaccugaacaagaagguggacgacggcuuccuggacaucuggaccuacaacgccgagcugcuggugcugcuggagaacgagagaacccuggacuuccacgacagcaacgugaagaaccuguacgagaaggugaagagccagcugaagaacaacgccaaggagaucggcaacggcugcuucgaguucuaccacaagugcaacaacgagugcauggagagcgugaagaacggcaccuacgacuaccccaaguacagcgaggagagcaagcugaacagagagaagaucgacggcgugaagcuggagagcaugggcguguaccagauccuggccaucuacagcaccguggccagcagccuggugcugcuggugagccugggcgccaucagcuucuggaugugcagcaacggcagccugcagugcagaaucugcaucuga

SEQ ID NO: 160978 - RNA, 1701 nt, Artificial Sequence; identical to SEQ ID NO: 160975
  derived and/or modified CDS sequence (opt4) from hemagglutinin__InfluenzaA__ABF47726

SEQ ID NO: 160979 - RNA, 1701 nt, Artificial Sequence; identical to SEQ ID NO: 160975
  derived and/or modified CDS sequence (opt4) from hemagglutinin__InfluenzaA__ABF47737

SEQ ID NO: 160980 - RNA, 1701 nt, Artificial Sequence
  derived and/or modified CDS sequence (opt4) from hemagglutinin__InfluenzaA__ABF47748
augaaggccaagcugcuggugcugcugugcgcccugagcgccaccgacgccgacaccaucugcaucggcuaccacgccaacaacagcaccgacaccguggacaccgugcuggagaagaacgugaccgugacccacagcgugaaccugcuggaggacagccacaacggcaagcugugcagacugaagggcaucgccccccugcagcugggcaagugcagcaucgccggcuggauccugggcaaccccgagugcgagagccuguucagcaagaagagcuggagcuacaucgccgagacccccaacagcgagaacggcaccugcuaccccggcuacuucgccgacuacgaggagcugagagagcagcugagcagcgugagcagcuucgagagauucgagaucuuccccaaggagagcagcuggcccaagcacaacgugaccagaggcgugaccgccagcugcagccacaagggcaagagcagcuucuacagaaaccugcuguggcugaccgagaagaacggcagcuaccccaaccugagcaagagcuacgugaacaacaaggagaaggaggugcuggugcuguggggcgugcaccaccccagcaacaucgaggaccagaagaccaucuacagaaaggagaacgccuacgugagcguggugagcagccacuacaacagaagauucacccccgagaucgccaagagacccaaggugagagaccaggagggcagaaucaacuacuacuggacccugcuggagcccggcgacaccaucaucuucgaggccaacggcaaccugaucgcccccugguacgccuucgcccugagcagaggcuucggcagcggcaucaucaccagcaacgccagcauggacgagugcgacgccaagugccagaccccccagggcgccaucaacagcagccugcccuuccagaacgugcaccccgugaccaucggcgagugccccaaguacgugagaagcaccaagcugagaauggugaccggccugagaaacauccccagcauccagagcagaggccuguucggcgccaucgccggcuucaucgagggcggcuggaccggcaugaucgacggcugguacggcuaccaccaccagaacgagcagggcagcggcuacgccgccgaccagaagagcacccagaacgccaucaacggcaucaccaacaaggugaacagcgugaucgagaagaugaacacccaguucaccgccgugggcaaggaguucaacaagcuggagaagagaauggagaaccugaacaagaagguggacgacggcuuccuggacaucuggaccuacaacgccgagcugcuggugcugcuggagaacgagagaacccuggacuuccacgacagcaacgugaagaaccuguacgagaaggugaagagccagcugaagaacaacgccaaggagaucggcaacggcugcuucgaguucuaccacaagugcaacaacgagugcauggagagcgugaagaacggcaccuacgacuaccccaaguacagcgaggagagcaagcugaacagagagaagaucgacggcgugaagcuggagagcaugggcguguaccagauccuggccaucuacagcaccguggccagcagccuggugcugcuggugagccugggcgccaucagcuucuggaugugcagcaacggcagccugcagugcagaaucugcaucuga

SEQ ID NO: 160981 - RNA, 1701 nt, Artificial Sequence
  derived and/or modified CDS sequence (opt4) from hemagglutinin__InfluenzaA__ABF47770
augaaggccaagcugcuggugcugcugugcgcccugagcgccaccgacgccgacaccaucugcaucggcuaccacgccaacaacagcaccgacaccguggacaccgugcuggagaagaacgugaccgugacccacagcgugaaccugcuggaggacaaccacaacggcaagcugugcaagcugaagggcaucgccccccugcagcugggcaagugcagcaucgccggcuggauccugggcaaccccgagugcgagagccuguucagcaagaagagcuggagcuacaucgccgagacccccaacagcgagaacggcaccugcuaccccggcuacuucgccgacuacgaggagcugagagagcagcugagcagcgugagcagcuucgagagauucgagaucuuccccaaggagagcagcuggcccaagcacaacgugaccaagggcgugaccgccagcugcagccacaagggcaagagcagcuucuacagaaaccugcuguggcugaccgagaagaacggcagcuaccccaaccugagcaagagcuacgugaacaacaaggagaaggaggugcuggugcuguggggcgugcaccaccccagcaacaucgaggaccagaagaccaucuacagaaaggagaacgccuacgugagcguggugagcagccacuacaacagaagauucacccccgagaucgccaagagacccaaggugagaaaccaggagggcagaaucaacuacuacuggacccugcuggagcccggcgacaccaucaucuucgaggccaacggcaaccugaucgcccccugguacgccuucgcccugagcagaggcuucggcagcggcaucaucaccagcaacgccagcauggacgagugcgacgccaagugccagaccccccagggcgccaucaacagcagccugcccuuccagaacgugcaccccgugaccaucggcgagugccccaaguacgugagaagcaccaagcugagaauggugaccggccugagaaacauccccagcauccagagcagaggccuguucggcgccaucgccggcuucaucgagggcggcuggaccggcaugaucgacggcugguacggcuaccaccaccagaacgagcagggcagcggcuacgccgccgaccagaagagcacccagaacgccaucaacggcaucaccaacaaggugaacagcaucaucgagaagaugaacacccaguucaccgccgugggcaaggaguucaacaagcuggagaagagaauggagaaccugaacaagaagguggacgacggcuuccuggacaucuggaccuacaacgccgagcugcuggugcugcuggagaacgagagaacccuggacuuccacgacagcaacgugaagaaccuguacgagaaggugaagagccagcugaagaacaacgccaaggagaucggcaacggcugcuucgaguucuaccacaagugcaacaacgagugcauggagagcgugaagaacggcaccuacgacuaccccaaguacagcgaggagagcaagcugaacagagagaagaucgacggcgugaagcuggagagcaugggcguguaccagauccuggccaucuacagcaccguggccagcagccuggugcugcuggugagccugggcgccaucagcuucuggaugugcagcaacggcagccugcagugcagaaucugcaucuga

SEQ ID NO: 160982 - RNA, 1701 nt, Artificial Sequence; identical to SEQ ID NO: 160981
  derived and/or modified CDS sequence (opt4) from hemagglutinin__InfluenzaA__ABF47781

SEQ ID NO: 160983 - RNA, 1701 nt, Artificial Sequence; identical to SEQ ID NO: 160981
  derived and/or modified CDS sequence (opt4) from hemagglutinin__InfluenzaA__ABF47792

SEQ ID NO: 160984 - RNA, 1701 nt, Artificial Sequence; identical to SEQ ID NO: 160981
  derived and/or modified CDS sequence (opt4) from hemagglutinin__InfluenzaA__ABF47803

SEQ ID NO: 160985 - RNA, 1701 nt, Artificial Sequence; identical to SEQ ID NO: 160981
  derived and/or modified CDS sequence (opt4) from hemagglutinin__InfluenzaA__ABF47814

SEQ ID NO: 160986 - RNA, 1701 nt, Artificial Sequence; identical to SEQ ID NO: 160981
  derived and/or modified CDS sequence (opt4) from hemagglutinin__InfluenzaA__ABF47825

SEQ ID NO: 160987 - RNA, 1701 nt, Artificial Sequence; identical to SEQ ID NO: 160981
  derived and/or modified CDS sequence (opt4) from hemagglutinin__InfluenzaA__ABF47836

SEQ ID NO: 160988 - RNA, 1701 nt, Artificial Sequence; identical to SEQ ID NO: 160981
  derived and/or modified CDS sequence (opt4) from hemagglutinin__InfluenzaA__ABF47847

SEQ ID NO: 160989 - RNA, 1701 nt, Artificial Sequence
  derived and/or modified CDS sequence (opt4) from hemagglutinin__InfluenzaA__ABF47858
augaagaccaucaucgcccugagcuacauccugugccugguguucgcccagaagcugcccggcaacgacaacggcaccgccacccugugccugggccaccacgccgugcccaacggcacccuggugaagaccaucaccaacgaccagaucgaggugaccaacgccaccgagcuggugcagagcagcagcaccggcagaaucugcgacagcccccacagaauccuggacggcaagaacugcacccugaucgacgcccugcugggcgacccccacugcgacggcuuccagaacaaggagugggaccuguucguggagagaagcaaggccuacagcaacugcuaccccuacgacgugcccgacuacgccagccugagaagccugguggccagcagcggcacccuggaguucaucaacgaggacuucaacuggaccggcguggcccaggacggcaagagcuacgccugcaagagaggcagcgugaacagcuucuucagcagacugaacuggcugcacaagcuggaguacaaguaccccgcccugaacgugaccaugcccaacaacggcaaguucgacaagcuguacaucuggggcgugcaccaccccagcaccgacagcgaccagaccagccuguacgugagagccagcggcagagugaccgugagcaccaagagaagccagcagaccgugauccccaacaucggcuucagacccugggugagaggccugagcagcagaaucagcaucuacuggaccaucgugaagcccggcgacauccugcugaucaacagcaccggcaaccugaucgcccccagaggcuacuucaagaucagaaacggcaagagcagcaucaugagaagcgacgcccccaucggcaacugcagcagcgagugcaucacccccaacggcagcauccccaacgacaagcccuuccagaacgugaacagaaucaccuacggcgccugccccagauacgugaagcagaacacccugaagcuggccaccggcaugagaaacgugcccgagaagcagaccagaggcaucuucggcgccaucgccggcuucaucgagaacggcugggagggcaugguggacggcugguacggcuucagacaccagaacagcgagggcaccggccaggccgccgaccugaagagcacccaggccgccaucgaccagaucaacggcaagcugaacagacugaucgagaagaccaacgagaaguuccaccagaucgagaaggaguucagcgagguggagggcagaauccaggaccuggagaaguacguggaggacaccaagaucgaccuguggagcuacaacgccggccugcugguggcccuggagaaccagcacaccaucgaccugaccgacagcgagaugaacaagcuguucgagagaaccagaaagcagcugagagagaacgccgaggacaugggcaacggcugcuucaagaucuaccacaagugcgacaacgccugcaucggcagcaucagaaacggcaccuacgaccacgacguguacagagacgaggcccugaacaacagauuccagaucaagggcguggagcugaagagcggcuacaaggacuggauccuguggaucagcuucgccaucagcugcuuccugcugugcguggugcugcugggcuucaucaugugggccugccagaagggcaacaucagaugcaacaucugcaucuga

SEQ ID NO: 160990 - RNA, 1698 nt, Artificial Sequence; identical to SEQ ID NO: 160802
  derived and/or modified CDS sequence (opt4) from hemagglutinin__InfluenzaA__ABF47869

SEQ ID NO: 160991 - RNA, 1698 nt, Artificial Sequence; identical to SEQ ID NO: 160802
  derived and/or modified CDS sequence (opt4) from hemagglutinin__InfluenzaA__ABF47880

SEQ ID NO: 160992 - RNA, 1698 nt, Artificial Sequence
  derived and/or modified CDS sequence (opt4) from hemagglutinin__InfluenzaA__ABF47891
augaaggugaagcugcuggugcugcugugcaccuucaccgccaccuacgccgacaccaucugcaucggcuaccacgccaacaacagcaccgacaccguggacaccgugcuggagaagaacgugaccgugacccacagcgugaaccugcuggaggacagccacaacggcaagcugugccugcugaagggcaucgccccccugcagcugggcaacugcagcguggccggcuggauccugggcaaccccgagugcgagcugcugaucagcaaggagagcuggagcuacaucguggagacccccaaccccgagaacggcaccugcuaccccggcuacuucgccgacuacgaggagcugagagagcagcugagcagcgugagcagcuucgagagauucgagaucuuccccaaggagagcagcuggcccaaccacaccgugaccggcgugagcgccagcugcagccacaacggcaagagcagcuucuacagaaaccugcuguggcugaccagaaagaacggccuguaccccaaccugagcaagagcuacgccaacaacaaggagaaggaggugcuggugcuguggggcgugcaccacccccccaacaucggcgaccagagagcccuguaccacaccgagaacgccuacgugagcguggugagcagccacuacagcagaagauucacccccgagaucgccaagagacccaaggugagagaccaggagggcagaaucaacuacuacuggacccugcuggagcccggcgacaccaucaucuucgaggccaacggcaaccugaucgcccccagauacgccuucgcccugagcagaggcuucggcagcggcaucaucaccagcaacgcccccauggacgagugcgacgccaagugccagaccccccagggcgccaucaacagcagccugcccuuccagaacgugcaccccgugaccaucggcgagugccccaaguacgugagaagcgccaagcugagaauggugaccggccugagaaacauccccagcauccagagcagaggccuguucggcgccaucgccggcuucaucgagggcggcuggaccggcaugguggacggcugguacggcuaccaccaccagaacgagcagggcagcggcuacgccgccgaccagaagagcacccagaacgccaucaacggcaucaccaacaaggugaacagcgugaucgagaagaugaacacccaguucaccgccgugggcaaggaguucaacaagcuggagagaagaauggagaaccugaacaagaagguggacgacggcuuccuggacaucuggaccuacaacgccgagcugcuggugcugcuggagaacgagagaacccuggacuuccacgacagcaacgugaagaaccuguacgagaaggugaagagccagcugaagaacaacgccaaggagaucggcaacggcugcuucgaguucuaccacaagugcaacaacgagugcauggagagcgugaagaacggcaccuacgacuaccccaaguacagcgaggagagcaagcugaacagagagaagaucgacggcgugaagcuggagagcaugggcguguaccagauccuggccaucuacagcaccguggccagcagccuggugcugcuggugagccugggcgccaucagcuucuggaugugcagcaacggcagccugcagugcagaaucugcaucuga

SEQ ID NO: 160993 - RNA, 1701 nt, Artificial Sequence
  derived and/or modified CDS sequence (opt4) from hemagglutinin__InfluenzaA__ABF47902
augaagaccaucaucgcccugagcuacauccugugccugguguucgcccagaagcugcccggcaacgacaacagcaccgccacccugugccugggccaccacgccgugcccaacggcacccuggugaagaccaucaccaacgaccagaucgaggugaccaacgccaccgagcuggugcagagcagcagcaccggcggcaucugcgacagcccccaccagauccuggacggcgagaacugcacccugaucgacgcccugcugggcgacccccacugcgacggcuuccagaacaaggagugggaccuguucguggagagaagcaaggccuacagcaacugcuaccccuacgacgugcccgacuacgccagccugagaagccugguggccagcagcggcacccuggaguucaacaacgagagcuucaacuggaccggcguggcccagaacggcaccagcagcgccugcaagagaagaagcaacaagagcuucuucagcagacugaacuggcugcaccagcugaaguacaaguaccccgcccugaacgugaccaugcccaacaacgagaaguucgacaagcuguacaucuggggcgugcaccaccccagcaccgacagcgaccagaucagccuguacgcccaggcccccggcagagugaccgugagcaccaagagaagccagcagaccgugauccccaacaucggcagcagacccugggugagaggcgugagcagcagaaucagcaucuacuggaccaucgugaagagcggcgacauccugcugaucaacugcaccggcaaccugaucgcccccagaggcuacuucaagaucagaagcggcaagagcagcaucaugagaagcgacgccagcaucggcaagugcaacagcgagugcaucacccccaacggcagcauccccaacgacaagcccuuccagaacgugaacagaaucaccuacggcgccugccccagauacgugaagcagaacacccugaagcuggccaccggcaugagaaacgugcccgagaagcagaccagaggcaucuucggcgccaucgccggcuucaucgagaacggcugggagggcaugguggacggcugguacggcuucagacaccagaacagcgagggcaccggccaggccgccgaccugaagagcacccaggccgccaucaaccagaucaacggcaagcugaacagacugaucgagaagaccaacgagaaguuccaccagaucgagaaggaguucagcgagguggagggcagaauccaggaccuggagaaguacguggaggacaccaagaucgaccuguggagcuacaacgccgagcugcugguggcccuggagaaccagcacaccaucgaccugaccgacagcgagaugaacaagcuguucgagagaaccaagaagcagcugagagagaacgccgaggacaugggcaacggcugcuucaagaucuaccacaagugcgacaacgccugcaucggcagcaucagaaacggcaccuacgaccacgacguguacagagacgaggcccugaacaacagauuccagaucaagggcguggagcugaagagcggcuacaaggacuggauccuguggaucagcuucgccaucagcugcuuccugcugugcguggugcugcugggcuucaucaugugggccugccagaagggcaacaucagaugcaacaucugcaucuga

SEQ ID NO: 160994 - RNA, 1698 nt, Artificial Sequence
  derived and/or modified CDS sequence (opt4) from hemagglutinin__InfluenzaA__ABF47955
augaaggccaagcugcuggugcugcuguacgccuucguggccaccgacgccgacaccaucugcaucggcuaccacgccaacaacagcaccgacaccguggacaccaucuucgagaagaacguggccgugacccacagcgugaaccugcuggaggacagacacaacggcaagcugugcaagcugaagggcaucgccccccugcagcugggcaagugcaacaucaccggcuggcugcugggcaaccccgagugcgacagccugcugcccgccagaagcuggagcuacaucguggagacccccaacagcgagaacggcgccugcuaccccggcgacuucaucgacuacgaggagcugagagagcagcugagcagcgugagcagccuggagagauucgagaucuuccccaaggagagcagcuggcccaaccacaccuucaacggcgugaccgugagcugcagccacagaggcaagagcagcuucuacagaaaccugcuguggcugaccaagaagggcgacagcuaccccaagcugaccaacagcuacgugaacaacaagggcaaggaggugcuggugcuguggggcgugcaccaccccagcagcagcgacgagcagcagagccuguacagcaacggcaacgccuacgugagcguggccagcagcaacuacaacagaagauucacccccgagaucgccgccagacccaaggugaaggaccagcacggcagaaugaacuacuacuggacccugcuggagcccggcgacaccaucaucuucgaggccaccggcaaccugaucgcccccugguacgccuucgcccugagcagaggcuucgagagcggcaucaucaccagcaacgccagcaugcacgagugcaacaccaagugccagaccccccagggcagcaucaacagcaaccugcccuuccagaacauccaccccgugaccaucggcgagugccccaaguacgugagaagcaccaagcugagaauggugaccggccugagaaacauccccagcauccaguacagaggccuguucggcgccaucgccggcuucaucgagggcggcuggaccggcaugaucgacggcugguacggcuaccaccaccagaacgagcagggcagcggcuacgccgccgaccagaagagcacccagaacgccaucaacagaaucaccaacaaggugaacagcgugaucgagaagaugaacacccaguucaccgccgugggcaaggaguucaacaaccuggagaagagaauggagaaccugaacaagaagguggacgacggcuuccuggacaucuggaccuacaacgccgagcugcuggugcugcuggagaacgagagaacccuggacuuccacgaccugaacgugaagaaccuguacgagaaggugaagagccagcugaagaacaacgccaaggagaucggcaacggcugcuucgaguucuaccacaagugcgacaacgagugcauggagagcgugagaaacggcaccuacgacuaccccaaguacagcgaggagagcaagcugaacagagagaagaucgacggcgugaagcuggagagcaugggcguguaccagauccuggccaucuacagcaccguggccagcagccuggugcugcuggugagccugggcgccaucagcuucuggaugugcagcaacggcagccugcagugcagaaucugcaucuga

SEQ ID NO: 160995 - RNA, 1698 nt, Artificial Sequence
  derived and/or modified CDS sequence (opt4) from hemagglutinin__InfluenzaA__ABF60576
augaagaccaccaucauccugauccugcugacccacgccguggacagccagaaccccaucagcggcaacaacaccgccacccugugccugggccaccacgccguggccaacggcacccuggugaagaccaucaccgacgaccagaucgaggugaccaacgccaccgagcuggugcagagcaccagcaucggcaagaucugcaacaaccccuacagagugcuggacggcagaaacugcacccugaucgacgccaugcugggcgacccccacugcgacguguuccaguacgagaacugggaccuguucaucgagagaagcagcgccuucagcaacugcuaccccuacgacauccccgacuacgccagccugagaagcaucguggccagcagcggcacccuggaguucaccgccgagggcuucaccuggaccggcgugacccagaacggcggcagcggcgccugcagaagaggcagcgccgacagcuucuucagcagacugaacuggcugaccaagagcggcaacagcuaccccacccugaacgugaccaugcccaacaacgacaacuucgacaagcuguacaucuggggcauccaccaccccagcaccaacaacgagcagaccaagcuguacgugcaggagcugggcagagugaccgugagcaccaagagaagccagcagaccaucauccccaacaucggcagcagacccggcgugagaggccaggccggcagaaucagcaucuacuggaccaucgugaagcccggcgacauccugaugaucaacagcaacggcaaccugguggcccccagaggcuacuucaagaugagaaccggcaagagcagcaucaugagaagcgacgcccccaucgacaccugcuggagcgagugcaucacccccaacggcagcauccccaacgacaagcccuuccagaacgugaacaaggugaccuacggcaagugccccaaguacaucaagcagaacacccugaagcuggccaccggcaugagaaacgugcccgagaagcagaucagaggcaucuucggcgccaucgccggcuucaucgagaacggcugggagggcaugguggacggcugguacggcuucagauaccagaacagcgagggcaccggccaggccgccgaccugaagagcacccaggccgccaucgaccagaucaacggcaagcugaacagagugaucgagagaaccaacgagaaguuccaccagaucgagaaggaguucagcgagguggagggcagaauccaggaccuggagaaguacguggaggacaccaagaucgaccuguggagcuacaacgccgagcugcugguggcccuggagaaccagcacaccaucgaccugaccgacgccgagaugaacaagcuguucgagaagaccagaagacagcugagagagaacgccgaggacaugggcggcggcugcuucaagaucuaccacaagugcgacaacgccugcaucggcagcaucagaaacggcaccuacgaccacuacaucuacagagacgaggcccugaacaacagauuccagaucaagggcguggagcugaagagcggcuacaaggacuggauccuguggaucagcuucgccaucagcugcuuccugaucugcguggugcugcugggcuucaucaugugggccugcgagaagggcaacaucagaugcaacaucugcaucuga

SEQ ID NO: 160996 - RNA, 1701 nt, Artificial Sequence
  derived and/or modified CDS sequence (opt4) from hemagglutinin__InfluenzaA__ABF60577
augaagaccaucaucgugcugagcuacuucuucugccuggcccugagccaggacuacagcgagagcaacaacagcaccgccacccugugccugggccaccacgccgugcccaacggcaccaucgugaagaccaucaccgacgaccagaucgaggugaccaacgccaccgagcuggugcagagcagcagcaccggcaagaucugcaacaacccccacagaauccuggacggcagagacugcacccugaucgacgcccugcugggcgacccccacugcgacguguuccaggacgagaccugggaccuguacguggagagaagcagcgccuucagcaacugcuaccccuacgacgugcccgacuacgccagccugagaagccugguggccagcagcggcacccuggaguucaucaccgagggcuucaccuggaccggcgugacccagaacggcggcagcaacgccugcaagagaggccccgccagcggcuucuucagcagacugaacuggcugaccaagagcggcagcaccuaccccgugcugaacgugaccaugcccaacgacgacaacuucgacaagcuguacguguggggcgugcaccaccccagcaccaaccaggagcagaccgaccuguacgugcaggccagcggcagagugaccgugagcaccagaagaagccagcagaccaucauccccaacaucggcagcagacccugggugagaggccagagcggcagaaucagcaucuacuggaccaucgugaagcccggcgacgugcuggugaucaacagcaacggcaaccugaucgcccccagaggcuacuucaagaucagaaccggcaagagcagcaucaugagaagcgacgcccccaucgacaccugcaucagcgagugcaucacccccaacggcagcauccccaacgacaagcccuuccagaacgugaacaagaucaccuacggcgccugccccaaguacgugaagcagagcacccugaagcuggccaccggcaugagaaacgugcccgagaagaagaccagaggccuguucguggccaucgccggcuucaucgagaacggcugggagggcaugaucgacugcugguacggcuucagacaccagaacagcgagggcaccggccaggccgccgaccugaagagcacccaggccgccaucgaccagaucaacggcaagcugaacagagugaucgagaagaccaacgagaaguuccaccagaucgagaaggaguucagcgagguggagggcagaauccaggaccuggagaacuacguggaggacaccaagaucgaccuguggagcuacaacgccgagcugcugguggcccuggagaaccagcacaccaucgaccugaccgacagcgagaugaacaagcuguucgagagaaccagaagacagcugagagagaacgccgaggacaugggcagcggcugcuucaagaucuaccacaagugcgacaacgccugcaucgagagcaucagaaacggcaccuacgaccacgacaucuacagagacgaggcccugaacaacagauuccagaucaagggcguggagcugaagagcggcuacaaggacuggauccuguggaucagcuucgccaccagcugcuuccugcugugcguggugcugggcggcuucaucaugugggccugccagagaggcaacaucagaugcaacaucugcaucuga

SEQ ID NO: 160997 - RNA, 1701 nt, Artificial Sequence
  derived and/or modified CDS sequence (opt4) from hemagglutinin__InfluenzaA__ABF60578
augaagaccaucaucgugcugagcugcuucuucugccuggccuucagccaggaccugagcgagaacaacaacaacaccgccacccugugccugggccaccacgccgugcccaacggcaccaucgugaagaccaucaccgacgaccagaucgaggugaccaacgccaccgagcuggugcagagcagcagcaccggcaagaucugcaacaacccccacagaauccuggacggcagagacugcacccugaucgacgcccugcugggcgacccccacugcgacguguuccaggacgagaccugggaccuguacguggagagaagcaagagcuucagcaacugcuaccccuacgacgugcccgacuacgccagccugagaagccugguggccagcagcggcacccuggaguucaucaccgaggccuucaccuggaccggcgugacccagaacggcggcagcggcgccugcaagagaggccccggcaacggcuucuucagcagacugaacuggcugaccaagagcggcagcgccuaccccgugcugaacgugaccaugcccaacaacgacaacuucgacaagcuguacguguggggcgugcaccaccccagcaccaaccaggagcagaccaaccuguacgugcaggccagcggcagagugaccgugagcaccagaagaagccagcagaccaucauccccaacaucggcagcagacccugggugagaggccagagcagaagaaucagcaucuacuggaccaucgugaagcccggcgacauccuggugaucaacagcaacggcaaccugaucgcccccagaggcuacuucaagaugagaaccggcaagagcagcaucaugagaagcgacgcccccaucgacaccugcaucagcgagugcaucacccccaacggcagcauccccaacgacaagcccuuccagaacgugaacaagaucaccuacggcgccugccccaaguacaucaagcagagcacccugaagcuggccaccggcaugagaaacgugcccgagaagcagaccagaggccuguucggcgccaucgccggcuucaucgagaacggcugggagggcaugaucgacggcugguacggcuucagacaccagaacagcgagggcaccggccaggccgccgaccugaagagcacccaggccgccaucgaccagaucaacggcaagcugaacagagugaucgagaagaccaacgagaaguuccaccagaucgagaaggaguucagcgagguggagggcagaauccaggaccuggagaaguacguggaggacaccaagaucgaccuguggagcuacaacgccgacgugcugguggcccuggagaaccagcacaccaucgaccugaccgacagcgagaugaacaagcuguucgagaagaccagaagacagcugagagagaacgccgaggacaugggcaacggcugcuucaagaucuaccacaagugcgacaacgccugcaucgagagcaucagaaacggcaccuacgaccacgacaucuacagagacgaggcccugaacaacagauuccagaucaagggcugcggcgugaagagcggcuacaaggacuggauccuguggaucagcuucgccaucagcugcuuccugcugugcguggugcugcugggcuucaucaugugggccugccagagaggcaacaucagaugcaacaucugcaucuga

SEQ ID NO: 160998 - RNA, 1701 nt, Artificial Sequence
  derived and/or modified CDS sequence (opt4) from hemagglutinin__InfluenzaA__ABF60579
augaagacccugaucgcccugagcuacaucuucugccuggugcugggccaggaccugcccggcaacggcaacagcaccgccacccugugccugggccaccacgccgugcccaacggcacccuggugaagaccaucaccgacgaccagaucgaggugaccaacgccaccgagcuggugcagaacuucagcauggacaagaucugcaacaacccccacagaauccuggacggcgccaacugcacccugaucgacgcccugcugggcgacccccacugcgacgacuuccagaacgagaagugggaccuguucguggagagaagcaaggccuucagcaacugcuaccccuacgacgugcccgacuacaccagccugagaagccugaucgccagcagcggcacccuggaguucaucaacgaggacuucaacuggaccggcgugacccagaacggcggcagcaacgccugcaagagaggccccgacagcagcuucuucagcagacugaacuggcuguacaagagcggcaacaccuaccccaugcugaacgugaccaugcccaacagcgacaacuucgacaagcuguacaucuggggcgugcaccaccccagcaccgccagagagcagaccaaccuguacgugcaggccagcggcaaggugaccgugagcaccaagagaagccagcagaccaucauccccaacaucggcagcagacccugggugagaggccugagcagcagaaucagcaucuacuggaccaucgugaagcccggcgacauccuggugaucaacagcaacggcaaccugaucgcccccagaggcuacuucaagaugcacaccggcagaagcagcaucaugagaagcgacgcccccaucgacaccugcagcagcgagugcaucacccccaacggcagcauccccaacgacaagcccuuccagaacgugaacaagaucaccuacggcgccugccccaaguacgugaagcagaacacccugaagcuggccaccggcaugagaaacauccccgagaagcagaccagaggcaucuucggcgccaucgccggcuucaucgagaacggcugggagggcaugguggacggcugguacggcuucagacaccagaacagcgagggcaccggccaggccgccgaccugaagagcacccaggccgccaucgaccagaucaacggcaagcugaacagagugaucgagaagaccaacgagaaguuccaccagaucgagaaggaguucagcggcguggagggcagaauccaggaccuggagaaguacguggaggacaccaagaucgaccuguggagcuacaacgccgagcugcugguggcccuggagaaccagcacaccaucgaccugaccgacagcgagaugaacaagcuguucgagaagaccagaagacagcugagagagaacgccgaggacaugggcaacggcugcuucaagaucuaccacaagugcgacaacgccugcaucgagagcaucagaaacggcaccuacgaccacaacgaguacagagacgaggcccugaacaacagauuccagaucaagggcguggagcugaagagcggcuacaaggacuggauccuguggaucagcuucgccaucagcugcuuccugcugugcguggugcugcugggcuucaucaugugggccugccagaagggcaacaucagaugcaacaucugcaucuga

SEQ ID NO: 160999 - RNA, 1701 nt, Artificial Sequence
  derived and/or modified CDS sequence (opt4) from hemagglutinin__InfluenzaA__ABF60580
augaagaccaucaucgcccugagcuacaucuucugccuggccuucgcccaggaccugcccggcaacgacaacagcaccgccacccugugccugggccaccacgccgugcccaacggcacccuggugaagaccaucaccaacgaccagaucgaggugaccaacgccaccgagcuggugcagagcagcagcaccggcaagaucugcgacaacccccacagaauccuggacggcaucaacugcacccugaucgacgcccugcugggcgacccccacugcgacggcuuccagaacgagaagugggaccuguucguggagagaagcaaggccuucagcaacugcuaccccuacgacgugcccgacuacgccagccugagaagccugguggccagcagcggcacccuggaguucaucaacgagggcuucaacuggaccggcgugacccagaacggcggcagcagcgccugcaagagaggccccgacaacggcuucuucagcagacugaacuggcuguacaagagcggcagcaccuaccccgugcagaacgugaccaugcccaacaacgacaacagcgacaagcuguacaucuggggcgugcaccaccccagcaccgacaaggagcagaccgaccuguacgugcaggccagcggcaaggugaccgugagcaccaagagaauccagcagaccgugauccccaacgugggcagcagacccugggugagaggccugagcagcagagugagcaucuacuggaccaucgugaagcccggcgacgugcuggugaucaacagcaacggcaaccugaucgcccccagaggcuacuacaagaugagaaccggcaagagcagcaucaugagaagcgacgcccccaucggcaccugcagcagcgagugcaucacccccaacggcagcauccccaacgacaagcccuuccagaacgugaacaagaucaccuacggcgccugccccaaguacgugaagcagaacacccugaagcuggccaccggcaugagaaacgugcccgagaagcagaccagaggcaucuucggcgccaucgccggcuucaucgagaacggcugggagggcaugaucgacggcugguacggcuucagacaccagaacagcgagggcaccggccaggccgccgaccugaagagcacccaggccgccaucgaccagaucaacggcaagcugaacagagugaucgagaagaccaacgagaaguuccaccagaucgagaaggaguucagcgagguggagggcagaauccaggaccuggagaaguacguggaggacaccaagaucgaccuguggagcuacaacgccgaggugcugguggcccuggagaaccagcacaccaucgaccugaccgacagcgagaugaacaagcuguucgagaagaccagaagacagcugagagagaacgccgaggacaugggcaacggcugcuucaagaucuaccacaagugcgacaacgccugcaucggcagcaucagaaacggcaccuacgaccacgacguguacagagacgaggcccugaacaacagauuccagaucaagggcguggagcugaagagcggcuacaaggacuggauccuguggaucagcuucgccaucagcugcuuccugcugugcguggugcugcugggcuucaucaugugggccugccagaagggcaacaucagaugcaacaucugcaucuga

SEQ ID NO: 161000 - RNA, 1701 nt, Artificial Sequence
  derived and/or modified CDS sequence (opt4) from hemagglutinin__InfluenzaA__ABF60581
augaagaccaucaucgugcugagcuacuucuucugccuggcccugagccaggacuacagcgagagcaacaacagcaccgccacccugugccugggccaccacgccgugcccaacggcaccaucgugaagaccaucaccgacgaccagaucgaggugaccaacgccaccgagcuggugcagagcagcagcaccggcaagaucugcaacaacccccacagaauccuggacggcagagacugcacccugaucgacgcccugcugggcgacccccacugcgacguguuccaggacgagaccugggaccuguacguggagagaagcagcgccuucagcaacugcuaccccuacgacgugcccgacuacgacagccugagaagccugguggccagcagcggcacccuggaguucaucaccgagggcuucaccuggaccggcgugacccagaacggcggcagcaacgccugcaagagaggccccgccagcggcuucuucagcagacugaacuggcugaccaagagcggcagcaccuaccccgugcugaacgugaccaugcccaacaacgacaacuucgacaagcuguacguguggggcgugcaccaccccagcaccaaccaggagcagaccaaccuguacgugcaggccagcggcagagugaccgugagcaccagaagaagccagcagaccaucauccccaacaucggcagcagacccugggugagaggccagagcggcagaaucagcaucuacuggaccaucgugaagcccggcgacgugcuggugaucaacagcaacggcaaccugaucgcccccagaggcuacuucaagaugagaaccggcaagagcagcaucaugagaagcgacgcccccaucgacaccugcaucagcgagugcaucacccccaacggcagcauccccaacgacaugcccuuccagaacgugaacaagaucaccuacggcgccugccccaaguacgugaagcagggcacccugaagcuggccaccggcaugagaaacgugcccgagaagcagaccagaggccuguucggcgccaucgccggcuucaucgagaacggcugggagggcaugaucgacggcugguacggcuucagacaccagaacagcgagggcaccggccaggccgccgaccugaagagcacccaggccgccaucgaccagaucaacggcaagcugaacagagugaucgagaagaccaacgagaaguuccaccagaucgagaaggaguucagcgagguggagggcagaauccaggaccuggagaaguacguggaggacaccaagaucgaccuguggagcgacaacgccgagcugcugguggcccuggagaaccagcacaccaucgaccugaccgacagcgagaugaacaagcuguucgagaagaccagaagacagcugagagagaacgccgaggugaugggcaacggcugcuucaagaucuaccacaagugcgacaacgccugcaucgagagcaucagaaacggcaccuacgaccacgacaucuacagagacgaggcccugaacaacagauuccagaucaagggcguggagcugaagagcggcuacaaggacuggauccuguggaucagcuucgccaucagcugcuuccugcugugcguggugcugcugggcuucaucaugugggccugccagagaggcaacaucagaugcaacaucugcaucuga

SEQ ID NO: 161001 - RNA, 1701 nt, Artificial Sequence; identical to SEQ ID NO: 160800
  derived and/or modified CDS sequence (opt4) from hemagglutinin__InfluenzaA__ABF82651

SEQ ID NO: 161002 - RNA, 1698 nt, Artificial Sequence; identical to SEQ ID NO: 160860
  derived and/or modified CDS sequence (opt4) from hemagglutinin__InfluenzaA__ABF82662

SEQ ID NO: 161003 - RNA, 1698 nt, Artificial Sequence
  derived and/or modified CDS sequence (opt4) from hemagglutinin__InfluenzaA__ABF82673
augaaggccaagcugcuggugcugcugugcaccuucaccgccaccuacgccgacaccaucugcaucggcuaccacgccaacaacagcaccgacaccguggacaccgugcuggagaagaacgugaccgugacccacagcgugaaccugcuggaggacagccacaacggcaagcugugccugcugaagggcaucgccccccugcagcugggcaacugcagcguggccggcuggauccugggcaaccccgagugcgagcugcugaucagcaagggcagcuggagcuacaucguggagacccccaaccccgagaacggcaccugcuaccccggcuacuucgccgacuacgaggagcugagagagcagcugagcagcgugagcagcuucgagagauucgagaucuuccccaagggcagcagcuggcccaaccacaccgugaccggcgugagcgccagcugcagccacaacggcaagagcagcuucuacagaaaccugcuguggcugaccggcaagaacggccuguaccccaaccugagcaugagcuacgugaacaacaaggagaaggaggugcuggugcuguggggcgugcaccacccccccaacaucggcgaccagagagcccuguaccacaccgagaacgccuacgugagcguggugagcagccacuacagcagaagauucacccccgagaucgccaagagacccaaggugagagaccaggagggcagaaucaacuacuacuggacccugcuggagcccggcgacaccaucaucuucgaggccaacggcaaccugaucgcccccugguacgccuucgcccugagcagaggcuucggcagcggcaucaucaccagcaacgcccccaugggcgagugcgacgccaagugccagaccccccagggcgccaucaacagcagccugcccuuccagaacgugcaccccgugaccaucggcgagugccccaaguacgugagaagcgccaagcugagaauggugaccggccugagaaacauccccagcauccagagcagaggccuguucggcgccaucgccggcuucaucgagggcggcuggaccggcaugguggacggcugguacggcuaccaccaccagaacgagcagggcagcggcuacgccgccgaccagaagagcacccagaacgccaucaacggcaucaccaacaaggugaacagcgugaucgagaagaugaacacccaguucaccgccgugggcaaggaguucaacaagcuggagagaagaauggagaaccugaacaagaagguggacgacggcuuccuggacaucuggaccuacaacgccgagcugcuggugcugcuggagaacgagagaacccuggacuuccacgacagcaacgugaagaaccuguacgagaaggugaagagccagcugaagaacaacgccaaggagaucggcaacggcugcuucgaguucuaccacaagugcaacaacgagugcauggagagcgugaagaacggcaccuacgacuaccccaaguacagcgaggagagcaagcugaacagagagaagaucgacggcgugaagcuggagagcaugggcguguaccagauccuggccaucuacagcaccguggccagcagccuggugcugcuggugagccugggcgccaucagcuucuggaugugcagcaacggcagccugcagugcagaaucugcaucuga

SEQ ID NO: 161004 - RNA, 1698 nt, Artificial Sequence; identical to SEQ ID NO: 160901
  derived and/or modified CDS sequence (opt4) from hemagglutinin__InfluenzaA__ABF82684

SEQ ID NO: 161005 - RNA, 1701 nt, Artificial Sequence; identical to SEQ ID NO: 160867
  derived and/or modified CDS sequence (opt4) from hemagglutinin__InfluenzaA__ABF82695

SEQ ID NO: 161006 - RNA, 1701 nt, Artificial Sequence; identical to SEQ ID NO: 160843
  derived and/or modified CDS sequence (opt4) from hemagglutinin__InfluenzaA__ABF82706

SEQ ID NO: 161007 - RNA, 1698 nt, Artificial Sequence; identical to SEQ ID NO: 160359
  derived and/or modified CDS sequence (opt4) from hemagglutinin__InfluenzaA__ABF82819

SEQ ID NO: 161008 - RNA, 1698 nt, Artificial Sequence; identical to SEQ ID NO: 160860
  derived and/or modified CDS sequence (opt4) from hemagglutinin__InfluenzaA__ABF82830

SEQ ID NO: 161009 - RNA, 1698 nt, Artificial Sequence; identical to SEQ ID NO: 160860
  derived and/or modified CDS sequence (opt4) from hemagglutinin__InfluenzaA__ABF82841

SEQ ID NO: 161010 - RNA, 1698 nt, Artificial Sequence; identical to SEQ ID NO: 160860
  derived and/or modified CDS sequence (opt4) from hemagglutinin__InfluenzaA__ABF82852

SEQ ID NO: 161011 - RNA, 1698 nt, Artificial Sequence
  derived and/or modified CDS sequence (opt4) from hemagglutinin__InfluenzaA__ABF82863
augaaggccaagcugcuggugcugcugugcaccuucaccgccaccuacgccgacaccaucugcaucggcuaccacgccaacaacagcaccgacaccguggacaccgugcuggagaagaacgugaccgugacccacagcgugaaccugcuggaggacagccacaacggcaagcugugccugcugaagggcaucgccccccugcagcugggcaacugcagcguggccggcuggauccugggcaaccccgagugcgagcugcugaucagcaaggagagcuggagcuacaucguggagacccccaaccccgagaacggcaccugcuaccccggcuacuucgccgacuacgaggagcugagagagcagcugagcagcgugagcagcuucgagagauucgagaucuuccccaagggcagcagcuggcccaaccacaccgugaccggcgugagcgccagcugcagccacaacggcaagagcagcuucuacagaaaccugcuguggcugaccggcaagaacggccuguaccccaaccugagcauguucuacgugaacaacaaggagaaggaggugcuggugcuguggggcgugcaccacccccccaacaucggcgaccagagagcccuguaccacaccgagaacgccuacgugagcguggugagcagccacuacagcagaagauucacccccgagaucgccaagagacccaaggugagagaccaggagggcagaaucaacuacuacuggacccugcuggagcccggcgacaccaucaucuucgaggccaacggcaaccugaucgcccccugguacgccuucgcccugagcagaggcuucggcagcggcaucaucaccagcaacgcccccaugggcgagugcgacgccaagugccagaccccccagggcgccaucaacagcagccugcccuuccagaacgugcaccccgugaccaucggcgagugccccaaguacgugagaagcgccaagcugagaauggugaccggccugagaaacauccccagcauccagagcagaggccuguucggcgccaucgccggcuucaucgagggcggcuggaccggcaugguggacggcugguacggcuaccaccaccagaacgagcagggcagcggcuacgccgccgaccagaagagcacccagaacgccaucaacggcaucaccaacaaggugaacagcgugaucgagaagaugaacacccaguucaccgccgugggcaaggaguucaacaagcuggagagaagaauggagaaccugaacaagaagguggacgacggcuuccuggacaucuggaccuacaacgccgagcugcuggugcugcuggagaacgagagaacccuggacuuccacgacagcaacgugaagaaccuguacgagaaggugaagagccagcugaagaacaacgccaaggagaucggcaacggcugcuucgaguucuaccacaagugcaacaacgagugcauggagagcgugaagaacggcaccuacgacuaccccaaguacagcgaggagagcaagcugaacagagagaagaucgacggcgugaagcuggagagcaugggcguguaccagauccuggccaucuacagcaccguggccagcagccuggugcugcuggugagccugggcgccaucagcuucuggaugugcagcaacggcagccugcagugcagaaucugcaucuga

SEQ ID NO: 161012 - RNA, 1698 nt, Artificial Sequence
  derived and/or modified CDS sequence (opt4) from hemagglutinin__InfluenzaA__ABF82874
augaaggccaagcugcuggugcugcugugcaccuucaccgccaccuacgccgacaccaucugcaucggcuaccacgccaacaacagcaccgacaccguggacaccgugcuggagaagaacgugaccgugacccacagcgugaaccugcuggaggacagccacaacggcaagcugugccugcugaagggcaucgccccccugcagcugggcaacugcagcguggccggcuggauccugggcaaccccgagugcgagcugcugaucagcaaggagagcuggagcuacaucguggagacccccaaccccgagaacggcaccugcuaccccggcuacuucgccgacuacgaggagcugagagagcagcugagcagcgugagcagcuucgagagauucgagaucuuccccaagggcagcagcuggcccaaccacaccgugaccggcgugagcgccagcugcagccacaacggcaagagcagcuucuacagaaaccugcuguggcugaccggcaagaacggccuguaccccaaccugagcaugagcuacgugaacaacaaggagaaggaggugcuggugcuguggggcgugcaccacccccccaacaucggcgaccagagagcccuguaccacaccgagaacgccuacgugagcguggugagcagccacuacagcagaagauucacccccgagaucgccaagagacccaaggugagagaccaggagggcagaaucaacuacuacuggacccugcuggagcccggcgacaccaucaucuucgaggccaacggcaaccugaucgcccccugguacgccuucgcccugagcagaggcuucggcagcggcaucaucaccagcaacgcccccaugggcgagugcgacgccaagugccagaccccccagggcgccaucaacagcagccugcccuuccagaacgugcaccccgugaccaucggcgagugccccaaguacgugagaagcgccaagcugagaauggugaccggccugagaaacauccccagcauccagagcagaggccuguucggcgccaucgccggcuucaucgagggcggcuggaccggcaugguggacggcugguacggcuaccaccaccagaacgagcagggcagcggcuacgccgccgaccagaagagcacccagaacgccaucaacggcaucaccaacaaggugaacagcgugaucgagaagaugaacacccaguucaccgccgugggcaaggaguucaacaagcuggagagaagaauggagaaccugaucaagaagguggacgacggcuuccuggacaucuggaccuacaacgccgagcugcuggugcugcuggagaacgagagaacccuggacuuccacgacagcaacgugaagaaccuguacgagaaggugaagagccagcugaagaacaacgccaaggagaucggcaacggcugcuucgaguucuaccacaagugcaacaacgagugcauggagagcgugaagaacggcaccuacgacuaccccaaguacagcgaggagagcaagcugaacagagagaagaucgacggcgugaagcuggagagcaugggcguguaccagauccuggccaucuacagcaccguggccagcagccuggugcugcuggugagccugggcgccaucagcuucuggaugugcagcaacggcagccugcagugcagaaucugcaucuga

SEQ ID NO: 161013 - RNA, 1698 nt, Artificial Sequence; identical to SEQ ID NO: 160860
  derived and/or modified CDS sequence (opt4) from hemagglutinin__InfluenzaA__ABF82885

SEQ ID NO: 161014 - RNA, 1698 nt, Artificial Sequence; identical to SEQ ID NO: 160860
  derived and/or modified CDS sequence (opt4) from hemagglutinin__InfluenzaA__ABF82896

SEQ ID NO: 161015 - RNA, 1698 nt, Artificial Sequence; identical to SEQ ID NO: 160860
  derived and/or modified CDS sequence (opt4) from hemagglutinin__InfluenzaA__ABF82907

SEQ ID NO: 161016 - RNA, 1698 nt, Artificial Sequence; identical to SEQ ID NO: 160904
  derived and/or modified CDS sequence (opt4) from hemagglutinin__InfluenzaA__ABF82929

SEQ ID NO: 161017 - RNA, 1698 nt, Artificial Sequence; identical to SEQ ID NO: 160860
  derived and/or modified CDS sequence (opt4) from hemagglutinin__InfluenzaA__ABF82940

SEQ ID NO: 161018 - RNA, 1701 nt, Artificial Sequence
  derived and/or modified CDS sequence (opt4) from hemagglutinin__InfluenzaA__ABF83447
augaagaccaucaucgcccugagcuacaucuucugccuggcccugggccaggaccugcccggcaacgacaacaacaccgccacccugugccugggccaccacgccgugcccaacggcacccuggugaagaccaucaccgacgaccagaucgaggugaccaacgccaccgagcuggugcagagcagcagcaccggcaagaucugcaacaacccccacagaauccuggacggcaucgacugcacccugaucgacgcccugcugggcgacccccacugcgacguguuccagaacgagaccugggaccuguucguggagagaagcaaggccuucagcaacugcuaccccuacgacgugcccgacuacgccagccugagaagccugguggccagcagcggcacccuggaguucaucaccgagggcuucaccuggaccggcgugacccagaacggcggcagcaacgccugcaagagaggccccggcagcggcuucuucagcagacugaacuggcugaccaagagcggcagcaccuaccccgugcugaacgugaccaugcccaacaacgacaacuucgacaagcuguacaucuggggcgugcaccaccccagcaccaaccaggagcagaccagccuguacgugcaggccagcggcggcgugaccgugagcaccagaagaagccagcagaccaucauccccaacaucggcagcagacccugggugagaggccugagcagcagaaucagcaucuacuggaccaucgugaagcccggcgacgugcuggugaucaacagcaacggcaaccugaucgcccccagaggcuacuucaagaugagaaccggcaagagcagcaucaugagaagcgacgcccccaucgacaccugcaucagcgagugcaucacccccaacggcagcauccccaacgacaagcccuuccagaacgugaacaagaucaccuacggcgccugccccaaguacgugaagcagaacacccugaagcuggccaccggcaugagaaacgugcccgagaagcagaccagaggccuguucggcgccaucgccggcuucaucgagaacggcugggagggcaugaucgacggcugguacggcuucagacaccagaacagcgagggcaccggccaggccgccgaccugaagagcacccaggccgccaucgaccagaucaacggcaagcugaacagagugaucgagaagaccaacgagaaguuccaccagaucgagaaggaguucagcgagguggagggcagaauccaggaccuggagaaguacguggaggacaccaagaucgaccuguggagcuacaacgccgagcugcugguggcccuggagaaccagcacaccaucgaccugaccgacagcgagaugaacaagcuguucgagaagaccagaagacagcugagagagaacgccgaggacaugggcaacggcugcuucaagaucuaccacaagugcgacaacgccugcaucgagagcaucagaaacggcaccuacgaccacgacguguacagagacgaggcccugaacaacagauuccagaucaagggcguggagcugaagagcggcuacaaggacuggauccuguggaucagcuucgccaucagcugcuuccugcugugcguggugcugcugggcuucaucaugugggccugccagagaggcaacaucagaugcaacaucugcaucuga

SEQ ID NO: 161019 - RNA, 1644 nt, Artificial Sequence
  derived and/or modified CDS sequence (opt4) from hemagglutinin__InfluenzaA__ABG20468
auggagaagaucgugcugcugcuggccaucgugagccuggugaagagcgaccagaucugcaucggcuaccacgccaacaacagcaccgagcagguggacaccaucauggagaagaacgugaccgugacccacgcccaggacauccuggagaagacccacaacggcaagcugugcgaccuggacggcgugaagccccugauccugagagacugcagcguggccggcgagaagaucaaccccgccaacgaccugugcuaccccggcaacuucaacgacuacgaggagcugaagcaccugcugagcagaaucaaccacuucgagaagauccagaucauccccaagagcagcuggagcgaccacgaggccagcagcggcgugagcagcgccugccccuaccagggcagaagcagcuucuucagaaacgugguguggcugaucaagaagaacaacgccuaccccaccaucaagagaagcuacaacaacaccaaccaggaggaccugcuggugcuguggggcauccaccaccccaacgacgccgccgagcagaccagacuguaccagaaccccaccaccuacaucagcgugggcaccagcacccugaaccagagacuggugcccaagaucgccaccagaagcaaggugaacggccagagcggcagaauggaguucuucuggaccauccugaagcccaacgacgccaucaacuucgagagcaacggcaacuucaucgcccccgagaacgccuacaagaucgugaagaagggcgacagcaccaucaugaagagcgagcuggaguacggcaacugcaacaccaagugcgagacccccaucggcgccaucaacagcagcaugcccuuccacaacauccacccccugaccaucggcgagugccccaaguacgugaagagcaacagacuggugcuggccaccggccugagaaacagcccccagggcgagagaagaagaaagaagagaggccuguucggcgccaucgccggcuucaucgagggcggcuggcagggcaugguggacggcugguacggcuaccaccacagcaacgagcagggcagcggcuacgccgccgacaaggagagcacccagaaggccaucgacggcgugaccaacaaggugaacagcaucaucgacaagaugaacacccaguucgaggccgugggcagagaguucaacaaccuggagagaagaaucgagaaccugaacaagaagauggaggacggcuuccuggacguguggaccuacaacgccgagcugcuggugcugauggagaacgagagaacccuggacuuccacgacagcaacgugaagaaccuguacgacaaggugagacugcagcugagagacaacgccaaggagcugggcaacggcugcuucgaguucuaccacagaugcgacaacgagugcauggagagcgugagaaacggcaccuacgacuacccccaguacagcgaggaggccagacugaagagagaggagaucagcggcgugaagcuggagagcaucggcaccuaccagauccugagcaucuacagcaccguggccagcagccuggcccuggccaucaugguggccggccugagccuguggaugugcagcaacggcagccugcagugcagaaucugcaucuga

SEQ ID NO: 161020 - RNA, 1707 nt, Artificial Sequence
  derived and/or modified CDS sequence (opt4) from hemagglutinin__InfluenzaA__ABG20472
auggagaagaucgugcugcugcuggccaucgugagccuggugaagagcgaccagaucugcaucggcuaccacgccaacaacagcaccgagcagguggacaccaucauggagaagaacgugaccgugacccacgcccaggacauccuggagaaggcccacaacggcaagcugugcgaccuggacggcgugaagccccugauccugagagacugcagcguggccggcuggcugcugggcaaccccaugugcgacgaguuccugaacgugcccgaguggagcuacaucguggagaagaucaaccccgccaacgaccugugcuaccccggcaacuucaacgacuacgaggagcugaagcaccugcugagcagaaucaaccacuucgagaagauccagaucauccccaagagcagcuggagcgaccacgaggccagcagcggcgugagcagcgccugccccuaccagggcagaagcagcuucuucagaaacgugguguggcugaucaagaaggacaacgccuaccccaccaucaagagaagcuacaacaacaccaaccaggaggaccugcuggugcuguggggcauccaccaccccaacgacgccgccgagcagaccagacuguaccagaaccccaccaccuacaucagcgugggcaccagcacccugaaccagagacuggugcccaagaucgccaccagaagcaaggugaacggccagagcggcagaauggaguucuucuggaccauccugaagcccaacgacgccaucaacuucgagagcaacggcaacuucaucgcccccgagaacgccuacaagaucgugaagaagggcgacagcaccaucaugaagagcgagcuggaguacggcaacugcaacaccaagugccagacccccaucggcgccaucaacagcagcaugcccuuccacaacauccacccccugaccaucggcgagugccccaaguacgugaagagcaacagacuggugcuggccaccggccugagaaacagcccccagggcgagagaagaagaaagaagagaggccuguucggcgccaucgccggcuucaucgagggcggcuggcagggcaugguggacggcugguacggcuaccaccacagcaacgagcagggcagcggcuacgccgccgacaaggagagcacccagaaggccaucgacggcgugaccaacaaggugaacagcaucaucgacaagaugaacacccaguucgaggccgugggcagagaguucaacaaccuggagagaagaaucgagaaccugaacaagaagauggaggacggcuuccuggacguguggaccuacaacgccgagcugcuggugcugauggagaacgagagaacccuggacuuccacgacagcaacgugaagaaccuguacgacaaggugagacugcagcugagagacaacgccaaggagcugggcaacggcugcuucgaguucuaccacagaugcgacaacgagugcauggagagcgugagaaacggcaccuacgacuacccccaguacagcgaggaggccagacugaagagagaggagaucagcggcgugaagcuggagagcaucggcaccuaccagauccugagcaucuacagcaccguggccagcagccuggcccuggccaucaugguggccggccugagccuguggaugugcagcaacggcagccugcagugcagaaucugcaucuga

SEQ ID NO: 161021 - RNA, 1707 nt, Artificial Sequence
  derived and/or modified CDS sequence (opt4) from hemagglutinin__InfluenzaA__ABG20478
auggagaagaucgugcugcuguucgccaucgugagccuggugaagagcgaccagaucugcaucggcuaccacgccaacaacagcaccgagcagguggacaccaucauggagaagaacgugaccgugacccacgcccaggacauccuggagaagacccacaacggcaagcugugcgaccuggacggcgugaagccccugauccugagagacugcagcguggccggcuggcugcugggcaaccccaugugcgacgaguuccugaacgugcccgaguggagcuacaucguggagaagaucaaccccgccaacgaccugugcuaccccggcaacuucaacgacuacgaggagcugaagcaccugcugagcagaaucaaccacuucgagaagauccagaucauccccaagagcagcuggagcgaccacgaggccagcagcggcgugagcagcgccugccccuaccagggcagaagcagcuucuucagaaacgugguguggcugaucaagaaggacaacgccuaccccaccaucaagagaagcuacaacaacaccaaccaggaggaccugcuggugcuguggggcauccaccaccccaacgacgccgccgagcagaccagacuguaccagaaccccaccaccuacaucagcgugggcaccagcacccugaaccagagacuggugcccaagaucgccaccagaagcaaggugaacggccagagcggcagaauggaguucuucuggaccauccugaagcccaacgacgccaucaacuucgagagcaacggcaacuucaucgcccccgagaacgccuacaagaucgugaagaagggcgacagcaccaucaugaagagcgagcuggaguacggcaacugcaacaccaagugccagacccccaucggcgccaucaacagcagcaugcccuuccacaacauccacccccugaccaucggcgagugccccaaguacgugaagagcaacagacuggugcuggccaccggccugagaaacagcccccagggcgagagaagaagaaagaagagaggccuguucggcgccaucgccggcuucaucgagggcggcuggcagggcaugguggacggcugguacggcuaccaccacagcaacgagcagggcagcggcuacgccgccgacaaggagagcacccagaaggccaucgacggcgugaccaacaaggugaacagcaucaucgacaagaugaacacccaguucgaggccgugggcagagaguucaacaaccuggagagaagaaucgagaaccugaacaagaagauggaggacggcuuccuggacguguggaccuacaacgccgagcugcuggugcugauggagaacgagagaacccuggacuuccacgacagcaacgugaagaaccuguacgacaaggugagacugcagcugagagacaacgccaaggagcugggcaacggcugcuucgaguucuaccacagaugcgacaacgagugcauggagagcgugagaaacggcaccuacgacuacccccaguacagcgaggaggccagacugaagagagaggagaucagcggcgugaagcuggagagcaucggcaccuaccagauccugagcaucuacagcaccguggccagcagccuggcccuggccaucaugguggccggccugagccuguggaugugcagcaacggcagccugcagugcagaaucugcaucuga

SEQ ID NO: 161022 - RNA, 1701 nt, Artificial Sequence; identical to SEQ ID NO: 160843
  derived and/or modified CDS sequence (opt4) from hemagglutinin__InfluenzaA__ABG26758

SEQ ID NO: 161023 - RNA, 1701 nt, Artificial Sequence
  derived and/or modified CDS sequence (opt4) from hemagglutinin__InfluenzaA__ABG26769
augaagaccaucaucgcccugagcuacauccugugccugguguucgcccagaagcugcccggcaacgacaacagcaccgccacccugugccugggccaccacgccgugcccaacggcacccuggugaagaccaucaccaacgaccagaucgaggugaccaacgccaccgagcuggugcagaacagcagcaccggcagaaucugcgacagcccccacagaauccuggacggcaagaacugcacccugaucgacgcccugcugggcgacccccacugcgacggcuuccagaacaaggagugggaccuguucguggagagaagcaaggccuacagcaacugcuaccccuacgacgugcccgacuacgccagccugagaagccugguggccagcagcggcacccuggaguucaacaacgagagcuucaacuggaccggcguggcccagaacggcaccagcuacgccugcaagagaagaagcgugaagagcuucuucagcagacugaacuggcugcacaagcuggaguacaaguaccccgcccugaacgugaccaugcccaacaacgacaaguucgacaagcuguacaucuggggcgugcaccaccccagcaccgacagcgaccagaccagccuguacgugcaggccagcggcagagugaccgugagcaccaagagaagccagcagaccgugauccccaacaucggcagcggccccugggugagaggcgugagcagcagaaucagcaucuacuggaccaucgugaagcccggcgacauccugcugaucaacagcaccggcaaccugaucgcccccagaggcuacuucaagaucagaagcggcaagagcagcaucaugagaagcgacgcccccaucggcaacugcaacagcgagugcaucacccccaacggcagcauccccaacgacaagcccuuccagaacgugaacagaaucaccuacggcgccugccccagauacgugaagcagaacacccugaagcuggccaccggcaugagaaacgugcccgagaagcagaccagaggcaucuucggcgccaucgccggcuucaucgagaacggcugggagggcaugguggacggcugguacggcuucagacaccagaacagcgagggcaccggccaggccgccgaccugaagagcacccaggccgccaucaaccagaucaacggcaagcugaacagacugaucgagaagaccaacgagaaguuccaccagaucgagaaggaguucagcgagguggagggcagaauccaggaccuggagaaguacguggaggacaccaagaucgaccuguggagcuacaacgccgagcugcugguggcccuggagaaccagcacaccaucgaccugaccgacagcgagaugaacaagcuguucgagagaaccagaaagcagcugagagagaacgccgaggacaugggcaacggcugcuucagaaucuaccacaagugcgacaacgccugcaucggcagcaucagaaacggcaccuacgaccacgacguguacagagacgaggcccugaacaacagauuccagaucaagggcguggagcugaagagcggcuacaaggacuggauccuguggaucagcuucgccaucagcugcuuccugcugugcguggugcugcugggcuucaucaugugggccugccagaagggcaacaucagaugcaacaucugcaucuga

SEQ ID NO: 161024 - RNA, 1701 nt, Artificial Sequence; identical to SEQ ID NO: 160971
  derived and/or modified CDS sequence (opt4) from hemagglutinin__InfluenzaA__ABG26780

SEQ ID NO: 161025 - RNA, 1701 nt, Artificial Sequence
  derived and/or modified CDS sequence (opt4) from hemagglutinin__InfluenzaA__ABG26791
augaaggccaagcugcuggugcugcugugcgccuucaccgccaccuacgccgacaccaucugcaucggcuaccacgccaacaacagcaccgacaccguggacaccgugcuggagaagaacgugaccgugacccacagcgugaaccugcuggaggacagccacaacggcaagcugugcagacugaagggcaccgccccccugcagcugggcaacugcagcguggccggcuggauccugggcaaccccgagugcgagagccuguucagcaaggagagcuggagcuacaucgccgagacccccaaccccgagaacggcaccugcuaccccggcuacuucgccgacuacgaggagcugaaggagcagcugagcagcgugagcagcuucgagagauucgagaucuuccccaaggagagcagcuggcccaaccacaccgugaccaagggcgugaccgccagcugcagccacaacggcaagagcagcuucuacaagaaccugcuguggcugaccgagaagaacggccuguaccccaaccugagcaagagcuacgugaacaacaaggagaaggaggugcuggugcuguggggcgugcaccaccccagcaacaucggcgaccagagagccaucuaccacaccgagaacgccuacgugagcguggugagcagccacuacagcagaagauucacccccgagaucgccaagagacccaaggugagagaccaggagggcagaaucaacuacuacuggacccugcuggagcccggcgacaccaucaucuucgaggccaacggcaaccugaucgcccccugguacgccuucgcccugagcagaggcuucggcagcggcaucaucaccagcaacgccagcaugggcgagugcgacgccaagugccagaccccccagggcgccaucaacagcagccugcccuuccagaacgugcaccccgugaccaucggcgagugccccaaguacgugagaagcaccaagcugagaauggugaccggccugagaaacauccccagcauccagagcagaggccuguucggcgccaucgccggcuucaucgagggcggcuggaccggcaugaucgacggcugguacggcuaccaccaccagaacgagcagggcagcggcuacgccgccgacaagaagagcacccagaacgccaucgacggcaucaccaacaaggugaacagcgugaucgagaagaugaacacccaguucaccgccgugggcaaggaguucaacaagcuggagagaagaauggagaaccugaacaagaagguggacgacggcuuccuggacaucuggaccuacaacgccgagcugcuggugcugcuggagaacgagagaacccuggacuuccacgacagcaacgugaagaaccuguacgagaaggugaagaaccagcugaagaacaacgccaaggagaucggcaacggcugcuucgaguucuaccacaagugcaacaacgagugcauggagagcgugaagaacggcaccuacgacuaccccaaguacagcgaggagagcaagcugaagagagagaagaucgacggcgugaagcuggagagcaugggcguguaccagauccuggccaucuacagcaccguggccagcagccuggugcugcuggugagccugggcgccaucagcuucuggaugugcagcaacggcagccugcagugcagaaucugcaucuga

SEQ ID NO: 161026 - RNA, 1701 nt, Artificial Sequence
  derived and/or modified CDS sequence (opt4) from hemagglutinin__InfluenzaA__ABG26802
augaagaccaucaucgcccugagcuacaucagcugccugguguucgcccagaagcugcccggcaacgacaacagcaccgccacccugugccugggccaccacgccgugcccaacggcacccuggugaagaccaucaccaacgaccagaucgaggugaccaacgccaccgagcuggugcagagcagcagcaccggcagaaucugcgacagcccccacagaauccuggacggcaagaacugcacccugaucgacgcccugcugggcgacccccacugcgacggcuuccagaacgagaagugggaccuguucguggagagaagcaaggccuucagcaacugcuaccccuacgacgugcccgacuacgccagccugagaagccugguggccagcagcggcacccuggaguucaucaacgagggcuucaacuggaccggcgugacccagagcggcggcagcuacgccugcaagagaggcagcgugaacagcuucuucagcagacugaacuggcuguacgagagcgagagcaaguaccccgcccugaacgugaccaugcccaacaacggcaaguucgacaagcuguacaucuggggcgugcaccaccccagcaccgacaaggagcagaccaaccuguacgugagagccagcggcagagugaccgugagcaccaagagaagccagcagaccgugauccccaacaucggccccagacccugggugagaggccugagcagcagaaucagcaucuacuggaccaucgugaagcccggcgacauccugcugaucaacagcaccggcaaccugaucgcccccagaggcuacuucaagaucagaaccggcaagagcagcaucaugagaagcgacgcccccaucggcaccugcagcagcggcugcaucacccccaacggcagcauccccaacgacaagcccuuccagaacgugaacaagaucaccuacggcgccugccccagauacgugaagcagaacacccugaagcuggccaccggcaugagaaacgugcccgagaagcagaccagaggcaucuucggcgccaucgccggcuucaucgagaacggcugggagggcaugguggacggcugguacggcuucagacaccagaacagcgagggcaccggccaggccgccgaccugaagagcacccaggccgccaucgaccagaucaacggcaagcugaacagacugaucgagaagaccaacgagaaguuccaccagaucgagaaggaguucagcgagguggagggcagaauccaggaccuggagaaguacguggaggacaccaagaucgaccuguggagcuacaacgccgagcugcugguggcccuggagaaccagcacaccaucgacaugaccgacagcgagaugaacaagcuguucgagaagaccagaaagcagcugagagagaacgccgaggacaugggcaacggcugcuucaagaucuaccacaagugcgacaacgccugcaucggcagcaucagaaacggcaccuacgaccacgacguguacagagacgaggcccugaacaacagauuccagaucaagggcguggagcugaagagcggcuacaaggacuggauccuguggaucagcuucgccaucagcugcuuccugcugugcguggugcugcugggcuucaucaugugggccugccagaagggcaacaucagaugcaacaucugcaucuga

SEQ ID NO: 161027 - RNA, 1701 nt, Artificial Sequence; identical to SEQ ID NO: 160975
  derived and/or modified CDS sequence (opt4) from hemagglutinin__InfluenzaA__ABG26813

SEQ ID NO: 161028 - RNA, 1701 nt, Artificial Sequence
  derived and/or modified CDS sequence (opt4) from hemagglutinin__InfluenzaA__ABG26824
augaaggccaagcugcuggugcugcugugcgcccugagcgccaccgacgccgacaccaucugcaucggcuaccacgccaacaacagcaccgacaccguggacaccgugcuggagaagaacgugaccgugacccacagcgugaaccugcuggaggacaaccacaacggcaagcugugcaagcugaagggcaucgccccccugcagcugggcaagugcagcaucgccggcuggauccugggcaaccccgagugcgagagccuguucagcaagaagagcuggagcuacaucgccgagacccccaacagcgagaacggcaccugcuaccccggcuacuucgccgacuacgaggagcugagagagcagcugagcagcgugagcagcuucgagagauucgagaucuuccccaaggagagcagcuggcccaagcacaacgugaccaagggcgugaccgccagcugcagccacaagggcaagagcagcuucuacagaaaccugcuguggcugaccgagaagaacggcagcuaccccaaccugagcaagagcuacgugaacaacaaggagaaggaggugcuggugcuguggggcgugcaccaccccagcaacaucgaggaccagaagaccaucuacagaaaggagaacgccuacgugagcguggugagcagccacuacaacagaagauucacccccgagaucgccaagagacccaaggugagaaaccaggagggcagaaucaacuacuacuggacccugcuggagcccggcgacaccaucaucuucgaggccaacggcaaccugaucgcccccugguacgccuucgcccugagcagaggcuucggcagcggcaucaucaccagcaacgccagcauggacgagugcgacgccaagugccagaccccccagggcgccaucaacagcagccugcccuuccagaacgugcaccccgugaccaucggcgagugccccaaguacgugagaagcaccaagcugagaauggugaccggccugagaaacauccccagcauccagagcagaggccuguucggcgccaucgccggcuucaucgagggcggcuggaccggcaugaucgacggcugguacggcuaccaccaccagaacgagcagggcagcggcuacgccgccgaccagaagagcacccagaacgccaucaacggcaucaccaacaaggugaacagcaucaucgagaagaugaacacccaguucaccgccgugggcaaggaguucaacaagcuggagaagagaauggagaaccugaacaagaagguggacgacggcuuccuggacaucuggaccuacaacgccgagcugcuggugcugcuggagaacgagagaacccuggacuuccacgacagcaacgugaagaaccuguacgagaaggugaagagccagcugaagaacaacgccaaggagaucggcaacggcugcuucgaguucuaccacaagugcaacaacgagugcauggagagcgugaagaacggcaccuacgacuaccccaaguacagcgaggagagcaagcugaacagagagaagaucgacggcgugaagcuggagagcaugggcguguaccagauccuggccaucuacagcaccguggccagcagccuggugcugcuggugagccugggcgccaucagcuucuggaugugcagcaacggcagccugcagugcaagaucugcaucuga

SEQ ID NO: 161029 - RNA, 1701 nt, Artificial Sequence; identical to SEQ ID NO: 160981
  derived and/or modified CDS sequence (opt4) from hemagglutinin__InfluenzaA__ABG26835

SEQ ID NO: 161030 - RNA, 1701 nt, Artificial Sequence
  derived and/or modified CDS sequence (opt4) from hemagglutinin__InfluenzaA__ABG26890
augaagaccaucaucgcccugagcuacauccugugccugguguucgcccagaagcugcccggcaacgacaacagcaccgccacccugugccugggccaccacgccgugcccaacggcacccuggugaagaccaucaccaacgaccagaucgaggugaccaacgccaccgagcuggugcagaacagccccaccggcagaaucugcgacagcccccacagaauccuggacggcaagaacugcacccugaucgacgcccugcugggcgacccccacugcgacggcuuccagaacaaggagugggaccuguucguggagagaagcaaggccuacagcaacugcuaccccuacgacgugcccgacuacgccagccugagaagccugguggccagcagcggcacccuggaguucaccaacgagaacuucaacuggaccggcguggcccaggacggcaagagcuacgccugcaagagaggcagcgugaacagcuucuucagcagacugaacuggcugcacaagcuggaguacaaguaccccgcccugaacgugaccaugcccaacaacggcaaguucgacaagcuguacaucuggggcgugcaccaccccagcaccgacagcgaccagaccagccuguacgugagagccagcggcaaggugaccgugagcaccaagagaagccagcagaccgugauccccgacaucggcuacagacccugggugagaggccugagcagcagaaucagcaucuacuggaccaucgugaagcccggcgacauccugcugaucaacagcaccggcaaccugaucgcccccagaggcuacuucaagaucagaaacggcaagagcagcaucaugagaagcgacgcccccaucggcaacugcagcagcgagugcaucacccccaacggcagcauccccaacgacaagcccuuccagaacgugaacagaaucaccuacggcgccugccccagauacgugaagcagaacacccugaagcuggccaccggcaugagaaacgugcccgagaagcagaccagaggcaucuucggcgccaucgccggcuucaucgagaacggcugggagggcaugguggacggcugguacggcuucagacaccagaacagcgagggcaccggccaggccgccgaccugaagagcacccaggccgccaucgaccagaucaacggcaagcugaacagacugguggagaagaccaacgagaaguuccaccagaucgagaaggaguucagcgagguggagggcagaauccaggaccuggagaaguacguggaggacaccaagaucgaccuguggagcuacaacgccgagcugcugguggcccuggagaaccagcacaccaucgaccugaccgacagcgagaugaacaagcuguucgagagaaccagaaagcagcugagagagaacgccgaggacaugggcaacggcugcuucaagaucuaccacaagugcgacaacgccugcaucggcagcaucagaaacggcaccuacgaccacgacguguacagagacgaggcccugaacaacagauuccagaucaagggcguggagcugaagagcggcuacaaggacuggauccuguggaucagcuucgccaucagcugcuuccugcugugcguggugcugcugggcuucaucaugugggccugccagaagggcaacaucagaugcaacaucugcaucuga

SEQ ID NO: 161031 - RNA, 1701 nt, Artificial Sequence
  derived and/or modified CDS sequence (opt4) from hemagglutinin__InfluenzaA__ABG26901
augaagaccaucaucgcccugagcuacauccugugccugguguucgcccagaagcugcccggcaacgacaacagcaccgccacccugugccugggccaccacgccgugcccaacggcacccuggugaagaccaucaccaacgaccagaucgaggugaccaacgccaccgagcuggugcagaacagccccaccggcagaaucugcgacagcccccacagaauccuggacggcaagaacugcacccugaucgacgcccugcugggcgacccccacugcgacggcuuccagaacaaggagugggaccuguucguggagagaagcaaggccuacagcaacugcuaccccuacgacgugcccgacuacgccagccugagaagccugguggccagcagcggcacccuggaguucaccaacgagaacuucaacuggaccggcguggcccaggacggcaagagcuacagcugcaagagaggcagcgugaacagcuucuucagcagacugaacuggcugcacaagagcgaguacaaguaccccgcccugaacgugaccaugcccaacaacggcaaguucgacaagcuguacaucuggggcgugcaccaccccagcaccgacagcgaccagaccagccuguacgugagagccagcggcaaggugaccgugagcaccaagagaagccagcagaccgugauccccgacaucggcuacagacccugggugagaggccugagcagcagaaucagcaucuacuggaccaucgugaagcccggcgacauccugcugaucaacagcaccggcaaccugaucgcccccagaggcuacuucaagaucagaaacggcaagagcagcaucaugagaagcgacgcccccaucggcaacugcagcagcgagugcaucacccccaacggcagcauccccaacgacaagcccuuccagaacgugaacagaaucaccuacggcgccugccccagauacgugaagcagaacacccugaagcuggccaccggcaugagaaacgugcccgagaagcagaccagaggcaucuucggcgccaucgccggcuucaucgagaacggcugggagggcaugguggacggcugguacggcuucagacaccagaacagcgagggcaccggccaggccgccgaccugaagagcacccaggccgccaucgaccagaucaacggcaagcugaacagacugguggagaagaccaacgagaaguuccaccagaucgagaaggaguucagcgagguggagggcagaauccaggaccuggagaaguacguggaggacaccaagaucgaccuguggagcuacaacgccgagcugcugguggcccuggagaaccagcacaccaucgaccugaccgacagcgagaugaacaagcuguucgagagaaccagaaagcagcugagagagaacgccgaggacaugggcaacggcugcuucaagaucuaccacaagugcgacaacgccugcaucggcagcaucagaaacggcaccuacgaccacgacguguacagagacgaggcccugaacaacagauuccagaucaagggcguggagcugaagagcggcuacaaggacuggauccuguggaucagcuucgccaucagcugcuuccugcugugcguggugcugcugggcuucaucaugugggccugccagaagggcaacaucagaugcaacaucugcaucuga

SEQ ID NO: 161032 - RNA, 1701 nt, Artificial Sequence
  derived and/or modified CDS sequence (opt4) from hemagglutinin__InfluenzaA__ABG26912
augaagaccaucaucgcccugagcuacauccugugccugguguucgcccagaagcugcccggcaacgacaacagcaccgccacccugugccugggccaccacgccgugcccaacggcacccuggugaagaccaucaccaacgaccagaucgaggugaccaacgccaccgagcuggugcagagcagcagcaccggcagaaucugcgacagcccccacagaauccuggacggcaagaacugcacccugaucgacgcccugcugggcgacccccacugcgacggcuuccagaacaaggagugggaccuguucguggagagaagcaaggccuacagcaacugcuaccccuacgacgugcccgacuacgccagccugagaagccugguggccagcagcggcacccuggaguucaccaaggagggcuucaacuggaccggcguggcccaggacggcaagagcuacgccugcaagagaggcagcgugaacagcuucuucagcagacugaacuggcugcacaagcuggaguacaaguaccccgcccugaacgugaccaugcccaacaacgacaaguucgacaagcuguacaucuggggcgugcaccaccccagcaccgacagcgaccagaccagccuguacgugcaggccagcggcagagugaccgugagcaccaagagaagccagcagaccgugauccccaacaucggcagcagacccugggugagaggcaucagcagcagaaucagcaucuacuggaccaucgugaagcccggcgacauccugcugaucaacagcaccggcaaccugaucgcccccagaggcuacuucaagaucagaaacggcaagagcagcaucaugagaagcgacgcccccaucagcaacugcaacagcgagugcaucacccccaacggcagcauccccaacgacaagcccuuccagaacgugaacagaaucaccuacggcgccugccccagauacgugaagcagaacacccugaagcuggccaccggcaugagaaacgugcccgagaagcagaccagaggcaucuucggcgccaucgccggcuucaucgagaacggcugggagggcaugguggacggcugguacggcuucagacaccagaacagcgagggcaccggccaggccgccgaccugaagagcacccaggccgccaucgaccagaucaacggcaagcugaacagacugaucgagaagaccaacgagaaguuccaccagaucgagaaggaguucagcgagguggagggcagaauccaggaccuggagaaguacguggaggacaccaagaucgaccuguggagcuacaacgccgagcugcugguggcccuggagaaccagcacaccaucgaccugaccgacagcgagaugaacaagcuguucgagagaaccagaaagcagcugagagagaacgccgaggacaugggcaacggcugcuucaagaucuaccacaagugcgacaacgccugcaucggcagcaucagaaacggcaccuacgaccacgacguguacagagacgaggcccugaacaacagauuccagaucaagggcguggagcugaagagcggcuacaaggacuggauccuguggaucagcuucgccaucagcugcuuccugcugugcguggugcugcugggcuucaucaugugggccugccagaagggcaacaucagaugcaacaucugcaucuga

SEQ ID NO: 161033 - RNA, 1698 nt, Artificial Sequence
  derived and/or modified CDS sequence (opt4) from hemagglutinin__InfluenzaA__ABG26945
augaaggccaagcugcuggugcugcugugcaccuucaccgccaccuacgccgacaccaucugcaucggcuaccacgccaacaacagcaccgacaccguggacaccgugcuggagaagaacgugaccgugacccacagcgugaaccugcuggaggacagccacaacggcaagcugugccugcugaagggcaucgccccccugcagcugggcaacugcagcguggccggcuggauccugggcaaccccgagugcgagcugcugaucagcaaggagagcuggagcuacaucguggagacccccaaccccgagaacggcaccugcuaccccggcuacuucgccgacuacgaggagcugagagagcagcugagcagcgugagcagcuucgagagauucgagaucuuccccaagggcagcagcuggcccaaccacaccgugaccggcgugagcgccagcugcagccacaacggcaagagcagcuucuacagaaaccugcuguggcugaccggcaagaacggccuguaccccaaccugagcaugagcuacgugaacaacaaggagaaggaggugcuggugcuguggggcgugcaccacccccccaacaucggcaaccagagagcccuguaccacaccgagaacgccuacgugagcguggugagcagccacuacagcagaagauucacccccgagaucgccaagagacccaaggugagagaccaggagggcagaaucaacuacuacuggacccugcuggagcccggcgacaccaucaucuucgaggccagcggcaaccugaucgcccccugguacgccuucgcccugagcagaggcuucggcagcggcaucaucaccagcaacgcccccaugggcgagugcgacgccaagugccagaccccccagggcgccaucaacagcagccugcccuuccagaacgugcaccccgugaccaucggcgagugccccaaguacgugagaagcgccaagcugagaauggugaccggccugagaaacauccccagcauccagagcagaggccuguucggcgccaucgccggcuucaucgagggcggcuggaccggcaugguggacggcugguacggcuaccaccaccagaacgagcagggcagcggcuacgccgccgaccagaagagcacccagaacgccaucaacggcaucaccaacaaggugaacagcgugaucgagaagaugaacacccaguucaccgccgugggcaaggaguucaacaagcuggagagaagaauggagaaccugaacaagaagguggacgacggcuuccuggacaucuggaccuacaacgccgagcugcuggugcugcuggagaacgagagaacccuggacuuccacgacagcaacgugaagaaccuguacgagaaggugaagagccagcugaagaacaacgccaaggagaucggcaacggcugcuucgaguucuaccacaagugcaacaacgagugcauggagagcgugaagaacggcaccuacgacuaccccaaguacagcgaggagagcaagcugaacagagagaagaucgacggcgugaagcuggagagcaugggcguguaccagauccuggccaucuacagcaccguggccagcagccuggugcugcuggugagccugggcgccaucagcuucuggaugugcagcaacggcagccugcagugcagaaucugcaucuga

SEQ ID NO: 161034 - RNA, 1701 nt, Artificial Sequence
  derived and/or modified CDS sequence (opt4) from hemagglutinin__InfluenzaA__ABG26956
augaagaccaucaucgcccugagcuacauccugugccugguguucgcccagaagcugcccggcaacgacaacagaaccgccacccugugccugggccaccacgccgugcccaacggcacccuggugaagaccaucaccaacgaccagaucgaggugaccaacgccaccgagcuggugcagagcagcagcaccggcagaaucugcgacagcccccaccagauccuggacggcgagaacugcacccugaucgacgcccugcugggcgacccccacugcgacggcuuccagaacaaggagugggaccuguucguggagagaagcaaggccuacagcaacugcuaccccuacgacgugcccgacuacgugagccugagaagccugguggccagcagcggcacccuggaguucaacaacgagagcuucaacuggaccggcguggcccagaacggcaccagcagcgccugcaagagaagaagcgacaagagcuucuucagcaagcugaacuggcugcaccagcugaaguacaaguaccccgcccugaacgugaccaugcccaacaacgagaaguucgacaagcuguacaucuggggcgugcaccaccccggcaccgacagcgaccagaucagccuguacgcccaggccagcggcagagugaccgugagcaccaagagaagccagcagaccgugauccccaacaucggcagcagacccugggugagaggcgugagcagcagaaucagcaucuacuggaccaucgugaagcccggcgacauccugcugaucaacagcaccggcaaccugaucgcccccagaggcuacuucaagaucagaagcggcaagagcagcaucaugagaagcgacgcccccaucggcaagugcaacagcgagugcaucacccccaacggcagcauccccaacgacaagcccuuccagaacgugaacagaaucaccuacggcgccugccccagauacgugaagcagaacacccugaagcuggccaccggcaugagaaacgugcccgagaagcagaccagaggcaucuucggcgccaucgccggcuucaucgagaacggcugggagggcaugauggacggcugguacggcuucagacaccagaacagcgagggcaccggccaggccgccgaccugaagagcacccaggccgccaucaaccagaucaacggcaagcugaacagacugaucgagaagaccaacgagaaguuccaccagaucgagaaggaguucagcgagguggagggcagaauccaggaccuggagaaguacguggaggacaccaagaucgaccuguggagcuacaacgccgagcugcugguggcccuggagaaccagcacaccaucgaccugaccgacagcgagaugaacaagcuguucgagagaaccaagaagcagcugagagagaacgccgaggacaugggcaacggcugcuucaagaucuaccacaagugcgacaacgccugcaucggcagcaucagaaacggcaccuacgaccacgacguguacagagacgaggcccugaacaacagauuccagaucaagggcguggagcugaagagcggcuacaaggacugggugcuguggaucagcuucgccaucagcugcuuccugcugugcaucgugcugcugggcuucaucaugugggccugccagaagggcaacaucagaugcaacaucugcaucuga

SEQ ID NO: 161035 - RNA, 1698 nt, Artificial Sequence
  derived and/or modified CDS sequence (opt4) from hemagglutinin__InfluenzaA__ABG37120
augaaggccaagcugcuggugcugcugugcaccuucaccgccaccuacgccgacaccaucugcaucggcuaccacgccaacaacagcaccgacaccguggacaccgugcuggagaagaacgugaccgugacccacagcgugaaccugcuggaggacagccacaacggcaagcugugccugcugaagggcaucgccccccugcagcugggcaacugcagcguggccggcuggauccugggcaaccccgagugcgagcugcugaucagcaaggagagcuggagcuacaucguggagacccccaaccccgagaacggcaccugcuaccccggcuacuucgccgacuacgaggagcugagagagcagcugagcagcgugagcagcuucgagagauucgagaucuuccccaagggcagcagcuggcccaaccacaccgugaccggcgugagcgccagcugcagccacaacggcgagagcagcuucuacagaaaccugcuguggcugaccggcaagaacggccuguaccccaaccugagcaugagcuacgugaacaacaaggagaaggaggugcuggugcuguggggcgugcaccacccccccaacaucggcaaccagagagcccuguaccacaccgagaacgccuacgugagcguggugagcagccacuacagcagaagauucacccccgagaucgccaagagacccaaggugagagaccaggagggcagaaucaacuacuacuggacccugcuggagcccggcgacaccaucaucuucgaggccaacggcaaccugaucgcccccugguacgccuucgcccugagcagaggcuucggcagcggcaucaucaccagcaacgcccccaugggcgagugcgacgccaagugccagaccccccagggcgccaucaacagcagccugcccuuccagaacgugcaccccgugaccaucggcgagugccccaaguacgugagaagcgccaagcugagaauggugaccggccugagaaacauccccagcauccagagcagaggccuguucggcgccaucgccggcuucaucgagggcggcuggaccggcaugguggacggcugguacggcuaccaccaccagaacgagcagggcagcggcuacgccgccgaccagaagagcacccagaacgccaucaacggcaucaccaacaaggugaacagcgugaucgagaagaugaacacccaguucaccgccgugggcaaggaguucaacaagcuggagagaagaauggagaaccugaacaagaagguggacgacggcuuccuggacaucuggaccuacaacgccgagcugcuggugcugcuggagaacgagagaacccuggacuuccacgacagcaacgugaagaaccuguacgagaaggugaagagccagcugaagaacaacgccaaggagaucggcaacggcugcuucgaguucuaccacaagugcaacaacgagugcauggagagcgugaagaacggcaccuacgacuaccccaaguacagcgaggagagcaagcugaacagagagaagaucgacggcgugaagcuggagagcaugggcguguaccagauccuggccaucuacagcaccguggccagcagccuggugcugcuggugagccugggcgccaucagcuucuggaugugcagcaacggcagccugcagugcagaaucugcaucuga

SEQ ID NO: 161036 - RNA, 1701 nt, Artificial Sequence
  derived and/or modified CDS sequence (opt4) from hemagglutinin__InfluenzaA__ABG37131
augaagaccaucaucgcccugagcuacaucagcugccugguguucgcccagaagcugcccggcaacgacaacagcaccgccacccugugccugggccaccacgccgugcccaacggcacccuggugaagaccaucaccaacgaccagaucgaggugaccaacgccaccgagcuggugcagagcagcagcaccggcagaaucugcgacggcccccaccagauccuggacggcaagaacugcacccugaucgacgcccugcugggcgacccccacugcgacggcuuccagaacaaggagugggaccuguucguggagagaagcaaggccuacagcaacugcuaccccuacgacgugcccgacuacgccagccugagaagccugguggccagcagcggcacccuggaguucaccaacgagagcuucaacuggaccggcguggcccagaacggcaccagcuacgccugcaagagaggcagcgugaagagcuucuucagcagacugaacuggcugcacaagcuggaguacaaguaccccgcccugaacgugaccaugcccaacaacgacaaguucgacaagcuguacaucuggggcgugcaccaccccagcaccgacagcgaccagaccagccuguacgugcagagcagcggcagagugaccgugagcaccaagagaagccagcagaccgugacccccaacaucggcagcagacccugggugagaggcaucagcagcagaaucagcaucuacuggaccaucgugaagcccggcgacauccugcugaucaacagcaccggcaaccugaucgcccccagaggcuacuucaagaucagaagaggcaagagcagcaucaugagaagcgacgcccccaucgacaacugcaacagcgagugcaucacccccaacggcagcauccccaacgacaagcccuuccagaacgugaacagaaucaccuacggcgccugccccagauacgugaagcagaacacccugaagcuggccaccggcaugagaaacgugcccgagaagcagaccagaggcaucuucggcgccaucgccggcuucaucgagaacggcugggagggcaugguggacggcugguacggcuucagacaccagaacagcgagggcaccggccaggccgccgaccugaagagcacccaggccgccaucaaccagaucaacggcaagcugaacagacugaucgagaagaccaacgagaaguuccaccagaucgagaaggaguucagcgagguggagggcagaauccaggaccuggagaaguacguggaggacaccaagaucgaccuguggagcuacaacgccgagcugcugguggcccuggagaaccagcacaccaucgaccugaccgacagcgagaugaacaagcuguucgagagaaccagaaagcagcugagagagaacgccgaggacaugggcaacggcugcuucaagaucuaccacaagugcgacaacgccugcaucggcagcaucagaaacggcaccuacgaccacgacguguacagagacgaggcccugaacaacagauuccagaucaagggcguggagcugaagagcggcuacaaggacuggauccuguggaucagcuucgccaucagcugcuuccugcugugcguggugcugcugggcuucaucaugugggccugccagaagggcaacaucagaugcaacaucugcaucuga

SEQ ID NO: 161037 - RNA, 1701 nt, Artificial Sequence; identical to SEQ ID NO: 160843
  derived and/or modified CDS sequence (opt4) from hemagglutinin__InfluenzaA__ABG37142

SEQ ID NO: 161038 - RNA, 1701 nt, Artificial Sequence
  derived and/or modified CDS sequence (opt4) from hemagglutinin__InfluenzaA__ABG37164
augaagaccaucaucgcccugagcuacauccugugccugguguucgcccagaagcugcccggcaacgacaacagcaccgccacccugugccugggccaccacgccgugcccaacggcacccuggugaagaccaucaccaacgaccagaucgaggugaccaacgccaccgagcuggugcagagcagcagcaccggcagaaucugcgacagcccccacagaauccuggacggcaagaacugcacccugaucgacgcccugcugggcgacccccacugcgacgacuuccagaacaaggagugggaccuguucguggagagaagcaaggccuacagcaacugcuaccccuacgacgugcccgacuacgccagccugagaagccugguggccagcagcggcacccuggaguucaccaaggagggcuucaacuggaccggcguggcccaggacggcaagagcuacgccugcaagagaggcagcgugaacagcuucuucagcagacugaacuggcugcacaagcuggaguacaaguaccccgcccugaacgugaccaugcccaacaacgacaaguucgacaagcuguacaucuggggcgugcaccaccccagcaccgacagcgaccagaccagccuguacgugcaggccagcggcagagugaccgugagcaccaagagaagccagcagaccgugauccccaacaucggcagcagacccugggugagaggcaucagcagcagaaucagcaucuacuggaccaucgugaagcccggcgacauccugcugaucaacagcaccggcaaccugaucgcccccagaggcuacuucaagaucagaaacggcaagagcagcaucaugagaagcgacgcccccaucggcaacugcaacagcgagugcaucacccccaacggcagcauccccaacgacaagcccuuccagaacgugaacagaaucaccuacggcgccugccccagauacgugaagcagaacacccugaagcuggccaccggcaugagaaacgugcccgagaagcagaccagaggcaucuucggcgccaucgccggcuucaucgagaacggcugggagggcaugguggacggcugguacggcuucagacaccagaacagcgagggcaccggccaggccgccgaccugaagagcacccaggccgccaucgaccagaucaacggcaagcugaacagacugaucgagaagaccaacgagaaguuccaccagaucgagaaggaguucagcgagguggagggcagaauccaggaccuggagaaguacguggaggacaccaagaucgaccuguggagcuacaacgccgagcugcugguggcccuggagaaccagcacaccaucgaccugaccgacagcgagaugaacaagcuguucgagagaaccagaaagcagcugagagagaacgccgaggacaugggcaacggcugcuucaagaucuaccacaagugcgacaacgccugcaucggcagcaucagaaacggcaccuacgaccacgacguguacagagacgaggcccugaacaacagauuccagaucaagggcguggagcugaagagcggcuacaaggacuggauccuguggaucagcuucgccaucagcugcuuccugcugugcguggugcugcugggcuucaucaugugggccugccagaagggcaacaucagaugcaacaucugcaucuga

SEQ ID NO: 161039 - RNA, 1701 nt, Artificial Sequence
  derived and/or modified CDS sequence (opt4) from hemagglutinin__InfluenzaA__ABG37175
augaagaccaucaucgcccugagcuacauccugugccagguguucgccaagaagcugcccggcaacgacaacagcaccgccacccugugccugggccaccacgccgugcccaacggcacccuggugaagaccaucaccaacgaccagaucgaggugaccaacgccaccgagcuggugcagagcagcagcaccggcagaaucugcgacagcccccacagaauccuggacggcaagaacugcacccugaucgacgcccugcugggcgacccccacugcgacggcuuccagaacaaggagugggaccuguucguggagagaagcaaggccuacagcaacugcuaccccuacgacgugcccgacuacgccagccugagaagccugguggccagcagcggcacccuggaguucaccaacgagggcuucaacuggaccggcguggcccaggacggcaagagcuacagcugcaagagaggcagcgugaacagcuucuucagcagacugaacuggcugcacaagcuggaguacaaguaccccgcccugaacgugaccaugcccaacaacgacaaguucgacaagcuguacaucuggggcgugcaccaccccagcaccgacagcgaccagaccagccuguacgugcaggccagcggcagagugaccgugagcaccaagagaagccagcagaccgugauccccaacaucggcagcagacccugggugagaggcaucagcagcagaaucagcaucuacuggaccaucgugaagcccggcgacauccugcugaucaacagcaccggcaaccugaucgcccccagaggcuacuucaagaucagaaacggcaagagcagcaucaugagaagcgacgcccccaucgacaacugcaacagcgagugcaucacccccaacggcagcauccccaacgacaagcccuuccagaacgugaacagaaucaccuacggcgccugccccagauacgugaagcagaacacccugaagcuggccaccggcaugagaaacgugcccgagaagcagaccagaggcaucuucggcgccaucgccggcuucaucgagaacggcugggagggcaugguggacggcugguacggcuucagacaccagaacagcgagggcaccggccaggccgccgaccugaagagcacccaggccgccaucgaccagaucaacggcaagcugaacagacugaucgagaagaccaacgagaaguuccaccagaucgagaaggaguucagcgagguggagggcagaauccaggaccuggagaaguacguggaggacaccaagaucgaccuguggagcuacaacgccgagcugcugguggcccuggagaaccagcacaccaucgaccugaccgacagcgagaugaacaagcuguucgagagaaccagaaagcagcugagagagaacgccgaggacaugggcaacggcugcuucaagaucuaccacaagugcgacaacgccugcaucggcagcaucagaaacggcaccuacgaccacgacguguacagagacgaggcccugaacaacagauuccagaucaagggcguggagcugaagagcggcuacaaggacuggauccuguggaucagcuucgccaucagcugcuuccugcugugcguggugcugcugggcuucaucaugugggccugccagaagggcaacaucagaugcaacaucugcaucuga

SEQ ID NO: 161040 - RNA, 1701 nt, Artificial Sequence
  derived and/or modified CDS sequence (opt4) from hemagglutinin__InfluenzaA__ABG37186
augaagaccaucaucgcccugagcuacauccugugccagguguucgcccagaagcugcccggcaacgacaacagcaccgccacccugugccugggccaccacgccgugcccaacggcacccuggugaagaccaucaccaacgaccagaucgaggugaccaacgccaccgagcuggugcagagcagcagcaccggcagaaucugcgacagcccccacagaauccuggacggcaagaacugcacccugaucgacgcccugcugggcgacccccacugcgacggcuuccagaacaaggagugggaccuguucguggagagaagcaaggccuacagcaacugcuaccccuacgacgugcccgacuacgccagccugagaagccugguggccagcagcggcacccuggaguucaccaacgagggcuucaacuggaccggcguggcccaggacggcaagagcuacgccugcaagagaggcagcgugaacagcuucuucagcagacugaacuggcugcacaagcuggaguacaaguaccccgcccugaacgugaccaugcccaacaacgacaaguucgacaagcuguacaucuggggcgugcaccaccccagcaccgacagcgaccagaccagccuguacgugcaggccagcggcagagugaccgugagcaccaagagaagccagcagaccgugauccccaacaucggcagcagacccugggugagaggcaucagcagcagaaucagcaucuacuggaccaucgugaagcccggcgacauccugcugaucagcagcaccggcaaccugaucgcccccagaggcuacuucaagaucagaaacggcaagagcagcaucaugagaagcgacgcccccaucgacaacugcaacagcgagugcaucacccccaacggcagcauccccaacgacaagcccuuccagaacgugaacagagugaccuacggcgccugccccagauacgugaagcagaacacccugaagcuggccaccggcaugagaaacgugcccgagaagcagaccagaggcaucuucggcgccaucgccggcuucaucgagaacggcugggagggcaugguggacggcugguacggcuucagacaccagaacagcgagggcaccggccaggccgccgaccugaagagcacccaggccgccaucgaccagaucaacggcaagcugaacagacugaucgagaagaccaacgagaaguuccaccagaucgagaaggaguucagcgagguggagggcagaauccaggaccuggagaaguacguggaggacaccaagaucgaccuguggagcuacaacgccgagcugcugguggcccuggagaaccagcacaccaucgaccugaccgacagcgagaugaacaagcuguucgagagaaccagaaagcagcugagagagaacgccgaggacaugggcaacggcugcuucaagaucuaccacaagugcgacaacgccugcaucggcagcaucagaaacggcaccuacgaccacgacguguacaaggacgaggcccugaacaacagauuccagaucaagggcguggugcugaagagcggcuacaaggacuggauccuguggaucagcuucgccaucagcugcuuccugcugugcguggugcugcugggcuucaucaugugggccugccagaagggcaacaucagaugcaacaucugcaucuga

SEQ ID NO: 161041 - RNA, 1701 nt, Artificial Sequence
  derived and/or modified CDS sequence (opt4) from hemagglutinin__InfluenzaA__ABG37197
augaagaccaucaucgcccugagcuacauccugugccagguguucgcccagaagcugcccggcaacgacaacagcaccgccacccugugccugggccaccacgccgugcccaacggcacccuggugaagaccaucaccaacgaccagaucgaggugaccaacgccaccgagcuggugcagagcagcagcaccggcagaaucugcgacagcccccacagaauccuggacggcaagaacugcacccugaucgacgcccugcugggcgacccccacugcgacggcuuccagaacaaggagugggaccuguucguggagagaagcaaggccuacagcaacugcuaccccuacgacgugcccgacuacgccagccugagaagccugguggccagcagcggcacccuggaguucaccaacgagggcuucaacuggaacggcguggcccaggacggcaagagcuacgccugcaagagaggcagcgugaagagcuucuucagcagacugaacuggcugcacaagcuggaguacaaguaccccgcccugaacgugaccaugcccaacaacgacaaguucgacaagcuguacaucuggggcgugcaccaccccagcaccgacagcgaccagaccagccuguacgugcaggccagcggcagagugaccgugagcaccaagagaagccagcagaccgugauccccaacaucggcagcagacccugggugagaggcaucagcagcagaaucagcaucuacuggaccaucgugaagcccggcgacauccugcugaucaacagcaccggcaaccugaucgcccccagaggcuacuucaagaucagaaacggcaagagcagcaucaugagaagcgacgcccccaucgacaacugcaacagcgagugcaucacccccaacggcagcauccccaacgacaagcccuuccagaacgugaacagaaucaccuacggcgccugccccagauacgugaagcagaacacccugaagcuggccaccggcaugagaaacgugcccgagaagcagaccagaggcaucuucggcgccaucgccggcuucaucgagaacggcugggagggcaugguggacggcugguacggcuucagacaccagaacagcgagggcaccggccaggccgccgaccugaagagcacccaggccgccaucgaccagaucaacggcaagcugaacagacugaucgagaagaccaacgagaaguuccaccagaucgagaaggaguucagcgagguggagggcagaauccaggaccuggagaaguacguggaggacaccaagaucgaccuguggagcuacaacgccgagcugcugguggcccuggagaaccagcacaccaucgaccugaccgacagcgagaugaacaagcuguucgagagaaccagaaagcagcugagagagaacgccgaggacaugggcaacggcugcuucaagaucuaccacaagugcgacaacgccugcaucggcagcaucagaaacggcaccuacgaccacgacguguacagagacgaggcccugaacaacagauuccagaucaagggcguggagcugaagagcggcuacaaggacuggauccuguggaucagcuucgccaucagcugcuuccugcugugcguggugcugcugggcuucaucaugugggccugccagaagggcaacaucagaugcaacaucugcaucuga

SEQ ID NO: 161042 - RNA, 1701 nt, Artificial Sequence
  derived and/or modified CDS sequence (opt4) from hemagglutinin__InfluenzaA__ABG37208
augaagaccaucaucgcccugagcuacaucagcugccugguguucgcccagaagcugcccggcaacgacaacagcaccgccacccugugccugggccaccacgccgugcccaacggcacccuggugaagaccaucaccaacgaccagaucgaggugaccaacgccaccgagcuggugcagagcagcagcaccggcagaaucugcgacagcccccacagaauccuggacggcaagaacugcacccugaucgacgcccugcugggcgacccccacugcgacggcuuccagaacgagaagugggaccuguucguggagagaagcaaggccuucagcaacugcuaccccuacgacgugcccgacuacgccagccugagaagccugguggccagcagcggcacccuggaguucaucaacgagggcuucaacuggaccggcgugacccagagcggcggcagcuacgccugcaagagaggcagcgugaacagcuucuucagcagacugaacuggcuguacaagagcgagagcaaguaccccgcccugaacgugaccaugcccaacaacggcaaguucgacaagcuguacaucuggggcgugcaccaccccagcaccgacaaggagcagaccaaccuguacgugagagccagcggcagagugaccgugagcaccaagagaagccagcagaccgugauccccaacaucggccccagacccugggugagaggccugagcagcagaaucagcaucuacuggaccaucgugaagcccggcgacauccugcugaucaacagcaccggcaaccugaucgcccccagaggcuacuucaagaucagaaccggcaagagcagcaucaugagaagcgacgcccccaucggcaccugcagcagcggcugcaucacccccaacggcagcauccccaacgacaagcccuuccagaacgugaacaagaucaccuacggcgccugccccagauacgugaagcagaacacccugaagcuggccaccggcaugagaaacgugcccgagaagcagaccagaggcaucuucggcgccaucgccggcuucaucgagaacggcugggagggcaugguggacggcugguacggcuucagacaccagaacagcgagggcaccggccaggccgccgaccugaagagcacccaggccgccaucgaccagaucaacggcaagcugaacagacugaucgagaagaccaacgagaaguuccaccagaucgagaaggaguucagcgagguggagggcagaauccaggaccuggagaaguacguggaggacaccaagaucgaccuguggagcuacaacgccgagcugcugguggcccuggagaaccagcacaccaucgacaugaccgacagcgagaugaacaagcuguucgagaagaccagaaagcagcugagagagaacgccgaggacaugggcaacggcugcuucaagaucuaccacaagugcgacaacgccugcaucggcagcaucagaaacggcaccuacgaccacgacguguacagagacgaggcccugaacaacagauuccagaucaagggcguggagcugaagagcggcuacaaggacuggauccuguggaucagcuucgccaucagcugcuuccugcugugcguggugcugcugggcuucaucaugugggccugccagaagggcaacaucagaugcaacaucugcaucuga

SEQ ID NO: 161043 - RNA, 1701 nt, Artificial Sequence
  derived and/or modified CDS sequence (opt4) from hemagglutinin__InfluenzaA__ABG37230
augaagaccaucaucgcccugagcuacauccugugccugguguucgcccagaagcugcccggcaacgacaacagcaccgccacccugugccugggccaccacgccgugcccaacggcacccuggugaagaccaucaccaacgaccagaucgaggugaccaacgccaccgagcuggugcagagcagcagcaccggcagaaucugcgacagcccccacagaauccuggacggcaagaacugcacccugaucgacgcccugcugggcgacccccacugcgacggcuuccagaacaaggagugggaccuguucguggagagaagcaaggccuacagcaacugcuaccccuacgacgugcccgacuacgccagccugagaagccugguggccagcagcggcacccuggaguucaucaacgaggacuucaacuggaccggcguggcccaggacggcaagagcuacgccugcaagagaggcagcgugaacagcuucuucagcagacugaacuggcugcaccagagcaaguacaaguaccccgagcugaacgugaccaugcccaacaacggcaaguucgacaagcuguacaucuggggcgugcaccaccccagcaccgacagcgaccagaccagccuguacgccagagccagcggcagagugaccgugagcaccaagagaagccagcagaccgugauccccaacaucggcuucagacccugggugagaggccugagcagcagaaucagcaucuacuggaccaucgugaagcccggcgacauccugcugaucaacagcaccggcaaccugaucgcccccagaggcuacuucaagaucagaaacggcaagagcagcaucaugagaagcgacgcccccaucggcaacugcagcagcgagugcaucacccccaacggcagcauccccaacgacaagcccuuccagaacgugaacagaaucaccuacggcgccugccccagauacgugaagcagaacacccugaagcuggccaccggcaugagaaacgugcccgagaagcagaccagaggcaucuucggcgccaucgccggcuucaucgagaacggcugggagggcaugguggacggcugguacggcuucagacaccagaacagcgagggcaccggccaggccgccgaccugaagagcacccaggccgccaucgaccagaucaacggcaagcugaacagacugaucgagaagaccaacgagaaguuccaccagaucgagaaggaguucagcgagguggagggcagaauccaggaccuggagaaguacguggaggacaccaagaucgaccuguggagcuacaacgccggccugcugguggcccuggagaaccagcacaccaucgaccugaccgacagcgagaugaacaagcuguucgagagaaccagaaagcagcugagagagaacgccgaggacaugggcaacggcugcuucaagaucuaccacaagugcgacaacgccugcaucggcagcaucagaaacggcaccuacgaccacgacguguacagagacgaggcccugaacaacagauuccagaucaagggcguggagcugaagagcggcuacaaggacuggauccuguggaucagcuucgccaucagcugcuuccugcugugcguggugcugcugggcuucaucaugugggccugccagaagggcaacaucagaugcaacaucugcaucuga

SEQ ID NO: 161044 - RNA, 1701 nt, Artificial Sequence
  derived and/or modified CDS sequence (opt4) from hemagglutinin__InfluenzaA__ABG37241
augaagaccaucaucgcccugagcuacauccugugccugguguucgcccagaagcugcccggcaacgacaacagcaccgccacccugugccugggccaccacgccgugcccaacggcacccuggugaagaccaucaccaacgaccagaucgaggugaccaacgccaccgagcuggugcagagcagccccaccggcagaaucugcgacagcccccacagaauccuggacggcaagaacugcacccugaucgacgcccugcugggcgacccccacugcgacggcuuccagaacaaggagugggaccuguucguggagagaagcaaggccuacagcaacugcuaccccuacgacgugcccgacuacgccagccugagaagccugguggccagcagcggcacccuggaguucaccaacgagaacuucaacuggaccggcguggcccaggacggcaagagcuacgccugcaagagaggcagcgugaacagcuucuucagcagacugaacuggcugcacaagcuggaguacaaguaccccgcccugaacgugaccaugcccaacaacggcaaguucgacaagcuguacaucuggggcgugcaccaccccagcaccgacagcgaccagaccagccuguacgugagagccagcggcaaggugaccgugagcaccaagagaagccagcagaccgugauccccgacaucggcuacagacccugggugagaggccugagcagcagaaucagcaucuacuggaccaucgugaagcccggcgacauccugcugaucaacagcaccggcaaccugaucgcccccagaggcuacuucaagaucagaaacggcaagagcagcaucaugagaagcgacgcccccaucggcaacugcagcagcgagugcaucacccccaacggcagcauccccaacgacaagcccuuccagaacgugaacagaaucaccuacggcgccugccccagauacgugaagcagaacacccugaagcuggccaccggcaugagaaacgugcccgagaagcagaccagaggcaucuucggcgccaucgccggcuucaucgagaacggcugggagggcaugguggacggcugguacggcuucagacaccagaacagcgagggcaccggccaggccgccgaccugaagagcacccaggccgccaucgaccagaucaacggcaagcugaacagacugguggagaagaccaacgagaaguuccaccagaucgagaaggaguucagcgagguggagggcagaauccaggaccuggagaaguacguggaggacaccaagaucgaccuguggagcuacaacgccgagcugcugguggcccuggagaaccagcacaccaucgaccugaccgacagcgagaugaacaagcuguucgagagaaccagaaagcagcugagagagaacgccgaggacaugggcaacggcugcuucaagaucuaccacaagugcgacaacgccugcaucggcagcaucagaaacggcaccuacgaccacgacguguacagagacgaggcccugaacaacagauuccagaucaagggcguggagcugaagagcggcuacaaggacuggauccuguggaucagcuucgccaucagcugcuuccugcugugcguggugcugcugggcuucaucaugugggccugccagaagggcaacaucagaugcaacaucugcaucuga

SEQ ID NO: 161045 - RNA, 1701 nt, Artificial Sequence
  derived and/or modified CDS sequence (opt4) from hemagglutinin__InfluenzaA__ABG37252
augaagaccaucaucgcccugagcuacauccugugccugguguucgcccagaagcugaccggcaacgacaacagcaccgccacccugugccugggccaccacgccgugcccaacggcacccuggugaagaccaucaccaacgaccagaucgaggugaccaacgccaccgagcuggugcagagcagccccaccggcagaaucugcgacagcccccacagaauccuggacggcaagaacugcacccugaucgacgcccugcugggcgacccccacugcgacggcuuccagaacaaggagugggaccuguucguggagagaagcaaggccuacagcaacugcuaccccuacgacgugcccgacuacgccagccugagaagccugguggccagcagcggcacccuggaguucaccaacgagaacuucaacuggaccggcguggcccaggacggcaagagcuacgccugcaagagaggcagcgugaacagcuucuucagcagacugaacuggcugcacaagcuggaguacaaguaccccgcccugaacgugaccaugcccaacaacggcaaguucgacaagcuguacaucuggggcgugcaccaccccagcaccgacagcgaccagaccagccuguacgugagagccagcggcaaggugaccgugagcaccaagagaagccagcagaccgugauccccgacaucggcuacagacccugggugagaggccugagcagcagaaucagcaucuacuggaccaucgugaagcccggcgacauccugcugaucaacagcaccggcaaccugaucgcccccagaggcuacuucaagaucagaaacggcaagagcagcaucaugagaagcgacgcccccaucggcaacugcagcagcgagugcaucacccccaacggcagcauccccaacgacaagcccuuccagaacgugaacagaaucaccuacggcgccugccccagauacgugaagcagaacacccugaagcuggccaccggcaugagaaacgugcccgagaagcagaccagaggcaucuucggcgccaucgccggcuucaucgagaacggcugggagggcaugguggacggcugguacggcuucagacaccagaacagcgagggcaccggccaggccgccgaccugaagagcacccaggccgccaucgaccagaucaacggcaagcugaacagacugguggagaagaccaacgagaaguuccaccagaucgagaaggaguucagcgagguggagggcagaauccaggaccuggagaaguacguggaggacaccaagaucgaccuguggagcuacaacgccgagcugcugguggcccuggagaaccagcacaccaucgaccugaccgacagcgagaugaacaagcuguucgagagaaccagaaagcagcugagagagaacgccgaggacaugggcaacggcugcuucaagaucuaccacaagugcgacaacgccugcaucggcagcaucagaaacggcaccuacgaccacgacguguacagagacgaggcccugaacaacagauuccagaucaagggcguggagcugaagagcggcuacaaggacuggauccuguggaucagcuucgccaucagcugcuuccugcugugcguggugcugcugggcuucaucaugugggccugccagaagggcaacaucagaugcaacaucugcaucuga

SEQ ID NO: 161046 - RNA, 1701 nt, Artificial Sequence
  derived and/or modified CDS sequence (opt4) from hemagglutinin__InfluenzaA__ABG37263
augaagaccaucaucgcccugagcuacauccugugccugguguucgcccagaagcugcccggcaacgacaacagcaccgccacccugugccugggccaccacgccgugcccaacggcacccuggugaagaccaucaccaacgaccagaucgaggugaccaacgccaccgagcuggugcagagcagcagcaccggcagaaucugcgacagcccccacagaauccuggacggcaagaacugcacccugaucgacgcccugcugggcgacccccacugcgacggcuuccagaacaaggagugggaccuguucguggagagaagcaaggccuacagcaacugcuaccccuacgacgugcccgacuacgccagccugagaagccugguggccagcagcggcacccuggaguucaccaaggagggcuucaacuggaccggcguggcccaggacggcaagagcuacgccugcaagagaggcagcgugaacagcuucuucagcagacugaacuggcugcacaagcuggaguacaaguaccccgcccugaacgugaccaugcccaacaacgacaaguucgacaagcuguacaucuggggcgugcaccaccccagcaccgacagcgaccagaccagccuguacgugcaggccagcggcagagugaccgugagcaccaagagaagccagcagaccgugauccccaacaucggcagcagacccugggugagaggcaucagcagcagaaucagcaucuacuggaccaucgugaagcccggcgacauccugcugaucaacagcaccggcaaccugaucgcccccagaggcuacuucaagaucagaaacggcaagagcagcaucaugagaagcgacgcccccaucggcaacugcaacagcgagugcaucacccccaacggcagcauccccaacgacaagcccuuccagaacgugaacagaaucaccuacggcgccugccccagauacgugaagcagaacacccugaagcuggccaccggcaugagaaacgugcccgagaagcagaccagaggcaucuucggcgccaucgccggcuucaucgagaacggcugggagggcaugguggacggcugguacggcuucagacaccagaacagcgagggcaccggccaggccgccgaccugaagagcacccaggccgccaucgaccagaucaacggcaagcugaacagacugaucgagaagaccaacgagaaguuccaccagaucgagaaggaguucagcgagguggagggcagaauccaggaccuggagaaguacguggaggacaccaagaucgaccuguggagcuacaacgccgagcugcugguggcccuggagaaccagcacaccaucgaccugaccgacagcgagaugaacaagcuguucgagagaaccagaaagcagcugagagagaacgccgaggacaugggcaacggcugcuucaagaucuaccacaagugcgacaacaccugcaucggcagcaucagaaacggcaccuacgaccacgacguguacagagacgaggcccugaacaacagauuccagaucaagggcguggagcugaagagcggcuacaaggacuggauccuguggaucagcuucgccaucagcugcuuccugcugugcguggugcugcugggcuucaucaugugggccugccagaagggcaacaucagaugcaacaucugcaucuga

SEQ ID NO: 161047 - RNA, 1701 nt, Artificial Sequence
  derived and/or modified CDS sequence (opt4) from hemagglutinin__InfluenzaA__ABG37274
augaagaccaucaucgcccugagcuacauccugugccugguguucgcccagaagcugcccggcaacgacaacagcaccgccacccugugccugggccaccacgccgugcccaacggcacccuggugaagaccaucaccaacgaccagaucgaggugaccaacgccaccgagcuggugcagagcagccccaccggcagaaucugcgacagcccccacagaauccuggacggcaagaacugcacccugaucgacgcccugcugggcgacccccacugcgacggcuuccagaacaaggagugggaccuguucguggagagaagcaaggccuacagcaacugcuaccccuacgacgugcccgacuacgccagccugagaagccugguggccagcagcggcacccuggaguucaccaacgagaacuucaacuggaccggcguggcccaggacggcaagagcuacgccugcaagagaggcagcgugaacagcuucuucagcagacugaacuggcugcacaagcuggaguacaaguaccccgcccugaacgugaccaugcccaacaacggcaaguucgacaagcuguacaucuggggcgugcaccaccccagcaccgacagcgaccagaucagccuguacgugagagccagcggcaaggugaccgugagcaccaagagaagccagcagaccgugauccccgacaucggcuacagacccugggugagaggccugagcagcagaaucagcaucuacuggaccaucgugaagcccggcgacauccugcugaucagcagcaccggcaaccugaucgcccccagaggcuacuucaagaucagaaacggcaagagcagcaucaugagaagcgacgcccccaucggcaacugcagcagcgagugcaucacccccaacggcagcauccccaacgacaagcccuuccagaacgugaacagaaucaccuacggcgccugccccagauacgugaagcagaacacccugaagcuggccaccggcaugagaaacgugcccgagaagcagaccagaggcaucuucggcgccaucgccggcuucaucgagaacggcugggagggcaugguggacggcugguacggcuucagacaccagaacagcgagggcaccggccaggccgccgaccugaagagcacccaggccgccaucgaccagaucaacggcaagcugaacagacugguggagaagaccaacgagaaguuccaccagaucgagaaggaguucagcgagguggagggcagaauccaggaccuggagaaguacguggaggacaccaagaucgaccuguggagcuacaacgccgagcugcugguggcccuggagaaccagcacaccaucgaccugaccgacagcgagaugaacaagcuguucgagagaaccagaaagcagcugagagagaacgccgaggacaugggcaacggcugcuucaagaucuaccacaagugcgacaacgccugcaucggcagcaucagaaacggcaccuacgaccacgacguguacagagacgaggcccugaacaacagauuccagaucaagggcguggagcugaagagcggcuacaaggacuggauccuguggaucagcuucgccaucagcugcuuccugcugugcguggugcugcugggcuucaucaugugggccugccagaagggcaacaucagaugcaacaucugcaucuga

SEQ ID NO: 161048 - RNA, 1701 nt, Artificial Sequence
  derived and/or modified CDS sequence (opt4) from hemagglutinin__InfluenzaA__ABG37285
augaagaccaucaucgcccugagcuacauccugugccugguguucgcccagaagcugcccggcaacgacaacagcaccgccacccugugccugggccaccacgccgugcccaacggcacccuggugaagaccaucaccaacgaccagaucgaggugaccaacgccaccgagcuggugcagagcagccccaccggcagaaucugcgacagcccccacagaauccuggacggcaagaacugcacccugaucgacgcccugcugggcgacccccacugcgacggcuuccagaacaaggagugggaccuguucguggagagaagcaaggccuacagcaacugcuaccccuacgacgugcccgacuacgccagccugagaagccugguggccagcagcggcacccuggaguucaccaacgagaacuucaacuggaccggcguggcccaggacggcaagagcuacgccugcaagagaggcagcgugaacagcuucuucagcagacugaacuggcugcacaagcuggacuacaaguaccccgcccugaacgugaccaugcccaacaacggcaaguucgacaagcuguacaucuggggcgugcaccaccccagcaccgacagcgaccagaccagccuguacgugagagccagcggcaaggugaccgugagcaccaagagaagccagcagaccgugauccccgacaucggcuacagacccugggugagaggccugagcagcagaaucagcaucuacuggaccaucgugaagcccggcgacauccugcugaucaacagcaccggcaaccugaucgcccccagaggcuacuucaagaucagaaacggcaagagcagcaucaugagaagcgacgcccccaucggcaacugcagcagcgagugcaucacccccaacggcagcauccccaacgacaagcccuuccagaacgugaacagaaucaccuacggcgccugccccagauacgugaagcagaacacccugaagcuggccaccggcaugagaaacgugcccgagaagcagaccagaggcaucuucggcgccaucgccggcuucaucgagaacggcugggagggcaugguggacggcugguacggcuucagacaccagaacagcgagggcaccggccaggccgccgaccugaagagcacccaggccgccaucgaccagaucaacggcaagcugaacagacugguggagaagaccaacgagaaguuccaccagaucgagaaggaguucagcgagguggagggcagaauccaggaccuggagaaguacguggaggacaccaagaucgaccuguggagcuacaacgccgagcugcugguggcccuggagaaccagcacaccaucgaccugaccgacagcgagaugaacaagcuguucgagagaaccagaaagcagcugagagagaacgccgaggacaugggcaacggcugcuucaagaucuaccacaagugcgacaacgccugcaucggcagcaucagaaacggcaccuacgaccacgacguguacagagacgaggcccugaacaacagauuccagaucaagggcguggagcugaagagcggcuacaaggacuggauccuguggaucagcuucgccaucagcugcuuccugcugugcuucgugcugcugggcuucaucaugugggccugccagaagggcaacaucagaugcaacaucugcaucuga

SEQ ID NO: 161049 - RNA, 1701 nt, Artificial Sequence
  derived and/or modified CDS sequence (opt4) from hemagglutinin__InfluenzaA__ABG37296
augaagaccaucaucgcccugagcuacauccugugccugguguucgcccagaagcugcccggcaacgacaacagcaccgccacccugugccugggccaccacgccgugcccaacggcacccuggugaagaccaucaccaacgaccagaucgaggugaccaacgccaccgagcuggugcagagcagcagcaccggcagaaucugcgacagcccccacagaauccuggacggcaagaacugcacccugaucgacgcccugcugggcgacccccacugcgacggcuuccagaacaaggagugggaccuguucguggagagaagcaaggccuacagcaacugcuaccccuacgacgugcccgacuacgccagccugagaagccugguggccagcagcggcacccuggaguucaccaaggagggcuucaacuggaccggcguggcccaggacggcaagagcuacgccugcaagagaggcagcgugaacagcuucuucagcagacugaacuggcugcacaagcuggaguacaaguaccccgcccugaacgugaccaugcccaacaacgacaaguucgacaagcuguacaucuggggcgugcaccaccccagcaccgacagcgaccagaccagccuguacgugcaggccagcggcagagugaccgugagcaccaagagaagccagcagaccgugauccccaacaucggcagcagacccugggugagaggcaucagcagcagaaucagcaucuacuggaccaucgugaagcccggcgacauccugcugaucaacagcaccggcaaccugaucgcccccagaggcuacuucaagaucagaaacggcaagagcagcaucaugagaagcgacgcccccaucggcaacugcaacagcgagugcaucacccccaacggcagcauccccaacgacaagcccuuccagaacgugaacagaaucaccuacggcgccugccccagauacgugaagcagaacacccugaagcuggccaccggcaugagaaacgugcccgagaagcagaccagaggcaucuucggcgccaucgccggcuucaucgagaacggcugggagggcaugguggacggcugguacggcuucagacaccagaacagcgagggcaccggccaggccgccgaccugaagagcacccaggccgccaucgaccagaucaacggcaagcugaacagacugaucgagaagaccaacgagaaguuccaccagaucgagaaggaguucagcgagguggagggcagaauccaggaccuggagaaguacguggaggacaccaagaucgaccuguggagcuacaacgccgagcugcugguggcccuggagaaccagcacaccaucgaccugaccgacagcgagaugaacaagcuguucgagagaaccagaaagcagcugagagagaacgccgaggacaugggcaacggcugcuucaagaucuaccacaagugcgacaacgccugcaucggcagcaucagaaacggcaccuacgaccacgacguguacagagacgaggcccugaacaacagauuccagaucaagggcguggagcugaagagcggcuacaaggacuggauccuguggaucagcuucgccaucagcugcuuccugcugugcguggugcugcugggcuucaucaugugggccugccagaagggcaacaucagaugcaacaucugcaucuga

SEQ ID NO: 161050 - RNA, 1701 nt, Artificial Sequence; identical to SEQ ID NO: 161044
  derived and/or modified CDS sequence (opt4) from hemagglutinin__InfluenzaA__ABG37307

SEQ ID NO: 161051 - RNA, 1701 nt, Artificial Sequence; identical to SEQ ID NO: 161049
  derived and/or modified CDS sequence (opt4) from hemagglutinin__InfluenzaA__ABG37318

SEQ ID NO: 161052 - RNA, 1701 nt, Artificial Sequence
  derived and/or modified CDS sequence (opt4) from hemagglutinin__InfluenzaA__ABG37329
augaagaccaucaucgcccugagcuacauccugugccugguguucgcccagaagcugcccgagaacgacaacagcaccgccacccugugccugggccaccacgccgugcccaacggcacccuggugaagaccaucaccaacgaccagaucgaggugaccaacgccaccgagcuggugcagagcagccccaccggcagaaucugcgacagcccccacagaauccuggacggcaagaacugcacccugaucgacgcccugcugggcgacccccacugcgacggcuuccagaacaaggagugggaccuguucguggagagaagcaaggccuacagcaacugcuaccccuacgacgugcccgacuacgccagccugagaagccugguggccagcagcggcacccuggaguucaccaacgagaacuucaacuggaccggcguggcccaggacggcaagagcuacgccugcaagagaggcagcgugaacagcuucuucagcagacugaacuggcugcacaagcuggaguacaaguaccccgcccugaacgugaccaugcccaacaacggcaaguucgacaagcuguacaucuggggcgugcaccaccccagcaccgacagcgaccagaccagccuguacgugagagccagcggcaaggugaccgugagcaccaagagaagccagcagaccgugauccccgacaucggcuacagacccugggugagaggccugagcagcagaaucagcaucuacuggaccaucgugaagcccggcgacauccugcugaucaacagcaccggcaaccugaucgcccccagaggcuacuucaagaucagaaacggcaagagcagcaucaugagaagcgacgcccccaucggcaacugcagcagcgagugcaucacccccaacggcagcauccccaacgacaagcccuuccagaacgugaacagaaucaccuacggcgccugccccagauacgugaagcagaacacccugaagcuggccaccggcaugagaaacgugcccgagaagcagaccagaggcaucuucggcgccaucgccggcuucaucgagaacggcugggagggcaugguggacggcugguacggcuucagacaccagaacagcgagggcaccggccaggccgccgaccugaagagcacccaggccgccaucgaccagaucaacggcaagcugaacagacugguggagaagaccaacgagaaguuccaccagaucgagaaggaguucagcgagguggagggcagaauccaggaccuggagaaguacguggaggacaccaagaucgaccuguggagcuacaacgccgagcugcugguggcccuggagaaccagcacaccaucgaccugaccgacagcgagaugaacaagcuguucgagagaaccagaaagcagcugagagagaacgccgaggacaugggcaacggcugcuucaagaucuaccacaagugcgacaacgccugcaucggcagcaucagaaacggcaccuacgaccacgacguguacagagacgaggcccugaacaacagauuccagaucaagggcguggagcugaagagcggcuacaaggacuggauccuguggaucagcuucgccaucagcugcuuccugcugugcguggugcugcugggcuucaucaugugggccugccagaagggcaacaucagaugcaacaucugcaucuga

SEQ ID NO: 161053 - RNA, 1701 nt, Artificial Sequence
  derived and/or modified CDS sequence (opt4) from hemagglutinin__InfluenzaA__ABG37340
augaagaccaucaucgcccugagcuacauccugugccugguguucgcccagaagcugcccggcaacgacaacagcaccgccacccugugccugggccaccacgccgugcccaacggcacccuggugaagaccaucaccaacgaccagaucgaggugaccaacgccaccgagcuggugcagagcuuccccaccggcagaaucugcgacagcccccacagaauccuggacggcaagaacugcacccugaucgacgcccugcugggcgacccccacugcgacggcuuccagaacaaggagugggaccuguucguggagagaagcaaggccuacagcaacugcuaccccuacgacgugcccgacuacgccagccugagaagccugguggccagcagcggcacccuggaguucaccaacgagaacuucaacuggaccggcguggcccaggacggcaagagcuacagcugcaagagaggcagcgugaacagcuucuucagcagacugaacuggcugcacaagcuggaguacaaguaccccgcccugaacgugaccaugcccaacaacggcaaguucgacaagcuguacaucuggggcgugcaccaccccagcaccgacagcgaccagaccagccuguacgugagagccagcggcaaggugaccgugagcaccaagagaagccagcagaccgugauccccgacaucggcuacagacccugggugagaggccugagcagcagaaucagcaucuacuggaccaucgugaagcccggcgacauccugcugaucaacagcaccggcaaccugaucgcccccagaggcuacuucaagaucagaaacggcaagagcagcaucaugagaagcgacgcccccaucggcaacugcagcagcgagugcaucacccccaacggcagcauccccaacgacaagcccuuccagaacgugaacagaaucaccuacggcgccugccccagauacgugaagcagaacacccugaagcuggccaccggcaugagaaacgugcccgagaagcagaccagaggcaucuucggcgccaucgccggcuucaucgagaacggcugggagggcaugguggacggcugguacggcuucagacaccagaacagcgagggcaccggccaggccgccgaccugaagagcacccaggccgccaucgaccagaucaacggcaagcugaacagacugguggagaagaccaacgagaaguuccaccagaucgagaaggaguucagcgagguggagggcagaauccaggaccuggagaaguacguggaggacaccaagaucgaccuguggagcuacaacgccgagcugcugguggcccuggagaaccagcacaccaucgaccugaccgacagcgagaugaacaagcuguucgagagaaccagaaagcagcugagagagaacgccgaggacaugggcaacggcugcuucaagaucuaccacaagugcgacaacgccugcaucggcagcaucagaaacggcaccuacgaccacgacguguacagagacgaggcccugaacaacagauuccagaucaagggcguggagcugaagagcggcuacaaggacuggauccuguggaucagcuucgccaucagcugcuuccugcugugcguggugcugcugggcuucaucaugugggccugccagaagggcaacaucagaugcaacaucugcaucuga

SEQ ID NO: 161054 - RNA, 1701 nt, Artificial Sequence
  derived and/or modified CDS sequence (opt4) from hemagglutinin__InfluenzaA__ABG37351
augaagaccaucaucgcccugagcuacauccugugccugguguucgcccagaagcugcccggcaacgacaacagcaccgccacccugugccugggccaccacgccgugcccaacggcacccuggugaagaccaucaccaacgaccagaucgaggugaccaacgccaccgagcuggugcagagcagcagcaccggcagaaucugcgacagcccccacagaauccuggacggcaagaacugcacccugaucgacgcccugcugggcgacccccacugcgacggcuuccagaacaaggagugggaccuguucguggagagaagcaaggccuacagcaacugcuaccccuacgacgugcccgacuacgccagccugagaagccugguggccagcagcggcacccuggaguucaucaacgaggacuucaacuggaccggcguggcccaggacggcaagagcuacgccugcaagagaggcagcgugaacagcuucuucagcagacugaacuggcugcacaagcuggaguacaaguaccccgcccugaacgugaccaugcccaacaacggcaaguucgacaagcuguacaucuggggcgugcaccaccccagcaccgacagcgaccagaccagccuguacgugagagccagcggcagagugaccgugagcaccaagagaagccagcagaccgugauccccaacaucggcuucagacccugggugagaggccugagcagcagaaucagcaucuacuggaccaucgugaagcccggcgacauccugcugaucgacagcaccggcaaccugaucgcccccagaggcuacuucaagaucagaaacggcaagagcagcaucaugagaagcgacgcccccaucggcaacugcagcagcgagugcaucacccccaacggcagcauccccaacgacaagcccuuccagaacgugaacagaaucaccuacggcgccugccccagauacgugaagcagaacacccugaagcuggccaccggcaugagaaacgugcccgagaagcagaccagaggcaucuucggcgccaucgccggcuucaucgagaacggcugggagggcaugguggacggcugguacggcuucagacaccagaacagcgagggcaccggccaggccgccgaccugaagagcacccaggccgccaucgaccagaucaacggcaagcugaacagacugaucgagaagaccaacgagaaguuccaccagaucgagaaggaguucagcgagguggagggcagaauccaggaccuggagaaguacguggaggacaccaagaucgaccuguggagcuacaacgccggccugcugguggcccuggagaaccagcacaccaucgaccugaccgacagcgagaugaacaagcuguucgagagaaccagaaagcagcugagagagaacgccgaggacaugggcaacggcugcuucaagaucuaccacaagugcgacaacgccugcaucggcagcaucagaaacggcaccuacgaccacgacguguacagagacgaggcccugaacaacagauuccagaucaagggcguggagcugaagagcggcuacaaggacuggauccuguggaucagcuucgccaucagcugcuuccugcugugcguggugcugcugggcuucaucaugugggccugccagaagggcaacaucagaugcaacaucugcaucuga

SEQ ID NO: 161055 - RNA, 1698 nt, Artificial Sequence
  derived and/or modified CDS sequence (opt4) from hemagglutinin__InfluenzaA__ABG37362
augaaggugaagcugcuggugcugcugugcaccuucaccgccaccuacgccgacaccaucugcaucggcuaccacgccaacaacagcaccgacaccguggacaccgugcuggagaagaacgugaccgugacccacagcgugaaccugcuggaggacagccacaacggcaagcugugccugcugaagggcaucgccccccugcagcugggcaacugcagcguggccggcuggauccugggcaaccccgagugcgagcugcugaucagcaaggagagcuggagcuacaucguggagacccccaaccccgagaacggcaccugcuaccccggcuacuucgccgacuacgaggagcugagagagcagcugagcagcgugagcagcuucgagagauucgagaucuuccccaaggagagcagcuggcccaaccacaccgugaccggcgugagcgccagcugcagccacaacggcaagagcagcuucuacagaaaccugcuguggcugaccggcaagaacggccuguaccccaaccugagcaagagcuacgccaacaacaaggagaaggaggugcuggugcuguggggcgugcaccacccccccaacaucggcaaccagagagcccuguaccacaccgagaacgccuacgugagcguggugagcagccacuacagcagaagauucacccccgagaucgccaagagacccaaggugagagaccaggagggcagaaucaacuacuacuggacccugcuggagcccggcgacaccaucaucuucgaggccaacggcaaccugaucgcccccugguacgccuucgcccugagcagaggcuucggcagcggcaucaucaccagcaacgcccccauggacgagugcgacgccaagugccagaccccccagggcgccaucaacagcagccugcccuuccagaacgugcaccccgugaccaucggcgagugccccaaguacgugagaagcgccaagcugagaauggugaccggccugagaaacauccccagcauccagagcagaggccuguucggcgccaucgccggcuucaucgagggcggcuggaccggcaugguggacggcugguacggcuaccaccaccagaacgagcagggcagcggcuacgccgccgaccagaagagcacccagaacgccaucaacggcaucaccaacaaggugaacagcgugaucgagaagaugaacacccaguucaccgccgugggcaaggaguucaacaagcuggagagaagaauggagaaccugaacaagaagguggacgacggcuuccuggacaucuggaccuacaacgccgagcugcuggugcugcuggagaacgagagaacccuggacuuccacgacagcaacgugaagaaccuguacgagaaggugaagagccagcugaagaacaacgccaaggagaucggcaacggcugcuucgaguucuaccacaagugcaacaacgagugcauggagagcgugaagaacggcaccuacgacuaccccaaguacagcgaggagagcaagcugaacagagagaagaucgacggcgugaagcuggagagcaugggcguguaccagauccuggccaucuacagcaccguggccagcagccuggugcugcuggugagccugggcgccaucagcuucuggaugugcagcaacggcagccugcagugcagaaucugcaucuga

SEQ ID NO: 161056 - RNA, 1698 nt, Artificial Sequence; identical to SEQ ID NO: 160860
  derived and/or modified CDS sequence (opt4) from hemagglutinin__InfluenzaA__ABG37384

SEQ ID NO: 161057 - RNA, 1698 nt, Artificial Sequence; identical to SEQ ID NO: 160930
  derived and/or modified CDS sequence (opt4) from hemagglutinin__InfluenzaA__ABG37395

SEQ ID NO: 161058 - RNA, 1701 nt, Artificial Sequence; identical to SEQ ID NO: 160837
  derived and/or modified CDS sequence (opt4) from hemagglutinin__InfluenzaA__ABG37406

SEQ ID NO: 161059 - RNA, 1701 nt, Artificial Sequence
  derived and/or modified CDS sequence (opt4) from hemagglutinin__InfluenzaA__ABG37428
augaagaccaucaucgcccugagcuacauccugugccugguguucgcccagaagcugcccggcaacgacaacagcaccgccacccugugccugggccaccacgccgugcccaacggcacccuggugaagaccaucaccaacgaccagaucgaggugaccaacgccaccgagcuggugcagagcagcagcaccggcagaaucugcgacagcccccaccagauccuggacggcgagaacugcacccugaucgacgcccugcugggcgacccccacugcgacggcuuccagaacaaggagugggaccuguucguggagagaagcaaggccuacagcaacugcuaccccuacgacgugcccgacuacgugagccugagaagccugguggccagcagcggcacccuggaguucaacaacgagagcuucaacuggaccggcguggcccagaacggcaccagcagcgccugcaagagaagaagcgacaagagcuucuucagcagacugaacuggcugcaccagcugaaguacaaguaccccgcccugaacgugaccaugcccaacaacgagaaguucgacaagcuguacaucuggggcgugcaccaccccggcaccgacagcgaccagaucagccuguacgcccaggccagcggcagagugaccgugagcaccaagagaagccagcagaccgugauccccaacaucggcagcagacccugggugagaggcgugagcagcagaaucagcaucuacuggaccaucgugaagcccggcgacauccugcugaucaacagcaccggcaaccugaucgcccccagaggcuacuucaagaucagaagcggcaagagcagcaucaugagaagcgacgcccccaucggcaagugcaacagcgagugcaucacccccaacggcagcauccccaacgacaagcccuuccagaacgugaacagaaucaccuacggcgccugccccagauacgugaagcagaacacccugaagcuggccaccggcaugagaaacgugcccgagaagcagaccagaggcaucuucggcgccaucgccggcuucaucgagaacggcugggagggcaugauggacggcugguacggcuucagacaccagaacagcgagggcaccggccaggccgccgaccugaagagcacccaggccgccaucaaccagaucaacggcaagcugaacagacugaucgagaagaccaacgagaagagccaccagaucgagaaggaguucagcgagguggagggcagaauccaggaccuggagaaguacguggaggacaccaagaucgaccuguggagcuacaacgccgagcugcugguggcccuggagaaccagcacaccaucgaccugaccgacagcgagaugaacaagcuguucgagagaaccaagaagcagcugagagagaacgccgaggacaugggcaacggcugcuucaagaucuaccacaagugcgacaacgccugcaucggcagcaucagaaacggcaccuacgaccacgacguguacagagacgaggcccugaacaacagauuccagaucaagggcguggagcugaagagcggcuacaaggacugggugcuguggaucagcuucgccaucagcugcuuccugcugugcaucgugcugcugggcuucaucaugugggccugccagaagggcaacaucagaugcaacaucugcaucuga

SEQ ID NO: 161060 - RNA, 1701 nt, Artificial Sequence; identical to SEQ ID NO: 160622
  derived and/or modified CDS sequence (opt4) from hemagglutinin__InfluenzaA__ABG37439

SEQ ID NO: 161061 - RNA, 1701 nt, Artificial Sequence; identical to SEQ ID NO: 160700
  derived and/or modified CDS sequence (opt4) from hemagglutinin__InfluenzaA__ABG37461

SEQ ID NO: 161062 - RNA, 1701 nt, Artificial Sequence
  derived and/or modified CDS sequence (opt4) from hemagglutinin__InfluenzaA__ABG37472
augaagaccaucaucgcccugagcuacauccugugccugguguucgcccagaagcugcccggcaacgacaacagcaccgccacccugugccugggccaccacgccgugcccaacggcacccuggugaagaccaucaccaacgaccagaucgaggugaccaacgccaccgagcuggugcagagcagcagcaccggcagaaucugcgacagcccccaccaggugcuggacggcgagaacugcacccugaucgacgcccugcugggcgacccccacugcgacggcuuccagaacaaggagugggaccuguucguggagagaagcaaggccuacagcaacugcuaccccuacgacgugcccgacuacgugagccugagaagccugguggccagcagcggcacccuggaguucaacaacgagagcuucaacuggaccggcguggcccagaacggcaccagcagcgccugcaagagaagaagcgacaagagcuucuucagcagacugaacuggcugcaccagcugaaguacaaguaccccgcccugaacgugaccaugcccaacaacgagaaguucgacaagcuguacaucuggggcgugcaccaccccggcaccgacagcgaccagaucagccuguacgcccaggccagcggcagagugaccgugagcaccaagagaagccagcagaccgugauccccaacaucggcagcagacccugggugagaggcgugagcagcagaaucagcaucuacuggaccaucgugaagcccggcgacauccugcugaucaacagcaccggcaaccugaucgcccccagaggcuacuucaagaucagaagcggcaagagcagcaucaugagaagcgacgcccccaucggcaagugcaacagcgagugcaucacccccaacggcagcauccccaacgacaagcccuuccagaacgugaacagaaucaccuacggccccugccccagauacgugaagcagaacacccugaagcuggccaccggcaugagaaacgugcccgagaagcagaccagaggcaucuucggcgccaucgccggcuucaucgagaacggcugggagggcaugauggacggcugguacggcuucagacaccagaacagcgagggcaccggccaggccgccgaccugaagagcacccaggccgccaucaaccagaucaacggcaagcugaacagacugaucgagaagaccaacgagaaguuccaccagaucgagaaggaguucagcgagguggagggcagaauccaggaccuggagaaguacguggaggacaccaagaucgaccuguggagcuacaacgccgagcugcugguggcccuggagaaccagcacaccaucgaccugaccgacagcgagaugaacaagcuguucgagagaaccaagaagcagcugagagagaacgccgaggacaugggcaacggcugcuucaagaucuaccacaagugcgacaacgccugcaucggcagcaucagaaacggcaccuacgaccacgacguguacagagacgaggcccugaacaacagauuccagaucaagggcguggagcugaagagcggcuacaaggacuggauccuguggaucagcuucgccaucagcugcuuccugcugugcaucgugcugcugggcuucaucaugugggccugccagaagggcaacaucagaugcaacaucugcaucuga

SEQ ID NO: 161063 - RNA, 1701 nt, Artificial Sequence; identical to SEQ ID NO: 160622
  derived and/or modified CDS sequence (opt4) from hemagglutinin__InfluenzaA__ABG37483

SEQ ID NO: 161064 - RNA, 1701 nt, Artificial Sequence; identical to SEQ ID NO: 160700
  derived and/or modified CDS sequence (opt4) from hemagglutinin__InfluenzaA__ABG37494

SEQ ID NO: 161065 - RNA, 1701 nt, Artificial Sequence
  derived and/or modified CDS sequence (opt4) from hemagglutinin__InfluenzaA__ABG37505
augaagaccaucaucgcccugagcuacauccugugccugguguucgcccagaagcugcccggcaacgacaacagcauggccacccugugccugggccaccacgccgugcccaacggcacccuggugaagaccaucaccaacgaccagaucgaggugaccaacgccaccgagcuggugcagagcagcagcaccggcagaaucugcgacagcccccaccagauccuggacggcgagaacugcacccugaucgacgcccugcugggcgacccccacugcgacggcuuccagaacaaggagugggaccuguucguggagagaagcaaggccuacagcaacugcuaccccuacgacgugcccgacuacgugagccugagaagccugguggccagcagcggcacccuggaguucaacaacgagagcuucaacuggaccggcguggcccagaacggcaccagcagcgccugcaagagaagaagcgacaagagcuucuucagcagacugaacuggcugcaccagcugaaguacaaguaccccgcccugaacgugaccaugcccaacaacgagaaguucgacaagcuguacaucuggggcgugcaccaccccggcaccgacagcgaccagaucagccuguacgcccaggccagcggcagagugaccgugagcaccaagagaagccagcagaccgugauccccaacaucggcagcagacccugggugagaggcgugagcagcagaaucagcaucuacuggaccaucgugaagcccggcgacauccugcugaucaacagcaccggcaaccugaucgcccccagaggcuacuucaagaucagaagcggcaagagcagcaucaugagaagcgacgcccccaucgacaagugcaacagcgagugcaucacccccaacggcagcauccccaacgacaagcccuuccagaacgugaacagaaucaccuacggccugugccccagauacgugaagcagaacacccugaagcuggccaccggcaugagaaacgugcccgagaagcagaccagaggcaucuucggcgccaucgccggcuucaucgagaacggcugggagggcaugauggacggcugguacggcuucagacaccagaacagcgagggcaccggccaggccgccgaccugaagagcacccaggccgccaucaaccagaucaacggcaagcugaacagacugaucgagaagaccaacgagaaguuccaccagaucgagaaggaguucagcgagguggagggcagaauccaggaccuggagaaguacguggaggacaccaagaucgaccuguggagcuacaacgccgagcugcugguggcccuggagaaccagcacaccaucgaccugaccgacagcgagaugaacaagcuguucgagagaaccaagaagcagcugagagagaacgccgaggacaugggcaacggcugcuucaagaucuaccacaagugcgacaacgccugcaucggcagcaucagaaacggcaccuacgaccacgacguguacagagacgaggcccugaacaacagauuccagaucaagggcguggagcugaagagcggcuacaaggacuggauccuguggaucagcuucgccaucagcugcuuccugcugugcaucgugcugcugggcuucaucaugugggccugccagaagggcaacaucagaugcaacaucugcaucuga

SEQ ID NO: 161066 - RNA, 1701 nt, Artificial Sequence; identical to SEQ ID NO: 160576
  derived and/or modified CDS sequence (opt4) from hemagglutinin__InfluenzaA__ABG37516

SEQ ID NO: 161067 - RNA, 1701 nt, Artificial Sequence; identical to SEQ ID NO: 160576
  derived and/or modified CDS sequence (opt4) from hemagglutinin__InfluenzaA__ABG37527

SEQ ID NO: 161068 - RNA, 1701 nt, Artificial Sequence; identical to SEQ ID NO: 160576
  derived and/or modified CDS sequence (opt4) from hemagglutinin__InfluenzaA__ABG37538

SEQ ID NO: 161069 - RNA, 1701 nt, Artificial Sequence; identical to SEQ ID NO: 160576
  derived and/or modified CDS sequence (opt4) from hemagglutinin__InfluenzaA__ABG37549

SEQ ID NO: 161070 - RNA, 1701 nt, Artificial Sequence; identical to SEQ ID NO: 160576
  derived and/or modified CDS sequence (opt4) from hemagglutinin__InfluenzaA__ABG37560

SEQ ID NO: 161071 - RNA, 1701 nt, Artificial Sequence; identical to SEQ ID NO: 160576
  derived and/or modified CDS sequence (opt4) from hemagglutinin__InfluenzaA__ABG37571

SEQ ID NO: 161072 - RNA, 1701 nt, Artificial Sequence
  derived and/or modified CDS sequence (opt4) from hemagglutinin__InfluenzaA__ABG37582
augaagaccaucaucgcccugagcuacauccugugccugguguucgcccagaagcugcccggcaacgacaacagcaccgccacccugugccugggccaccacgccgugcccaacggcaccaucgugaagaccaucaccaacgaccagaucgaggugaccaacgccaccgagcuggugcagaucagcagcaccggcggcaucugcgacagcccccaccagauccuggacggcgagaacugcacccugaucgacgcccugcugggcgacccccagugcgacggcuuccagaacaagaagugggaccuguucguggagagaagcaaggccuacagcaacugcuaccccuacgacgugcccgaccacgccagccugagaagccugguggccagcagcggcacccuggaguucaacaacgagagcuucgacuggaccggcgugacccagaacggcaccagcagcgccugcaagagaagaagcaacaagagcuucuucagcagacugaacuggcugacccaccugaaguacaaguaccccgcccugaacgugaccaugcccaacaacgagaaguucgacaagcuguacaucuggggcgugcaccaccccggcaccgacagcgaccagaucagccuguacgcccaggccagcggcagaaucaccgugagcaccaagagaagccagcagaccgugauccccaacaucggcagcagacccagagugagagacgugagcagcagaaucagcaucuacuggaccaucgugaagcccggcgacauccugcugaucaacagcaccggcaaccugaucgcccccagaggcuacuucaagaucagaagcggcaagagcagcaucaugagaagcgacgcccccaucggcaagugcaacagcgagugcaucacccccaacggcagcauccccaacgacaagcccuuccagaacgugaacagaaucaccuacggcgccugccccagauacgugaagcagaacacccugaagcuggccaccggcaugagaaacgugcccgagaagcagaccagaggcaucuucggcgccaucgccggcuucaucgagaacggcugggagggcaugguggacggcugguacggcuucagacaccagaacagcgagggcaccggccaggccgccgaccugaagagcacccaggccgccaucaaccagaucaacggcaagcugaacagacugaucggcaagaccaacgagaaguuccaccagaucgagaaggaguucagcgagguggagggcagaauccaggaccuggagaaguacguggaggacaccaagaucgaccuguggagcuacaacgccgagcugcugguggcccuggagaaccagcacaccaucgaccugaccgacagcgagaugaacaagcuguucgagagaaccaagaagcagcugagagagaacgccgaggacaugggcaacggcugcuucaagaucuaccacaagugcgacaacgccugcaucggcagcaucagaaacggcaccuacgaccacgacguguacagagacgaggcccugaacaacagauuccagaucaagggcguggagcugaagagcggcuacaaggacuggauccuguggaucagcuucgccaucagcugcuuccugcugugcguggcccugcugggcuucaucaugugggccugccagaagggcaacaucagaugcaacaucugcaucuga

SEQ ID NO: 161073 - RNA, 1701 nt, Artificial Sequence; identical to SEQ ID NO: 160576
  derived and/or modified CDS sequence (opt4) from hemagglutinin__InfluenzaA__ABG37604

SEQ ID NO: 161074 - RNA, 1701 nt, Artificial Sequence; identical to SEQ ID NO: 160576
  derived and/or modified CDS sequence (opt4) from hemagglutinin__InfluenzaA__ABG37615

SEQ ID NO: 161075 - RNA, 1698 nt, Artificial Sequence; identical to SEQ ID NO: 160802
  derived and/or modified CDS sequence (opt4) from hemagglutinin__InfluenzaA__ABG47807

SEQ ID NO: 161076 - RNA, 1698 nt, Artificial Sequence; identical to SEQ ID NO: 160801
  derived and/or modified CDS sequence (opt4) from hemagglutinin__InfluenzaA__ABG47818

SEQ ID NO: 161077 - RNA, 1701 nt, Artificial Sequence
  derived and/or modified CDS sequence (opt4) from hemagglutinin__InfluenzaA__ABG47829
augaaggccaagcugcuggugcugcugugcgccuucaccgccaccuacgccgacaccaucugcaucggcuaccacgccaacaacagcaccgacaccguggacaccgugcuggagaagaacgugaccgugacccacagcgugaaccugcuggaggacagccacaacggcaagcugugcagacugaagggcaccgccccccugcagcugggcaacugcagcguggccggcuggauccugggcaaccccgagugcgagagccuguucagcaaggagagcuggagcuacaucgccgagacccccaaccccgagaacggcaccugcuaccccggcuacuucgccgacuacgaggagcugagagagcagcugagcagcgugagcagcuucgagagauucgagaucuuccccaaggagagcagcuggcccaaccacaccgugaccaagggcgugaccgccagcugcagccacaacggcaagagcagcuucuacaagaaccugcuguggcugaccgagaagaacggccuguaccccaaccugagcaagagcuacgugaacaacaaggagaaggaggugcuggugcuguggggcgugcaccaccccagcaacaucggcgaccagagagccaucuaccacaccgagaacgccuacgugagcguggugagcagccacuacagcagaagauucacccccgagaucaccaagagacccaaggugagaaaccaggagggcagaaucaacuacuacuggacccugcuggagcccggcgacaccaucaucuucgaggccaacggcaaccugaucgcccccugguacgccuucgcccugagcagaggcuucggcagcggcaucaucaccagcaacgccagcaugggcgagugcgacgccaagugccagaccccccagggcgccaucaacagcagccugcccuuccagaacgugcaccccgugaccaucggcgagugccccaaguacgugagaagcaccaagcugagaauggugaccggccugagaaacauccccagcauccagagcagaggccuguucggcgccaucgccggcuucaucgagggcggcuggaccggcaugaucgacggcugguacggcuaccaccaccagaacgagcagggcagcggcuacgccgccgaccagaagagcacccagaacgccaucgacggcaucaccaacaaggugaacagcgugaucgagaagaugaacacccaguucaccgccgugggcaaggaguucaacaagcuggagagaagaauggagaaccugaacaagaagguggacgacggcuuccuggacaucuggaccuacaacgccgagcugcuggugcugcuggagaacgagagaacccuggacuuccacgacagcaacgugaagaaccuguacgagaaggugaagacccagcugaagaacaacgccaaggagaucggcaacggcugcuucgaguucuaccacaagugcaacaacgagugcauggagagcgugaagaacggcaccuacgacuaccccaaguacagcgaggagagcaagcugaacagagagaagaucgacggcgugaagcuggagagcaugggcguguaccagauccuggccaucuacagcaccguggccagcagccuggugcugcuggugagccugggcgccaucagcuucuggaugugcagcaacggcagccugcagugcagaaucugcaucuga

SEQ ID NO: 161078 - RNA, 1701 nt, Artificial Sequence
  derived and/or modified CDS sequence (opt4) from hemagglutinin__InfluenzaA__ABG47840
augaaggugaagcugcuggugcugcugugcgccuucaccgccaccuacgccgacaccaucugcaucggcuaccacgccaacaacagcaccgacaccguggacaccgugcuggagaagaacgugaccgugacccacagcgugaaccugcuggaggacagccacaacggcaagcugugcagacugaagggcaccgccccccugcagcugggcaacugcagcguggccggcuggauccugggcaaccccgagugcgagagccuguucagcaaggagagcuggagcuacaucgccgagacccccaaccccgagaacggcaccugcuaccccggcuacuucgccgacuacgaggagcugagagagcagcugagcagcgugagcagcuucgagagauucgagaucuuccccaaggagagcagcuggcccaaccacaccgugaccaagggcgugaccgccagcugcagccacaacggcaagagcagcuucuacaagaaccugcuguggcugaccgagaagaacggccuguaccccaaccugagcaagagcuacgugaacaacaaggagaaggaggugcuggugcuguggggcgugcaccaccccagcaacaucggcgaccagagagccaucuaccacaccgagaacgccuacgugagcguggugagcagccacuacagcagaagauucacccccgagaucgccaagagacccaaggugagagaccaggagggcagaaucaacuacuacuggacccugcuggagcccggcgacaccaucaucuucgaggccaacggcaaccugaucgcccccugguacgccuucgcccugagcagaggcuucggcagcggcaucaucaccagcaacgccagcaugagcgagugcgacgccaagugccagaccccccagggcgccaucaacagcagccugcccuuccagaacgugcaccccgugaccaucggcgagugccccaaguacgugagaagcaccaagcugagaauggugaccggccugagaaacauccccagcauccagagcagaggccuguucggcgccaucgccggcuucaucgagggcggcuggaccggcaugaucgacggcugguacggcuaccaccaccagaacgagcagggcagcggcuacgccgccgaccagaagagcacccagaacgccaucgacggcaucaccaacaaggugaacagcgugaucgagaagaugaacacccaguucaccgccgugggcaaggaguucaacaagcuggagagaagaauggagaaccugaacaagaagguggacgacggcuuccuggacaucuggaccuacaacgccgagcugcuggugcugcuggagaacgagagaacccuggacuuccacgacagcaacgugaagaaccuguacgagaaggugaagaaccagcugaagaacaacgccaaggagaucggcaacggcugcuucgaguucuaccacaagugcaacaacgagugcauggagagcgugaagaacggcaccuacgacuaccccaaguacagcgaggagagcaagcugaacagagagaagaucgacggcgugaagcuggagagcaugggcguguaccagauccuggccaucuacagcaccguggccagcagccuggugcugcuggugagccugggcgccaucagcuucuggaugugcagcaacggcagccugcagugcagaaucugcaucuga

SEQ ID NO: 161079 - RNA, 1701 nt, Artificial Sequence
  derived and/or modified CDS sequence (opt4) from hemagglutinin__InfluenzaA__ABG47851
augaagaccaucaucgcccugagcuacauccugugccugguguucgcccagaagcugcccggcaacgacaacagcaccgccacccugugccugggccaccacgccgugcccaacggcacccuggugaagaccaucaccaacgaccagaucgaggugaccaacgccaccgagcuggugcagagcagcagcaccggcagaaucugcgacagcccccacagaauccuggacggcaagaacugcacccugaucgacgcccugcugggcgacccccacugcgacggcuuccagaacaaggagugggaccuguucguggagagaagcaaggccuacagcaacugcuaccccuacgacgugcccgacuacgccagccugagaagccugguggccagcagcggcacccuggaguucaccaacgagggcuucaacuggaccggcguggcccaggacggcaagagcuacgccugcaagagaggcagcgugaacagcuucuucagcagacugaacuggcugcacaagcuggaguacaaguaccccgcccugaacgugaccaugcccaacaacgacaaguucgacaagcuguacaucuggggcgugcaccaccccagcaccgacagcgaccagaccagccuguacgugcaggccagcggcagagugaccgugagcaccaagagaagccagcagaccgugauccccaacaucggcagcagacccugggugagaggcaucagcagcagaaucagcaucuacuggaccaucgugaagcccggcgacauccugcugaucaacagcaccggcaaccugaucgcccccagaggcuacuucaagaucagaaacggcaagagcagcaucaugagaagcgacgcccccaucgacaacugcaacagcgagugcaucacccccaacggcagcauccccaacgacaagcccuuccagaacgugaacagaaucaccuacggcgccugccccagauacgugaagcagaacacccugaagcuggccaccggcaugagaaacgugcccgagaagcagaccagaggcaucuucggcgccaucgccggcuucaucgagaacggcugggagggcaugguggacggcugguacggcuucagacaccagaacagcgagggcaccggccaggccgccgaccugaagagcacccaggccgccaucgaccagaucaacggcaagcugaacagacugaucgagaagaccaacgagaaguuccaccagaucgagaaggaguucagcgagguggagggcagaauccaggaccuggagaaguacguggaggacaccaagaucgaccuguggagcuacaacgccgagcugcugguggcccuggagaaccagcacaccaucgaccugaccgacagcgagaugaacaagcuguucgagagaaccagaaagcagcugagagagaacgccgaggacaugggcaacggcugcuucaagaucuaccacaagugcgacaacgccugcaucggcagcaucagaaacggcaccuacaaccacgacguguacagagacgaggcccugaacaacagauuccagaucaagggcguggagcugaagagcggcuacaaggacuggauccuguggaucagcuucgccaucagcugcuuccugcugugcguggugcugcugggcuucaucaugugggccugccagaagggcaacaucagaugcagcaucugcaucuga

SEQ ID NO: 161080 - RNA, 1701 nt, Artificial Sequence
  derived and/or modified CDS sequence (opt4) from hemagglutinin__InfluenzaA__ABG47862
augagaaccaucaucgcccugagcuacauccugugccugguguucgcccagaagcugcccggcaacgacaacagcaccgccacccugugccugggccaccacgccgugcccaacggcacccuggugaagaccaucaccaacgaccagaucgaggugaccaacgccaccgagcuggugcagagcagcagcaccggcagaaucugcaacagcccccacagaauccuggacggcaagaacugcacccugaucgacgcccugcugggcgacccccacugcgacggcuuccagaacaaggagugggaccuguucguggagagaagcaaggccuacagcaacugcuaccccuacgacgugcccgacuacgccagccugagaagccugaucgccagcagcggcacccuggaguucaccaacgagggcuucaacuggaccggcguggcccaggacggcaccagcuacgccugcaagagaggcagcgugaagagcuucuucagcagacugaacuggcugcacaagcuggaguacaaguaccccgcccugaacgugaccaugcccaacaacgacaaguucgacaagcuguacaucuggggcgugcaccaccccagcaccgacagcgaccagaccagccuguacgugcaggccagcggcagagugaccgugagcaccaagagaagccagcagaccgugauccccaacaucggcagcagacccugggugagaggcgugagcagcagaaucagcaucuacuggaccaucgugaagcccggcgacauccugcugaucaacagcaccggcaaccugaucgcccccagaggcuacuucaagaucagaagcggcaagagcagcaucaugagaagcgacgcccccaucggcaacugcaacagcgagugcaucacccccaacggcagcauccccaacgacaagcccuuccagaacgugaacagaaucaccuacggcgccugccccagauacgugaagcagaacacccugaagcuggccaccggcaugagaaacgugcccgagaagcagaccagaggcaucuucggcgccaucgccggcuucaucgagaacggcugggagggcaugguggacggcugguacggcuucagacaccagaacagcgagggcaccggccaggccgccgaccugaagagcacccaggccgccaucaaccagaucaacggcaagcugaacagacugaucgagaagaccaacgagaaguuccaccagaucgagaaggaguucagcgagguggagggcagaauccaggaccuggagaaguacguggaggacaccaagaucgaccuguggagcuacaacgccgagcugcugguggcccuggagaaccagcacaccaucgaccugaccgacagcgagaugaacaagcuguucgagagaaccagaaagcagcugagagagaacgccgaggacaugggcaacggcugcuucaagaucuaccacaagugcgacaacgccugcaucggcagcaucagaaacggcaccuacgaccacgacguguacagagacgaggcccugaacaacagauuccagaucaagggcguggagcugaagagcggcuacaaggacuggauccuguggaucagcuucgccaucagcugcuuccugcugugcguggugcugcugggcuucaucaugugggccugccagaagggcaacaucagaugcaacaucugcaucuga

SEQ ID NO: 161081 - RNA, 1701 nt, Artificial Sequence; identical to SEQ ID NO: 161044
  derived and/or modified CDS sequence (opt4) from hemagglutinin__InfluenzaA__ABG47873

SEQ ID NO: 161082 - RNA, 1701 nt, Artificial Sequence; identical to SEQ ID NO: 161049
  derived and/or modified CDS sequence (opt4) from hemagglutinin__InfluenzaA__ABG47895

SEQ ID NO: 161083 - RNA, 1701 nt, Artificial Sequence; identical to SEQ ID NO: 161044
  derived and/or modified CDS sequence (opt4) from hemagglutinin__InfluenzaA__ABG47906

SEQ ID NO: 161084 - RNA, 1701 nt, Artificial Sequence
  derived and/or modified CDS sequence (opt4) from hemagglutinin__InfluenzaA__ABG47917
augaagaccaucaucgcccugagcuacauccugugccugguguucgcccagaagcugcccggcaacgacaacagcaccgccacccugugccugggccaccacgccgugcccaacggcacccuggugaagaccaucaccaacgaccagaucgaggugaccaacgccaccgagcuggugcagagcagcagcaccggcagaaucugcgacagcccccacagaauccuggacggcaagaacugcacccugaucgacgcccugcugggcgacccccacugcgacggcuuccagaacaaggagugggaccuguucguggagagaagcaaggccuacagcaacugcuaccccuacgacgugcccgacuacgccagccugagaagccugguggccagcagcggcacccuggaguucaucaacgaggacuucaacuggaccggcguggcccaggacggcaagagcuacgccugcaagagaggcagcgugaacagcuucuucagcagacugaacuggcugcacaagcuggaguacaaguaccccgcccugaacgugaccaugcccaacaacggcaaguucgacaagcuguacaucuggggcgugcaccaccccagcaccgacagcgaccagaccagccuguacgugagagccagcggcagagugaccgugagcaccaagagaagccagcagaccgugauccccaacaucggcuucagacccugggugagaggccugagcagcagaaucagcaucuacuggaccaucgugaagcccggcgacauccugcugaucaacagcaccggcaaccugaucgcccccagaggcuacuucaagaucagaaacggcaagagcagcaucaugagaagcgacgcccccaucggcaacugcagcagcgagugcaucacccccaacggcagcauccccaacgacaagcccuuccagaacgugaacagaaucaccuacggcgccugccccagauacgugaagcagaacacccugaagcuggccaccggcaugagaaacgugcccgagaagcagaccagaggcaucuucggcgccaucgccggcuucaucgagaacggcugggagggcaugguggacggcugguacggcuucagacaccagaacagcgagggcaccggccaggccgccgaccugaagagcacccaggccgccaucgaccagaucaacggcaagcugaacagacugaucgagaagaccaacgagaaguuccaccagaucgagaaggaguucagcgagguggagggcagaauccaggaccuggagaaguacguggaggacaccaagaucgaccuguggagcuacaacgccggccugcugguggcccuggagaaccagcacaccaucgaccugaccgacagcgagaugaacaagcuguucgagagaaccagaaagcagcugagagagaacgccgaggacaugggcaacggcugcuucaagaucuaccacaagugcgacaacgccugcaucggcagcaucagaaacggcaccuacgaccacgacguguacagagacgaggcccugaacaacagauuccagaucaagggcguggagcugaagagcggcuacaaggacuggauccuguggaucagcuucgccaucagcugcuuccugcugugcguggugcugcugggcuucaucaugugggccugccagaagggcaacaucagaugcaacaucugcaucuga

SEQ ID NO: 161085 - RNA, 1701 nt, Artificial Sequence; identical to SEQ ID NO: 161084
  derived and/or modified CDS sequence (opt4) from hemagglutinin__InfluenzaA__ABG47928

SEQ ID NO: 161086 - RNA, 1701 nt, Artificial Sequence
  derived and/or modified CDS sequence (opt4) from hemagglutinin__InfluenzaA__ABG47939
augaagaccaucaucgcccugagcuacauccugugccugguguucgcccagaagcugcccggcaacgacaacagcaccgccacccugugccugggccaccacgccgugcccaacggcacccuggugaagaccaucaccaacgaccagaucgaggugaccaacgccaccgagcuggugcagagcagcagcaccggcagaaucugcgacagccccuacagaauccuggacggcaagaacugcacccugaucgacgcccugcugggcgacccccacugcgacggcuuccagaacaaggagugggaccuguucguggagagaagcaaggccuacagcaacugcuaccccuacgacgugcccgacuacgccagccugagaagccugguggccagcagcggcacccuggaguucaucaacgaggacuucaacuggaccggcguggcccaggacggcaagagcuacgccugcaagagaggcagcgugaacagcuucuucagcagacugaacuggcugcacaagcuggaguacaaguaccccgcccugaacgugaccaugcccaacaacggcaaguucgacaagcuguacaucuggggcgugcaccaccccagcaccgacagcgaccagaccagccuguacgugagagccagcggcagagugaccgugagcaccaagagaagccagcagaccgugauccccaacaucggcuucagacccugggugagaggccugagcagcagaaucagcaucuacuggaccaucgugaagcccggcgacauccugcugaucaacagcaccggcaaccugaucgcccccagaggcuacuucaagaucagaaacggcaagagcagcaucaugagaagcgacgcccccaucggcaacugcagcagcgagugcaucacccccaacggcagcauccccaacgacaagcccuuccagaacgugaacagaaucaccuacggcgccugccccagauacgugaagcagaacacccugaagcuggccaccggcaugagaaacgugcccgagaagcagaccagaggcaucuucggcgccaucgccggcuucaucgagaacggcugggagggcaugguggacggcugguacggcuucagacaccagaacagcgagggcaccggccaggccgccgaccugaagagcacccaggccgccaucgaccagaucaacggcaagcugaacagacugaucgagaagaccaacgagaaguuccaccagaucgagaaggaguucagcgagguggagggcagaauccaggaccuggagaaguacguggaggacaccaagaucgaccuguggagcuacaacgccggccugcugguggcccuggagaaccagcacaccaucgaccugaccgacagcgagaugaacaagcuguucgagagaaccagaaagcagcugagagagaacgccgaggacaugggcaacggcugcuucaagaucuaccacaagugcgacaacgccugcaucggcagcaucagaaacggcaccuacgaccacgacguguacagagacgaggcccugaacaacagauuccagaucaagggcguggagcugaagagcggcuacaaggacuggauccuguggaucagcuucgccaucagcugcuuccugcugugcguggugcugcugggcuucaucaugugggccugccagaagggcaacaucagaugcaacaucugcaucuga

SEQ ID NO: 161087 - RNA, 1701 nt, Artificial Sequence
  derived and/or modified CDS sequence (opt4) from hemagglutinin__InfluenzaA__ABG47950
augaagaccaucaucgcccugagcuacauccugugccugguguucgcccagaagcugcccggcaacgacaacagcaccgccacccugugccugggccaccacgccgugcccaacggcacccuggugaagaccaucaccaacgaccagaucgaggugaccaacgccaccgagcuggugcagagcagcagcaccggcagaaucugcgacagcccccacagaauccuggacggcaagaacugcacccugaucgacgcccugcugggcgacccccacugcgacggcuuccagaacaaggagugggaccuguucguggagagaagcaaggccuacagcaacugcuaccccuacgacgugcccgacuacgccagccugagaagccugguggccagccugggcacccuggaguucaucaacgaggacuucaacuggaccggcguggcccaggacggcaagagcuacagcugcaagagaggcagcgugaacagcuucuucagcagacugaacuggcugcacaagcuggaguacaaguaccccgcccugaacgugaccaugcccaacaacggcaaguucgacaagcuguacaucuggggcgugcaccaccccagcaccgacagcgaccagaccagccuguacgccagagccagcggcagagugaccgugagcaccaagagaagccagcagaccgugauccccaacaucggcuucagacccugggugagaggccugagcagcagaaucagcaucuacuggaccaucgugaagcccggcgacauccugcugaucaacagcaccggcaaccugaucgcccccagaggcuacuucaagaucagaaccggcaagagcagcaucaugagaagcgacgcccccaucggcaacugcagcagcgagugcaucacccccaacggcaacauccccaacgacaagcccuuccagaacgugaacagaaucaccuacggcgccugccccagauacgugaagcagaacacccugaagcuggccaccggcaugagaaacgugcccgagaagcagaccagaggcaucuucggcgccaucgccggcuucaucgagaacggcugggagggcaugguggacggcugguacggcuucagacaccagaacagcgagggcaccggccaggccgccgaccugaagagcacccaggccgccaucgaccagaucaacggcaagcugaacagacugaucgagaagaccaacgagaaguuccaccagaucgagaaggaguucagcgagguggagggcagaauccaggaccuggagaaguacguggaggacaccaagaucgaccuguggagcuacaacgccggcuuccugguggcccuggagaaccagcacaccaucgaccugaccgacagcgagaugaacaagcuguucgagagaaccagaaagcagcugagagagaacgccgaggacaugggcaacggcugcuucaagaucuaccacaagugcgacaacgccugcaucggcagcaucagaaacggcaccuacgaccacgacguguacagagacgaggcccugaacaacagauuccagaucaagggcguggagcugaagagcggcuacaaggacuggauccuguggaucagcuucgccaucagcugcuuccugcugugcguggugcugcugggcuucaucaugugggccugccagaagggcaacaucagaugcaacaucugcaucuga

SEQ ID NO: 161088 - RNA, 1701 nt, Artificial Sequence
  derived and/or modified CDS sequence (opt4) from hemagglutinin__InfluenzaA__ABG47961
augaagaccaucaucgcccugagcuacauccugugccugguguucgcccagaagcugcccggcaacgacaacagcaccgccacccugugccugggccaccacgccgugcccaacggcacccuggugaagaccaucaccaacgaccagaucgaggugaccaacgccaccgagcuggugcagagcagcagcaccggcagaaucugcgacagcccccacagaauccuggacggcaagaacugcacccugaucgacgcccugcugggcgacccccacugcgacggcuuccagaacaaggagugggaccuguucguggagagaagcaaggccuacagcaacugcuaccccuacgacgugcccgacuacgccagccugagaagccugguggccagcagcggcacccuggaguucaucaacgaggacuucaacuggaccggcguggcccaggacggcaagagcuacagcugcaagagaggcagcgugaacagcuucuucagcagacugaacuggcugcacaagcuggaguacaaguaccccgcccugaacgugaccaugcccaacaacggcaaguucgacaagcuguacaucuggggcgugcaccaccccagcaccgacagcgaccagaccagccuguacgugagagccagcggcggcgugaccgugagcaccaagagaagccagcagaccgugauccccaacaucggcagcagacccugggugagaggccugagcagcagaaucagcaucuacuggaccaucgugaagcccggcgacauccugcugaucaacagcaccggcaaccugaucgcccccagaggcuacuucaagaugagaaacggcaagagcagcaucaugagaagcgacgcccccaucggcaacugcagcagcgagugcaucacccccaacggcagcauccccaacgacaagcccuuccagaacgugaacagaaucaccuacggcgccugccccagauacgugaagcagaacacccugaagcuggccaccggcaugagaaacgugcccgagaagcagaccagaggcaucuucggcgccaucgccggcuucaucgagaacggcugggagggcaugguggacggcugguacggcuucagacaccagaacagcgagggcaccggccaggccgccgaccugaagagcacccaggccgccaucgaccagaucaacggcaagcugaacagacugaucggcaagaccaacgagaaguuccaccagaucgagaaggaguucagcgagguggagggcagaauccaggaccuggagaaguacguggaggacaccaagaucgaccuguggagcuacaacgccgagcugcugguggcccuggagaaccagcacaccaucgaccugaccgacagcgagaugaacaagcuguucgagagaaccagaaagcagcugagagagaacgccgaggacaugggcaacggcugcuucaagaucuaccacaagugcgacaacgccugcaucggcagcaucagaaacggcaccuacgaccacgacguguacagagacgaggcccugaacaacagauuccagaucaagggcguggagcugaagagcggcuacaaggacuggauccuguggaucagcuucgccaucagcugcuuccugcugugcguggugcugcugggcuucaucaugugggccugccagaagggcaacaucagaugcaacaucugcaucuga

SEQ ID NO: 161089 - RNA, 1701 nt, Artificial Sequence; identical to SEQ ID NO: 161084
  derived and/or modified CDS sequence (opt4) from hemagglutinin__InfluenzaA__ABG47972

SEQ ID NO: 161090 - RNA, 1701 nt, Artificial Sequence; identical to SEQ ID NO: 161084
  derived and/or modified CDS sequence (opt4) from hemagglutinin__InfluenzaA__ABG47983

SEQ ID NO: 161091 - RNA, 1701 nt, Artificial Sequence; identical to SEQ ID NO: 161084
  derived and/or modified CDS sequence (opt4) from hemagglutinin__InfluenzaA__ABG47994

SEQ ID NO: 161092 - RNA, 1701 nt, Artificial Sequence
  derived and/or modified CDS sequence (opt4) from hemagglutinin__InfluenzaA__ABG48005
augaagaccaucaucgcccugagcuacauccugugccugguguucgcccagaagcugcccggcaacgacaacagcaccgccacccugugccugggccaccacgccgugcccaacggcacccuggugaagaccaucaccaacgaccagaucgaggugaccaacgccaccgagcuggugcagagcagcagcaccggcagaaucugcgacagcccccacagaauccuggacggcaagaacugcacccugaucgacgcccugcugggcgacccccacugcgacggcuuccagaacaaggagugggaccuguucguggagagaagcaaggccuacagcaacugcuaccccuacgacgugcccgacuacgccagccugagaagccugguggccagcagcggcacccuggaguucaucaacgaggacuucaacuggaccggcguggcccaggacggcaagagcuacgccugcaagagaggcagcgugaacagcuucuucagcagacugaacuggcugcacaagcuggaguacaaguaccccgcccugaacgugaccaugcccaacaacggcaaguucgacaagcuguacaucuggggcgugcaccaccccagcaccgacagcgaccagaccagccuguacgugagagccagcggcagagugaccgugagcaccaagagaagccagcagaccgugauccccaacaucggcuucagacccugggugagaggccugagcagcagaaucagcaucuacuggaccaucgugaagcccggcgacauccugcugaucaacagcaccggcaaccugaucgcccccagaggcuacuucaagaucagaaacggcaagagcagcaucaugagaagcgacgcccccaucggcaacugcagcagcgagugcaucacccccaacggcagcauccccaacgacaagcccuuccagaacgugaacagaaucaccuacggcgccugccccagauacgugaagcagaacacccugaagcuggccaccggcaugagaaacgugcccgagaagcagaccagaggcaucuucggcgccaucgccggcuucaucgagaacggcugggagggcaugguggacggcugguacggcuucagacaccagaacagcgagggcaccggccaggccgccgaccugaagagcacccaggccgccaucaaccagaucaacggcaagcugaacagacugaucgagaagaccaacgagaaguuccaccagaucgagaaggaguucagcgagguggagggcagaauccaggaccuggagaaguacguggaggacaccaagaucgaccuguggagcuacaacgccggccugcugguggcccuggagaaccagcacaccaucgaccugaccgacagcgagaugaacaagcuguucgagagaaccagaaagcagcugagagagaacgccgaggacaugggcaacggcugcuucaagaucuaccacaagugcgacaacgccugcaucggcagcaucagaaacggcaccuacgaccacgacguguacagagacgaggcccugaacaacagauuccagaucaagggcguggagcugaagagcggcuacaaggacuggauccuguggaucagcuucgccaucagcugcuuccugcugugcguggugcugcugggcuucaucaugugggccugccagaagggcaacaucagaugcaacaucugcaucuga

SEQ ID NO: 161093 - RNA, 1701 nt, Artificial Sequence; identical to SEQ ID NO: 161084
  derived and/or modified CDS sequence (opt4) from hemagglutinin__InfluenzaA__ABG48016

SEQ ID NO: 161094 - RNA, 1701 nt, Artificial Sequence; identical to SEQ ID NO: 161084
  derived and/or modified CDS sequence (opt4) from hemagglutinin__InfluenzaA__ABG48027

SEQ ID NO: 161095 - RNA, 1698 nt, Artificial Sequence
  derived and/or modified CDS sequence (opt4) from hemagglutinin__InfluenzaA__ABG48049
augaaggugaagcugcuggugcugcugugcaccuucaccgccaccuacgccgacaccaucugcaucggcuaccacgccaacaacagcaccgacaccguggacaccgugcuggagaagaacgugaccgugacccacagcgugaaccugcuggaggacagccacaacggcaagcugugccugcugaagggcaucgccccccugcagcugggcaacugcagcguggccggcuggauccugggcaaccccgagugcgagcugcugaucagcaaggagagcuggagcuacaucguggagacccccaaccccgagaacggcaccugcuaccccggcuacuucgccgacuacgaggagcugagagagcagcugagcagcgugagcagcuucgagagauucgagaucuuccccaaggagagcagcuggcccaaccacaccgugaccggcgugagcgccagcugcagccacaacggcaagagcagcuucuacagaaaccugcuguggcugaccggcaagaacggccuguaccccaaccugagcaagagcuacgccaacaacaaggagaaggaggugcuggugcuguggggcgugcaccacccccccaacaucggcgaccagagagcccuguaccacaccgagaacgccuacgugagcguggugagcacccacuacagcagaagauucacccccgagaucgccaagagacccaaggugagagaccaggagggcagaaucaacuacuacuggacccugcuggagcccggcgacaccaucaucuucgaggccaacggcaaccugaucgcccccagauacgccuucgcccugagcagaggcuucggcagcggcaucaucaccagcaacgcccccauggacgagugcgacgccaagugccagaccccccagggcgccaucaacagcagccugcccuuccagaacgugcaccccgugaccaucggcgagugccccaaguacgugagaagcgccaagcugagaauggugaccggccugagaaacauccccagcauccagagcagaggccuguucggcgccaucgccggcuucaucgagggcggcuggaccggcaugguggacggcugguacggcuaccaccaccagaacgagcagggcagcggcuacgccgccgaccagaagagcacccagaacgccaucaacggcaucaccaacaaggugaacagcgugaucgagaagaugaacacccaguucaccgccgugggcaaggaguucaacaagcuggagagaagaauggagaaccugaacaagaagguggacgacggcuuccuggacaucuggaccuacaacgccgagcugcuggugcugcuggagaacgagagaacccuggacuuccacgacagcaacgugaagaaccuguacgagaaggugaagagccagcugaagaacaacgccaaggagaucggcaacggcugcuucgaguucuaccacaagugcaacaacgagugcauggagagcgugaagaacggcaccuacgacuaccccaaguacagcgaggagagcaagcugaacagagagaagaucgacggcgugaagcuggagagcaugggcguguaccagauccuggccaucuacagcaccguggccagcagccuggugcugcuggugagccugggcgccaucagcuucuggaugugcagcaacggcagccugcagugcagaaucugcaucuga

SEQ ID NO: 161096 - RNA, 1701 nt, Artificial Sequence; identical to SEQ ID NO: 160710
  derived and/or modified CDS sequence (opt4) from hemagglutinin__InfluenzaA__ABG48060

SEQ ID NO: 161097 - RNA, 1701 nt, Artificial Sequence; identical to SEQ ID NO: 160710
  derived and/or modified CDS sequence (opt4) from hemagglutinin__InfluenzaA__ABG48071

SEQ ID NO: 161098 - RNA, 1701 nt, Artificial Sequence
  derived and/or modified CDS sequence (opt4) from hemagglutinin__InfluenzaA__ABG48082
augaagaccaucaucgcccugagcuacauccugugccugguguucgcccagaagcugcccggcaacgacaacagcaccgccacccugugccugggccaccacgccgugcccaacggcacccuggugaagaccaucaccaacgaccagaucgaggugaccaacgccaccgagcuggugcagagcagcagcaccggcagaaucugcgacagcccccaccagauccuggacggcgagaacugcacccugaucgacgcccugcugggcgacccccacugcgacggcuuccagaacaaggagugggaccuguucguggagagaagcaaggccuacagcaacugcuaccccuacgacgugcccgacuacgugagccugagaagccugguggccagcagcggcacccuggaguucaacaacgagagcuucaacuggaccggcguggcccagaacggcaccagcagcgccugcaagagaagaagcgacaagagcuucuucagcagacugaacuggcugcaccagcugaaguacaaguaccccgcccugaacgugaccaugcccaacaacgagaaguucgacaagcuguacaucuggggcgugcugcaccccggcaccgacagcgaccagaucagccuguacgcccaggccagcggcagagugaccgugagcaccaagagaagccagcagaccgugauccccaacaucggcagcagacccugggugagaggcgugagcagcagaaucagcaucuacuggaccaucgugaagcccggcgacauccugcugaucaacagcaccggcaaccugaucgcccccagaggcuacuucaagaucagaagcggcaagagcagcaucaugagaagcgacgcccccaucggcaagugcaacagcgagugcaucacccccaacggcagcauccccaacggcaagcccuuccagaacgugaacagaaucaccuacggcgccugccccagauacgugaagcagaacacccugaagcuggccaccggcaugagaaacgugcccgagaagcagaccagaggcaucuucggcgccaucgccggcuucaucgagaacggcugggagggcaugauggacggcugguacggcuucagacaccagaacagcgagggcaccggccaggccgccgaccugaagagcacccaggccgccaucaaccagaucaacggcaagcugaacagacugaucgagaagaccaacgagaaguuccaccagaucgagaaggaguucagcgagguggagggcagaauccaggaccuggagaaguacguggaggacaccaagaucgaccuguggagcuacaacgccgagcugcugguggcccuggagaaccagcacaccaucgaccugaccgacagcgagaugaacaagcuguucgagagaaccaagaagcagcugagagagaacgccgaggacaugggcaacggcugcuucaagaucuaccacaagugcgacaacgccugcaucggcagcaucagaaacggcaccuacgaccacgacguguacagagacgaggcccugaacaacagauuccagaucaagggcguggagcugaagagcggcuacaaggacuggauccuguggaucagcuucgccaucagcugcuuccugcugugcaucgugcugcugggcuucaucaugugggccugccagaagggcaacaucagaugcaacaucugcaucuga

SEQ ID NO: 161099 - RNA, 1701 nt, Artificial Sequence
  derived and/or modified CDS sequence (opt4) from hemagglutinin__InfluenzaA__ABG48104
augaagaccaucaucgcccugagcuacauccugugccugguguucgcccagaagcugcccggcaacgacaacagcaccgccacccugugccugggccaccacgccgugcccaacggcacccuggugaagaccaucaccaacgaccagaucgaggugaccaacgccaccgagcuggugcagagcagcagcaccggcagaaucugcgacagcccccaccagauccuggacggcgagaacugcacccugaucgacgcccugcugggcgacccccacugcgacggcuuccagaacaaggagugggaccuguucguggagagaagcagagccuacagcaacugcuaccccuacgacgugcccgacuacgugagccugagaagccugguggccagcagcggcacccuggaguucaacaacgagagcuucaacuggaccggcguggcccagaacggcaccagcagcgccugcaagagaagaagcgacaagagcuucuucagcagacugaacuggcugcaccagcugaaguacaaguaccccgcccugaacgugaccaugcccaacaacgagaaguucgacaagcuguacaucuggggcgugcaccaccccggcaccgacagcgaccagaucagccuguacgcccaggccagcggcagagugaccgugagcaccaagagaagccagcagaccgugauccccaacaucggcagcagacccugggugagaggcgugagcagcagaaucagcaucuacuggaccaucgugaagcccggcgacauccugcugaucaacagcaccggcaaccugaucgcccccagaggcuacuucaagaucagaagcggcaagagcagcaucaugagaagcgacgcccccaucggcaagugcaacagcgagugcaucacccccaacggcagcauccccaacgacaagcccuuccagaacgugaacagaaucaccuacggccccugccccagauacgugaagcagaacacccugaagcuggccaccggcaugagaaacgugcccgagaagcagaccagaggcaucuucggcgccaucgccggcuucaucgagaacggcugggagggcaugauggacggcugguacggcuucagacaccagaacagcgagggcaccggccaggccgccgaccugaagagcacccaggccgccaucaaccagaucaacggcaagcugaacagacugaucgagaagaccaacgagaaguuccaccagaucgagaaggaguucagcgagguggagggcagaauccaggaccuggagaaguacguggaggacaccaagaucgaccuguggagcuacaacgccgagcugcugguggcccuggagaaccagcacaccaucgaccugaccgacagcgagaugaacaagcuguucgagagaaccaagaagcagcugagagagaacgccgaggacaugggcaacggcugcuucaagaucuaccacaagugcgacaacgccugcaucggcagcaucagaaacggcaccuacgaccacgacguguacagagacgaggcccugaacaacagauuccagaucaagggcguggagcugaagagcggcuacaaggacuggauccuguggaucagcuucgccaucagcugcuuccugcugugcaucgugcugcugggcuucaucaugugggccugccagaagggcaacaucagaugcaacaucugcaucuga

SEQ ID NO: 161100 - RNA, 1701 nt, Artificial Sequence; identical to SEQ ID NO: 160700
  derived and/or modified CDS sequence (opt4) from hemagglutinin__InfluenzaA__ABG48115

SEQ ID NO: 161101 - RNA, 1701 nt, Artificial Sequence; identical to SEQ ID NO: 160707
  derived and/or modified CDS sequence (opt4) from hemagglutinin__InfluenzaA__ABG48126

SEQ ID NO: 161102 - RNA, 1701 nt, Artificial Sequence; identical to SEQ ID NO: 160622
  derived and/or modified CDS sequence (opt4) from hemagglutinin__InfluenzaA__ABG48148

SEQ ID NO: 161103 - RNA, 1701 nt, Artificial Sequence; identical to SEQ ID NO: 160622
  derived and/or modified CDS sequence (opt4) from hemagglutinin__InfluenzaA__ABG48159

SEQ ID NO: 161104 - RNA, 1701 nt, Artificial Sequence
  derived and/or modified CDS sequence (opt4) from hemagglutinin__InfluenzaA__ABG48170
augaagaccaucaucgcccugagcuacauccugugccugguguucgcccagaagcugcccggcaacgacaacagcaccgccacccugugccugggccaccacgccgugcccaacggcacccuggugaagaccaucaccaacgaccagaucgaggugaccaacgccaccgagcuggugcagagcagcagcaccggcagaaucugcgacagcccccaccagauccuggacggcgagaacugcacccugaucgacgcccugcugggcgacccccacugcgacggcuuccagaacaaggagugggaccuguucguggagagaagcaaggccuacagcaacugcuaccccuacgacgugcccgacuacgugagccugagaagccugguggccagcagcggcacccuggaguucaacaacgagagcuucaacuggaccggcguggcccagaacggcaccagcagcgccugcaagagaagaagcgacaagagcuucuucagcagacugaacuggcugcaccagcugaaguacaaguaccccgcccugaacgugaccaugcccaacaacgagaaguucgacaagcuguacaucuggggcgugcaccaccccggcaccgacagcgaccagaucagccuguacgcccaggccagcggcagagugaccgugagcaccaagagaagccagcagaccgugauccccaacaucggcagcagacccugggugagaggcgugagcagcagaaucagcaucuacuggaccaucgugaagcccggcgacauccugcugaucaacagcaccggcaaccugaucgcccccagaggcuacuucaagaucagaagcggcaagagcagcaucaugaagagcgacgcccccaucggcaagugcaacuucgagugcaucacccccaacggcagcauccccaacggcaagcccuuccagaacgugaacagaaucaccuacggcgccugccccagauacgugaagcagaacacccugaagcuggccaccggcaugagaaacgugcccgagaagcagaccagaggcaucuucggcgccaucgccggcuucaucgagaacggcugggagggcaugauggacggcugguacggcuucagacaccagaacagcgagggcaccggccaggccgccgaccugaagagcacccaggccgccaucaaccagaucaacggcaagcugaacagacugaucgagaagaccaacgagaaguuccaccagaucgagaaggaguucagcgagguggagggcagaauccaggaccuggagaaguacguggaggacaccaagaucgaccuguggagcuacaacgccgagcugcugguggcccuggagaaccagcacaccaucgaccugaccgacagcgagaugaacaagcuguucgagagaaccaagaagcagcugagagagaacgccgaggacaugggcaacggcugcuucaagaucuaccacaagugcgacaacgccugcaucggcagcaucagaaacggcaccuacgaccacgacguguacagagacgaggcccugaacaacagauuccagaucaagggcguggagcugaagagcggcuacaaggacuggauccuguggaucagcuucgccaucagcugcuuccugcugugcaucgugcugcugggcuucaucaugugggccugccagaagggcaacaucagaugcaacaucugcaucuga

SEQ ID NO: 161105 - RNA, 1701 nt, Artificial Sequence
  derived and/or modified CDS sequence (opt4) from hemagglutinin__InfluenzaA__ABG48181
augaagaccaucaucgcccugagcuacauccugugccugguguucgcccagaagcugcccggcaacgacaacagcaccgccacccugugccugggccaccacgccgugcccaacggcacccuggugaagaccaucaccaacgaccagaucgaggugaccaacgccaccgagcuggugcagagcagcagcaccggcagaaucugcgacagcccccaccagauccuggacggcgagaacugcacccugaucgacgcccugcugggcgacccccacugcgacggcuuccagaacaaggagugggaccuguucguggagagaagcaaggccuacagcaacugcuaccccuacgacgugcccgacuacgugagccugagaagccugguggccagcagcggcacccuggaguucaacaacgagagcuucaacuggaccggcguggcccagaacggcaccagcuacgccugcaagagaagaagcgacaagagcuucuucagcagacugaacuggcugcaccagcugaaguacaaguaccccgcccugaacgugaccaugcccaacaacgagaaguucgacaagcuguacaucuggggcgugcaccaccccggcaccgacagcgaccagaucagccuguacgcccaggccagcggcagagugaccgugagcaccaagagaagccagcagaccgugauccccaacaucggcagcagacccugggugagaggcgugagcagcagaaucagcaucuacuggaccaucgugaagcccggcgacauccugcugaucaacagcaccggcaaccugaucgcccccagaggcuacuucaagaucagaagcggcaagagcagcaucaugagaagcgacgcccccaucggcaagugcaacagcgagugcaucacccccaacggcagcauccccaacgacaagcccuuccagaacgugaacagaaucaccuacggcgccugccccagauacgugaagcagaacacccugaagcuggccaccggcaugagaaacgugcccgagaagcagaccagaggcaucuucggcgccaucgccggcuucaucgagaacggcugggagggcaugauggacggcugguacggcuucagacaccagaacagcgagggcaccggccaggccgccgaccugaagagcacccaggccgccaucaaccagaucaacggcaagcugaacagacugaucgagaagaccaacgagaaguuccaccagaucgagaaggaguucagcgagguggagggcagaauccaggaccuggagaaguacguggaggacaccaagaucgaccuguggagcuacaacgccgagcugcugguggcccuggagaaccagcacaccaucgaccugaccgacagcgagaugaacaagcuguucgagagaaccaagaagcagcugagagagaacgccgaggacaugggcaacggcugcuucaagaucuaccacaagugcgacaacgccugcaucggcagcaucagaaacggcaccuacgaccacgacguguacagagacgaggcccugaacaacagauuccagaucaagggcguggagcugaagagcggcuacaaggacugggugcuguggaucagcuucgccaucagcugcuuccugcugugcaucgugcugcugggcuucaucaugugggccugccagaagggcaacaucagaugcaacaucugcaucuga

SEQ ID NO: 161106 - RNA, 1701 nt, Artificial Sequence; identical to SEQ ID NO: 160622
  derived and/or modified CDS sequence (opt4) from hemagglutinin__InfluenzaA__ABG48192

SEQ ID NO: 161107 - RNA, 1701 nt, Artificial Sequence
  derived and/or modified CDS sequence (opt4) from hemagglutinin__InfluenzaA__ABG48203
augaagaccaucaucgcccugagcuacauccugugccugguguucgcccagaagcugcccggcaacgacaacagcaccgccacccugugccugggccaccacgccgugcccaacggcaccaucgugaagaccaucaccaacgaccagaucgaggugaccaacgccaccgagcuggugcagagcagcagcaccggcggcaucugcgacagcccccaccagauccuggacggcgagaacugcacccugaucgacgcccugcugggcgacccccagugcgacggcuuccagaacaagaagugggaccuguucguggagagaagcaaggccuacagcaacugcuaccccuacgacgugcccgaccacgccagccugagaagccugguggccagcagcggcacccuggaguucaacaacgagagcuucgacuggaccggcgugacccagaacggcaccagcagcgccugcaagagaagaagcaacaagagcuucuucagcagacugaacuggcugacccaccugaaguacaaguaccccgcccugaacgugaccaugcccaacaacgagaaguucgacaagcuguacaucuggggcgugcaccaccccggcaccgacagcgaccagaucagccuguacgcccaggccagcggcagaaucaccgugagcaccaagagaagccagcagaccgugauccccaacaucggcagcagacccagagugagagacgugagcagcagaaucagcaucuacuggaccaucgugaagcccggcgacauccugcugaucaacagcaccggcaaccugaucgcccccagaggcuacuucaagaucagaagcggcaagagcagcaucaugagaagcgacgcccccaucggcaagugcaacagcgagugcaucacccccaacggcagcauccccaacgacaagcccuuccagaacgugaacagaaucaccuacggcgccugccccagauacgugaagcagaacacccugaagcuggccaccggcaugagaaacgugcccgagaagcagaccagaggcaucuucggcgccaucgccggcuucaucgagaacggcugggagggcaugguggacggcugguacggcuucagacaccagaacagcgagggcaccggccaggccgccgaccugaagagcacccaggccgccaucaaccagaucaacggcaagcugaacagacugaucggcaagaccaacgagaaguuccaccagaucgagaaggaguucagcgagguggagggcagaauccaggaccuggagaaguacguggaggacaccaagaucgaccuguggagcuacaacgccgagcugcugguggcccuggagaaccagcacaccaucgaccugaccgacagcgagaugaacaagcuguucgagagaaccaagaagcagcugagagagaacgccgaggacaugggcaacggcugcuucaagaucuaccacaagugcgacaacgccugcaucggcagcaucagaaacggcaccuacgaccacgacguguacagagacgaggcccugaacaacagauuccagaucaagggcguggagcugaagagcggcuacaaggacuggauccuguggaucagcuucgccaucagcugcuuccugcugugcguggcccugcugggcuucaucaugugggccugccagaagggcaacaucagaugcaacgugugcaucuga

SEQ ID NO: 161108 - RNA, 1701 nt, Artificial Sequence; identical to SEQ ID NO: 160576
  derived and/or modified CDS sequence (opt4) from hemagglutinin__InfluenzaA__ABG48214

SEQ ID NO: 161109 - RNA, 1701 nt, Artificial Sequence; identical to SEQ ID NO: 160576
  derived and/or modified CDS sequence (opt4) from hemagglutinin__InfluenzaA__ABG48236

SEQ ID NO: 161110 - RNA, 1701 nt, Artificial Sequence
  derived and/or modified CDS sequence (opt4) from hemagglutinin__InfluenzaA__ABG48247
augaagaccaucaucgcccugagcuacauccugugccugguguucgcccagaagcugcccggcaacgacaacaacaccgccacccugugccugggccaccacgccgugcccaacggcaccaucgugaagaccaucaccaacgaccagaucgaggugaccaacgccaccgagcuggugcagagcagcagcaccggcggcaucugcgacagcccccaccagauccuggacggcgagaacugcacccugaucgacgcccugcugggcgacccccagugcgacggcuuccagaacaagaagugggaccuguucguggagagaagcaaggccuacagcaacugcuaccccuacgacgugcccgaccacgccagccugagaagccugguggccagcagcggcacccuggaguucaacaacgagagcuucgacuggaccggcgugacccagaacggcaccagcagcgccugcaagagaagaagcaacaagagcuucuucagcagacugaacuggcugacccaccugaaguacaaguaccccgcccugaacgugaccaugcccaacaacgagaaguucgacaagcuguacaucuggggcgugcaccaccccggcaccgacagcgaccagaucagccuguacgcccaggccagcggcagaaucaccgugagcaccaagagaagccagcagaccgugauccccaacaucggcagcagacccagagugagagacgugagcagcagaaucagcaucuacuggaccaucgugaagcccggcgacauccugcugaucaacagcaccggcaaccugaucgcccccagaggcuacuucaagaucagaagcggcaagagcagcaucaugagaagcgacgcccccaucggcaagugcaacagcgagugcaucacccccaacggcagcauccccaacgacaagcccuuccagaacgugaacagaaucaccuacggcgccugccccagauacgugaagcagaacacccugaagcuggccaccggcaugagaaacgugcccgagaagcagaccagaggcaucuucggcgccaucgccggcuucaucgagaacggcugggagggcaugguggacggcugguacggcuucagacaccagaacagcgagggcaccggccaggccgccgaccugaagagcacccaggccgccaucaaccagaucaacggcaagcugaacagacugaucggcaagaccaacgagaaguuccaccagaucgagaaggaguucagcgagguggagggcagaauccaggaccuggagaaguacguggaggacaccaagaucgaccuguggagcuacaacgccgagcugcugguggcccuggagaaccagcacaccaucgaccugaccgacagcgagaugaacaagcuguucgagagaaccaagaagcagcugagagagaacgccgaggacaugggcaacggcugcuucaagaucuaccacaagugcgacaacgccugcaucggcagcaucagaaacggcaccuacgaccacgacguguacagagacgaggcccugaacaacagauuccagaucaagggcguggagcugaagagcggcuacaaggacuggauccuguggaucagcuucgccaucagcugcuuccugcugugcguggcccugcugggcuucaucaugugggccugccagaagggcaacaucagaugcaacaucugcaucuga

SEQ ID NO: 161111 - RNA, 1701 nt, Artificial Sequence
  derived and/or modified CDS sequence (opt4) from hemagglutinin__InfluenzaA__ABG48269
augaagaccaucaucgcccugagcuacauccugugccugguguucgcccagaagcugcccggcaacgacaacagcaccgccacccugugccugggccaccacgccgugcccaacggcaccaucgugaagaccaucaccaacgaccagaucgaggugaccaacgccaccgagcuggugcagagcagccccaccggcggcaucugcgacagcccccaccagauccuggacggcgagaacugcacccugaucgacgcccugcugggcgacccccagugcgacggcuuccagaacaagaagugggaccuguucguggagagaagcaaggcccacagcaacugcuaccccuacgacgugcccgacuacgccagccugagaagccugguggccagcagcggcacccuggaguucaacaacgagagcuucaacuggaccggcgugacccagaacggcaccagcagcgccugcaagagaagaagcaacaagagcuucuucagcagacugaacuggcugacccaccugaaguucaaguaccccgcccugaacgugaccaugcccaacaacgagaaguucgacaagcuguacaucuggggcgugcaccaccccggcaccgacaacgaccagaucagccuguacgcccaggccagcggcagaaucaccgugagcaccaagagaagccagcagaccgugauccccaacaucggcagcagacccagagugagagacgugcccagcagaaucagcaucuacuggaccaucgugaagcccggcgacauccugcugaucaacagcaccggcaaccugaucgcccccagaggcuacuucaagaucagaagcggcaagagcagcaucaugagaagcgacgcccccaucggcaagugcaacagcgagugcaucacccccaacggcagcauccccaacgacaagcccuuccagaacgugaacagaaucaccuacggcgccugccccagauacgugaagcagaacacccugaagcuggccaccggcaugagaaacgugcccgagaagcagaccagaggcaucuucggcgccaucgccggcuucaucgagaacggcugggagggcaugguggacggcugguacggcuucagacaccagaacagcgagggcaccggccaggccgccgaccugaagagcacccaggccgccaucaaccagaucaacggcaagcugaacagacugaucggcaagaccaacgagaaguuccaccagaucgagaaggaguucagcgagguggagggcagaauccaggaccuggagaaguacguggaggacaccaagaucgaccuguggagcuacaacgccgagcugcugguggcccuggagaaccagcacaccaucgaccugaccgacagcgagaugaacaagcuguucgagagaaccaagaagcagcugagagagaacgccgaggacaugggcaacggcugcuucaagaucuaccacaagugcgacaacgccugcaucggcagcaucagaaacggcaccuacgaccacgacguguacagagacgaggcccugaacaacagauuccagaucaagggcguggagcugaagagcggcuacaaggacuggauccuguggaucagcuucgccaucagcugcuuccugcugugcguggcccugcugggcuucaucaugugggccugccagaagggcaacaucagaugcaacaucugcaucuga

SEQ ID NO: 161112 - RNA, 1701 nt, Artificial Sequence
  derived and/or modified CDS sequence (opt4) from hemagglutinin__InfluenzaA__ABG48291
augaagaccaucaucgcccugagcuacauccugugccugguguucgcccagaagcugcccggcaacgacaacagcaccgccacccugugccugggccaccacgccgugcccaacggcacccuggugaagaccaucaccaacgaccagaucgaggugaccaacgccaccgagcuggugcagagcagcagcaccggcagaaucugcgacagcccccacagaauccuggacggcaagaacugcacccugaucgacgcccugcugggcgacccccacugcgacggcuuccagaacaaggagugggaccuguucguggagagaagcaaggccuacagcaacugcuaccccuacgacgugcccgacuacgccagccugagaagccugguggccagcagcggcacccuggaguucaucaacgaggacuucaacuggaccggcguggcccaggacggcggcagcuacgccugcaagagaggcagcgugaacagcuucuucagcagacugaacuggcugcacaagagcgaguacaaguaccccgcccugaacgugagcaugcccaacaacggcaaguucaacaagcuguacaucuggggcgugcaccaccccagcaccgacagcgaccagaccagccuguacgugagagccagcggcagagugaccgugagcaccaagagaagccagcagaccgugacccccaacaucggcagcagacccugggugagaggccugagcagcagaaucagcaucuacuggaccaucgugaagcccggcgacauccugcugaucaacagcaccggcaaccugaucgcccccagaggcuacuucaagaucagaaacggcaagagcagcaucaugagaagcgacgcccccaucggcaccugcagcuucgagugcaucacccccaacggcagcauccccaacgacaagcccuuccagaacgugaacagaaucaccuacggcgccugccccagauacgugaagcagaacacccugaagcuggccaccggcaugagaaacgugcccgagaagcagaccagaggcaucuucggcgccaucgccggcuucaucgagaacggcugggagggcaugguggacggcugguacggcuucagacaccagaacagcgagggcaccggccaggccgccgaccugaagagcacccaggccgccaucgaccagaucaacggcaagcugaacagacugaucgagaagaccaacgagaaguuccaccagaucgagaaggaguucagcgagguggagggcagaauccaggaccuggagaaguacguggaggacaccaagaucgaccuguggagcuacaacgccgagcugcugguggcccuggagaaccagcacaccaucgaccugaccgacagcgagaugaacaagcuguucgagaagaccagaaagcagcugagagagaacgccgaggacaugggcaacggcugcuucaagaucuaccacaagugcgacaacgccugcaucggcagcaucagaaacggcaccuacgaccacgacguguacagagacgaggcccugaacaacagauuccagaucaagggcguggagcugaagagcggcuacaaggacuggauccuguggaucagcuucgccaucagcugcuuccugcugugcguggugcugcugggcuucaucaugugggccugccagaagggcaacaucagaugcaacaucugcaucuga

SEQ ID NO: 161113 - RNA, 1701 nt, Artificial Sequence
  derived and/or modified CDS sequence (opt4) from hemagglutinin__InfluenzaA__ABG48335
augaagaccaucaucgcccugagcuacauccugugccugguguucgcccagaagcugcccggcaacgacaacagcaccgccacccugugccugggccaccacgccgugcccaacggcacccuggugaagaccaucaccaacgaccagaucgaggugaccaacgccaccgagcuggugcagagcagcagcaccggcagaaucugcgacagcccccacagaauccuggacggcaagaacugcacccugaucgacgcccugcugggcgacccccacugcgacggcuuccagaacaaggagugggaccuguucguggagagaagcaaggccuacagcaacugcuaccccuacgacgugcccgacuacgccagccugagaagccugguggccagcagcggcacccuggaguucaucaacgaggacuucaacuggaccggcguggcccaggacggcaagagcuacgccugcaagagaggcagcgugaacagcuucuucagcagacugaacuggcugcacaagcuggaguacaaguaccccgcccugaacgugaccaugcccaacaacggcaaguucgacaagcuguacaucuggggcgugcaccaccccagcaccgacagcgaccagaccagccuguacgugagagccagcggcagagugaccgugagcaccaagagaagccagcagaccgugauccccaacaucggcagcagacccugggugagaggccugagcagcagaaucagcaucuacuggaccaucgugaagcccggcgacauccugcugaucaacagcaccggcaaccugaucgcccccagaggcuacuucaagaucagaaacggcaagagcagcaucaugagaagcgacgcccccaucggcaacugcagcagcgagugcaucacccccaacggcagcauccccaacgacaagcccuuccagaacgugaacagaaucaccuacggcgccugccccagauacgugaagcagaacacccugaagcuggccaccggcaugagaaacgugcccgagaagcagaccagaggcaucuucggcgccaucgccggcuucaucgagaacggcugggagggcaugguggacggcugguacggcuucagacaccagaacagcgagggcaccggccaggccgccgaccugaagagcacccaggccgccaucgaccagaucaacggcaagcugaacagacugaucgagaagaccaacgagaaguuccaccagaucgagaaggaguucagcgagguggagggcagaauccaggaccuggagaaguacguggaggacaccaagaucgaccuguggagcuacaacgccgagcugcugguggcccuggagaaccagcacaccaucgaccugaccgacagcgagaugaacaagcuguucgagagaaccagaaagcagcugagagagaacgccgaggacaugggcaacggcugcuucaagaucuaccacaagugcgacaacgccugcaucggcagcaucagaaacggcaccuacgaccacgacguguacagagacgaggcccugaacaacagauuccagaucaagggcguggagcugaagagcggcuacaaggacuggauccuguggaucagcuucgccaucagcugcuuccugcugugcguggugcugcugggcuucaucaugugggccugccagaagggcaacaucagaugcaacaucugcaucuga

SEQ ID NO: 161114 - RNA, 1701 nt, Artificial Sequence
  derived and/or modified CDS sequence (opt4) from hemagglutinin__InfluenzaA__ABG48346
augaagaccaucaucgcccugagcuacauccugugccugguguucgcccagaagcugcccggcaacgacaacagcaccgccacccugugccugggccaccacgccgugcccaacggcacccuggugaagaccaucaccaacgaccagaucgaggugaccaacgccaccgagcuggugcagagcagcagcaccggcagaaucugcgacagcccccacagaauccuggacggcaagaacugcacccugaucgacgcccugcugggcgacccccacugcgacggcuuccagaacaaggagugggaccuguucguggagagaaacaaggccuacagcaacugcuaccccuacgacgugcccgacuacgccagccugagaagccugguggccagcagcggcacccuggaguucaucaacgaggacuucaacuggaccggcguggcccaggacggcaagagcuacgccugcaagagaggcagcgugaacagcuucuucagcagacugaacuggcugcacaagcuggaguacaaguaccccgcccugaacgugaccaugcccaacaacggcaaguucgacaagcuguacaucuggggcgugcaccaccccagcaccgacagcgaccagaccagccuguacgugagagccagcggcagagugaccgugagcaccaagagaagccagcagaccgugauccccaacaucggcagcagacccugggugagaggccugagcagcagaaucagcaucuacuggaccaucgugaagcccggcgacauccugcugaucaacagcaccggcaaccugaucgcccccagaggcuacuucaagaucagaaacggcaagagcagcaucaugagaagcgacgcccccaucggcaacugcagcagcgagugcaucacccccaacggcagcauccccaacgacagacccuuccagaacgugaacagaaucaccuacggcgccugccccagauacgugaagcagaacacccugaagcuggccaccggcaugagaaacgugcccgagaagcagaccagaggcaucuucggcgccaucgccggcuucaucgagaacggcugggagggcaugguggacggcugguacggcuucagacaccagaacagcgagggcaccggccaggccgccgaccugaagagcacccaggccgccaucgaccagaucaacggcaagcugaacagacugaucgagaagaccaacgagaaguuccaccagaucgagaaggaguucagcgagguggagggcagaauccaggaccuggagaaguacguggaggacaccaagaucgaccuguggagcuacaacgccgagcugcugguggcccuggagaaccagcacaccaucgaccugaccgacagcgagaugaacaagcuguucgagagaaccagaaagcagcugagagagaacgccgaggacaugggcaacggcugcuucaagaucuaccacaagugcgacaacgccugcaucggcagcaucagaaacggcaccuacgaccacgacguguacagagacgaggcccugaacaacagauuccagaucaagggcguggagcugaagagcggcuacaaggacuggauccuguggaucagcuucgccaucagcugcuuccugcugugcguggugcugcugggcuucaucaugugggccugccagaagggcaacaucagaugcaacaucugcaucuga

SEQ ID NO: 161115 - RNA, 1701 nt, Artificial Sequence; identical to SEQ ID NO: 161113
  derived and/or modified CDS sequence (opt4) from hemagglutinin__InfluenzaA__ABG48357

SEQ ID NO: 161116 - RNA, 1701 nt, Artificial Sequence
  derived and/or modified CDS sequence (opt4) from hemagglutinin__InfluenzaA__ABG48368
augaagaccaucaucgcccugagcuacauccugugccugguguucgcccagaagcugcccggcaacgacaacagcaccgccacccugugccugggccaccacgccgugcccaacggcacccuggugaagaccaucaccaacgaccagaucgaggugaccaacgccaccgagcuggugcagagcagcagcaccggcagaaucugcgacagcccccacagaauccuggacggcaagaacugcacccugaucgacgcccugcugggcgacccccacugcgacggcuuccagaacaaggagugggaccuguucguggagagaagcaaggccuacagcaacugcuaccccuacgacgugcccgacuacgccagccugagaagccugguggccagcagcggcacccuggaguucaucaacgaggacuucaacuggaccggcguggcccaggacggcaagagcuacgccugcaagagaggcagcgugaacagcuucuucagcagacugaacuggcugcacaagcuggaguacaaguaccccgcccugaacgugaccaugcccaacaacggcaaguucgacaagcuguacaucuggggcgugcaccaccccagcaccgacagcgaccagaccagccuguacgugagagccagcggcagagugaccgugagcaccaagagaagccagcagaccgugauccccaacaucggcagcagacccugggugagaggccugagcagcagaaucagcaucuacuggaccaucgugaagcccggcgacauccugcugaucaacagcaccggcaaccugaucgcccccagaggcuacuucaagaucagaaacggcaagagcagcaucaugagaagcgacgcccccaucggcaacugcagcagcgagugcaucacccccaacggcagcauccccaacgacaagcccuuccagaacgugaacagaaucaccuacggcgccugccccagauacgugaagcagaacacccugaagcuggccaccggcaugagaaacgugcccgagaagcagaccagaggcaucuucggcgccaucgccggcuucaucgagaacggcugggagggcaugguggacggcugguacggcuucagacaccagaacagcgagggcaccggccaggccgccgaccugaagagcacccaggccgccaucgaccagaucaacggcaagcugaacagacugaucgagaagaccaacgagaaguuccaccagaucgagaaggaguucagcgagguggagggcagaauccaggaccuggagaaguacguggaggacaccaagaucgaccuguggagcuacaacgccgagcugcugguggcccuggagaaccagcacaccaucgaccugaccgacagcgagaugaacaagcuguucgagagaaccagaaagcagcugagagagaacgccgaggacaugggcaacggcugcuucaagguguaccacaagugcgacaacgccugcaucgagagcaucagaaacggcaccuacgaccacgacguguacagagacgaggcccugaacaacagauuccagaucaagggcguggagcugaagagcggcuacaaggacuggauccuguggaucagcuucgccaucagcugcuuccugcugugcguggugcugcugggcuucaucaugugggccugccagaagggcaacaucagaugcaacaucugcaucuga

SEQ ID NO: 161117 - RNA, 1701 nt, Artificial Sequence; identical to SEQ ID NO: 160967
  derived and/or modified CDS sequence (opt4) from hemagglutinin__InfluenzaA__ABG67135

SEQ ID NO: 161118 - RNA, 1701 nt, Artificial Sequence; identical to SEQ ID NO: 160843
  derived and/or modified CDS sequence (opt4) from hemagglutinin__InfluenzaA__ABG67146

SEQ ID NO: 161119 - RNA, 1701 nt, Artificial Sequence
  derived and/or modified CDS sequence (opt4) from hemagglutinin__InfluenzaA__ABG67157
augaagaccaucaucgcccugagcuacauccugugccugguguucgcccagaagcugcccggcaacgacaacagcaccgccacccugugccugggccaccacgccgugcccaacggcacccuggugaagaccaucaccaacgaccagaucgaggugaccaacgccaccgagcuggugcagagcagccccaccggcagaaucugcaacagcccccacagaaucaucgacggcaagaacugcacccugaucgacgcccugcugggcgacccccacugcgacggcuuccagaacaaggagugggaccuguucguggagagaagcaaggccuacagcaacugcuaccccuacgacgugcccgacuacgccagccugagaagccugguggccagcagcggcacccuggaguucaucaacgagaacuucaacuggaccggcguggcccaggacggcaagagcuacgccugcaagagaggcagcgugaacagcuucuucagcagacugaacuggcugcacaagcuggaguacaaguaccccgcccugaacgugaccaugcccaacaacggcaaguucgacaagcuguacaucuggggcgugcaccaccccagcaccgacagcgaccagaccagccuguacgugagagccagcggcagagugaccgugagcaccaagagaagccagcagaccgugauccccgacaucggcuacagacccugggugagaggccugagcagcagaaucagcaucuacuggaccaucgugaagcccggcgacauccugcugaucaacagcaccggcaaccugaucgcccccagaggcuacuucaagcugagaaacggcaagagcagcaucaugagaagcgacgcccccaucggcaacugcagcagcgagugcaucacccccaacggcagcauccccaacgacaagcccuuccagaacgugaacagaaucaccuacggcgccugccccagauacaucaagcagaacacccugaagcuggccaccggcaugagaaacgugcccgagaagcagaccagaggcaucuucggcgccaucgccggcuucaucgagaacggcugggagggcaugguggacggcugguacggcuucagacaccagaacagcgagggcaccggccaggccgccgaccugaagagcacccaggccgccaucgaccagaucaacggcaagcugaacagacugguggagaagaccaacgagaaguuccaccagaucgagaaggaguucagcgagguggagggcagaauccaggaccuggagaaguacguggaggacaccaagaucgaccuguggagcuacaacgccgagcugcugguggcccuggagaaccagcacaccaucgaccugaccgacagcgagaugaacaagcuguucgagagaaccaagaagcagcugagagagaacgccgaggacaugggcaacggcugcuucaagaucuaccacaagugcgacaacgccugcaucggcagcaucagaaacggcaccuacgaccacgacguguacagagacgaggcccugaacaacagauuccagaucaagggcguggagcugaagagcggcuacaaggacuggauccuguggaucagcuucgccaucagcugcuuccugcugugcguggugcugcugggcuucaucaugugggccugccagaagggcaacaucagaugcaacaucugcaucuga

SEQ ID NO: 161120 - RNA, 1701 nt, Artificial Sequence; identical to SEQ ID NO: 161044
  derived and/or modified CDS sequence (opt4) from hemagglutinin__InfluenzaA__ABG67168

SEQ ID NO: 161121 - RNA, 1701 nt, Artificial Sequence; identical to SEQ ID NO: 161044
  derived and/or modified CDS sequence (opt4) from hemagglutinin__InfluenzaA__ABG67179

SEQ ID NO: 161122 - RNA, 1701 nt, Artificial Sequence
  derived and/or modified CDS sequence (opt4) from hemagglutinin__InfluenzaA__ABG67190
augaagaccaucaucgcccugagcuacauccugugccugguguucgcccagaagcugcccggcaacgacaacagcaccgccacccugugccugggccaccacgccgugcccaacggcacccuggugaagaccaucaccaacgaccagaucgaggugaccaacgccaccgagcuggugcagagcuuccccaccggcagaaucugcgacagcccccacagaauccuggacggcaagaacugcacccugaucgacgcccugcugggcgacccccacugcgacggcuuccagaacaaggagugggaccuguucguggagagaagcaaggccuacagcaacugcuaccccuacgacgugcccgacuacgccagccugagaagccugguggccagcagcggcacccuggaguucaccaacgagaacuucaacuggaccggcguggcccaggacggcaagagcuacgccugcaagagaggcagcgugaacagcuucuucagcagacugaacuggcugcacaagcuggaguacaaguaccccgcccugaacgugaccaugcccaacaacggcaaguucgacaagcuguacaucuggggcgugcaccaccccagcaccgacagcgaccagaccagccuguacgugagagccagcggcaaggugaccgugagcaccaagagaagccagcagaccgugauccccgacaucggcuacagacccugggugagaggccugagcagcagaaucagcaucuacuggaccaucgugaagcccggcgacauccugcugaucaacagcaccggcaaccugaucgcccccagaggcuacuucaagaucagaaacggcaagagcagcaucaugagaagcgacgcccccaucggcaacugcagcagcgagugcaucacccccaacggcagcauccccaacgacaagcccuuccagaacgugaacagaaucaccuacggcgccugccccagauacgugaagcagaacacccugaagcuggccaccggcaugagaaacgugcccgagaagcagaccagaggcaucuucggcgccaucgccggcuucaucgagaacggcugggagggcaugguggacggcugguacggcuucagacaccagaacagcgagggcaccggccaggccgccgaccugaagagcacccaggccgccaucgaccagaucaacggcaagcugaacagacugguggagaagaccaacgagaaguuccaccagaucgagaaggaguucagcgagguggagggcagaauccaggaccuggagaaguacguggaggacaccaagaucgaccuguggagcuacaacgccgagcugcugguggcccuggagaaccagcacaccaucgaccugaccgacagcgagaugaacaagcuguucgagagaaccagaaagcagcugagagagaacgccgaggacaugggcaacggcugcuucaagaucuaccacaagugcgacaacgccugcaucggcagcaucagaaacggcaccuacgaccacgacguguacagagacgaggcccugaacaacagauuccagaucaagggcguggagcugaagagcggcuacaaggacuggauccuguggaucagcuucgccaucagcugcuuccugcugugcguggugcugcugggcuucaucaugugggccugccagaagggcaacaucagaugcaacaucugcaucuga

SEQ ID NO: 161123 - RNA, 1701 nt, Artificial Sequence
  derived and/or modified CDS sequence (opt4) from hemagglutinin__InfluenzaA__ABG67212
augaagaccaucaucgcccugagcuacauccugugccugguguucgcccagaagcugcccggcaacgacaacagcaccgccacccugugccugggccaccacgccgugcccaacggcacccuggugaagaccaucaccaacgaccagaucgaggugaccaacgccaccgagcuggugcagagcagcagcaccggcagaaucugcgacagcccccacagaauccuggacggcaagaacugcacccugaucgacgcccugcugggcgacccccacugcgacggcuuccagaacaaggagugggaccuguucguggagagaagcaaggccuacagcaacugcuaccccuacgacgugcccgacuacgccagccugagaagccugguggccagcagcggcacccuggaguucaucaacgaggacuucaacuggaccggcguggcccaggacggcaagagcuacgccugcaagagaggcagcgugaacagcuucuucagcagacugaacuggcugcacaagcuggaguacagauaccccgcccugaacgugaccaugcccaacaacggcaaguucgacaagcuguacaucuggggcgugcaccaccccagcaccgacagcgaccagaccagccuguacgugagagccagcggcagagugaccgugagcaccaagagaagccagcagaccgugauccccaacaucggcuucagacccugggugagaggccugagcagcagaaucagcaucuacuggaccaucgugaagcccggcgacauccugcugaucaacagcaccggcaaccugaucgcccccagaggcuacuucaagaucagaaacggcaagagcagcaucaugagaagcgacgcccccaucggcaacugcagcagcgagugcaucacccccaacggcagcauccccaacgacaagcccuuccagaacgugaacagaaucaccuacggcgccugccccagauacgugaagcagaacacccugaagcuggccaccggcaugagaaacgugcccgagaagcagaccagaggcaucuucggcgccaucgccggcuucaucgagaacggcugggagggcaugguggacggcugguacggcuucagacaccagaacagcgagggcaccggccaggccgccgaccugaagagcacccaggccgccaucgaccagaucaacggcaagcugaacagacugaucgagaagaccaacgagaaguuccaccagaucgagaaggaguucagcgagguggagggcagaauccaggaccuggagaaguacguggaggacaccaagaucgaccuguggagcuacaacgccggccugcugguggcccuggagaaccagcacaccaucgaccugaccgacagcgagaugaacaagcuguucgagagaaccagaaagcagcugagagagaacgccgaggacaugggcaacggcugcuucaagaucuaccacaagugcgacaacgccugcaucggcagcaucagaaacggcaccuacgaccacgacguguacagagacgaggcccugaacaacagauuccagaucaagggcguggagcugaagagcggcuacaaggacuggauccuguggaucagcuucgccaucagcugcuuccugcugugcguggugcugcugggcuucaucaugugggccugccagaagggcaacaucagaugcaacaucugcaucuga

SEQ ID NO: 161124 - RNA, 1701 nt, Artificial Sequence; identical to SEQ ID NO: 161084
  derived and/or modified CDS sequence (opt4) from hemagglutinin__InfluenzaA__ABG67223

SEQ ID NO: 161125 - RNA, 1701 nt, Artificial Sequence
  derived and/or modified CDS sequence (opt4) from hemagglutinin__InfluenzaA__ABG67234
augaagaccaucaucgcccugagcuacauccugugccugguguucgcccagaagcugcccggcgacgacaacagcaccgccacccugugccugggccaccacgccgugcccaacggcacccuggugaagaccaucaccaacgaccagaucgaggugaccaacgccaccgagcuggugcagagcagcagcaccggcagaaucugcgacagcccccacagaauccuggacggcaagaacugcacccugaucgacgcccugcugggcgacccccacugcgacggcuuccagaacaaggagugggaccuguucguggagagaagcaaggccuacagcaacugcuaccccuacgacgugcccgacuacgccagccugagaagccugguggccagcagcggcacccuggaguucaucaacgaggacuucaacuggaccggcguggcccaggacggcaagagcuacgccugcaagagaggcagcgugaacagcuucuucagcagacugaacuggcugcacaagcuggaguacaaguaccccgcccugaacgugaccaugcccaacaacggcaaguucgacaagcuguacaucuggggcgugcaccaccccagcaccgacagcgaccagaccagccuguacgugagagccagcggcagagugaccgugagcaccaagagaagccagcagaccgugauccccaacaucggcuucagacccugggugagaggccugagcagcagaaucagcaucuacuggaccaucguggagcccggcgacauccugcugaucaacagcaccggcaaccugaucgcccccagaggcuacuucaagaucagaaacggcaagagcagcaucaugagaagcgacgcccccaucggcaacugcagcagcgagugcaucacccccaacggcagcauccccaacgacaagcccuuccagaacgugaacagaaucaccuacggcgccugccccagauacgugaagcagaacacccugaagcuggccaccggcaugagaaacgugcccgagaagcagaccagaggcaucuucggcgccaucgccggcuucaucgagaacggcugggagggcaugguggacggcugguacggcuucagacaccagaacagcgagggcaccggccaggccgccgaccugaagagcacccaggccgccaucgaccagaucaacggcaagcugaacagacugaucgagaagaccaacgagaaguuccaccagaucgagaaggaguucagcgagguggagggcagaauccaggaccuggagaaguacguggaggacaccaagaucgaccuguggagcuacaacgccggccugcugguggcccuggagaaccagcacaccaucgaccugaccgacagcgagaugaacaagcuguucgagagaaccagaaagcagcugagagagaacgccgaggacaugggcaacggcugcuucaagaucuaccacaagugcgacaacgccugcaucggcagcaucagaaacggcaccuacgaccacgacguguacagagacgaggcccugaacaacagauuccagaucaagggcguggagcugaagagcggcuacaaggacuggauccuguggaucagcuucgccaucagcugcuuccugcugugcguggugcugcugggcuucaucaugugggccugccagaagggcaacaucagaugcaacaucugcaucuga

SEQ ID NO: 161126 - RNA, 1701 nt, Artificial Sequence
  derived and/or modified CDS sequence (opt4) from hemagglutinin__InfluenzaA__ABG67245
augaagaccaucaucgcccugagcuacauccugugccugguguucgcccagaagcugcccggcaacgacaacagcaccgccacccugugccugggccaccacgccgugcccaacggcacccuggugaagaccaucaccaacgaccagaucgaggugaccaacgccaccgagcuggugcagagcagcagcaccggcagaaucugcgacagcccccacagaauccuggacggcaagaacugcacccugaucgacgcccugcugggcgacccccacugcgacggcuuccagaacaaggagugggaccuguucguggagagaagcaaggccuacagcaacugcuaccccuacgacgugcccgacuacgccagccugagaagccugguggccagcagcggcacccuggaguucaucaacgaggacuucaacuggaccggcguggcccaggacggcaagagcuacgccugcaagagaggcagcgugaacagcuucuucagcagacugaacuggcugcacaagcuggaguacaaguaccccgcccugaacgugaccaugcccaacaacggcaaguucgacaagcuguacaucuggggcgugcaccaccccagcaccgacagcgaccagaccagccuguacgugagagccagcggcagagugaccgugagcaccaagagaagccagcagaccgugauccccaacaucggcuucagacccugggugagaggccugagcagcagaaucagcaucuacuggaccaucgugaagcccggcgacauccugcugaucaacagcaccggcaaccugaucgcccccagaggcuacuucaagaucagaaacggcaagagcagcaucaugagaagcgacgcccccaucggcaacugcagcagcgagugcaucacccccaacggcagcauccccaacgacaagcccuuccagaacgugaacagaaucaccuacggcgccugccccagauacgugaagcagaacacccugaagcuggccaccggcaugagaaacgugcccgagaagcagaccagaggcaucuucggcgccaucgccggcuucaucgagaacggcugggagggcaugguggacggcugguacggcuucagacaccagaacagcgagggcaccggccaggccgccgaccugaagagcacccaggccgccaucgaccagaucgacggcaagcugaacagacugaucgagaagaccaacgagaaguuccaccagaucgagaaggaguucagcgagguggagggcagaauccaggaccuggagaaguacguggaggacaccaagaucgaccuguggagcuacaacgccggccugcugguggcccuggagaaccagcacaccaucgaccugaccgacagcgagaugaacaagcuguucgagagaaccagaaagcagcugagagagaacgccgaggacaugggcaacggcugcuucaagaucuaccacaagugcgacaacgccugcaucggcagcaucagaaacggcaccuacgaccacgacguguacagagacgaggcccugaacaacagauuccagaucaagggcguggagcugaagagcggcuacaaggacuggauccuguggaucagcuucgccaucagcugcuuccugcugugcguggugcugcugggcuucaucaugugggccugccagaagggcaacaucagaugcaacaucugcaucuga

SEQ ID NO: 161127 - RNA, 1698 nt, Artificial Sequence; identical to SEQ ID NO: 160802
  derived and/or modified CDS sequence (opt4) from hemagglutinin__InfluenzaA__ABG67477

SEQ ID NO: 161128 - RNA, 1698 nt, Artificial Sequence; identical to SEQ ID NO: 160860
  derived and/or modified CDS sequence (opt4) from hemagglutinin__InfluenzaA__ABG67491

SEQ ID NO: 161129 - RNA, 1701 nt, Artificial Sequence
  derived and/or modified CDS sequence (opt4) from hemagglutinin__InfluenzaA__ABG67502
augaagaccaucaucgcccugagcuacauccugugccugguguucgcccagaagcugcccggcaacgacaacagcaccgccacccugugccugggccaccacgccgugcccaacggcacccuggugaagaccaucaccaacgaccagaucgaggugaccaacgccaccgagcuggugcagagcagcagcaccggcagaaucugcgacagcccccaccagauccuggacggcgagaacugcacccugaucgacgcccugcugggcgacccccacugcgacggcuuccagaacaaggagugggaccuguucguggagagaagcaaggccuacagcaacugcuaccccuacgacgugagcgacuacgugagccugagaagccugguggccagcagcggcacccuggaguucaacaacgagagcuucaacuggaccggcguggcccagaacggcaccagcagcgccugcaagagaagaagcgacaagagcuucuucagcagacugaacuggcugcaccagcugaaguacaaguaccccgcccugaacgugaccaugcccaacaacgagaaguucgacaagcuguacaucuggggcgugcaccaccccggcaccgacagcgaccagaucagccuguacgcccaggccagcggcagagugaccgugagcaccaagagaagccagcagaccgugauccccaacaucggcagcagacccugggugagaggcaucagcagcagaaucagcaucuacuggaccaucgugaagcccggcgacauccugcugaucaacagcaccggcaaccugaucgcccccagaggcuacuucaagaucagaagcggcaagagcagcaucaugagaagcgacgcccccaucggcaagugcaacagcgagugcaucacccccaacggcagcauccccaacgacaagcccuuccagaacgugaacagaaucaccuacggccccugccccagauacgugaagcagaacacccugaagcuggccaccggcaugagaaacgugcccgagaagcagaccagaggcaucuucggcgccaucgccggcuucaucgagaacggcugggagggcaugauggacggcugguacggcuucagacaccagaacagcgagggcaccggccaggccgccgaccugaagagcacccaggccgccaucaaccagaucaacggcaagcugaacagacugaucgagaagaccaacgagaaguuccaccagaucgagaaggaguucagcgagguggagggcagaauccaggaccuggagaaguacguggaggacaccaagaucgaccuguggagcuacaacgccgagcugcugguggcccuggagaaccagcacaccaucgaccugaccgacagcgagaugaacaagcuguucgagagaaccaagaagcagcugagagagaacgccgaggacaugggcaacggcugcuucaagaucuaccacaagugcgacaacgccugcaucggcagcaucagaaacggcaccuacgaccacgacguguacagagacgaggcccugaacaacagauuccagaucaagggcguggagcugaagagcggcuacaaggacuggauccuguggaucagcuucgccaucagcugcuuccugcugugcaucgugcugcugggcuucaucaugugggccugccagaagggcaacaucagaugcaacaucugcaucuga

SEQ ID NO: 161130 - RNA, 1701 nt, Artificial Sequence
  derived and/or modified CDS sequence (opt4) from hemagglutinin__InfluenzaA__ABG67524
augaagaccaucaucgcccugagcuacauccugugccugguguucgcccagaagcugcccggcaacgacaacagcaccgccacccugugccugggccaccacgccgugcccaacggcacccuggugaagaccaucaccaacgaccagaucgaggugaccaacgccaccgagcuggugcagagcagcagcaccggcagaaucugcgacagcccccaccagauccuggacggcgagaacugcacccugaucgacgcccugcugggcgacccccacugcgacggcuuccagaacaaggagugggaccuguucguggagagaagcagagccuacagcaacugcuaccccuacgacgugcccgacuacgugagccugagaagccugguggccagcagcggcacccuggaguucaacaacgagagcuucaacuggaccggcguggcccagaacggcaccagcagcgccugcaagagaagaagcgacaagagcuucuucagcagacugaacuggcugcaccagcugaaguacaaguaccccgcccugaacgugaccaugcccaacaacgagaaguucgacaagcuguacaucuggggcgugcaccaccccggcaccgacagcgaccagaucagccuguacgcccaggccagcggcagagugaccgugagcaccaagagaagccagcagaccgugauccccaacaucggcagcagacccugggugagaggcgugagcagcagaaucagcaucuacuggaccaucgugaagcccggcgacauccugcugaucaacagcaccggcaaccugaucgcccccagaggcuacuucaagaucagaagcggcaagagcagcaucaugagaagcgacgcccccaucggcaagugcaacagcgagugcaucacccccaacggcagcauccccaacgacaagcccuuccagaacgugaacagaaucaccuacggccccugccccagauacgugaagcagaacacccugaagcuggccaccggcaugagaaacgugcccgagaagcagaccagaggcaucuucggcgccaucgccggcuucaucgagaacggcugggagggcaugauggacggcugguacggcuucagacaccagaacagcgagggcaccggccaggccgccgaccugaagagcacccaggccgccgugaaccagaucaacggcaagcugaacagacugaucgagaagaccaacgagaaguuccaccagaucgagaaggaguucagcgagguggagggcagaauccaggaccuggagaaguacguggaggacaccaagaucgaccuguggagcuacaacgccgagcugcugguggcccuggagaaccagcacaccaucgaccugaccgacagcgagaugaacaagcuguucgagagaaccaagaagcagcugagagagaacgccgaggacaugggcaacggcugcuucaagaucuaccacaagugcgacaacgccugcaucggcagcaucagaaacggcaccuacgaccacgacguguacagagacgaggcccugaacaacagauuccagaucaagggcguggagcugaagagcggcuacaaggacuggauccuguggaucagcuucgccaucagcugcuuccugcugugcaucgugcugcugggcuucaucaugugggccugccagaagggcaacaucagaugcaacaucugcaucuga

SEQ ID NO: 161131 - RNA, 1701 nt, Artificial Sequence; identical to SEQ ID NO: 160622
  derived and/or modified CDS sequence (opt4) from hemagglutinin__InfluenzaA__ABG67535

SEQ ID NO: 161132 - RNA, 1701 nt, Artificial Sequence; identical to SEQ ID NO: 160576
  derived and/or modified CDS sequence (opt4) from hemagglutinin__InfluenzaA__ABG67546

SEQ ID NO: 161133 - RNA, 1701 nt, Artificial Sequence
  derived and/or modified CDS sequence (opt4) from hemagglutinin__InfluenzaA__ABG67557
augaagaccaucaucgcccugagcuacauccugugccugguguucgcccagaagcugcccggcaacgacaacagcaccgccacccugugccugggccaccacgccgugcccaacggcaccaucgugaagaccaucaccaacgaccagaucgaggugaccaacgccaccgagcuggugcagagcagcagcaccggcggcaucugcgacagcccccaccagauccuggacggcgagaacugcacccugaucgacgcccugcugggcgacccccagugcgacggcuuccagaacaagaagugggaccuguucguggagagaagcaaggccuacagcaacugcuaccccuacgacgugcccgaccacgccagccugagaagccugguggccagcagcggcacccuggaguucaacaacgagagcuucgacuggaccggcgugacccagaacggcaccagcagcgccugcaagagaagaagcaacaagagcuucuucagcagacugaacuggcugacccaccugaaguacaaguaccccgcccugaacgugaccaugcccaacaacgagaaguucgacaagcuguacaucuggggcgugcaccaccccggcaccgacagcgaccagaucagccuguacgcccaggccagcggcagaaucaccgugagcaccaagagaagccagcagaccgugauccccaacaucggcagcagacccagagugagagacgugagcagcagaaucagcaucuacuggaccaucgugaagcccggcgacauccugcugaucaacagcaccggcaaccugaucgcccccagaggcuacuucaagaucagaagcggcaagagcagcaucaugagaagcgacgcccccaucggcaagugcaacagcgagugcaucacccccaacggcagcauccccaacgacaagcccuuccagaacgugaacagaaucaccuacggcgccugccccagauacgugaagcagaacacccugaagcuggccaccggcaugagaaacgugcccgagaagcagaccagaggcaucuucggcgccaucgccggcuucaucgagaacggcugggagggcaugguggacggcugguacggcuucagacaccagaacagcgagggcaccggccaggccgccgaccugaagagcacccaggccaccaucaaccagaucaacggcaagcugaacagacugaucggcaagaccaacgagaaguuccaccagaucgagaaggaguucagcgagguggagggcagaauccaggaccuggagaaguacguggaggacaccaagaucgaccuguggagcuacaacgccgagcugcugguggcccuggagaaccagcacaccaucgaccugaccgacagcgagaugaacaagcuguucgagagaaccaagaagcagcugagagagaacgccgaggacaugggcaacggcugcuucaagaucuaccacaagugcgacaacgccugcaucggcagcaucagaaacggcaccuacgaccacgacguguacagagacgaggcccugaacaacagauuccagaucaagggcguggagcugaagagcggcuacaaggacuggauccuguggaucagcuucgccaucagcugcuuccugcugugcguggcccugcugggcuucaucaugugggccugccagaagggcaacaucagaugcaacaucugcaucuga

SEQ ID NO: 161134 - RNA, 1701 nt, Artificial Sequence; identical to SEQ ID NO: 160576
  derived and/or modified CDS sequence (opt4) from hemagglutinin__InfluenzaA__ABG67568

SEQ ID NO: 161135 - RNA, 1701 nt, Artificial Sequence; identical to SEQ ID NO: 160576
  derived and/or modified CDS sequence (opt4) from hemagglutinin__InfluenzaA__ABG67579

SEQ ID NO: 161136 - RNA, 1701 nt, Artificial Sequence; identical to SEQ ID NO: 160576
  derived and/or modified CDS sequence (opt4) from hemagglutinin__InfluenzaA__ABG67590

SEQ ID NO: 161137 - RNA, 1701 nt, Artificial Sequence; identical to SEQ ID NO: 160576
  derived and/or modified CDS sequence (opt4) from hemagglutinin__InfluenzaA__ABG67601

SEQ ID NO: 161138 - RNA, 1701 nt, Artificial Sequence; identical to SEQ ID NO: 160576
  derived and/or modified CDS sequence (opt4) from hemagglutinin__InfluenzaA__ABG67612

SEQ ID NO: 161139 - RNA, 1701 nt, Artificial Sequence; identical to SEQ ID NO: 160576
  derived and/or modified CDS sequence (opt4) from hemagglutinin__InfluenzaA__ABG67623

SEQ ID NO: 161140 - RNA, 1701 nt, Artificial Sequence
  derived and/or modified CDS sequence (opt4) from hemagglutinin__InfluenzaA__ABG67634
augaagaccaucaucgcccugagcuacauccugugccugguguucgcccagaagcugcccggcaacgacaacaacaccgccacccugugccugggccaccacgccgugcccaacggcaccaucgugaagaccaucaccaacgaccagaucgaggugaccaacgccaccgagcuggugcagagcagcagcaccggcggcaucugcgacagcccccaccagauccuggacggcgagaacugcacccugaucgacgcccugcugggcgacccccagugcgacggcuuccagaacaagaagugggaccuguucguggagagaagcaaggccuacagcaacugcuaccccuacgacgugcccgaccacgccagccugagaagccugguggccagcagcggcacccuggaguucaacaacgagagcuucgacuggaccggcgugacccagaacggcaccagcagcgccugcaagagaagaagcaacaagagcuucuucagcagacugaacuggcugacccaccugaaguacaaguaccccgcccugaacgugaccaugcccaacaacgagaaguucgacaagcuguacaucuggggcgugcaccaccccggcaccgacagcgaccagaucagccuguacgcccaggccagcggcagaaucaccgugagcaccaagagaagccagcagaccgugauccccaacaucggcagcagacccagagugagagacgugagcagcagaaucagcaucuacuggaccaucgugaagcccggcgacauccugcugaucaacagcaccggcaaccugaucgcccccagaggcuacuucaagaucagaagcggcaagagcagcaucaugagaagcgacgcccccaucggcaagugcaacagcgagugcaucacccccaacggcagcauccccaacgacaagcccuuccagaacgugaacagaaucaccuacggcgccugccccagauacgugaagcagaacacccugaagcuggccaccggcaugagaaacgugcccgagaagcagaccagaggcaucuucggcgccaucgccggcuucaucgagaacggcugggagggcaugguggacggcugguacggcuucagacaccagaacagcgagggcaccggccaggccgccgaccugaagagcacccaggccgccaucaaccagaucaacggcaagcugaacagacugaucggcaagaccaacgagaaguuccaccagaucgagaaggaguucagcgagguggagggcagaauccaggaccuggagaaguacguggaggacaccaagaucgaccuguggagcuacaacgccgagcugcugguggcccuggagaaccagcacaccaucgaccugaccgacagcaagaugaacaagcuguucgagagaaccaagaagcagcugagagagaacgccgaggacaugggcaacggcugcuucaagaucuaccacaagugcgacaacgccugcaucggcagcaucagaaacggcaccuacgaccacgacguguacagagacgaggcccugaacaacagauuccagaucaagggcguggagcugaagagcggcuacaaggacuggauccuguggaucagcuucgccaucagcugcuuccugcugugcguggcccugcugggcuucaucaugugggccugccagaagggcaacaucagaugcaacaucugcaucuga

SEQ ID NO: 161141 - RNA, 1701 nt, Artificial Sequence; identical to SEQ ID NO: 160576
  derived and/or modified CDS sequence (opt4) from hemagglutinin__InfluenzaA__ABG67645

SEQ ID NO: 161142 - RNA, 1701 nt, Artificial Sequence
  derived and/or modified CDS sequence (opt4) from hemagglutinin__InfluenzaA__ABG67656
augaagaccaucaucgcccugagcuacauccugugccugguguucgcccagaagcugcccggcaacgacaacagcaccgccacccugugccugggccaccacgccgugcccaacggcaccaucgugaagaccaucaccaacgaccagaucgaggugaccaacgccaccgagcuggugcagagcagcagcaccggcggcaucugcgacagcccccaccagauccuggacggcgagaacugcacccugaucgacgcccugcugggcgacccccagugcgacggcuuccagaacaagaagugggaccuguucguggagagaagcaaggccuacagcaacugcuaccccuacgacgugcccgaccacgccagccugagaagccugguggccagcagcggcacccuggaguucaacaacgagagcuucgacugggccggcgugacccagaacggcaccagcagcgccugcaagagaagaagcaacaagagcuucuucagcagacugaacuggcugacccaccugaaguacaaguaccccgcccugaacgugaccaugcccaacaacgagaaguucgacaagcuguacaucuggggcgugcaccaccccggcaccgacagcgaccagaucagccuguacgcccaggccagcggcagaaucaccgugagcaccaagagaagccagcagaccgugauccccaacaucggcagcagacccagagugagagacgugagcagcagaaucagcaucuacuggaccaucgugaagcccggcgacauccugcugaucaacagcaccggcaaccugaucgcccccagaggcuacuucaagaucagaagcggcaagagcagcaucaugagaagcgacgcccccaucggcaagugcaacagcgagugcaucacccccaacggcagcauccccaacgacaagcccuuccagaacgugaacagaaucaccuacggcgccugccccagauacgugaagcagaacacccugaagcuggccaccggcaugagaaacgugcccgagaagcagaccagaggcaucuucggcgccaucgccggcuucaucgagaacggcugggagggcaugguggacggcugguacggcuucagacaccagaacagcgagggcaccggccaggccgccgaccugaagagcacccaggccgccaucaaccagaucaacggcaagcugaacagacugaucggcaagaccaacgagaaguuccaccagaucgagaaggaguucagcgagaucgagggcagaauccaggaccuggagaaguacguggaggacaccaagaucgaccuguggagcuacaacgccgagcugcugguggcccuggagaaccagcacaccaucgaccugaccgacagcgagaugaacaagcuguucgagagaaccaagaagcagcugagagagaacgccgaggacaugggcaacggcugcuucaagaucuaccacaagugcgacaacgccugcaucggcagcaucagaaacggcaccuacgaccacgacguguacagagacgaggcccugaacaacagauuccagaucaagggcguggagcugaagagcggcuacaaggacuggauccuguggaucagcuucgccaucagcugcuuccugcugugcguggcccugcugggcuucaucaugugggccugccagaagggcaacaucagaugcaacaucugcaucuga

SEQ ID NO: 161143 - RNA, 1701 nt, Artificial Sequence
  derived and/or modified CDS sequence (opt4) from hemagglutinin__InfluenzaA__ABG67667
augaagaccaucaucgcccugagcuacauccugugccagguguucgcccagaagcugcccggcaacgacaacagcaccgccacccugugccugggccaccacgccgugcccaacggcacccuggugaagaccaucaccaacgaccagaucgaggugaccaacgccaccgagcuggugcagagcagcagcaccggcagaaucugcgacagcccccacagaauccuggacggcaagaacugcacccugaucgacgcccugcugggcgacccccacugcgacggcuuccagaacaaggagugggaccuguucguggagagaagcaaggccuacagcaacugcuaccccuacgacgugcccgacuacgccagccugagaagccugguggccagcagcggcacccuggaguucaccaacgagggcuucaacuggaucggcguggcccaggacggcaagagcuacgccugcaagagaggcagcgugaacagcuucuucagcagacugaacuggcugcacaagcuggaguacaaguaccccgcccugaacgugaccaugcccaacaacgacaaguucgacaagcuguacaucuggggcgugcaccaccccagcaccgacagcgaccagaccagccuguacgugcaggccagcggcagagugaccgugagcaccaagagaagccagcagaccgugauccccaacaucggcagcagacccugggugagaggcaucagcagcagaaucagcaucuacuggaccaucgugaagcccggcgacauccugcugaucaacagcaccggcaaccugaucgcccccagaggcuacuucaagaucagaaacggcaagagcagcaucaugagaagcgacgcccccaucgacaacugcaacagcgagugcaucacccccaacggcagcauccccaacgacaagcccuuccagaacgugaacagaaucaccuacggcgccugccccagauacgugaagcagaacacccugaagcuggccaccggcaugagaaacgugcccgagaagcagaccagaggcaucuucggcgccaucgccggcuucaucgagaacggcugggagggcaugaucgacggcugguacggcuucagacaccagaacagcgagggcaccggccaggccgccgaccugaagagcacccaggccgccaucgaccagaucaacggcaagcugaacagacugaucgagaagaccaacgagaaguuccaccagaucgagaaggaguucagcgagguggagggcagaauccaggaccuggagaaguacguggaggacaccaagaucgaccuguggagcuacaacgccgagcugcugguggcccuggagaaccagcacaccaucgaccugaccgacagcgagaugaacaagcuguucgagagaaccagaaagcagcugagagagaacgccgaggacaugggcaacggcugcuucaagaucuaccacaagugcgacaacgccugcaucggcagcaucagaaacggcaccuacgaccacgacguguacagagacgaggcccugaacaacagauuccagaucaagggcguggagcugaagagcggcuacaaggacuggauccuguggaucagcuucgccaucagcugcuuccugcugugcguggugcugcugggcuucaucaugugggccugccagaagggcaacaucagaugcaacaucugcaucuga

SEQ ID NO: 161144 - RNA, 1701 nt, Artificial Sequence
  derived and/or modified CDS sequence (opt4) from hemagglutinin__InfluenzaA__ABG79941
augaagaccaucaucgcccugagcuacauccugugccugguguucgcccagaagcugcccggcaacgacaacagcaccgccacccugugccugggccaccacgccgugcccaacggcacccuggugaagaccaucaccaacgaccagaucgaggugaccaacgccaccgagcuggugcagagcagcagcaccggcggcaucugcgacagcccccaccagauccuggacggcgagaacugcacccugaucgacgcccugcugggcgacccccacugcgacggcuuccagaacaaggagugggaccuguucguggagagaagcaaggccuacagcaacugcuaccccuacgacgugcccgacuacgccagccugagaagccugguggccagcagcggcacccuggaguucaacaacgagagcuucaacuggaccggcguggcccagaacggcaccagcagcgccugcaagagaagaagcaacaagagcuucuucagcagacugaacuggcugcaccagcugaaguacaaguaccccgcccugaacgugaccaugcccaacaacgagaaguucgacaagcuguacaucuggggcgugcaccaccccagcaccgacagcgaccagaucagccuguacgcccaggcccccggcagagugaccgugagcaccaagagaagccagcagaccgugauccccaacaucggcagcagacccugggugagaggcgugagcagcagaaucagcaucuacuggaccaucgugaagcccggcgacauccugcugaucaacugcaccggcaaccugaucgcccccagaggcuacuucaagaucagaagcggcaagagcagcaucaugagaagcgacgccagcaucggcaagugcaacagcgagugcaucacccccaacggcagcauccccaacgacaagcccuuccagaacgugaacagaaucaccuacggcgccugccccagauacgugaagcagaacacccugaagcuggccaccggcaugagaaacgugcccgagaagcagaccagaggcaucuucggcgccaucgccggcuucaucgagaacggcugggagggcaugguggacggcugguacggcuucagacaccagaacagcgagggcaccggccaggccgccgaccugaagagcacccaggccgccaucaaccagaucaacggcaagcugaacagacugaucgagaagaccaacgagaaguuccaccagaucgagaaggaguucagcgagguggagggcagaauccaggaccuggagaaguacguggaggacaccaagaucgaccuguggagcuacaacgccgagcugcugguggcccuggagaaccagcacaccaucgaccugaccgacagcgagaugaacaagcuguucgagagaaccaagaagcagcugagagagaacgccgaggacaugggcaacggcugcuucaagaucuaccacaagugcgacaacgccugcaucggcagcaucagaaacggcaccuacgaccacgacguguacagagacgaggcccugaacaacagauuccagaucaagggcguggagcugaagagcggcuacaaggacuggauccuguggaucagcuucgccaucagcugcuuccugcugugcguggugcugcugggcuucaucaugugggccugccagaagggcaacaucagaugcagcaucugcaucuga

SEQ ID NO: 161145 - RNA, 1701 nt, Artificial Sequence; identical to SEQ ID NO: 160981
  derived and/or modified CDS sequence (opt4) from hemagglutinin__InfluenzaA__ABG79952

SEQ ID NO: 161146 - RNA, 1701 nt, Artificial Sequence; identical to SEQ ID NO: 161044
  derived and/or modified CDS sequence (opt4) from hemagglutinin__InfluenzaA__ABG79974

SEQ ID NO: 161147 - RNA, 1701 nt, Artificial Sequence; identical to SEQ ID NO: 161044
  derived and/or modified CDS sequence (opt4) from hemagglutinin__InfluenzaA__ABG79985

SEQ ID NO: 161148 - RNA, 1701 nt, Artificial Sequence
  derived and/or modified CDS sequence (opt4) from hemagglutinin__InfluenzaA__ABG79996
augaagaccaucaucgcccugagcuacauccugugccugguguucgcccagaagcugcccggcaacgacaacagcaccgccacccugugccugggccaccacgccgugcccaacggcacccuggugaagaccaucaccaacgaccagaucgaggugaccaacgccaccgagcuggugcagagcagccccaccggcagaaucugcgacagcccccacagaauccuggacggcaagaacugcacccugaucgacgcccugcugggcgacccccacugcgacggcuuccagaacaaggagugggaccuguucguggagagaagcaaggccuacagcaacugcuaccccuacgacgugcccgacuacgccagccugagaagccugguggccagcagcggcacccuggaguucaccaacgagaacuucaacuggaccggcguggcccaggacggcaagagcuacagcugcaagagaggcagcgugaacagcuucuucagcagacugaacuggcugcacaagcuggaguacaaguaccccgcccugaacgugaccaugcccaacaacggcaaguucgacaagcuguacaucuggggcgugcaccaccccagcaccgacagcgaccagaccagccuguacgugagagccagcggcaaggugaccgugagcaccaagagaagccagcagaccgugauccccgacaucggcuacagacccugggugagaggccugagcagcagaaucagcaucuacuggaccaucgugaagcccggcgacauccugcugaucaacagcaccggcaaccugaucgcccccagaggcuacuucaagaucagaaacggcaagagcagcaucaugagaagcgacgcccccaucggcaacugcagcagcgagugcaucacccccaacggcagcauccccaacgacaagcccuuccagaacgugaacagaaucaccuacggcgccugccccagauacgugaagcagaacacccugaagcuggccaccggcaugagaaacgugcccgagaagcagaccagaggcaucuucggcgccaucgccggcuucaucgagaacggcugggagggcaugguggacggcugguacggcuucagacaccagaacagcgagggcaccggccaggccgccgaccugaagagcacccaggccgccaucgaccagaucaacggcaagcugaacagacugguggagaagaccaacgagaaguuccaccagaucgagaaggaguucagcgagguggagggcagaauccaggaccuggagaaguacguggaggacaccaagaucgaccuguggagcuacaacgccgagcugcugguggcccuggagaaccagcacaccaucgaccugaccgacagcgagaugaacaagcuguucgagagaaccagaaagcagcugagagagaacgccgaggacaugggcaacggcugcuucaagaucuaccacaagugcgacaacgccugcaucggcagcaucagaaacggcaccuacgaccacgacguguacagagacgaggcccugaacaacagauuccagaucaagggcguggagcugaagagcggcuacaaggacuggauccuguggaucagcuucgccaucagcugcuuccugcugugcguggugcugcugggcuucaucaugugggccugccagaagggcaacaucagaugcaacaucugcaucuga

SEQ ID NO: 161149 - RNA, 1701 nt, Artificial Sequence; identical to SEQ ID NO: 161044
  derived and/or modified CDS sequence (opt4) from hemagglutinin__InfluenzaA__ABG80007

SEQ ID NO: 161150 - RNA, 1701 nt, Artificial Sequence; identical to SEQ ID NO: 161044
  derived and/or modified CDS sequence (opt4) from hemagglutinin__InfluenzaA__ABG80018

SEQ ID NO: 161151 - RNA, 1701 nt, Artificial Sequence; identical to SEQ ID NO: 161049
  derived and/or modified CDS sequence (opt4) from hemagglutinin__InfluenzaA__ABG80029

SEQ ID NO: 161152 - RNA, 1701 nt, Artificial Sequence; identical to SEQ ID NO: 161049
  derived and/or modified CDS sequence (opt4) from hemagglutinin__InfluenzaA__ABG80040

SEQ ID NO: 161153 - RNA, 1701 nt, Artificial Sequence; identical to SEQ ID NO: 161044
  derived and/or modified CDS sequence (opt4) from hemagglutinin__InfluenzaA__ABG80051

SEQ ID NO: 161154 - RNA, 1701 nt, Artificial Sequence
  derived and/or modified CDS sequence (opt4) from hemagglutinin__InfluenzaA__ABG80062
augaagaccaucaucgcccugagcuacauccugugccugguguucgcccagaagcugcccggcaacgacaacagcaccgccacccugugccugggccaccacgccgugcccaacggcacccuggugaagaccaucaccaacgaccagaucgaggugaccaacgccaccgagcuggugcagagcagcagcaccggcagaaucugcgacagcccccacagaauccuggacggcaagaacugcacccugaucgacgcccugcugggcgacccccacugcgacggcuuccagaacaaggagugggaccuguucguggagagaagcaaggccuacagcaacugcuaccccuacgacgugcccgacuacgccagccugagaagccugguggccagcagcggcacccuggaguucaccaaggagggcuucaacuggaccggcguggcccaggacggcaagagcuacgccugcaagagaggcagcgugaacagcuucuucagcagacugaacuggcugcacaagcuggaguacaaguaccccgcccugaacgugaccaugcccaacaacgacaaguucgacaagcuguacaucuggggcgugcaccaccccagcaccgacagcgaccagaccagccuguacgugcaggccagcggcagagugaccgugagcaccaagagaagccagcagaccgugauccccaacaucggcagcagacccugggugagaggcaucagcagcagaaucagcaucuacuggaccaucgugaagcccggcgacauccugcugaucaacagcaccggcaaccugaucgcccccagaggcuacuucaagaucagaaacggcaagagcagcaucaugagaagcgacgcccccaucggcaacugcaacagcgagugcaucacccccaacggcagcauccccaacgacaagcccuuccagaacgugaacagaaucaccuacggcgccugccccagauacgugaagcagaacacccugaagcuggccaccggcaugagaaacgugcccgagaagcagaccagaggcaucuucggcgccaucgccggcuucaucgagaacggcugggagggcaugguggacggcugguacggcuucagacaccagaacagcgagggcaccggccaggccgccgaccugaagagcacccaggccgccaucgaccagaucaacggcaagcugaacagacugaucgagaagaccaacgagaaguuccaccagaucgagaaggaguucagcgagguggagggcagaauccaggaccuggagaaguacguggaggacaccaagaucgaccuguggagcuacaacgccgagcugcugguggcccuggagaaccagcacaccaucgaccugaccgacagcgagaugaacaagcuguucgagagaaccagaaagcagcugagagagaacgccgaggacaugggcaacggcugcuucaagaucuaccacaagugcgacaacgccugcaucggcagcaucagaaacggcaccuacgaccacgacguguacagagacgaggcccugaacaacagauuccagaucaagggcguggagcugaagaccggcuacaaggacuggauccuguggaucagcuucgccaucagcugcuuccugcugugcguggugcugcugggcuucaucaugugggccugccagaagggcaacaucagaugcaacaucugcaucuga

SEQ ID NO: 161155 - RNA, 1701 nt, Artificial Sequence
  derived and/or modified CDS sequence (opt4) from hemagglutinin__InfluenzaA__ABG80073
augaagaccaucaucgcccugagcuacauccugugccugguguucgcccagaagcugcccggcaacgacaacagcaccgccacccugugccugggccaccacgccgugcccaacggcacccuggugaagaccaucaccaacgaccagaucgaggugaccaacgccaccgagcuggugcagagcagcagcaccggcagaaucugcgacagcccccacagaauccuggacggcaagaacugcacccugaucgacgcccugcugggcgaccccaacugcgacggcuuccagaacaaggagugggaccuguucguggagagaagcaaggccuacagcaacugcuaccccuacgacgugcccgacuacgccagccugagaagccugguggccagcagcggcacccuggaguucaccaacgaggacuucaacuggaccggcguggcccaggacggcggcagcuacgccugcaagagaggcagcgugaacagcuucuucagcagacugaacuggcugcacaagcuggaguacaaguaccccgcccugaacgugaccaugcccaacaacggcaaguucgacaagcuguacaucuggggcgugcaccaccccagcaccgacagcgaccagaccagccuguacgugagagccagcggcagagugaccgugagcaccaagagaagccagcagaccgugacccccaacaucggcagcagacccugggugagaggccugagcagcagaaucagcaucuacuggaccaucgugaagcccggcgacauccugcugaucaacagcaccggcaaccugaucgcccccagaggcuacuucaagaucagaaacggcaagagcagcaucaugagaagcgacgcccccaucggcaccugcagcagcgagugcaucacccccaacggcagcauccccaacgacaagcccuuccagaacgugaacagaaucaccuacggcgccugccccagauacgugaagcagaacacccugaagcuggccaccggcaugagaaacgugcccgagaagcagaccagaggcaucuucggcgccaucgccggcuucaucgagaacggcugggagggcaugguggacggcugguacggcuucagacaccagaacagcgagggcaccggccaggccgccgaccugaagagcacccaggccgccaucgaccagaucaacggcaagcugaacagacugaucgagaagaccaacgagaaguuccaccagaucgagaaggaguucagcgagguggagggcagaauccaggaccuggagaaguacguggaggacaccaagaucgaccuguggagcuacaacgccgagcugcugguggcccuggagaaccagcacaccaucgaccugaccgacagcgagaugaacaagcuguucgagaagaccagaaagcagcugagagagaacgccgaggacaugggcaacggcugcuucaagaucuaccacaagugcgacaacgccugcaucggcagcaucagaaacggcaccuacgaccacgacguguacagagacgaggcccugaacaacagauuccagaucaagggcguggagcugaagagcggcuacaaggacuggauccuguggaucagcuucgccaucagcugcuuccugcugugcguggugcugcugggcuucaucaugugggccugccagaagggcaacaucagaugcaacaucugcaucuga

SEQ ID NO: 161156 - RNA, 1701 nt, Artificial Sequence
  derived and/or modified CDS sequence (opt4) from hemagglutinin__InfluenzaA__ABG80084
augaagaccaucaucgcccugagcuacauccugugccugguguucgcccagaagcugcccggcaacgacaacagcaccgccacccugugccugggccaccacgccgugcccaacggcacccuggugaagaccaucaccaacgaccagaucgaggugaccaacgccaccgagcuggugcagagcagcagcaccggcagaaucugcgacagcccccacagaauccuggacggcaagaacugcacccugaucgacgcccugcugggcgacccccacugcgacggcuuccagaacaaggagugggaccuguucguggagagaagcaaggccuacagcaacugcuaccccuacgacgugcccgacuacgccagccugagaagccugguggccagcagcggcacccuggaguucaucaacgaggacuucaacuggaccggcguggcccaggacggcaagagcuacgccugcaagagaggcagcgugaacagcuucuucagcagacugaacuggcugcacaagcuggaguacaaguaccccgcccugaacgugaccaugcccaacaacggcaaguucgacaagcuguacaucuggggcgugcaccaccccagcaccgacagcgaccagaccagccuguacgugagagccagcggcagagugaccgugagcaccaagagaagccagcagaccgugauccccaacaucggcuucagacccugggugagaggccugagcagcggcaucagcaucuacuggaccaucgugaagcccggcgacauccugcugaucaacagcaccggcaaccugaucgcccccagaggcuacuucaagaucagaaacggcaagagcagcaucaugagaagcgacgcccccaucggcaacugcagcagcgagugcaucacccccaacggcagcauccccaacgacaagcccuuccagaacgugaacagaaucaccuacggcgccugccccagauacgugaagcagaacacccugaagcuggccaccggcaugagaaacgugcccgagaagcagaccagaggcaucuucggcgccaucgccggcuucaucgagaacggcugggagggcaugguggacggcugguacggcuucagacaccagaacagcgagggcaccggccaggccgccgaccugaagagcacccaggccgccaucgaccagaucaacggcaagcugaacagacugaucgagaagaccaacgagaaguuccaccagaucgagaaggaguucagcgagguggagggcagaauccaggaccuggagaaguacguggaggacaccaagaucgaccuguggagcuacaacgccggccugcugguggcccuggagaaccagcacaccaucgaccugaccgacagcgagaugaacaagcuguucgagagaaccagaaagcagcugagagagaacgccgaggacaugggcaacggcugcuucaagaucuaccacaagugcgacaacgccugcaucggcagcaucagaaacggcaccuacgaccacgacaucuacagagacgaggcccugaacaacagauuccagaucaagggcguggagcugaagagcggcuacaaggacuggauccuguggaucagcuucgccaucagcugcuuccugcugugcguggugcugcugggcuucaucaugugggccugccagaagggcaacaucagaugcaacaucugcaucuga

SEQ ID NO: 161157 - RNA, 1701 nt, Artificial Sequence
  derived and/or modified CDS sequence (opt4) from hemagglutinin__InfluenzaA__ABG80095
augaagaccaucaucgcccugagcuacauccugugccugguguucgcccagaagcugcccggcaacgacaacagcaccgccacccugugccugggccaccacgccgugcccaacggcacccuggugaagaccaucaccaacgaccagaucgaggugaccaacgccaccgagcuggugcagagcagcagcaccggcagaaucugcgacagcccccacagaauccuggacggcaagaacugcacccugaucgacgcccugcugggcgacccccacugcgacggcuuccagaacaaggagugggaccuguucguggagagaagcaaggccuacagcaacugcuaccccuacgacgugcccgacuacgccagccugagaagccugguggccagcagcggcacccuggaguucaucaacgaggacuucaacuggaccggcguggcccaggacggcaagagcuacgccugcaagagaggcagcgugaacagcuucuucagcagacugaacuggcugcacaagcuggaguacaaguaccccgcccugaacgugaccaugcccaacaacggcaagguggacaagcuguacaucuggggcgugcaccaccccagcaccgacagcgaccagaccagccuguacgugagagccagcggcagagugaccgugagcaccaagagaagccagcagaccgugauccccaacaucggcuucagacccugggugagaggccugagcagcagaaucagcaucuacuggaccaucgugaagcccggcgacauccugcugaucaacagcaccggcaaccugaucgcccccagaggcuacuucaagaucagaaacggcaagagcagcaucaugagaagcgacgcccccaucggcaacugcagcagcgagugcaucacccccaacggcagcauccccaacgacaagcccuuccagaacgugaacagaaucaccuacggcgccugccccagauacgugaagcagaacacccugaagcuggccaccggcaugagaaacgugcccgagaagcagaccagaggcaucuucggcgccaucgccggcuucaucgagaacggcugggagggcaugguggacggcugguacggcuucagacaccagaacagcgagggcaccggccaggccgccgaccugaagagcacccaggccgccaucgaccagaucaacggcaagcugaacagacugaucgagaagaccaacgagaaguuccaccagaucgagaaggaguucagcgagguggagggcagaauccaggaccuggagaaguacguggaggacaccaagaucgaccuguggagcuacaacgccggccugcugguggcccuggagaaccagcacaccaucgaccugaccgacagcgagaugaacaagcuguucgagagaaccagaaagcagcugagagagaacgccgaggacaugggcaacggcugcuucaagaucuaccacaagugcgacaacgccugcaucggcagcaucagaaacggcaccuacgaccacgacguguacagagacgaggcccugaacaacagauuccagaucaagggcguggagcugaagagcggcuacaaggacuggauccuguggaucagcuucgccaucagcugcuuccugcugugcguggugcugcugggcuucaucaugugggccugccagaagggcaacaucagaugcaacaucugcaucuga

SEQ ID NO: 161158 - RNA, 1701 nt, Artificial Sequence; identical to SEQ ID NO: 161084
  derived and/or modified CDS sequence (opt4) from hemagglutinin__InfluenzaA__ABG80106

SEQ ID NO: 161159 - RNA, 1701 nt, Artificial Sequence
  derived and/or modified CDS sequence (opt4) from hemagglutinin__InfluenzaA__ABG80117
augaagaccaucaucgcccugagcuacauccugugccugguguucgcccagaagcugcccggcaacgacaacagcaccgccacccugugccugggccaccacgccgugcccaacggcacccuggugaagaccaucaccaacgaccagaucgaggugaccaacgccaccgagcuggugcagagcagcagcaccggcagaaucugcgacagcccccacagaauccuggacggcaagaacugcacccugaucgacgcccugcugggcgacccccacugcgacggcuuccagaacaaggagugggaccuguucguggagagaagcaaggccuacagcaacugcuaccccuacgacgugcccgacuacgccagccugagaagccugguggccagcagcggcacccuggaguucaucaacgaggacuucaacuggaccggcguggcccaggacggcaagagcuacgccugcaagagaggcagcgugaacagcuucuucagcagacugaacuggcugcacaagcuggaguacaaguaccccgcccugaacgugaccaugcccaacaacggcaaguucgacaagcuguacaucuggggcgugcaccaccccagcaccgacagcgaccagaccagccuguacgugagagccagcggcagagugaccgugagcaccaagagaagccagcagaccgugauccccaacaucggcuucagacccugggugagaggccugagcagcagaaucagcaucuacuggaccaucgugaagcccggcgacauccugcugaucaacagcaccggcaaccugaucgcccccagaggcuacuucaagaucagaaacggcaagagcagcaucaugagaagcgacgcccccaucggcaacugcagcagcgagugcaucacccccaacggcagcauccccaacgacaagcccuuccagaacgugaacagaaucaccuacggcgccugccccagauacgugaagcagaacacccugaagcuggccaccggcaugagaaacgugcccgugaagcagaccagaggcaucuucggcgccaucgccggcuucaucgagaacggcugggagggcaugguggacggcugguacggcuucagacaccagaacagcgagggcaccggccaggccgccgaccugaagagcacccaggccgccaucgaccagaucaacggcaagcugaacagacugaucgagaagaccaacgagaaguuccaccagaucgagaaggaguucagcgagguggagggcagaauccaggaccuggagaaguacguggaggacaccaagaucgaccuguggagcuacaacgccggccugcugguggcccuggagaaccagcacaccaucgaccugaccgacagcgagaugaacaagcuguucgagagaaccagaaagcagcugagagagaacgccgaggacaugggcaacggcugcuucaagaucuaccacaagugcgacaacgccugcaucggcagcaucagaaacggcaccuacgaccacgacguguacagagacgaggcccugaacaacagauuccagaucaagggcguggagcugaagagcggcuacaaggacuggauccuguggaucagcuucgccaucagcugcuuccugcugugcguggugcugcugggcuucaucaugugggccugccagaagggcaacaucagaugcaacaucugcaucuga

SEQ ID NO: 161160 - RNA, 1701 nt, Artificial Sequence
  derived and/or modified CDS sequence (opt4) from hemagglutinin__InfluenzaA__ABG80128
augaagaccaucaucgcccugagcuacauccugugccugguguucgcccagaagcugcccggcaacgacaacagcaccgccacccugugccugggccaccacgccgugcccaacggcacccuggugaagaccaucaccaacgacagaaucgaggugaccaacgccaccgagcuggugcagagcagcagcaccggcagaaucugcgacagcccccacagaauccuggacggcaagaacugcacccugaucgacgcccugcugggcgacccccacugcgacggcuuccagaacaaggagugggaccuguucguggagagaagcaaggccuacagcaacugcuaccccuacgacgugcccgacuacgccagccugagaagccugguggccagcagcggcacccuggaguucaucaacgaggacuucaacuggaccggcguggcccaggacggcaagagcuacgccugcaagagaggcagcgugaacagcuucuucagcagacugaacuggcugcacaagcuggaguacaaguaccccgcccugaacgugaccaugcccaacaacggcaaguucgacaagcuguacaucuggggcgugcaccaccccagcaccgacagcgaccagaccagccuguacgugagagccagcggcagagugaccgugagcaccaagagaagccagcagaccgugauccccaacaucggcuucagacccugggugagaggccugagcagcagaaucagcaucuacuggaccaucgugaagcccggcgacauccugcugaucaacagcaccggcaaccugaucgcccccagaggcuacuucaagaucagaaacggcaagagcagcaucaugagaagcgacgcccccaucggcaacugcagcagcgagugcaucacccccaacggcagcauccccaacgacaagcccuuccagaacgugaacagaaucaccuacggcgccugccccagauacgugaagcagaacacccugaagcuggccaccggcaugagaaacgugcccgagaagcagaccagaggcaucuucggcgccaucgccggcuucaucgagaacggcugggagggcaugguggacggcugguacggcuucagacaccagaacagcgagggcaccggccaggccgccgaccugaagagcacccaggccgccaucgaccagaucaacggcaagcugaacagacugaucgagaagaccaacgagaaguuccaccagaucgagaaggaguucagcgagguggagggcagaauccaggaccuggagaaguacguggaggacaccaagaucgaccuguggagcuacaacgccggccugcugguggcccuggagaaccagcacaccaucgaccugaccgacagcgagaugaacaagcuguucgagagaaccagaaagcagcugagagagaacgccgaggacaugggcaacggcugcuucaagaucuaccacaagugcgacaacgccugcaucggcagcaucagaaacggcaccuacgaccacgacguguacagagacgaggcccugaacaacagauuccagaucaagggcguggagcugaagagcggcuacaaggacuggauccuguggaucagcuucgccaucagcugcuuccugcugugcguggugcugcugggcuucaucaugugggccugccagaagggcaacaucagaugcaacaucugcaucuga

SEQ ID NO: 161161 - RNA, 1701 nt, Artificial Sequence
  derived and/or modified CDS sequence (opt4) from hemagglutinin__InfluenzaA__ABG80139
augaagaccaucaucgcccugagcuacauccugugccugguguucgcccagaagcugcccggcaacgacaacagcaccgccacccugugccugggccaccacgccgugcccaacggcacccuggugaagaccaucaccaacgaccagaucgaggugaccaacgccaccgagcuggugcagagcagcagcaccggcagaaucugcgacagcccccacagaauccuggacggcaagaacugcacccugaucgacgcccugcugggcgacccccacugcgacggcuuccagaacaaggagugggaccuguucguggagagaagcaaggccuacagcaacugcuaccccuacgacgugcccgacuacgccagccugagaagccugguggccagcagcggcacccuggaguucaucaacgaggacuucaacuggaccggcguggcccaggacggcaagagcuacgccugcaagagaggcagcgugaacagcuucuucagcagacugaacuggcugcacaagcuggaguacaaguaccccgcccugaacgugaccaugcccaacaacggcaaguucgacaagcuguacaucuggggcgugcaccaccccagcaccgacagcgaccagaccagccuguacgugagagccagcggcagagugaccgugagcaccaagagaagccagcagaccgugauccccaacaucggcuucagacccugggugagaggccugagcagcagaaucagcaucuacuggaccaucgugaagcccggcgacauccugcugaucaacagcaccggcaaccugaucgcccccagaggcuacuucaagaucagaaacggcaagagcagcaucaugagaagcgacgcccccaucggcaacugcagcuacgagugcaucacccccaacggcagcauccccaacgacaagcccuuccagaacgugaacagaaucaccuacggcgccugccccagauacgugaagcagaacacccugaagcuggccaccggcaugagaaacgugcccgagaagcagaccagaggcaucuucggcgccaucgccggcuucaucgagaacggcugggagggcaugguggacggcugguacggcuucagacaccagaacagcgagggcaccggccaggccgccgaccugaagagcacccaggccgccaucgaccagaucaacggcaagcugaacagacugaucgagaagaccaacgagaaguuccaccagaucgagaaggaguucagcgagguggagggcagaauccaggaccuggagaaguacguggaggacaccaagaucgaccuguggagcuacaacgccggccugcugguggcccuggagaaccagcacaccaucgaccugaccgacagcgagaugaacaagcuguucgagagaaccagaaagcagcugagagagaacgccgaggacaugggcaacggcugcuucaagaucuaccacaagugcgacaacaccugcaucggcagcaucagaaacggcaccuacgaccacgacguguacagagacgaggcccugaacaacagauuccagaucaagggcguggagcugaagagcggcuacaaggacuggauccuguggaucagcuucgccaucagcugcuuccugcugugcguggugcugcugggcuucaucaugugggccugccagaagggcaacaucagaugcaacaucugcaucuga

SEQ ID NO: 161162 - RNA, 1701 nt, Artificial Sequence
  derived and/or modified CDS sequence (opt4) from hemagglutinin__InfluenzaA__ABG80150
augaagaccaucaucgcccugagcuacauccugugccugguguucgcccagaagcugcccggcaacgacaacagcaccgccacccugugccugggccaccacgccgugcccaacggcacccuggugaagaccaucaccaacgaccagaucgaggugaccaacgccaccgagcuggugcagagcagcagcaccggcagaaucugcgacagcccccacagaauccuggacggcaagaacugcacccugaucgacgcccugcugggcgacccccacugcgacggcuuccagaacaaggagugggaccuguucguggagagaagcaaggccuacagcaacugcuaccccuacgacgugcccgacuacgccagccugagaagccugguggccagcagcggcacccuggaguucaucaacgagaacuucaacuggaccggcguggcccaggacggcaagagcuacgccugcaagagaggcagcgugaacagcuucuucagcagacugaacuggcugcacaagcuggaguacaaguaccccgcccugaacgugaccaugcccaacaacggcaaguucgacaagcuguacaucuggggcgugcaccaccccagcaccgacagcgaccagaccagccuguacgugagagccagcggcagagugaccgugagcaccaagagaagccagcagaccgugauccccaacaucggcuucagacccugggugagaggccugagcagcggcaucagcaucuacuggaccaucgugaagcccggcgacauccugcugaucaacagcaccggcaaccugaucgcccccagaggcuacuucaagaucagaaacggcaagagcagcaucaugagaagcgacgcccccaucggcaacugcagcagcgagugcaucacccccaacggcagcauccccaacgacaagcccuuccagaacgugaacagaaucaccuacggcgccugccccagauacgugaagcagaacacccugaagcuggccaccggcaugagaaacgugcccgagaagcagaccagaggcaucuucggcgccaucgccggcuucaucgagaacggcugggagggcaugguggacggcugguacggcuucagacaccagaacagcgagggcaccggccaggccgccgaccugaagagcacccaggccgccaucgaccagaucaacggcaagcugaacagacugaucgagaagaccaacgagaaguuccaccagaucgagaaggaguucagcgagguggagggcagaauccaggaccuggagaaguacguggaggacaccaagaucgaccuguggagcuacaacgccggccugcugguggcccuggagaaccagcacaccaucgaccugaccgacagcgagaugaacaagcuguucgagagaaccagaaagcagcugagagagaacgccgaggacaugggcaacggcugcuucaagaucuaccacaagugcgacaacgccugcaucggcagcaucagaaacggcaccuacgaccacgacguguacagagacgaggcccugaacaacagauuccagaucaagggcguggagcugaagagcggcuacaaggacuggauccuguggaucagcuucgccaucagcugcuuccugcugugcguggugcugcugggcuucaucaugugggccugccagaagggcaacaucagaugcaacaucugcaucuga

SEQ ID NO: 161163 - RNA, 1701 nt, Artificial Sequence
  derived and/or modified CDS sequence (opt4) from hemagglutinin__InfluenzaA__ABG80161
augaagaccaucaucgcccugagcuacaucagcugccugguguucgcccagaagcugcccggcaacgacaacagcaccgccacccugugccugggccaccacgccgugcccaacggcacccuggugaagaccaucaccaacgaccagaucgaggugaccaacgccaccgagcuggugcagagcagcagcaccggcagaaucugcgacagcccccacagaauccuggacggcaagaacugcacccugaucgacgcccugcugggcgacccccacugcgacggcuuccagaacaaggagugggaccuguucguggagagaagcaaggccuacagcaacugcuaccccuacgacgugcccgacuacgccagccugagaagccugguggccagcagcggcacccuggaguucaucaacgaggacuucaacuggaccggcguggcccaggacggcaagagcuacgccugcaagagaggcagcgugaacagcuucuucagcagacugaacuggcugcacaagcuggaguacaaguaccccgcccugaacgugaccaugcccaacaacggcaaguucgacaagcuguacaucuggggcgugcaccaccccagcaccgacagcgaccagaccagccuguacgugcaggccagcggcagagugaccgugagcaccaagagaagccagcagaccgugauccccaacaucggcuucagacccugggugagaggccugagcagcagaaucagcaucuacuggaccaucgugaagcccggcgacauccugcugaucaacagcaccggcaaccugaucgcccccagaggcuacuucaagaucagaaacggcaagagcagcaucaugagaagcgacgcccccaucggcaacugcagcagcgagugcaucacccccaacggcagcauccccaacgacaagcccuuccagaacgugaacagaaucaccuacggcgccugccccagauacgugaagcagaacacccugaagcuggccaccggcaugagaaacgugcccgagaagcagaccagaggcaucuucggcgccaucgccggcuucaucgagaacggcugggagggcaugguggacggcugguacggcuucagacaccagaacagcgagggcaccggccaggccgccgaccugaagagcacccaggccgccaucgaccagaucaacggcaagcugaacagacugaucgagaagaccaacgagaaguuccaccagaucgagaaggaguucagcgagguggagggcagaauccaggaccuggagaaguacguggaggacaccaagaucgaccuguggagcuacaacgccggccugcugguggcccuggagaaccagcacaccaucgaccugaccgacagcgagaugaacaagcuguucgagagaaccagaaagcagcugagagagaacgccgaggacaugggcaacggcugcuucaagaucuaccacaagugcgacaacgccugcaucggcagcaucagaaacggcaccuacgaccacgacguguacagagacgaggcccugaacaacagauuccagaucaagggcguggagcugaagagcggcuacaaggacuggauccuguggaucagcuucgccaucagcugcuuccugcugugcguggugcugcugggcuucaucaugugggccugccagaagggcaacaucagaugcaacaucugcaucuga

SEQ ID NO: 161164 - RNA, 1698 nt, Artificial Sequence
  derived and/or modified CDS sequence (opt4) from hemagglutinin__InfluenzaA__ABG80172
augaaggugaagcugcuggugcugcugugcaccuucaccgccaccuacgccgacaccaucugcaucggcuaccacgccaacaacagcaccgacaccguggacaccgugcuggagaagaacgugaccgugacccacagcgugaaccugcuggaggacagccacaacggcaagcugugccugcugaagggcaucgccccccugcagcugggcaacugcagcguggccggcuggauccugggcaaccccgagugcgagcugcugaucagcaaggagagcuggagcuacaucguggagacccccaaccccgagaacggcaccugcuaccccggcuacuucgccgacuacgaggagcugagagagcagcugagcagcgugagcagcuucgagagauucgagaucuuccccaaggagagcagcuggcccaaccacaccgugaccggcgugagcgccagcugcagccacaacggcaagagcagcuucuacagaaaccugcuguggcugaccggcaagaacggccuguaccccaaccugagcaagagcuacgccaacaacaaggagaaggaggugcuggugcuguggggcgugcaccacccccccaacaucggcgaccagagagcccuguaccacaccgagaacgccuacgugagcguggugagcagccacuacagcagaagauucacccccgagaucgccaagagacccaaggugagagaccaggagggcagaaucaacuacuacuggacccugcuggagcccggcgacaccaucaucuucgaggccaacggcaaccugaucgcccccagauacgccuucgcccugagcagaggcuucggcagcggcaucaucaccagcaacgcccccauggacgagugcgacgccaagugccagaccccccagggcgccaucaacagcagccugcccuuccagaacgugcaccccgugaccaucggcgagugccccaaguacgugagaagcgccaagcugagaauggugaccggccugagaaacauccccagcauccagagcagaggccuguucggcgccaucgccggcuucaucgagggcggcuggaccggcaugguggacggcugguacggcuaccaccaccagaacgagcagggcagcggcuacgccgccgaccagaagagcacccagaacgccaucaacggcaucaccaacaaggugaacagcgugaucgagaagaugaacacccaguucaccgccgugggcaaggaguucaacaagcuggagagaagaauggagaaccugaacaagaagguggacgacggcuuccuggacaucuggaccuacaacgccgagcugcuggugcugcuggagaacgagagaacccuggacuuccacaacagcaacgugaagaaccuguacgagaaggugaagagccagcugaagaacaacgccaaggagaucggcaacggcugcuucgaguucuaccacaagugcaacaacgagugcauggagagcgugaagaacggcaccuacgacuaccccaaguacagcgaggagagcaagcugaacagagagaagaucgacggcgugaagcuggagagcaugggcguguaccagauccuggccaucuacagcaccguggccagcagccuggugcugcuggugagccugggcgccaucagcuucuggaugugcagcaacggcagccugcagugcagaaucugcaucuga

SEQ ID NO: 161165 - RNA, 1698 nt, Artificial Sequence
  derived and/or modified CDS sequence (opt4) from hemagglutinin__InfluenzaA__ABG80183
augaaggugaagcugcuggugcugcugugcaccuucaccgccaccuacgccgacaccaucugcaucggcuaccacgccaacaacagcaccgacaccguggacaccgugcuggagaagaacgugaccgugacccacagcgugaaccugcuggaggacagccacaacggcaagcugugccugcugaagggcaucgccccccugcagcugggcaacugcagcguggccggcuggauccugggcaaccccgagugcgagcugcugaucagcaaggagagcuggagcuacaucguggagacccccaaccccgagaacggcaccugcuaccccggcuacuucgccgacuacgaggagcugagagagcagcugagcagcgugagcagcuucgagagauucgagaucuuccccaaggagagcagcuggcccaaccacaccgugaccggcgugagcgccagcugcagccacaacggcaagagcagcuucuacagaaaccugcuguggcugaccggcaagaacggccuguaccccaaccugagcaagagcuacgccaacaacaaggagaaggaggugcuggugcuguggggcgugcaccacccccccaacaucggcggccagagagcccuguaccacaccgagaacgccuacgugagcguggugagcagccacuacagcagaagauucacccccgagaucgccaagagacccaaggugagagaccaggagggcagaaucaacuacuacuggacccugcuggagcccggcgacaccaucaucuucgaggccaacggcaaccugaucgcccccagauacgccuucgcccugagcagaggcuucggcagcggcaucaucaccagcaacgcccccauggacgagugcgacgccaagugccagaccccccagggcgccaucaacagcagccugcccuuccagaacgugcaccccgugaccaucggcgagugccccaaguacgugagaagcgccaagcugagaauggugaccggccugagaaacauccccagcauccagagcagaggccuguucggcgccaucgccggcuucaucgagggcggcuggaccggcaugguggacggcugguacggcuaccaccaccagaacgagcagggcagcggcuacgccgccgaccagaagagcacccagaacgccaucaacggcaucaccaacaaggugaacagcgugaucgagaagaugaacacccaguucaccgccgugggcaaggaguucaacaagcuggagagaagaauggagaaccugaacaagaagguggacgacggcuuccuggacaucuggaccuacaacgccgagcugcuggugcugcuggagaacgagagaacccuggacuuccacgacagcaacgugaagaaccuguacgagaaggugaagagccagcugaagaacaacgccaaggagaucggcaacggcugcuucgaguucuaccacaagugcaacaacgagugcauggagagcgugaagaacggcaccuacgacuaccccaaguacagcgaggagagcaagcugaacagagagaagaucgacggcgugaagcuggagagcaugggcguguaccagauccuggccaucuacagcaccguggccagcagccuggugcugcuggugagccugggcgccaucagcuucuggaugugcagcaacggcagccugcagugcagaaucugcaucuga

SEQ ID NO: 161166 - RNA, 1701 nt, Artificial Sequence
  derived and/or modified CDS sequence (opt4) from hemagglutinin__InfluenzaA__ABG80194
augaagaccaucaucgcccugagcuacauccugugccugguguucgcccagaagcugcccgugaacgacaacagcaccgccacccugugccugggccaccacgccgugcccaacggcacccuggugaagaccaucaccaacgaccacaucgaggugaccaacgccaccgagcuggugcagagcagcagcaccggcagaaucugcgacagcccccaccagauccuggacggcgagaacugcacccugaucgacgcccugcugggcgacccccacugcgacggcuuccagaacaaggaguggaaccuguucguggagagaagcaccgccuacagcaacugcuaccccuacgacgugcccgacuacgccagccugagaagccugguggccagcagcggcacccuggaguucaacaacgagagcuucaacuggaccggcguggcccagaacggcaccagcagcgccugcaagagaagaagcaucaagagcuucuucagcagacugaacuggcugcaccagcugaaguacaaguaccccgcccugaacgugaccaugcccaacaacgagaaguucgacaagcuguacaucuggggcgugcaccaccccagcaccgacagcgaccagaucagccuguacgcccaggccagcggcagagugaccgugagcaccaagagaagccagcagaccgugauccccaacaucggcagcagacccugggugagaggcgugagcagcaucaucagcaucuacuggaccaucgugaagcccggcgacauccugcugaucaacagcaccggcaaccugaucgcccccagaggcuacuucaagaucagaagcggcaagagcagcaucaugagaagcaacgcccccaucggcaagugcaacagcgagugcaucacccccaacggcagcauccccaacgacaagcccuuccagaacgugaacagaaucaccuacggcgccugccccagauacgugaagcagaacacccugaagcuggccaccggcaugagaaacgugcccgagaagcagaccagaggcaucuucggcgccaucgccggcuucaucgagaacggcugggagggcaugguggacggcugguacggcuucagacaccagaacagcgagggcaccggccaggccgccgaccugaagagcacccaggccgccaucaaccagaucaacggcaagcugaacagacugaucgagaagaccaacgagaaguuccaccagaucgagaaggaguucagcgagguggagggcagaauccaggaccuggagaaguacguggaggacaccaagaucgaccuguggagcuacaacgccgagcugcugguggcccuggagaaccagcacaccaucgaccugaccgacagcgagaugaacaagcuguucgagagaaccagaaagcagcugagagagaacgccgaggacaugggcaacggcugcuucaagaucuaccacaagugcgacaacgccugcaucggcagcaucagaaacggcaccuacgaccacgacguguacagagacgaggcccugaacaacagauuccagaucaagggcguggagcugaagagcggcuacaaggacuggauccuguggaucagcuucgccaucagcugcuuccugcugugcguggugcugcugggcuucaucaugugggccugccagaagggcaacaucagaugcaacaucugcaucuga

SEQ ID NO: 161167 - RNA, 1701 nt, Artificial Sequence
  derived and/or modified CDS sequence (opt4) from hemagglutinin__InfluenzaA__ABG80205
augaagaccaucaucgcccugagcuacauccugugccugguguucgcccagaagcugcccggcaacgacaacagcaccgccacccugugccugggccaccacgccgugcccaacggcacccuggugaagaccaucaccaacgaccagaucgaggugaccaacgccaccgagcuggugcagagcagcagcaccggcggcaucugcgacagcccccaccagauccuggacggcgagaacugcacccugaucgacgcccugcugggcgacccccacugcgacggcuuccagaacaaggagugggaccuguucguggagagaagcaaggccuacagcaacugcuaccccuacgacgugcccgacuacgccagccugagaagccugguggccagcagcggcacccuggaguucaacaacgagagcuucaacuggaccggcguggcccagaacggcaccagcagcgccugcaagagaagaagcaacaagagcuucuucagcagacugaacuggcugcaccagcugaaguacaaguaccccgcccugaacguggccaugcccaacaacgagaaguucgacaagcuguacaucuggggcgugcaccaccccagcaccgacagcgaccagaucagccuguacgcccaggcccccggcagagugaccgugagcaccaagagaagccagcagaccgugauccccaacaucggcagcagacccugggugagaggcgugagcagcagaaucagcaucuacuggaccaucgugaagcccggcgacauccugcugaucaacugcaccggcaaccugaucgcccccagaggcuacuucaagaucagaagcggcaagagcagcaucaugagaagcgacgccagcaucggcaagugcaacagcgagugcaucacccccaacggcagcauccccaacgacaagcccuuccagaacgugaacagaaucaccuacggcgccugccccagauacgugaagcagaacacccugaagcuggccaccggcaugagaaacgugcccgagaagcagaccagaggcaucuucggcgccaucgccggcuucaucgagaacggcugggagggcaugguggacggcugguacggcuucagacaccagaacagcgagggcaccggccaggccgccgaccugaagagcacccaggccgccaucaaccagaucaacggcaagcugaacagacugaucgagaagaccaacgagaaguuccaccagaucgagaaggaguucagcgagguggagggcagaauccaggaccuggagaaguacguggaggacaccaagaucaaccuguggagcuacaacgccgagcugcugguggcccuggagaaccagcacaccaucgaccugaccgacagcgagaugaacaagcuguucgagagaaccaagaagcagcugagagagaacgccgaggacaugggcaacggcugcuucaagaucuaccacaagugcgacaacgccugcaucggcagcaucagaaacggcaccuacgaccacgacguguacagagacgaggcccugaacaacagauuccagaucaagggcguggagcugaagagcggcuacaaggacuggauccuguggaucagcuucgccaucagcugcuuccugcugugcguggugcugcugggcuucaucaugugggccugccagaagggcaacaucagaugcaacaucugcaucuga

SEQ ID NO: 161168 - RNA, 1701 nt, Artificial Sequence
  derived and/or modified CDS sequence (opt4) from hemagglutinin__InfluenzaA__ABG80216
augaagaccaucaucgcccugagcuacauccugugccugguguucgcccagaagcugcccgugaacgacaacagcaccgccacccugugccugggccaccacgccgugcccaacggcacccuggugaagaccaucaccaacgaccacaucgaggugaccaacgccaccgagcuggugcagagcagccccaccggcagaaucugcgacagcccccaccagauccuggacggcgagaacugcacccugaucgacgcccugcugggcgacccccacugcgacggcuuccagaacaaggagugggaccuguucguggagagaagcaccgccuacagcaacugcuaccccuacgacgugcccgacuacgccagccugagaagccugguggccagcagcggcacccuggaguucaacaacgagagcuucaacuggaccggcguggcccagaacggcaccagcagcgccugcaagagaagaagcaucaagagcuucuucagcagacugaacuggcugcaccagcugaaguacaaguaccccgcccugaacgugaccaugcccaacaacgagaaguucgacaagcuguacaucuggggcgugcaccaccccagcaccgacagcgaccagaucagccuguacgcccaggcccccggcagagugaccgugagcaccaagagaagccagcagaccgugauccccaacaucggcagcagacccugggugagaggcgugagcagcagaaucagcaucuacuggaccaucgugaagcccggcgacauccugcugaucaacagcaccggcaaccugaucgcccccagaggcuacuucaagaucagaagcggcaagagcagcaucaugagaagcaacacccccaucggcaagugcaacagcgagugcaucacccccaacggcagcauccccaacgacaagcccuuccagaacgugaacagaaucaccuacggcgccugccccagauacgugaagcagaacacccugaagcuggccaccggcaugagaaacgugcccgagaagcagaccagaggcaucuucggcgccaucgccggcuucaucgagaacggcugggagggcaugguggacggcugguacggcuucagacaccagaacagcgagggcaccggccaggccgccgaccugaagagcacccaggccgccaucaaccagaucaacggcaagcugaacagacugaucgagaagaccaacgagaaguuccaccagaucgagaaggaguucagcgagguggagggcagaauccaggaccuggagaaguacguggaggacaccaagaucgaccuguggagcuacaacgccgagcugcugguggcccuggagaaccagcacaccaucgaccugaccgacagcgagaugaacaagcuguucgagagaaccagaaagcagcugagagagaacgccgaggacaugggcaacggcugcuucaagaucuaccacaagugcgacaacgccugcaucggcagcaucagaaacggcaccuacgaccacgacguguacagagacgaggcccugaacaacagauuccagaucaagggcguggagcugaagagcggcuacaaggacuggauccuguggaucagcuucgccaucagcugcuuccugcugugcguggugcugcugggcuucaucaugugggccugccagaagggcaacaucagaugcaacaucugcaucuga

SEQ ID NO: 161169 - RNA, 1701 nt, Artificial Sequence; identical to SEQ ID NO: 160700
  derived and/or modified CDS sequence (opt4) from hemagglutinin__InfluenzaA__ABG80227

SEQ ID NO: 161170 - RNA, 1701 nt, Artificial Sequence; identical to SEQ ID NO: 160576
  derived and/or modified CDS sequence (opt4) from hemagglutinin__InfluenzaA__ABG80238

SEQ ID NO: 161171 - RNA, 1701 nt, Artificial Sequence; identical to SEQ ID NO: 160576
  derived and/or modified CDS sequence (opt4) from hemagglutinin__InfluenzaA__ABG80249

SEQ ID NO: 161172 - RNA, 1701 nt, Artificial Sequence; identical to SEQ ID NO: 160576
  derived and/or modified CDS sequence (opt4) from hemagglutinin__InfluenzaA__ABG80260

SEQ ID NO: 161173 - RNA, 1701 nt, Artificial Sequence
  derived and/or modified CDS sequence (opt4) from hemagglutinin__InfluenzaA__ABG80271
augaagaccaucaucgcccugagcuacauccugugccugguguucgcccagaagcugcccggcaacgacaacagcaccgccacccugugccugggccaccacgccgugcccaacggcaccguggugaagaccaucaccaacgaccagaucgaggugaccaacgccaccgagcuggugcagagcagcagcaccggcggcaucugcgacagcccccaccagauccuggacggcgagaacugcacccugauggacgcccugcugggcgacccccagugcgacggcuuccagaacaagaagugggaccuguucguggagagaagcaaggccuacagcaacugcuaccccuacgacgugcccgacuacgccagccugagaagccugguggccagcagcggcacccuggaguucaacaacgagagcuucaacuggaccggcgugacccagaacggcaccagcagcgccugcaagagaagaagcaacaacagcuucuucagcagacugaacuggcugacccaccugaaguucaaguaccccgcccugaacgugaccaugcccaacaacgagaaguucgacaagcuguacaucuggggcgugcaccaccccggcaccgacaacgaccagaucagccuguacgcccaggccagcggcagaaucaccgugagcaccaagagaagccagcagaccgugauccccaacaucggcagcagacccagagugagagacauccccagcagaaucagcaucuacuggaccaucgugaagcccggcgacauccugcugaucaacagcaccggcaaccugaucgcccccagaggcuacuucaagaucagaagcggcaagagcagcaucaugagaagcgacgcccccaucggcaagugcaacagcgagugcaucacccccaacggcagcauccccaacgacaagcccuuccagaacgugaacagaaucaccuacggcgccugccccagauacgugaagcagaacacccugaagcuggccaccggcaugagaaacgugcccgagaagcagaccagaggcaucuucggcgccaucgccggcuucaucgagaacggcugggagggcaugguggacggcugguacggcuucagacaccagaacagcgagggcaccggccaggccgccgaccugaagagcacccaggccgccaucaaccagaucaacggcaagcugaacagacugaucggcaagaccaacgagaaguuccaccagaucgagaaggaguucagcgagguggagggcagaauccaggaccuggagaaguacguggaggacaccaagaucgaccuguggagcuacaacgccgagcugcugguggcccuggagaaccagcacaccaucgaccugaccgacagcgagaugaacaagcuguucgagagaaccaagaagcagcugagagagaacgccgaggacaugggcaacggcugcuucaagaucuaccacaagugcgacaacgccugcaucggcagcaucagaaacggcaccuacgaccacgacguguacagagacgaggcccugaacaacagauuccagaucaagggcguggagcugaagagcggcuacaaggacuggauccuguggaucagcuucgccaucagcugcuuccugcugugcguggcccugcugggcuucaucaugugggccugccagaagggcaacaucagaugcaacaucugcaucuga

SEQ ID NO: 161174 - RNA, 1701 nt, Artificial Sequence; identical to SEQ ID NO: 160651
  derived and/or modified CDS sequence (opt4) from hemagglutinin__InfluenzaA__ABG80282

SEQ ID NO: 161175 - RNA, 1701 nt, Artificial Sequence; identical to SEQ ID NO: 160303
  derived and/or modified CDS sequence (opt4) from hemagglutinin__InfluenzaA__ABG80293

SEQ ID NO: 161176 - RNA, 1701 nt, Artificial Sequence
  derived and/or modified CDS sequence (opt4) from hemagglutinin__InfluenzaA__ABG80304
augaagaccaucaucgcccugagcuacauccugugccugguguucgcccagaagcugcccggcaacgacaacagcaccgccacccugugccugggccaccacgccgugcccaacggcaccaucgugaagaccaucaccaacgaccagaucgaggugaccaacgccaccgagcuggugcagagcagcagcaccggcggcaucugcgacagcccccaccagauccuggacggcgagaacugcacccugaucgacgcccugcugggcgacccccagugcgacggcuuccagaacaagaagugggaccuguucguggagagaagcaaggccuacagcaacugcuaccccuacgacgugcccgacuacgccagccugagaagccugguggccagcagcggcacccuggaguucaacaacgagagcuucaacuggaccggcgugacccagaacggcaccagcagcgccugcaagagaagaagcaacaacagcuucuucagcagacugaacuggcugacccaccugaaguucaaguaccccgcccugaacgugaccaugcccaacaacgagaaguucgacaagcuguacaucuggggcgugcaccaccccggcaccaacaacgaccagaucaaccuguacgcccaggccagcggcagaaucaccgugagcaccaagagaagccagcagaccgugauccccaacaucggcagcagacccagagugagagacauccccagcagaaucagcaucuacuggaccaucgugaagcccggcgacauccugcugaucaacagcaccggcaaccugaucgcccccagaggcuacuucaagaucagaagcggcaagagcagcaucaugagaagcgacgcccccaucggcaagugcaacagcgagugcaucacccccaacggcagcauccccaacgacaagcccuuccagaacgugaacagaaucaccuacggcgccugccccagauacgugaagcagaacacccugaagcuggccaccggcaugagaaacgugcccgagaagcagaccagaggcaucuucggcgccaucgccggcuucaucgagaacggcugggagggcaugguggacggcugguacggcuucagacaccagaacagcgagggcaucggccaggccgccgaccugaagagcacccaggccgccaucaaccagaucaacggcaagcugaacagacugaucggcaagaccaacgagaaguuccaccagaucgagaaggaguucagcgagguggagggcagaauccaggaccuggagaaguacguggaggacaccaagaucgaccuguggagcuacaacgccgagcugcugguggcccuggagaaccagcacaccaucgaccugaccgacagcgagaugaacaagcuguucgagagaaccaagaagcagcugagagagaacgccgaggacaugggcaacggcugcuucaagaucuaccacaagugcgacaacgccugcaucggcagcaucagaaacggcaccuacgaccacgacguguacagagacgaggcccugaacaacagauuccagaucaagggcguggagcugaagagcggcuacaaggacuggauccuguggaucagcuucgccaucagcugcuuccugcugugcguggcccugcugggcuucaucaugugggccugccagaagggcaacaucagaugcaacaucugcaucuga

SEQ ID NO: 161177 - RNA, 1701 nt, Artificial Sequence
  derived and/or modified CDS sequence (opt4) from hemagglutinin__InfluenzaA__ABG80315
augaagaccaucaucgcccugagcuacauccugugccugguguucgcccagaagcugcccggcaacgacaacagcaccgccacccugugccugggccaccacgccgugcccaacggcaccaucgugaagaccaucaccaacgaccagaucgaggugaccaacgccaccgagcugauccagagcagcagcaccggcggcaucugcgacagcccccaccagauccuggacggcgagaacugcacccugaucgacgcccugcugggcgacccccagugcgacggcuuccagaacaagaagugggaccuguucguggagagaagcaaggccuacagcaacugcuaccccuacgacgugcccgacuacgccagccugagaagccugguggccagcagcggcacccuggaguucaacaacgagagcuucaacuggaccggcgugacccagaacggcaccagcagcgccugcaagagaagaagcaacaacagcuucuucagcagacugaacuggcugacccaccugaaguucaaguaccccgcccugaacgugaccaugcccaacaacgagaaguucgacaagcuguacaucuggggcgugcaccaccccggcaccgacaacgaccagaucagccuguacgcccaggccagcggcagaaucaccgugagcaccaagagaagccagcagaccgugauccccaacaucggcagcagacccagagugagagacauccccagcagaaucagcaucuacuggaccaucgugaagcccggcgacaugcugcugaucaacagcaccggcaaccugaucgcccccagaggcuacuucaagaucagaagcggcaagagcagcaucaugagaagcgacgcccccaucggcaagugcaacagcgagugcaucacccccaacggcagcauccccaacgacaagcccuuccagaacgugaacagaaucaccuacggcgccugccccagauacgugaagcagaacacccugaagcuggccaccggcaugagaaacgugcccgagaagcagaccagaggcaucuucggcgccaucgccggcuucaucgagaacggcugggagggcaugguggacggcugguacggcuucagacaccagaacagcgagggcaccggccaggccgccgaccugaagagcacccaggccgccaucaaccagaucaacggcaagcugaacagacugaucggcaagaccaacgagaaguuccaccagaucgagaaggaguucagcgagguggagggcagaauccaggaccuggagaaguacguggaggacaccaagaucgaccuguggagcuacaacgccgagcugcugguggcccuggagaaccagcacaccaucgaccugaccgacagcgagaugaacaagcuguucgagagaaccaagaagcagcugagagagaacgccgaggacaugggcaacggcugcuucaagaucuaccacaagugcgacaacgccugcaucggcagcaucagaaacggcaccuacgaccacgacguguacagagacgaggcccugaacaacagauuccagaucaagggcguggagcugaagagcggcuacaaggacuggauccuguggaucagcuucgccaucagcugcuuccugcugugcguggcccugcugggcuucaucaugugggccugccagaagggcaacaucagaugcaacaucugcaucuga

SEQ ID NO: 161178 - RNA, 1701 nt, Artificial Sequence; identical to SEQ ID NO: 160342
  derived and/or modified CDS sequence (opt4) from hemagglutinin__InfluenzaA__ABG80326

SEQ ID NO: 161179 - RNA, 1701 nt, Artificial Sequence; identical to SEQ ID NO: 160342
  derived and/or modified CDS sequence (opt4) from hemagglutinin__InfluenzaA__ABG80337

SEQ ID NO: 161180 - RNA, 1701 nt, Artificial Sequence
  derived and/or modified CDS sequence (opt4) from hemagglutinin__InfluenzaA__ABG80359
augaagaccaucaucgcccugagcuacauccugugccugguguucgcccagaagcugcccggcaacgacaacagcaccgccacccugugccugggccaccacgccgugcccaacggcacccuggugaagaccaucaccaacgaccagaucgaggugaccaacgccaccgagcuggugcagagcagcagcaccggcagaaucugcgacagcccccacagaauccuggacggcaagaacugcacccugaucgacgcccugcugggcgacccccacugcgacggcuuccagaacaaggagugggaccuguucguggagagaagcaaggccuacagcaacugcuaccccuacgacgugcccgacuacgccagccugagaagccugguggccagcagcggcacccuggaguucaucaacgaggacuucaacuggaccggcguggcccaggacggcggcagcuacgccugcaagagaggcagcgugaacagcuucuucagcagacugaacuggcugcacaagcuggaguacaaguaccccgcccugaacgugaccaugcccaacaacggcaaguucgacaagcuguacaucuggggcgugcaccaccccagcaccgacagcgaccagaccagccuguacgugagagccagcggcagagugaccgugagcaccaagagaagccagcagaccgugacccccaacaucggcagcagacccugggugagaggccugagcagcagaaucagcaucuacuggaccaucgugaagcccggcgacauccugcugaucaacagcaccggcaaccugaucgcccccagaggcuacuucaagaucagaaacggcaagagcagcaucaugagaagcgacgcccccaucggcaacugcagcagcgagugcaucacccccaacggcagcauccccagcgacaagcccuuccagaacgugaacagaaucaccuacggcgccugccccagauacgugaagcagaacacccugaagcuggccaccggcaugagaaacgugcccgagaagcagaccagaggcaucuucggcgccaucgccggcuucaucgagaacggcugggagggcaugguggacggcugguacggcuucagacaccagaacagcgagggcaccggccaggccgccgaccugaagagcacccaggccgccguggaccagaucaacggcaagcugaacagacugaucgagagaaccaacgagaaguuccaccagaucgagaaggaguucagcgagguggagggcagaauccaggaccuggagaaguacguggaggacaccaagaucgaccuguggagcuacaacgccgagcugcugguggcccuggagaaccagcacaccaucgaccugaccgacagcgagaugaacaagcuguucgagaagaccagaaagcagcugagagagaacgccgaggacaugggcaacggcugcuucaagaucuaccacaagugcgacaacgccugcaucggcagcaucagaaacggcaccuacgaccacgacguguacagagacgaggcccugaacaacagauuccagaucaagggcguggagcugaagagcggcuacaaggacuggauccuguggaucagcuucgccaucagcugcuuccugcugugcguggugcugcugggcuucaucaugugggccugccagaagggcaacaucagaugcaacaucugcaucuga

SEQ ID NO: 161181 - RNA, 1701 nt, Artificial Sequence
  derived and/or modified CDS sequence (opt4) from hemagglutinin__InfluenzaA__ABG80370
augaagaccaucaucgcccugagcuacauccugugccugguguucgcccagaagcugcccggcaacgacaacagcaccgccacccugugccugggccaccacgccgugcccaacggcacccuggugaagaccaucaccaacgaccagaucgaggugaccaacgccaccgagcuggugcagagcagcagcaccggcagaaucugcgacagcccccacagaauccuggacggcaagaacugcacccugaucgacgcccugcugggcgacccccacugcgacggcuuccagaacaaggagugggaccuguucguggagagaagcaaggccuacagcaacugcuaccccuacgacgugcccgacuacgccagccugagaagccugguggccagcagcggcacccuggaguucaucaacgaggacuucaacuggaccggcguggcccaggacggcaagagcuacgccugcaagagaggcagcgugaagagcuucuucagcagacugaacuggcugcacaagcuggaguacaaguaccccgcccugaacgugaccaugcccaacaacggcaaguucgacaagcuguacaucuggggcgugcaccaccccagcaccgacagcgaccagaccagccuguacgugagagccagcggcagagugaccgugagcaccaagagaagccagcagaccgugauccccaacaucggcagcagacccugggugagaggccugagcagcagaaucagcaucuacuggaccaucgugaagcccggcgacauccugcugaucaacagcaccggcaaccugaucgcccccagaggcuacuucaagaucagaaacggcaagagcagcaucaugagaagcgacgcccccaucggcaacugcagcagcgagugcaucacccccaacggcagcauccccaacgacaagcccuuccagaacgugaacagaaucaccuacggcgccugccccagauacgugaagcagaacacccugaagcuggccaccggcaugagaaacgugcccgagaagcagaccagaggcaucuucggcgccaucgccggcuucaucgagaacggcugggagggcaugguggacggcugguacggcuucagacaccagaacagcgagggcaccggccaggccgccgaccugaagagcacccaggccgccaucgaccagaucaacggcaagcugaacagacugaucgagaagaccaacgagaaguuccaccagaucgagaaggaguucagcgagguggagggcagaauccaggaccuggagaaguacguggaggacaccaagaucgaccuguggagcuacaacgccgagcugcugguggcccuggagaaccagcacaccaucgaccugaccgacagcgagaugaacaagcuguucgagagaaccagaaagcagcugagagagaacgccgaggacaugggcaacggcugcuucaagaucuaccacaagugcgacaacgccugcaucggcagcaucagaaacggcaccuacgaccacgacguguacagagacgaggcccugaacaacagauuccagaucaagggcguggagcugaagagcggcuacaaggacuggauccuguggaucagcuucgccaucagcugcuuccugcugugcguggugcugcugggcuucaucaugugggccugccagaagggcaacaucagaugcaacaucugcaucuga

SEQ ID NO: 161182 - RNA, 1701 nt, Artificial Sequence; identical to SEQ ID NO: 161113
  derived and/or modified CDS sequence (opt4) from hemagglutinin__InfluenzaA__ABG80392

SEQ ID NO: 161183 - RNA, 1701 nt, Artificial Sequence; identical to SEQ ID NO: 161113
  derived and/or modified CDS sequence (opt4) from hemagglutinin__InfluenzaA__ABG80403

SEQ ID NO: 161184 - RNA, 1701 nt, Artificial Sequence; identical to SEQ ID NO: 161113
  derived and/or modified CDS sequence (opt4) from hemagglutinin__InfluenzaA__ABG80414

SEQ ID NO: 161185 - RNA, 1701 nt, Artificial Sequence; identical to SEQ ID NO: 161113
  derived and/or modified CDS sequence (opt4) from hemagglutinin__InfluenzaA__ABG80425

SEQ ID NO: 161186 - RNA, 1701 nt, Artificial Sequence; identical to SEQ ID NO: 160843
  derived and/or modified CDS sequence (opt4) from hemagglutinin__InfluenzaA__ABG88289

SEQ ID NO: 161187 - RNA, 1701 nt, Artificial Sequence
  derived and/or modified CDS sequence (opt4) from hemagglutinin__InfluenzaA__ABG88300
augaaggccaagcugcuggugcugcugugcgccuucaccgccaccuacgccgacaccaucugcaucggcuaccacgccaacaacagcaccgacaccguggacaccgugcuggagaagaacgugaccgugacccacagcgugaaccugcuggaggacagccacaacggcaagcugugcagacugaagggcaccgccccccugcagcugggcaacugcagcguggccggcuggauccugggcaaccccgagugcgagagccuguucagcaaggagagcuggagcuacaucgccgagacccccaaccccgagaacggcaccugcuaccccggcuacuucgccgacuacgaggagcugagagagcagcugagcagcgugagcagcuucgagagauucgagaucuuccccaaggagagcagcuggcccaaccacaccgugaccaagggcgugaccgccagcugcagccacaacggcaagagcagcuucuacaagaaccugcuguggcugaccgagaagaacggccuguaccccgaccugagcaagagcuacgugaacaacaaggagaaggaggugcuggugcuguggggcgugcaccaccccagcaacaucggcgaccagagagccaucuaccacaccgagaacgccuacgugagcguggugagcagccacuacagcagaagauucacccccgagaucaccaagagacccaaggugagagaccaggagggcagaaucaacuacuacuggacccugcuggagcccggcgacaccaucaucuucgaggccaacggcaaccugaucgcccccugguacgccuucgcccugagcagaggcuucggcagcggcaucaucaccagcaacgccagcaugggcgagugcgacgccaagugccagaccccccagggcgccaucaacagcagccugcccuuccagaacgugcaccccgugaccaucggcgagugccccaaguacgugagaagcaccaagcugagaauggugaccggccugagaaacauccccagcauccagagcagaggccuguucggcgccaucgccggcuucaucgagggcggcuggaccggcaugaucgacggcugguacggcuaccaccaccagaacgagcagggcagcggcuacgccgccgaccagaagagcacccagaacgccaucgacggcaucaccaacaaggugaacagcgugaucgagaagaugaacacccaguucaccgccgugggcaaggaguucaacaagcuggagagaagaauggagaaccugaacaagaagguggacgacggcuuccuggacaucuggaccuacaacgccgagcugcuggugcugcuggagaacgagagaacccuggacuuccacgacagcaacgugaagaaccuguacgagaaggugaagacccagcugaagaacaacgccaaggagaucggcaacggcugcuucgaguucuaccacaagugcaacaacgagugcauggagagcgugaagaacggcaccuacgacuaccccaaguacagcgaggagagcaagcugaacagagagaagaucgacggcgugaagcuggagagcaugggcguguaccagauccuggccaucuacagcaccguggccagcagccuggugcugcuggugagccugggcgccaucagcuucuggaugugcagcaacggcagccugcagugcagaaucugcaucuga

SEQ ID NO: 161188 - RNA, 1701 nt, Artificial Sequence; identical to SEQ ID NO: 160971
  derived and/or modified CDS sequence (opt4) from hemagglutinin__InfluenzaA__ABG88311

SEQ ID NO: 161189 - RNA, 1701 nt, Artificial Sequence
  derived and/or modified CDS sequence (opt4) from hemagglutinin__InfluenzaA__ABG88322
augaaggccaagcugcuggugcugcugugcgccuucaccgccaccuacgccgacaccaucugcaucggcuaccacgccaacaacagcaccgacaccguggacaccgugcuggagaagaacgugaccgugacccacagcgugaaccugcuggaggacagccacaacggcaagcugugcagacugaagggcaccgccccccugcagcugggcaacugcagcguggccggcuggauccugggcaaccccgagugcgagagccuguucagcaaggagagcuggagcuacaucgccgagacccccaaccccgagaacggcaccugcuaccccggcuacuucgccgacuacgaggagcugagagagcagcugagcagcgugagcagcuucgagagauucgagaucuuccccaaggagagcagcuggcccaaccacaccgugaccaagggcgugaccgccagcugcagccacaacggcaagagcagcuucuacaagaaccugcuguggcugaccgagaagaacggccuguaccccauccugagcaagagcuacgugaacaacaaggagaaggaggugcuggugcuguggggcgugcaccaccccagcaacaucggcgaccagagagccaucuaccacaccgagaacgccuacgugagcguggugagcagccacuacagcagaagauucacccccgagaucgccaagagacccaaggugagagaccaggagggcagaaucaacuacuacuggacccugcuggagcccggcgacaccaucaucuucgaggccaacggcaaccugaucgcccccugguacgccuucgcccugagcagaggcuucggcagcggcaucaucaccagcaacgccagcaugggcgagugcgacgccaagugccagaccccccagggcgccaucaacagcagccugcccuuccagaacgugcaccccgugaccaucggcgagugccccaaguacgugagaagcaccaagcugagaauggugaccggccugagaaacauccccagcauccagagcagaggccuguucggcgccaucgccggcuucaucgagggcggcuggaccggcaugaucgacggcugguacggcuaccaccaccagaacgagcagggcagcggcuacgccgccgaccagaagagcacccagaacgccaucgacggcaucaccaacaaggugaacagcgugaucgagaagaugaacacccaguucaccgccgugggcaaggaguucaacaagcuggagagaagaauggagaaccugaacaagaagguggacgacggcuuccuggacaucuggaccuacaacgccgagcugcuggugcugcuggagaacgagagaacccuggacuuccacgacagcaacgugaagaaccuguacgagaaggugaagaaccagcugaagaacaacgccaaggagaucggcaacggcugcuucgaguucuaccacaagugcaacaacgagugcauggagagcgugaagaacggcaccuacgacuaccccaaguacagcgaggagagcaagcugaacagagagaagaucgacggcgugaagcuggagagcaugggcguguaccagauccuggccaucuacagcaccguggccagcagccuggugcugcuggugagccugggcgccaucagcuucuggaugugcagcaacggcagccugcagugcagaaucugcaucuga

SEQ ID NO: 161190 - RNA, 1701 nt, Artificial Sequence
  derived and/or modified CDS sequence (opt4) from hemagglutinin__InfluenzaA__ABG88333
augaaggccaagcugcuggugcugcugugcgcccugagcgccaccgacgccgacaccaucugcaucggcuaccacgccaacaacagcaccgacaccguggacaccgugcuggagaagaacgugaccgugacccacagcgugaaccugcuggaggacagccacaacggcaagcugugcagacugaagggcaucgccccccugcagcugggcaagugcagcaucgccggcuggauccugggcaaccccgagugcgagagccuguucagcaagaagagcuggagcuacaucgccgagacccccaacagcgagaacggcaccugcuaccccggcuacuucgccgacuacgaggagcugagagagcagcugagcagcgugagcagcuucgagagauucgagaucuuccccaaggagagcagcuggcccaagcacaacgugaccagaggcgugaccgccagcugcagccacaagggcaagagcagcuucuacagaaaccugcuguggcugaccgagaagaacggcagcuaccccaaccugagcaagagcuacgugaacaacaaggagaaggaggugcuggugcuguggggcgugcaccaccccagcaacaucgaggaccagaagaccaucuacagaaaggagaacgccuacgugagcguggugagcagccacuacaacagaagauucacccccgagaucagcaagagacccaaggugagaggccaggagggcagaaucaacuacuacuggacccugcuggagcccggcgacaccaucaucuucgaggccaacggcaaccugaucgcccccugguacgccuucgcccugagcagaggcuucggcagcggcaucaucaccagcaacgccagcauggacgagugcgacgccaagugccagaccccccagggcgccaucaacagcagccugcccuuccagaacgugcaccccgugaccaucggcgagugccccaaguacgugagaagcaccaagcugagaauggugaccggccugagaaacauccccagcauccagagcagaggccuguucggcgccaucgccggcuucaucgagggcggcuggaccggcaugaucgacggcugguacggcuaccaccaccagaacgagcagggcagcggcuacgccgccgaccagaagagcacccagaacgccaucaacggcaucaccaacaaggugaacagcgugaucgagaagaugaacacccaguucaccgccgugggcaaggaguucaacaagcuggagaagagaauggagaaccugaacaagaagguggacgacggcuuccuggacaucuggaccuacaacgccgagcugcuggugcugcuggagaacgagagaacccuggacuuccacgacagcaacgugaagaaccuguacgagaaggugaagagccagcugaagaacaacgccaaggagaucggcaacggcugcuucgaguucuaccacaagugcaacaacgagugcauggagagcgugaagaacggcaccuacgacuaccccaaguacagcgaggagagcaagcugaacagagagaagaucgacggcgugaagcuggagagcaugggcguguaccagauccuggccaucuacagcaccguggccagcagccuggugcugcuggugagccugggcgccaucagcuucuggaugugcagcaacggcagccugcagugcagaaucugcaucuga

SEQ ID NO: 161191 - RNA, 1701 nt, Artificial Sequence
  derived and/or modified CDS sequence (opt4) from hemagglutinin__InfluenzaA__ABG88344
augaaggccaagcugcuggugcugcugugcgcccugagcgccaccgacgccgacaccaucugcaucggcuaccacgccaacaacagcaccgacaccguggacaccgugcuggagaagaacgugaccgugacccacagcgugaaccugcuggaggacagccacaacggcaagcugugcagacugaagggcaucgccccccugcagcugggcaagugcagcaucgccggcuggauccugggcaaccccgagugcgagagccuguucagcaagaagagcuggagcuacaucgccgagacccccaacagcgagaacggcaccugcuaccccggcuacuucgccgacuacgaggagcugagagagcagcugagcagcgugagcagcuucgagagauucgagaucuuccccaaggagagcagcuggcccaagcacaacgugaccagaggcgugaccgccagcugcagccacaagggcaagagcagcuucuacagaaaccugcuguggcugaccgagaagaacggcagcuaccccaaccugagcaagagcuacgugaacaacaaggagaaggaggugcuggugcuguggggcgugcaccaccccagcaacaucgaggaccagaagaccaucuacagaaaggagaacgccuacgugagcguggugagcagccacuacaacagaagauucacccccgagaucagcaagagacccaaggugagaaaccaggagggcagaaucaacuacuacuggacccugcuggagcccggcgacaccaucaucuucgaggccaacggcaaccugaucgcccccugguacgccuucgcccugagcagaggcuucggcagcggcaucaucaccagcaacgccagcauggacgagugcgacgccaagugccagaccccccagggcgccaucaacagcagccugcccuuccagaacgugcaccccgugaccaucggcgagugccccaaguacgugagaagcaccaagcugagaauggugaccggccugagaaacauccccagcauccagagcagaggccuguucggcgccaucgccggcuucaucgagggcggcuggaccggcaugaucgacggcugguacggcuaccaccaccagaacgagcagggcagcggcuacgccgccgaccagaagagcacccagaacgccaucaacggcaucaccaacaaggugaacagcgugaucgagaagaugaacacccaguucaccgccgugggcaaggaguucaacaagcuggagaagagaauggagaaccugaacaagaagguggacgacggcuuccuggacaucuggaccuacaacgccgagcugcuggugcugcuggagaacgagagaacccuggacuuccacgacagcaacgugaagaaccuguacgagaaggugaagagccagcugaagaacaacgccaaggagaucggcaacggcugcuucgaguucuaccacaagugcaacaacgagugcauggagagcgugaagaacggcaccuacgacuaccccaaguacagcgaggagagcaagcugaacagagagaagaucgacggcgugaagcuggagagcaugggcguguaccagauccuggccaucuacagcaccguggccagcagccuggugcugcuggugagccugggcgccaucagcuucuggaugugcagcaacggcagccugcagugcagaaucugcaucuga

SEQ ID NO: 161192 - RNA, 1701 nt, Artificial Sequence
  derived and/or modified CDS sequence (opt4) from hemagglutinin__InfluenzaA__ABG88355
augaagaccaucaucgcccugagcuacauccugugccugguguucgcccagaagcugcccggcaacgacaacagcaccgccacccugugccugggccaccacgccgugcccaacggcacccuggugaagaccaucaccaacgaccagaucgaggugaccaacgccaccgagcuggugcagagcagccccaccggcagaaucugcgacagcccccacagaauccuggacggcaagaacugcacccugaucgacgcccugcugggcgacccccacugcgacggcuuccagaacaaggagugggaccuguucguggagagaagcaaggccuacagcaacugcuaccccuacgacgugcccgacuacgccagccugagaagccugguggccagcagcggcacccuggaguucaccaacgagaacuucaacuggaccggcguggcccaggacggcaagagcuacgccugcaagagaggcagcgugaacagcuucuucagcagacugaacuggcugcacaagcuggaguacaaguaccccgcccugaacgugaccaugcccaacaacggcaaguucgacaagcuguacaucuggggcgugcaccaccccagcaccgacagcgaccagaccagccuguacgugagagccagcggcaaggugaccgugagcaccaagagaagccagcagaccgugauccccgacaucggcuacagacccugggugagaggccugagcagcagaaucagcaucuacuggaccaucgugaagcccggcgacauccugcugaucaacagcaccggcaaccugaucgcccccagaggcuacuucaagaucagaaacggcgagagcagcaucaugagaagcgacgcccccaucggcaacugcagcagcgagugcaucacccccaacggcagcauccccaacgacaagcccuuccagaacgugaacagaaucaccuacggcgccugccccagauacgugaagcagaacacccugaagcuggccaccggcaugagaaacgugcccgagaagcagaccagaggcaucuucggcgccaucgccggcuucaucgagaacggcugggagggcaugguggacggcugguacggcuucagacaccagaacagcgagggcaccggccaggccgccgaccugaagagcacccaggccgccaucgaccagaucaacggcaagcugaacagacugguggagaagaccaacgagaaguuccaccagaucgagaaggaguucagcgagguggagggcagaauccaggaccuggagaaguacguggaggacaccaagaucgaccuguggagcuacaacgccgagcugcugguggcccuggagaaccagcacaccaucgaccugaccgacagcgagaugaacaagcuguucgagagaaccagaaagcagcugagagagaacgccgaggacaugggcaacggcugcuucaagaucuaccacaagugcgacaacgccugcaucggcagcaucagaaacggcaccuacgaccacgacguguacagagacgaggcccugaacaacagauuccagaucaagggcguggagcugaagagcggcuacaaggacuggauccuguggaucagcuucgccaucagcugcuuccugcugugcguggugcugcugggcuucaucaugugggccugccagaagggcaacaucagaugcaacaucugcaucuga

SEQ ID NO: 161193 - RNA, 1701 nt, Artificial Sequence
  derived and/or modified CDS sequence (opt4) from hemagglutinin__InfluenzaA__ABG88366
augaagaccaucaucgcccugagcuacuuccugugccugguguucgcccagaagcugcccggcaacgacaacagcaccgccacccugugccugggccaccacgccgugcccaacggcacccuggugaagaccaucaccaacgaccagaucgaggugaccaacgccaccgagcuggugcagaacagccccaccggcagaaucugcgacagcccccacagaauccuggacggcaagaacugcacccugaucgacgcccugcugggcgacccccacugcgacggcuuccagaacaaggagugggaccuguucguggagagaagcaaggccuacagcaacugcuaccccuacgacgugcccgacuacgccagccugagaagccugguggccagcagcggcacccuggaguucaccaacgagaacuucaacuggaccggcguggcccaggacggcaagagcuacgccugcaagagaggcagcgugaacagcuucuucagcagacugaacuggcugcacaagcuggaguacaaguaccccgcccugaacgugaccaugcccaacaacggcaaguucgacaagcuguacaucuggggcgugcaccaccccagcaccgacagcgaccagaccagccuguacgugagagccagcggcaaggugaccgugagcaccaagagaagccagcagaccgugauccccgacaucggcuacagacccugggugagaggccugagcagcagaaucagcaucuacuggaccaucgugaagcccggcgacauccugcugaucaacagcaccggcaaccugaucgcccccagaggcuacuucaagaucagaaacggcaagagcagcaucaugagaagcgacgcccccaucggcaacugcagcagcgagugcaucacccccaacggcagcauccccaacgacaagcccuuccagaacgugaacagaaucaccuacggcgccugccccagauacgugaagcagaacacccugaagcuggccaccggcaugagaaacgugcccgagaagcagaccagaggcaucuucggcgccaucgccggcuucaucgagaacggcugggagggcaugguggacggcugguacggcuucagacaccagaacagcgagggcaccggccaggccgccgaccugaagagcacccaggccgccaucgaccagaucaacggcaagcugaacagacugguggagaagaccaacgagaaguuccaccagaucgagaaggaguucagcgagguggagggcagaauccaggaccuggagaaguacguggaggacaccaagaucgaccuguggagcuacaacgccgagcugcugguggcccuggagaaccagcacaccaucgaccugaccgacagcgagaugaacaagcuguucgagagaaccagaaagcagcugagagagaacgccgaggacaugggcaacggcugcuucaagaucuaccacaagugcgacaacgccugcaucggcagcaucagaaacggcaccuacgaccacgacguguacagagacgaggcccugaacaacagauuccagaucaagggcguggagcugaagagcggcuacaaggacuggauccuguggaucagcuucgccaucagcugcuuccugcugugcguggugcugcugggcuucaucaugugggccugccagaagggcaacaucagaugcaacaucugcaucuga

SEQ ID NO: 161194 - RNA, 1701 nt, Artificial Sequence; identical to SEQ ID NO: 161044
  derived and/or modified CDS sequence (opt4) from hemagglutinin__InfluenzaA__ABG88377

SEQ ID NO: 161195 - RNA, 1701 nt, Artificial Sequence; identical to SEQ ID NO: 161044
  derived and/or modified CDS sequence (opt4) from hemagglutinin__InfluenzaA__ABG88388

SEQ ID NO: 161196 - RNA, 1701 nt, Artificial Sequence
  derived and/or modified CDS sequence (opt4) from hemagglutinin__InfluenzaA__ABG88399
augaagaccaucaucgcccugagcuacauccugugccugguguucgcccagaagcugcccggcaacgacaacagcaccgccacccugugccugggccaccacgccgugcccaacggcacccuggugaagaccaucaccaacgaccagaucgaggugaccaacgccaccgagcuggugcagagcagcagcaccggcagaaucugcgacagcccccacagaauccuggacggcaagaacugcacccugaucgacgcccugcugggcgacccccacugcgacggcuuccagaacaaggagugggaccuguucguggagagaagcaaggccuacagcaacugcuaccccuacgacgugcccgacuacgccagccugagaagccugguggccagcagcggcacccuggaguucaccaaggagagcuucaacuggaccggcguggcccaggacggcaagagcuacgccugcaagagaggcagcgugaacagcuucuucagcagacugaacuggcugcacaagcuggaguacaaguaccccgcccugaacgugaccaugcccaacaacgacaaguucgacaagcuguacaucuggggcgugcaccaccccagcaccgacagcgaccagaccagccuguacgugcaggccagcggcagagugaccgugagcaccaagagaagccagcagaccgugauccccaacaucggcagcagacccugggugagaggcaucagcagcagaaucagcaucuacuggaccaucgugaagcccggcgacauccugcugaucaacagcaccggcaaccugaucgcccccagaggcuacuucaagaucagaaacggcaagagcagcaucaugagaagcgacgcccccaucggcaacugcaacagcgagugcaucacccccaacggcagcauccccaacgacaagcccuuccagaacgugaacagaaucaccuacggcgccugccccagauacgugaagcagaacacccugaagcuggccaccggcaugagaaacgugcccgagaagcagaccagaggcaucuucggcgccaucgccggcuucaucgagaacggcugggagggcaugguggacggcugguacggcuucagacaccagaacagcgagggcaccggccaggccgccgaccugaagagcacccaggccgccaucgaccagaucaacggcaagcugaacagacugaucgagaagaccaacgagaaguuccaccagaucgagaaggaguucagcgagguggagggcagaauccaggaccuggagaaguacguggaggacaccaagaucgaccuguggagcuacaacgccgagcugcugguggcccuggagaaccagcacaccaucgaccugaccgacagcgagaugaacaagcuguucgagagaaccagaaagcagcugagagagaacgccgaggacaugggcaacggcugcuucaagaucuaccacaagugcgacaacgccugcaucggcagcaucagaaacggcaccuacgaccacgacguguacagagacgaggcccugaacaacagauuccagaucaagggcguggagcugaagagcggcuacaaggacuggauccuguggaucagcuucgccaucagcugcuuccugcugugcguggugcugcugggcuucaucaugugggccugccagaagggcaacaucagaugcaacaucugcaucuga

SEQ ID NO: 161197 - RNA, 1701 nt, Artificial Sequence; identical to SEQ ID NO: 161084
  derived and/or modified CDS sequence (opt4) from hemagglutinin__InfluenzaA__ABG88410

SEQ ID NO: 161198 - RNA, 1701 nt, Artificial Sequence; identical to SEQ ID NO: 161084
  derived and/or modified CDS sequence (opt4) from hemagglutinin__InfluenzaA__ABG88421

SEQ ID NO: 161199 - RNA, 1701 nt, Artificial Sequence
  derived and/or modified CDS sequence (opt4) from hemagglutinin__InfluenzaA__ABG88432
augaagaccaucaucgcccugagcuacauccugugccugguguucgcccagaagcugcccggcaacgacaacagcaccgccacccugugccugggccaccacgccgugcccaacggcacccuggugaagaccaucaccaacgaccagaucgaggugaccaacgccaccgagcuggugcagagcagcagcaccggcagaaucugcgacagcccccacagaauccuggacggcaagaacugcacccugaucgacgcccugcugggcgacccccacugcgacggcuuccagaacaaggagugggaccuguucguggagagaagcaaggccuacagcaacugcuaccccuacgacgugcccgacuacgccagccugagaagccugguggccagcagcggcacccuggaguucaucaacgaggacuucaacuggaccggcguggcccaggacggcaagagcuacgccugcaagagaggcagcgugaacagcuucuucagcagacugaacuggcugcacaagcuggaguacaaguaccccgcccugaacgugaccaugcccaacaacggcaaguucgacaagcuguacaucuggggcgugcaccaccccagcaccgacagcgaccagaccagccuguacgugagagccagcggcagagugaccgugagcaccaagagaagccagcagaccgugauccccaacaucggcuucagacccugggugagaggccugagcagcagaaucagcaucuacuggaccaucgugaagcccggcgacauccugcugaucaacagcaccggcaaccugaucgcccccagaggcuacuucaagaugagaaacggcaagagcagcaucaugagaagcgacgcccccaucggcaacugcagcagcgagugcaucacccccaacggcagcauccccaacgacaagcccuuccagaacgugaacagaaucaccuacggcgccugccccagauacgugaagcagaacacccugaagcuggccaccggcaugagaaacgugcccgagaagcagaccagaggcaucuucggcgccaucgccggcuucaucgagaacggcugggagggcaugguggacggcugguacggcuucagacaccagaacagcgagggcaccggccaggccgccgaccugaagagcacccaggccgccaucgaccagaucaacggcaagcugaacagacugaucgagaagaccaacgagaaguuccaccagaucgagaaggaguucagcgagguggagggcagaauccaggaccuggagaaguacguggaggacaccaagaucgaccuguggagcuacaacgccggccugcugguggcccuggagaaccagcacaccaucgaccugaccgacagcgagaugaacaagcuguucgagagaaccagaaagcagcugagagagaacgccgaggacaugggcaacggcugcuucaagaucuaccacaagugcgacaacgccugcaucggcagcaucagaaacggcaccuacgaccacgacguguacagagacgaggcccugaacaacagauuccagaucaagggcguggagcugaagagcggcuacaaggacuggauccuguggaucagcuucgccaucagcugcuuccugcugugcguggugcugcugggcuucaucaugugggccugccagaagggcaacaucagaugcaacaucugcaucuga

SEQ ID NO: 161200 - RNA, 1701 nt, Artificial Sequence; identical to SEQ ID NO: 161084
  derived and/or modified CDS sequence (opt4) from hemagglutinin__InfluenzaA__ABG88443

SEQ ID NO: 161201 - RNA, 1701 nt, Artificial Sequence
  derived and/or modified CDS sequence (opt4) from hemagglutinin__InfluenzaA__ABG88454
augaagaccaucaucgcccugagcuacauccugugccugguguucgcccagaagcugcccggcaacgacaacagcaccgccacccugugccugggccaccacgccgugcccaacggcacccuggugaagaccaucaccaacgaccagaucgaggugaccaacgccaccgagcuggugcagagcagcagcaccggcagaaucugcgacagcccccacagaauccuggacggcaagaacugcacccugaucgacgcccugcugggcgacccccacugcgacggcuuccagaacaaggagugggaccuguucguggagagaagcaaggccuacagcaacugcuaccccuacgacgugcccgacuacgccagccugagaagccugguggccagcagcggcacccuggaguucaucaacgaggacuucaacuggaccggcguggcccaggacggcaagagcuacgccugcaagagaggcagcgccaacagcuucuucagcagacugaacuggcugcacaagcuggaguacaaguaccccgcccugaacgugaccaugcccaacaacggcaaguucgacaagcuguacaucuggggcgugcaccaccccagcaccgacagcgaccagaccagccuguacgugagagccagcggcggcgugaccgugagcaccaagagaagccagcagaccgugauccccaacaucggcagcagacccugggugagaggccugagcagcagaaucagcaucuacuggaccaucgugaagcccggcgacauccugcugaucaacagcaccggcaaccugaucgcccccagaggcuacuucaagaucagaagcggcaagagcagcaucaugagaagcgacgccagcaucggcaacugcagcagcgagugcaucacccccaacggcagcauccccaacgacaagcccuuccagaacgugaacagaaucaccuacggcgccugccccagauacgugaagcagaacacccugaagcuggccaccggcaugagaaacgugcccgagaagcagaccagaggcaucuucggcgccaucgccggcuucaucgagaacggcugggagggcaugguggacggcugguacggcuucagacaccagaacagcgagggcaccggccaggccgccgaccugaagagcacccaggccgccaucgaccagaucaacggcaagcugaacagacugaucggcaagaccaacgacaaguuccaccagaucgagaaggaguucagcgagguggagggcagaauccaggaccuggagaaguacguggaggacaccaagaucgaccuguggagcuacaacgccgagcugcugguggcccuggagaaccagcacaccaucgaccugaccgacagcgagaugaacaagcuguucgagagaaccagaaagcagcugagagagaacgccgaggacaugggcaacggcugcuucaagaucuaccacaagugcgacaacgccugcaucggcagcaucagaaacggcaccuacgaccacgacguguacagagacgaggcccugaacaacagauuccagaucaagggcguggagcugaagagcggcuacaaggacuggauccuguggaucagcuucgccaucagcugcuuccugcugugcguggugcugcugggcuucaucaugugggccugccagaagggcaacaucagaugcaacaucugcaucuga

SEQ ID NO: 161202 - RNA, 1701 nt, Artificial Sequence
  derived and/or modified CDS sequence (opt4) from hemagglutinin__InfluenzaA__ABG88465
augaagaccaucaucgcccugagcuacauccugugccugguguucgcccagaagcugcccggcaacgacaacagcaccgccacccugugccugggccaccacgccgugcccaacggcacccuggugaagaccaucaccaacgaccagaucgaggugaccaacgccaccgagcuggugcagagcagcagcaccggcagaaucugcgacagcccccacagaauccuggacggcaagaacugcacccugaucgacgcccugcugggcgacccccacugcgacggcuuccagaacaaggagugggaccuguucguggagagaagcaaggccuacagcaacugcuaccccuacgacgugcccgacuacgccagccugagaagccugguggccagcagcggcacccuggaguucaucaacgaggacuucaacuggaccggcguggcccaggacggcaagagcuacgccugcaagagaggcagcgugaacagcuucuucagcagacugaacuggcugcacaagcuggaguacaaguaccccgcccugaacgugaccaugcccaacaacggcaaguucgacaagcuguacaucuggggcgugcaccaccccagcaccgacagcgaccagaccagccuguacgugagagccagcggcagagugaccgugagcaccaagagaagccagcagaccgugauccccaacaucggcuucagacccugggugagaggccugagcagcagaaucagcaucuacuggaccaucgugaagcccggcgacauccugcugaucaacagcaccggcaaccugaucgcccccagaggcuacuucaagaucagaaacggcaagagcagcaucaugagaagcgacgcccccaucggcaacugcagcagcgagugcaucacccccaacggcagcauccccaacgacaagcccuuccagaacgugaacagaaucaccuacggcgccugccccagauacgugaagcagaacacccugaagcuggccaccggcaugagaaacauccccgagaagcagaccagaggcaucuucggcgccaucgccggcuucaucgagaacggcugggagggcaugguggacggcugguacggcuucagacaccagaacagcgagggcaccggccaggccgccgaccugaagagcacccaggccgccaucgaccagaucaacggcaagcugaacagacugaucgagaagaccaacgagaaguuccaccagaucgagaaggaguucagcgagguggagggcagaauccaggaccuggagaaguacguggaggacaccaagaucgaccuguggagcuacaacgccggccugcugguggcccuggagaaccagcacaccaucgaccugaccgacagcgagaugaacaagcuguucgagagaaccagaaagcagcugagagagaacgccgaggacaugggcaacggcugcuucaagaucuaccacaagugcgacaacgccugcaucggcagcaucagaaacggcaccuacgaccacgacguguacagagacgaggcccugaacaacagauuccagaucaagggcguggagcugaagagcggcuacaaggacuggauccuguggaucagcuucgccaucagcugcuuccugcugugcguggugcugcugggcuucaucaugugggccugccagaagggcaacaucagaugcaacaucugcaucuga

SEQ ID NO: 161203 - RNA, 1701 nt, Artificial Sequence; identical to SEQ ID NO: 161084
  derived and/or modified CDS sequence (opt4) from hemagglutinin__InfluenzaA__ABG88476

SEQ ID NO: 161204 - RNA, 1701 nt, Artificial Sequence; identical to SEQ ID NO: 161084
  derived and/or modified CDS sequence (opt4) from hemagglutinin__InfluenzaA__ABG88487

SEQ ID NO: 161205 - RNA, 1701 nt, Artificial Sequence; identical to SEQ ID NO: 161084
  derived and/or modified CDS sequence (opt4) from hemagglutinin__InfluenzaA__ABG88498

SEQ ID NO: 161206 - RNA, 1701 nt, Artificial Sequence; identical to SEQ ID NO: 161084
  derived and/or modified CDS sequence (opt4) from hemagglutinin__InfluenzaA__ABG88509

SEQ ID NO: 161207 - RNA, 1701 nt, Artificial Sequence
  derived and/or modified CDS sequence (opt4) from hemagglutinin__InfluenzaA__ABG88520
augaagaccaucaucgcccugagcuacaucagcugccugguguucgcccagaagcugcccggcaacgacaacagcaccgccacccugugccugggccaccacgccgugcccaacggcacccuggugaagaccaucaccaacgaccagaucgaggugaccaacgccaccgagcuggugcagagcagcagcaccggcagaaucugcgacagcccccacagaauccuggacggcaagaacugcacccugaucgacgcccugcugggcgacccccacugcgacggcuuccagaacaaggagugggaccuguucguggagagaagcaaggccuacagcaacugcuaccccuacgacgugcccgacuacgccagccugagaagccugguggccagcagcggcacccuggaguucaucaacgaggacuucaacuggaccggcguggcccaggacggcaagagcuacgccugcaagagaggcagcgugaacagcuucuucagcagacugaacuggcugcacaagcuggaguacaaguaccccgcccugaacgugaccaugcccaacaacggcaaguucgacaagcuguacaucuggggcgugcaccaccccagcaccgacagcgaccagaccagccuguacgugagagccagcggcagagugaccgugagcaccaagagaagccagcagaccgugauccccaacaucggcuucagacccugggugagaggccugagcagcagaaucagcaucuacuggaccaucgugaagcccggcgacauccugcugaucaacagcaccggcaaccugaucgcccccagaggcuacuucaagaucagaaacggcaagagcagcaucaugagaagcgacgcccccaucggcaacugcagcagcgagugcaucacccccaacggcagcauccccaacgacaagcccuuccagaacgugaacagaaucaccuacggcgccugccccagauacgugaagcagaacacccugaagcuggccaccggcaugagaaacgugcccgagaagcagaccagaggcaucuucggcgccaucgccggcuucaucgagaacggcugggagggcaugguggacggcugguacggcuucagacaccagaacagcgagggcaccggccaggccgccgaccugaagagcacccaggccgccaucgaccagaucaacggcaagcugaacagacugaucgagaagaccaacgagaaguuccaccagaucgagaaggaguucagcgagguggagggcagaauccaggaccuggagaaguacguggaggacaccaagaucgaccuguggagcuacaacgccggccugcugguggcccuggagaaccagcacaccaucgaccugaccgacagcgagaugaacaagcuguucgagagaaccagaaagcagcugagagagaacgccgaggacaugggcaacggcugcuucaagaucuaccacaagugcgacaacgccugcaucggcagcaucagaaacggcaccuacgaccacgacguguacagagacgaggcccugaacaacagauuccagaucaagggcguggagcugaagagcggcuacaaggacuggauccuguggaucagcuucgccaucagcugcuuccugcugugcguggugcugcugggcuucaccaugugggccugccagaagggcaacaucagaugcaacaucugcaucuga

SEQ ID NO: 161208 - RNA, 1701 nt, Artificial Sequence
  derived and/or modified CDS sequence (opt4) from hemagglutinin__InfluenzaA__ABG88531
augaagaccaucaucgcccugagcuacauccugugccugguguucgcccagaagcugcccggcaacgacaacagcaccgccacccugugccugggccaccacgccgugcccaacggcacccuggugaagaccaucaccaacgaccagaucgaggugaccaacgccaccgagcuggugcagagcagcagcaccggcagaaucugcgacagcccccacagaauccuggacggcaagaacugcacccugaucgacgcccugcugggcgacccccacugcgacggcuuccagaacaaggagugggaccuguucguggagagaagcaaggccuacagcaacugcuaccccuacgacgugcccgacuacgccagccugagaagccugguggccagcagcggcacccuggaguucaucaacgaggacuucaacuggaccggcguggcccaggacggcaagagcuacgccugcaagagaggcagcgugaacagcuucuucagcagacugaacuggcugcacaagcuggaguacaaguaccccgcccugaacgugaccaugcccaacaacggcaaguucgacaagcuguacaucuggggcgugcaccaccccagcaccgacagcgugcagaccagccuguacgugagagccagcggcagagugaccgugagcaccaagagaagccagcagaccgugauccccaacaucggcuucagacccugggugagaggccugagcagcagaaucagcaucuacuggaccaucgugaagcccggcgacauccugcugaucaacagcaccggcaaccugaucgcccccagaggcuacuucaagaucagaaacggcaagagcagcaucaugagaagcgacgcccccaucggcaacugcagcagcgagugcaucacccccaacggcagcauccccaacgacaagcccuuccagaacgugaacagaaucaccuacggcgccugccccagauacgugaagcagaacacccugaagcuggccaccggcaugagaaacgugcccgagaagcagaccagaggcaucuucggcgccaucgccggcuucaucgagaacggcugggagggcaugguggacggcugguacggcuucagacaccagaacagcgagggcaccggccaggccgccgaccugaagagcacccaggccgccaucgaccagaucaacggcaagcugaacagacugaucgagaagaccaacgagaaguuccaccagaucgagaaggaguucagcgagguggagggcagaauccaggaccuggagaaguacguggaggacaccaagaucgaccuguggagcuacaacgccggccugcugguggcccuggagaaccagcacaccaucgaccugaccgacagcgagaugaacaagcuguucgagagaaccagaaagcagcugagagagaacgccgaggacaugggcaacggcugcuucaagaucuaccacaagugcgacaacgccugcaucggcagcaucagaaacggcaccuacgaccacgacguguacagagacgaggcccugaacaacagauuccagaucaagggcguggagcugaagagcggcuacaaggacuggauccuguggaucagcuucgccaucagcugcuuccugcugugcguggugcugcugggcuucaucaugugggccugccagaagggcaacaucagaugcaacaucugcaucuga

SEQ ID NO: 161209 - RNA, 1698 nt, Artificial Sequence; identical to SEQ ID NO: 161095
  derived and/or modified CDS sequence (opt4) from hemagglutinin__InfluenzaA__ABG88553

SEQ ID NO: 161210 - RNA, 1701 nt, Artificial Sequence; identical to SEQ ID NO: 160770
  derived and/or modified CDS sequence (opt4) from hemagglutinin__InfluenzaA__ABG88564

SEQ ID NO: 161211 - RNA, 1701 nt, Artificial Sequence; identical to SEQ ID NO: 160800
  derived and/or modified CDS sequence (opt4) from hemagglutinin__InfluenzaA__ABG88575

SEQ ID NO: 161212 - RNA, 1701 nt, Artificial Sequence; identical to SEQ ID NO: 160710
  derived and/or modified CDS sequence (opt4) from hemagglutinin__InfluenzaA__ABG88586

SEQ ID NO: 161213 - RNA, 1701 nt, Artificial Sequence
  derived and/or modified CDS sequence (opt4) from hemagglutinin__InfluenzaA__ABG88597
augaagaccaucaucgcccugagcuacauccugugccugguguucgcccagaagcugcccgccaacgacaacagcaccgccacccugugccugggccaccacgccgugcccaacggcacccuggugaagaccaucaccaacgacaacaucgaggugaccaacgccaccgagcuggugcagagcagcagcaccggcagaaucugcgacagcccccaccagauccuggacggcgagaacugcacccugaucgacgcccugcugggcgacccccacugcgacggcuuccagaacaaggagugggaccuguucguggagagaagcaccgccuacagcaacugcuaccccuacgacgugcccgacuacgccagccugagaagccugguggccagcagcggcacccuggaguucaacaacgagagcuucaacuggaccggcguggaccagaacggcaccagcagcgccugcaagagaagaagcaacaagagcuucuucagcagacugaacuggcugcaccagcugaaguacaaguaccccgcccugaacgugaccaugcccaacaacgagaaguucgacaagcuguacaucuggggcgugcaccaccccagcaccgacagcgaccagaucagccuguacgcccaggccagcggcagagugaccgugagcaccaagagaagccagcagaccgugauccccaacaucggcagcagacccugggugagaggcgugagcagcagaaucagcaucuacuggaccaucgugaagcccggcgacauccugcugaucaacagcaccggcaaccugaucgcccccagaggcuacuucaagaucagaagcggcaagagcagcaucaugagaagcaacgcccccaucggcaagugcaacagcgagugcaucacccccaacggcagcauccccaacgacaagcccuuccagaacgugaacagaaucaccuacggcgccugccccagauacgugaagcagaacacccugaagcuggccaccggcaugagaaacgugcccgagaagcagaccagaggcaucuucggcgccaucgccggcuucaucgagaacggcugggagggcaugguggacggcugguacggcuucagacaccagaacagcgagggcaccggccaggccgccgaccugaagagcacccaggccgccaucaaccagaucaacggcaagcugaacagacugaucgagaagaccaacgagaaguuccaccagaucgagaaggaguucagcgagguggagggcagaauccaggaccuggagaaguacguggaggacaccaagaucgaccuguggagcuacaacgccgagcugcugguggcccuggagaaccagcacaccaucgaccugaccgacagcgagaugaacaagcuguucgagagaaccagaaagcagcugagagagaacgccgaggacaugggcaacggcugcuucaagaucuaccacaagugcgacaacgccugcaucggcagcaucagaaacggcaccuacgaccacgacguguacagagacgaggcccugaacaacagauuccagaucaagggcguggagcugaagagcggcuacaaggacuggauccuguggaucagcuucgccaucagcugcuuccugcugugcguggugcugcugggcuucaucaugugggccugccagaagggcaacaucagaugcaacaucugcaucuga

SEQ ID NO: 161214 - RNA, 1701 nt, Artificial Sequence
  derived and/or modified CDS sequence (opt4) from hemagglutinin__InfluenzaA__ABG88608
augaagaccaucaucgcccugagcuacauccugugccugguguucgcccagaagcugcccggcaacgacaacagcaccgccacccugugccugggccaccacgccgugcccaacggcacccuggugaagaccaucaccaacgaccagaucgaggugaccaacgccaccgagcuggugcagagcagcagcaccggcagaaucugcgacagcccccaccagauccuggacggcgagaacugcacccugaucgacgcccugcugggcgacccccacugcgacggcuuccagaacaaggagugggaccuguucguggagagaagcagagccuacagcaacugcuaccccuacgacgugcccgacuacgugagccugagaagccugguggccagcagcggcacccuggaguucaacaacgagagcuucaacuggaccggcguggcccagaacggcaccagcagcgccugcaagagaagaagcgacaagagcuucuucagcagacugaacuggcugcaccagcugaaguacaaguaccccgcccugaacgugaccaugcccaacaacgagaaguucgacaagcuguacaucuggggcgugcaccaccccggcaccgacagcgaccagaucagccuguacgcccaggccagcggcagagugaccgugagcaccaagagaagccagcagaccgugauccccaacaucggcagcagacccugggugagaggcgugagcagcagaaucagcaucuacuggaccaucgugaagcccggcgacauccugcugaucaacagcaccggcaaccugaucgcccccagaggcuacuucaagaucagaagcggcaagagcagcaucaugagaagcgacgcccccaucggcaagugcaacagcgagugcaucacccccaacggcagcauccccaacgacaagcccuuccagaacgugaacagaaucaccuacggccccugccccagauacgugaagcagaacacccugaagcuggccaccggcaugagaaacgugcccgagaagcagaccagaggcaucuucggcgccaucgccggcuucaucgagaacggcugggagggcaugauggacggcugguacggcuucagacaccagaacagcgagggcaccggccaggccgccgaccugaagagcacccaggccgccaucaaccagaucaacggcaagcugaacagacugaucgagaagaccaacgagaaguuccaccagaucgagaaggaguucagcgagguggagggcagaauccaggaccuggagaaguacguggaggacaccaagaucgaccuguggagcuacaacgccgagcugcugguggcccuggagaaccagcacaccaucgaccugaccgacagcgagaugaacaagcuguucgagagaaccaagaagcagcugagagagaacgccgaggacaugggcaacggcugcuucaagaucuaccacaagugcgacaacgccugcaucggcagcaucagaaacggcaccuacgaccacgacguguacagagacgaggcccugaacaccagauuccagaucaagggcguggagcugaagagcggcuacaaggacuggauccuguggaucagcuucgccaucagcugcuuccugcugugcaucgugcugcugggcuucaucaugugggccugccagaagggcaacaucagaugcaacaucugcaucuga

SEQ ID NO: 161215 - RNA, 1701 nt, Artificial Sequence; identical to SEQ ID NO: 160622
  derived and/or modified CDS sequence (opt4) from hemagglutinin__InfluenzaA__ABG88619

SEQ ID NO: 161216 - RNA, 1701 nt, Artificial Sequence
  derived and/or modified CDS sequence (opt4) from hemagglutinin__InfluenzaA__ABG88630
augaagaccaucaucgcccugagcuacauccugugccugguguucgcccagaagcugcccggcaacgacaacagcaccgccacccugugccugggccaccacgccgugcccaacggcacccuggugaagaccaucaccaacgaccagaucgaggugaccaacgccaccgagcuggugcagagcagcagcaccggcagaaucugcgacagcccccaccaggugcuggacggcgagaacugcacccugaucgacgcccugcugggcgacccccacugcgacggcuuccagaacaaggagugggaccuguucguggagagaagcaaggccuacagcaacugcuaccccuacgacgugcccgacuacgugagccugagaagccugguggccagcagcggcacccuggaguucaacaacgagagcuucaacuggaccggcguggcccagaacggcaccagcagcgccugcaagagaagaagcgacaagagcuucuucagcagacugaacuggcugcaccagcugaaguacaaguaccccgcccugaacgugaccaugcccaacaacgagaaguucgacaagcuguacaucuggggcgugcaccaccccggcaccgacagcgaccagaucagccuguacgcccaggccagcggcagagugaccgugagcaccaagagaagccagcagaccgugauccccaacaucggcagcagacccugggugagaggcgugagcagcagaaucagcaucuacuggaccaucgugaagcccggcgacauccugcugaucaacagcaccggcaaccugaucgcccccagaggcuacuucaagaucagaagcggcaagagcagcaucaugagaagcgacgcccccaucggcaagugcaacagcgagugcaucacccccaacggcagcauccccaacgacaagcccuuccagaacgugaacagaaucaccuacggcgccugccccagauacgugaagcagaagacccugaagcuggccaccggcaugagaaacgugcccgagaagcagaccagaggcaucuucggcgccaucgccggcuucaucgagaacggcugggagggcaugauggacggcugguacggcuucagacaccagaacagcgagggcaccggccaggccgccgaccugaagagcacccaggccgccaucaaccagaucaacggcaagcugaacagacugaucgagaagaccaacgagaaguuccaccagaucgagaaggaguucagcgagguggagggcagaauccaggaccuggagaaguacguggaggacaccaagaucgaccuguggagcuacaacgccgagcugcugguggcccuggagaaccagcacaccaucgaccugaccgacagcgagaugaacaagcuguucgagagaaccaagaagcagcugagagagaacgccgaggacaugggcaacggcugcuucaagaucuaccacaagugcgacaacgccugcaucggcagcaucagaaacggcaccuacgaccacgacguguacagagacgaggcccugaacaacagauuccagaucaagggcguggagcugaagagcggcuacaaggacuggauccuguggaucagcuucgccaucagcugcuuccugcugugcaucgugcugcugggcuucaucaugugggccugccagaagggcaacaucagaugcaacaucugcaucuga

SEQ ID NO: 161217 - RNA, 1701 nt, Artificial Sequence
  derived and/or modified CDS sequence (opt4) from hemagglutinin__InfluenzaA__ABG88641
augaagaccaucaucgcccugagcuacauccugugccugguguucgcccagaagcugcccggcaacgacaacagcaccgccacccugugccugggccaccacgccgugcccaacggcacccuggugaagaccaucaccaacgaccagaucgaggugaccaacgccaccgagcuggugcagagcagcagcaccagcagaaucugcgacagcccccaccagauccuggacggcgagaacugcacccugaucgacgcccugcugggcgacccccacugcgacggcuuccagaacaaggagugggaccuguucguggagagaagcaaggccuacagcaacugcuaccccuacgacgugcccgacuacgugagccugagaagccugguggccagcagcggcacccuggaguucaacaacgagagcuucaacuggaccggcguggcccagaacggcaccagcagcgccugcaagagaagaagcgacaagagcuucuucagcagacugaacuggcugcaccagcugaaguacaaguaccccgcccugaacgugaccaugcccaacaacgagaaguucgacaagcuguacaucuggggcgugcaccaccccggcaccgacagcgaccagaucagccuguacgcccaggccagcggcagagugaccgugagcaccaagagaagccagcagaccgugauccccaacaucggcagcggccccugggugagaggcgugagcagcagaaucagcaucuacuggaccaucgugaagcccggcgacauccugcugaucaacagcaccggcaaccugaucgcccccagaggcuacuucaagaucagaagcggcaagagcagcaucaugagaagcgacgcccccaucggcaagugcaacagcgagugcaucacccccaacggcagcauccccaacggcaagcccuuccagaacgugaacagaaucaccuacggcgccugccccagauacgugaagcagaacacccugaagcuggccaccggcaugagaaacgugcccgagaagcagaccagaggcaucuucggcgccaucgccggcuucaucgagaacggcugggagggcaugauggacggcugguacggcuucagacaccagaacagcgagggcaccggccaggccgccgaccugaagagcacccaggccgccaucaaccagaucaacggcaagcugaacagacugaucgagaagaccaacgagaaguuccaccagaucgagaaggaguucagcgagguggagggcagaauccaggaccuggagaaguacguggaggacaccaagaucgaccuguggagcuacaacgccgagcugcugguggcccuggagaaccagcacaccaucgaccugaccgacagcgagaugaacaagcuguucgagagaaccaagaagcagcugagagagaacgccgaggacaugggcaacggcugcuucaagaucuaccacaagugcgacaacgccugcaucggcagcaucagaaacggcaccuacgaccacgacguguacagagacgaggcccugaacaacagauuccagaucaagggcguggagcugaagagcggcuacaaggacuggauccuguggaucagcuucgccaccagcugcuuccugcugugcaucgugcugcugggcuucaucaugugggccugccagaagggcaacaucagaugcaacaucugcaucuga

SEQ ID NO: 161218 - RNA, 1701 nt, Artificial Sequence; identical to SEQ ID NO: 160576
  derived and/or modified CDS sequence (opt4) from hemagglutinin__InfluenzaA__ABG88652

SEQ ID NO: 161219 - RNA, 1701 nt, Artificial Sequence; identical to SEQ ID NO: 160576
  derived and/or modified CDS sequence (opt4) from hemagglutinin__InfluenzaA__ABG88663

SEQ ID NO: 161220 - RNA, 1701 nt, Artificial Sequence; identical to SEQ ID NO: 160576
  derived and/or modified CDS sequence (opt4) from hemagglutinin__InfluenzaA__ABG88674

SEQ ID NO: 161221 - RNA, 1701 nt, Artificial Sequence; identical to SEQ ID NO: 160576
  derived and/or modified CDS sequence (opt4) from hemagglutinin__InfluenzaA__ABG88685

SEQ ID NO: 161222 - RNA, 1701 nt, Artificial Sequence; identical to SEQ ID NO: 160576
  derived and/or modified CDS sequence (opt4) from hemagglutinin__InfluenzaA__ABG88696

SEQ ID NO: 161223 - RNA, 1701 nt, Artificial Sequence; identical to SEQ ID NO: 160342
  derived and/or modified CDS sequence (opt4) from hemagglutinin__InfluenzaA__ABG88707

SEQ ID NO: 161224 - RNA, 1701 nt, Artificial Sequence; identical to SEQ ID NO: 160342
  derived and/or modified CDS sequence (opt4) from hemagglutinin__InfluenzaA__ABG88718

SEQ ID NO: 161225 - RNA, 1701 nt, Artificial Sequence
  derived and/or modified CDS sequence (opt4) from hemagglutinin__InfluenzaA__ABG88729
augaagaccaucaucgcccugagcuacauccugugccugguguucgcccagaagcugcccggcaacgacaacagcaccgccacccugugccugggccaccacgccgugcccaacggcacccuggugaagaccaucaccaacgaccagaucgaggugaccaacgccaccgagcuggugcagagcagcagcaccggcagaaucugcgacagcccccacagaauccuggacggcaagaacugcacccugaucgacgcccugcugggcgacccccacugcgacggcuuccagaacaaggagugggaccuguucguggagagaagcaaggccuacagcaacugcuaccccuacgacgugcccgacuacgccagccugagaagccugguggccagcagcggcacccuggaguucaucaacgaggacuucaacuggaccggcguggcccaggacggcggcagcuacgccugcaagagaggcagcgugaacagcuucuucagcagacugaacuggcugcacaagcuggaguacaaguaccccgcccugaacgugaccaugcccaacagcggcaaguucgacaagcuguacaucuggggcgugcaccaccccagcaccgacagcgaccagaccagccuguacgugagagccagcggcagagugaccgugagcaccaagagaagccagcagaccgugacccccaacaucggcagcagacccugggugagaggccugagcagcagaaucagcaucuacuggaccaucgugaagcccggcgacauccugcugaucaacagcaccggcaaccugaucgcccccagaggcuacuucaagaucagaaacggcaagagcagcaucaugagaagcgacgcccccaucggcaacugcagcagcgagugcaucacccccaacggcagcauccccaacgacaagcccuuccagaacgugaacagaaucaccuacggcgccugccccagauacgugaagcagaacacccugaagcuggccaccggcaugagaaacgugcccgagaagcagaccagaggcaucuucggcgccaucgccggcuucaucgagaacggcugggagggcaugguggacggcugguacggcuucagacaccagaacagcgagggcaccggccaggccgccgaccugaagagcacccaggccgccaucgaccagaucaacggcaagcugaacagacugaucgagaagaccaacgagaaguuccaccagaucgagaaggaguucagcgagguggagggcagaauccaggaccuggagaaguacguggaggacaccaagaucgaccuguggagcuacaacgccgagcugcugguggcccuggagaaccagcacaccaucgaccugaccgacagcgagaugaacaagcuguucgagaagaccagaaagcagcugagagagaacgccgaggacaugggcaacggcugcuucaagaucuaccacaagugcgacaacgccugcaucggcagcaucagaaacggcaccuacgaccacgacguguacagagacgaggcccugaacaacagauuccagaucaagggcguggagcugaagagcggcuacaaggacuggauccuguggaucagcuucgccaucagcugcuuccugcugugcguggugcugcugggcuucaucaugugggccugccagaagggcaacaucagaugcaacaucugcaucuga

SEQ ID NO: 161226 - RNA, 1701 nt, Artificial Sequence
  derived and/or modified CDS sequence (opt4) from hemagglutinin__InfluenzaA__ABG88740
augaagaccaucaucgcccugagcuacauccugugccugguguucgcccagaagcugcccggcaacgacaacagcaccgccacccugugccugggccaccacgccgugcccaacggcacccuggugaagaccaucaccaacgaccagaucgaggugaccaacgccaccgagcuggugcagagcagcagcaccggcagaaucugcgacagcccccacagaauccuggacggcaagaacugcacccugaucgacgcccugcugggcgacccccacugcgacggcuuccagaacaaggagugggaccuguucguggagagaagcaaggccuacagcaacugcuaccccuacgacgugcccgacuacgccagccugagaagccugguggccagcagcggcacccuggaguucaucaacgaggacuucaacuggaccggcguggcccaggacggcaagagcuacgccugcaagagaggcagcgugaacagcuucuucagcagacugaacuggcugcacaagcuggaguacaaguaccccgcccugaacgugaccaugcccaacaacggcaaguucgacaagcuguacaucuggggcgugcaccaccccagcaccgacagcgaccagaccagccuguacgugagagccagcggcagagugaccgugagcaccaagagaagccagcagaccgugauccccaacaucggcagcagacccugggugagaggccugagcagcagaaucagcaucuacuggaccaucgugaagcccggcgacauccugcugaucaacagcaccggcaaccugaucgcccccagaggcuacuucaagaucagaaacggcaagagcagcaucaugagaagcgacgcccccaucggcaacugcagcagcgagugcaucacccccaacggcagcauccccaacgacaagcccuuccagaacgugaacagaaucaccuacggcgccugccccagauacaucaagcagaacacccugaagcuggccaccggcaugagaaacgugcccgagaagcagaccagaggcaucuucggcgccaucgccggcuucaucgagaacggcugggagggcaugguggacggcugguacggcuucagacaccagaacagcgagggcaccggccaggccgccgaccugaagagcacccaggccgccaucgaccagaucaacggcaagcugaacagacugaucgagaagaccaacgagaaguuccaccagaucgagaaggaguucagcgagguggagggcagaauccaggaccuggagaaguacguggaggacaccaagaucgaccuguggagcuacaacgccgagcugcugguggcccuggagaaccagcacaccaucgaccugaccgacagcgagaugaacaagcuguucgagagaaccagaaagcagcugagagagaacgccgaggacaugggcaacggcugcuucaagaucuaccacaagugcgacaacgccugcaucggcagcaucagaaacggcaccuacgaccacgacguguacagagacgaggcccugaacaacagauuccagaucaagggcguggagcugaagagcggcuacaaggacuggauccuguggaucagcuucgccaucagcugcuuccugcugugcguggugcugcugggcuucaucaugugggccugccagaagggcaacaucagaugcaacaucugcaucuga

SEQ ID NO: 161227 - RNA, 1701 nt, Artificial Sequence; identical to SEQ ID NO: 161113
  derived and/or modified CDS sequence (opt4) from hemagglutinin__InfluenzaA__ABG88751

SEQ ID NO: 161228 - RNA, 1701 nt, Artificial Sequence
  derived and/or modified CDS sequence (opt4) from hemagglutinin__InfluenzaA__ABG88762
augaagaccaucaucgcccugagcuacauccugugccugguguucacccagaagcugcccggcaacgacaacagcaccgccacccugugccugggccaccacgccgugcccaacggcacccuggugaagaccaucaccaacgaccagaucgaggugaccaacgccaccgagcuggugcagagcagcagcaccggcagaaucugcgacagcccccacagaauccuggacggcaagaacugcacccugaucgacgcccugcugggcgacccccacugcgacggcuuccagaacaaggagugggaccuguucguggagagaagcaaggccuacagcaacugcuaccccuacgacgugcccgacuacgccagccugagaagccugguggccagcagcggcacccuggaguucaucaacgaggacuucaacuggaccggcguggcccaggacggcggcagcuacgccugcaagagaggcagcgugaacagcuucuucagcagacugaacuggcugcacaagcuggaguacaaguaccccgcccugaacgugaccaugcccaacaacggcaaguucgacaagcuguacaucuggggcgugcaccaccccagcaccgacagcgaccagaccagccuguacgugagagccagcggcagagugaccgugagcaccaagagaagccagcagaccgugauccccaacaucggcagcagacccugggugagaggccugagcagcagaaucagcaucuacuggaccaucgugaagcccggcgacauccugcugaucaacagcaccggcaaccugaucgcccccagaggcuacuucaagaucagaaacggcaagagcagcaucaugagaagcgacgccagcaucggcaacugcagcagcgagugcaucacccccaacggcagcauccccaacgacaagcccuuccagaacgugaacagaaucaccuacggcgccugccccagauacgugaagcagaacacccugaagcuggccaccggcaugagaaacgugcccgagaagcagaccagaggcaucuucggcgccaucgccggcuucaucgagaacggcugggagggcaugguggacggcugguacggcuucagacaccagaacagcgagggcaccggccaggccgccgaccugaagagcacccaggccgccaucgaccagaucaacggcaagcugaacagacugaucgagaagaccaacgagaaguuccaccagaucgagaaggaggugagcgagguggagggcagaauccaggaccuggagaaguacguggaggacaccaagaucgaccuguggagcuacaacgccgagcugcugguggcccuggagaaccagcacaccaucgaccugaccgacagcgagaugaacaagcuguucgagagaaccagaaagcagcugagagagaacgccgaggacaugggcaacggcugcuucaagaucuaccacaagugcgacaacgccugcaucggcagcaucagaaacggcaccuacgaccacgacguguacagagacgaggcccugaacaacagauuccagaucaagagcguggagcugaagagcggcuacaaggacuggauccuguggaucagcuucgccaucagcugcuuccugcugugcguggugcugcugggcuucaucaugugggccugccagaagggcaacaucagaugcaacaucugcaucuga

SEQ ID NO: 161229 - RNA, 1701 nt, Artificial Sequence
  derived and/or modified CDS sequence (opt4) from hemagglutinin__InfluenzaA__ABG88773
augaagaccaucaucgcccugagcuacauccugugccugguguucgcccagaagcugcccggcaacgacaacagcaccgccacccugugccugggccaccacgccgugcccaacggcacccuggugaagaccaucaccaacgaccagaucgaggugaccaacgccaccgagcuggugcagagcagcagcgccggcagaaucugcgacagcccccacagaauccuggacggcaagaacugcacccugaucgacgcccugcugggcgacccccacugcgacggcuuccagaacaaggagugggaccuguucguggagagaagcaaggccuacagcaacugcuaccccuacgacgugcccgacuacgccagccugagaagccugguggccagcagcggcacccuggaguucaucaacgaggacuucaacuggaccggcguggcccaggacggcaagagcuacgccugcaagagaggcagcgugaacagcuucuucagcagacugaacuggcugcacaagcuggaguacaaguaccccgcccugaacgugaccaugcccaacaacggcaaguucgacaagcuguacaucuggggcgugcaccaccccagcaccgacagcgaccagaccagccuguacgugagagccagcggcagagugaccgugagcaccaagagaagccagcagaccgugauccccaacaucggcagcagacccugggugagaggccugagcagcagaaucagcaucuacuggaccaucgugaagcccggcgacauccugcugaucaacagcaccggcaaccugaucgcccccagaggcuacuucaagaucagaaacggcaagagcagcaucaugagaagcgacgcccccaucggcaacugcagcagcgagugcaucacccccaacggcagcauccccaacgacaagcccuuccagaacgugaacagaaucaccuacggcgccugccccagauacgugaagcagaacacccugaagcuggccaccggcaugagaaacgugcccgagaagcagaccagaggcaucuucggcgccaucgccggcuucaucgagaacggcugggagggcaugguggacggcugguacggcuucagacaccagaacagcgagggcaccggccaggccgccgaccugaagagcacccaggccgccaccgaccagaucaacggcaagcugaacagacugaucgagaagaccaacgagaaguuccaccagaucgagaaggaguucagcgagguggagggcagaauccaggaccuggagaaguacguggaggacaccaagaucgaccuguggagcuacaacgccgagcugcugguggcccuggagaaccagcacaccaucgaccugaccgacagcgagaugaacaagcuguucgagagaaccagaaagcagcugagagagaacgccgaggacaugggcaacggcugcuucaagaucuaccacaagugcgacaacgccugcaucggcagcaucagaaacggcaccuacgaccacgacguguacagagacgaggcccugaacaacagauuccagaucaagggcguggagcugaagagcggcuacaaggacuggauccuguggaucagcuucgccaucagcugcuuccugcugugcguggugcugcugggcuucaucaugugggccugccagaagggcaacaucagaugcaacaucugcaucuga

SEQ ID NO: 161230 - RNA, 1701 nt, Artificial Sequence
  derived and/or modified CDS sequence (opt4) from hemagglutinin__InfluenzaA__ABG88784
augaagaccaucaucgcccugagcuacauccugugccugguguucgcccagaagcugcccggcaacgacaacagcaccgccacccugugccugggccaccacgccgugcccaacggcacccuggugaagaccaucaccaacgaccagaucgaggugaccaacgccaccgagcuggugcagagcagcagcaccggcagaaucugcgacagcccccacagaauccuggacggcaagaacugcacccugaucgacgcccugcugggcgacccccacugcgacggcuuccagaacaaggagugggaccuguucguggagagaagcaaggccuacagcaacugcuaccccuacgacgugcccgacuacgccagccugagaagccugguggccagcagcggcacccuggaguucaucaacgaggacuucaacuggaccggcguggcccaggacggcaagagcuacgccugcaagagaggcagcgugaacagcuucuucagcagacugaacuggcugcacaagcuggaguacaaguaccccgcccugaacgugaccaugcccaacaacggcaaguucgacaagcuguacaucuggggcgugcaccaccccagcaccgacagcgaccagaccagccuguacgugagagccagcggcagagugaccgugagcaccaagagaagccagcagaccgugauccccaacaucggcagcagacccugggugagaggccugagcagcagaaucagcaucuacuggaccaucgugaagcccggcgacauccugcugaucaacagcaccggcaaccugaucgcccccagaggcuacuucaagaucagaaacggcaagagcagcaucaugagaagcgacgcccccaucggcaacugcagcagcgagugcaucacccccaacggcagcauccccaacgacaagcccuuccagaacgugaacagaaucaccuacggcgccugccccagauacgugaagcagaacacccugaagcuggccaccggcaugagaaacgugcccgagaagcagaccagaggcaucuucggcgccaucgccggcuucaucgagaacggcugggagggcaugguggacggcugguacggcuucagacaccagaacagcgagggcaccggccaggccgccgaccugaagagcacccaggccgccaucgaccagaucaacggcaagcugaacagacugaucaagaagaccaacgagaaguuccaccagaucgagaaggaguucagcgagguggagggcagaauccaggaccuggagaaguacguggaggacaccaagaucgaccuguggagcuacaacgccgagcugcugguggcccuggagaaccagcacaccaucgaccugaccgacagcgagaugaacaagcuguucgagagaaccagaaagcagcugagagagaacgccgaggacaugggcaacggcugcuucaagaucuaccacaagugcgacaacgccugcaucggcagcaucagaaacggcaccuacgaccacgacguguacagagacgaggcccugaacaacagauuccagaucaagggcguggagcugaagagcggcuacaaggacuggauccuguggaucagcuucgccaucagcugcuuccugcugugcguggugcugcugggcuucaucaugugggccugccagaagggcaacaucagaugcaacaucugcaucuga

SEQ ID NO: 161231 - RNA, 1701 nt, Artificial Sequence
  derived and/or modified CDS sequence (opt4) from hemagglutinin__InfluenzaA__ABG88806
augaagaccaucaucgcccugagcuacauccugugccugguguucgcccagaagcugcccggcaacgacaacagcaccgccacccugugccugggccaccacgccgugcccaacggcacccuggugaagaccaucaccaacgaccagaucgaggugaccaacgccaccgagcuggugcagagcagcagcaccggcagaaucugcgacagcccccaccagauccuggacggcgagaacugcacccugaucgacgcccugcugggcgacccccacugcgacggcuuccagaacaaggagugggaccuguucguggagagaagcaaggccuacagcaacugcuaccccuacgacgugcccgacuacgugagccugagaagccugguggccagcagcggcacccuggaguucaacaacgagagcuucaacuggaccggcguggcccagaacggcaccagcagcgccugcaagagaagaagcgacaagagcuucuucagcagacugaacuggcugcaccagcugaaguacaaguaccccgcccugaacgugaccgugcccaacaacgagaaguucgacaagcuguacaucuggggcgugcaccaccccggcaccgacagcgaccagaucagccuguacgcccaggccagcggcagagugaccgugagcaccaagagaagccagcagaccgugauccccaacaucggcagcagacccugggugagaggcgugagcagcagaaucagcaucuacuggaccaucgugaagcccggcgacauccugcugaucaacagcaccggcaaccugaucgcccccagaggcuacuucaagaucagaagcggcaagagcagcaucaugagaagcgacgcccccaucggcaagugcaacagcgagugcaucacccccaacggcagcauccccaacgacaagcccuuccagaacgugaacagaaucaccuacggcgccugccccagauacgugaagcagaacacccugaagcuggccaccggcaugagaaacgugcccgagaagcagaccagaggcaucuucggcgccaucgccggcuucaucgagaacggcugggagggcaugauggacggcugguacggcuucagacaccagaacagcgagggcaccggccaggccgccgaccugaagagcacccaggccgccaucaaccagaucaacggcaagcugaacagacugaucgagaagaccaacgagaaguuccaccagaucgagaaggaguucagcgagguggagggcagaauccaggaccuggagaaguacguggaggacaccaagaucgaccuguggagcuacaacgccgagcugcugguggcccuggagaaccagcacaccaucgaccugaccgacagcgagaugaacaagcuguucgagagaaccaagaagcagcugagagagaacgccgaggacaugggcaacggcugcuucaagaucuaccacaagugcgacaacgccugcaucggcagcaucagaaacggcaccuacgaccacgacguguacagagacgaggcccugaacaacagauuccagaucaagggcguggagcugaagagcggcuacaaggacuggauccuguggaucagcuucgccaucagcugcuuccugcugugcaucgugcugcugggcuucaucaugugggccugccagaagggcaacaucagaugcaacaucugcaucuga

SEQ ID NO: 161232 - RNA, 1704 nt, Artificial Sequence
  derived and/or modified CDS sequence (opt4) from hemagglutinin__InfluenzaA__ABI16504
auggagaagaucgugcugcugcuggccaucgugagccuggugaagagcgaccagaucugcaucggcuaccacgccaacaacagcaccgagcagguggacaccaucauggagaagaacgugaccgugacccacgcccaggacauccuggagaagacccacaacggcaagcugugcgaccuggacggcgugaagccccugauccugagagacugcagcguggccggcuggcugcugggcaaccccaugugcgacgaguucaucaacgugcccgaguggagcuacaucguggagaaggccaaccccgccaacgaccugugcuaccccggcaacuucaacgacuacgaggagcugaagcaccugcugagcagaaucaaccacuucgagaagauccagaucaucagcaagagcagcuggagcgaccacgaggccagcagcggcgugagcagcgccugccccuaccagggcacccccagcuucuucagaaacgugguguggcugaucaagaagaacaacaccuaccccaccaucaagagaagcuacaacaacaccaaccaggaggaccugcugauccuguggggcauccaccacagcaacaacgccgccgagcagaccaagcuguaccagaaccccaccaccuacaucagcgugggcaccagcacccugaaccugagacuggugcccaagaucgccaccagaagcaaggugaacggccagagcggcagaauggacuucuucuggaccauccugaagcccaacgacgccaucaacuucgagagcaacggcaacuucaucgcccccgaguacgccuacaagaucgugaagaagggcgacagcgccaucaugaagagcgagguggaguacggcaacugcaacaccaagugccagacccccaucggcgccaucaacagcagcaugcccuuccacaacauccacccccugaccaucggcgagugccccaaguacgugaagagcaacaagcuggugcuggccaccggccugagaaacagcccccugagagagagaagaagaaagagaggccuguucggcgccaucgccggcuucaucgagggcggcuggcagggcaugguggacggcugguacggcuaccaccacagcaacgagcagggcagcggcuacgccgccgacaaggagagcacccagaaggccaucgacggcgugaccaacaaggugaacagcaucaucgacaagaugaacacccaguucgaggccgugggcagagaguucaacaaccuggagagaagaaucgagaaccugaacaagaagauggaggacggcuuccuggacguguggaccuacaacgccgagcugcuggugcugauggagaacgagagaacccuggacuuccacgacagcaacgugaagaaccuguacgacaaggugagacugcagcugagagacaacgccaaggagcugggcaacggcugcuucgaguucuaccacaagugcgacaacgagugcauggagagcgugagaaacggcaccuacgacuacccccaguacagcgaggaggccagacugaagagagaggagaucagcggcgugaagcuggagagcaucggcaccuaccagauccugagcaucuacagcaccguggccagcagccuggcccuggccaucaugguggccggccugagccuguggaugugcagcaacggcagccugcagugcagaaucugcaucuga

SEQ ID NO: 161233 - RNA, 1701 nt, Artificial Sequence; identical to SEQ ID NO: 160693
  derived and/or modified CDS sequence (opt4) from hemagglutinin__InfluenzaA__ABI20793

SEQ ID NO: 161234 - RNA, 1701 nt, Artificial Sequence
  derived and/or modified CDS sequence (opt4) from hemagglutinin__InfluenzaA__ABI20837
augaaggccaagcugcuggugcugcugugcgccuucaccgccaccuacgccgacaccaucugcaucggcuaccacgccaacaacagcaccgacaccguggacaccgugcuggagaagaacgugaccgugacccacagcgugaaccugcuggaggacagccacaacggcaagcugugcagacugaagggcaccgccccccugcagcugggcaacugcagcguggccggcuggauccugggcaaccccgagugcgagagccuguucagcaaggagagcuggagcuacaucgccgagacccccaaccccgagaacggcaccugcuaccccggcuacuucgccgacuacgaggagcugagagagcagcugagcagcgugagcagcuucgagagauucgagaucuuccccaaggagagcagcuggcccaaccacaccgugaccaagggcgugaccgccagcugcagccacaacggcaagagcagcuucuacaagaaccugcuguggcugaccgagaagaacggccuguaccccaaccugagcaagagcuacgugaacaacaaggagaaggaggugcuggugcuguggggcgugcaccaccccagcaacaucggcgaccagagagccaucuaccacaccgagaacgccuacgugagcguggugagcagccacuacagcagaagauucacccccgagaucgccaagagacccaaggugagagaccaggagggcagaaucaacuacuacuggacccugcuggagcccggcgacaccaucaucuucgaggccaacggcaaccugaucgcccccugguacgccuucgcccugagcagaggcuucggcagcggcaucaucaccagcaacgccagcaugggcgagugcgacgccaagugccagaccccccagggcgccaucaacagcagccugcccuuccagaacgugcaccccgugaccaucggcgagugccccaaguacgugagaagcaccaagcugagaauggugaccggccugagaaacauccccagcauccagagcagaggccuguucggcgccaucgccggcuucaucgagggcggcuggaccggcaugaucgacggcugguacggcuaccaccaccagaacgagcagggcagcggcuacgccgccgaccagaagagcacccagaacgccaucaacggcaucaccaacaaggugaacagcgugaucgagaagaugaacacccaguucaccgccgugggcaaggaguucaacaagcuggagagaagaauggagaaccugaacaagaagguggacgacggcuuccuggacaucuggaccuacaacgccgagcugcuggugcugcuggagaacgagagaacccuggacuuccacgacagcaacgugaagaaccuguacgagaaggugaagacccagcugaagaacaacgccaaggagaucggcaacggcugcuucgaguucuaccacaagugcaacaacgagugcauggagagcgugaagaacggcaccuacgacuaccccaaguacagcgaggagagcaagcugaacagagagaagaucgacggcgugaagcuggagagcaugggcguguaccagauccuggccaucuacagcaccguggccagcagccuggugcugcuggugagccugggcgccaucagcuucuggaugugcagcaacggcagccugcagugcagaaucugcaucuga

SEQ ID NO: 161235 - RNA, 1701 nt, Artificial Sequence
  derived and/or modified CDS sequence (opt4) from hemagglutinin__InfluenzaA__ABI20848
augaaggccaagcugcuggugcugcugugcgccuucaccgccaccuacgccgacaccaucugcaucggcuaccacgccaacaacagcaccgacaccguggacaccgugcuggagaagaacgugaccgugacccacagcgugaaccugcuggaggacagccacaacggcaagcugugcagacugaagggcaccgccccccugcagcugggcaacugcagcguggccggcuggauccugggcaaccccgagugcgagagccuguucagcaaggagagcuggagcuacaucgccgagacccccaaccccgagaacggcaccugcuaccccggcuacuucgccgacuacgaggagcugaaggagcagcugagcagcgugagcagcuucgagagauucgagaucuuccccaaggagagcagcuggcccaaccacaccgugaccaagggcgugaccgccagcugcagccacaacggcaagagcagcuucuacaagaaccugcuguggcugaccgagaagaacggccuguaccccaaccugagcaagagcuacgugaacaacaaggagaaggaggugcuggugcuguggggcgugcaccaccccagcaacaucggcgaccagagagccaucuaccacaccgagaacgcccacgugagcguggugagcagccacuacagcagaagauucacccccgagaucgccaagagacccaaggugagagaccaggagggcagaaucaacuacuacuggacccugcuggagcccggcgacaccaucaucuucgaggccaacggcaaccugaucgcccccugguacgccuucgcccugagcagaggcuucggcagcggcaucaucaccagcaacgccagcaugggcgagugcgacgccaagugccagaccccccagggcgccaucaacagcagccugcccuuccagaacgugcaccccgugaccaucggcgagugccccaaguacgugagaagcaccaagcugagaauggugaccggccugagaaacauccccagcauccagagcagaggccuguucggcgccaucgccggcuucaucgagggcggcuggaccggcaugaucgacggcugguacggcuaccaccaccagaacgagcagggcagcggcuacgccgccgacaagaagagcacccagaacgccaucgacggcaucaccaacaaggugaacagcgugaucgagaagaugaacacccaguucaccgccgugggcaaggaguucaacaagcuggagagaagaauggagaaccugaacaagaagguggacgacggcuuccuggacaucuggaccuacaacgccgagcugcuggugcugcuggagaacgagagaacccuggacuuccacgacagcaacgugaagaaccuguacgagaaggugaagaaccagcugaagaacaacgccaaggagaucggcaacggcugcuucgaguucuaccacaagugcaacaacgagugcauggagagcgugaagaacggcaccuacgacuaccccaaguacagcgaggagagcaagcugaagagagagaagaucgacggcgugaagcuggagagcaugggcguguaccagauccuggccaucuacagcaccguggccagcagccuggugcugcuggugagccugggcgccaucagcuucuggaugugcagcaacggcagccugcagugcagaaucugcaucuga

SEQ ID NO: 161236 - RNA, 1701 nt, Artificial Sequence; identical to SEQ ID NO: 160981
  derived and/or modified CDS sequence (opt4) from hemagglutinin__InfluenzaA__ABI20859

SEQ ID NO: 161237 - RNA, 1701 nt, Artificial Sequence
  derived and/or modified CDS sequence (opt4) from hemagglutinin__InfluenzaA__ABI20870
augaaggccaagcugcuggugcugcugugcgccuucaccgccaccuacgccgacaccaucugcaucggcuaccacgccaacaacagcaccgacaccguggacaccgugcuggagaagaacgugaccgugacccacagcgugaaccugcuggaggacagccacaacggcaagcugugcagacugaagggcaucgccccccugcagcugggcaacugcagcguggccggcuggauccugggcaaccccgagugcgagagccuguucagcaaggagagcuggagcuacaucgccgagacccccaaccccgagaacggcaccugcuaccccggcaacuucgccgacuacgaggagcugagagagcagcugagcagcgugagcagcuucgagagauucgagaucuuccccaaggagagcagcuggcccaaccacaccgugaccaagggcgugaccgugagcugcagccacaacggcaagagcagcuucuacagaaaccugcuguggcugaccgagaagaacggccuguaccccaaccugagcaagagcuacgugaacaacaaggagaaggaggugcuggugcuguggggcgugcaccaccccagcaacaugagagaccagagagccaucuaccacaccgagaacgccuacgugagcguggugagcagccacuacagcagaagauucacccccgagaucgccaagagacccaaggugagagaccaggagggcagaaucaacuacuacuggacccugcuggagcccggcgacaccaucaucuucgaggccaacggcaaccugaucgcccccagauacgccuucgcccugagcagaggcuucggcagcggcaucaucaccagcaacgccagcauggacgagugcgacgccaagugccagaccccccagggcgccaucaacagcagccugcccuuccagaacgugcaccccgugaccaucggcgagugccccaaguacgugagaagcaccaagcugagaauggugaccggccugagaaacauccccagcauccagagcagaggccuguucggcgccaucgccggcuucaucgagggcggcuggaccggcaugaucgacggcugguacggcuaccaccaccagaacgagcagggcagcggcuacgccgccgaccagaagagcacccagaacgccaucaacggcaucaccaacaaggugaacagcgugaucgagaagaugaacacccaguucaccgccgugggcaaggaguucaacaagcuggagagaagaauggagaaccugaacaagaagguggacgacggcuuccuggacaucuggaccuacaacgccgagcugcuggugcugcuggagaacgagagaacccuggacuuccacgacagcaacgugaagaaccuguacgagaaggugaagagccagcugaagaacaacgccaaggagaucggcaacggcugcuucgaguucuaccacaagugcaacaacgagugcauggagagcgugaagaacggcaccuacgacuaccccaaguacagcgaggagagcaagcugaacagagagaagaucgacggcgugaagcuggagagcaugggcguguaccagauccuggccaucuacagcaccguggccagcagccuggugcugcuggugagccugggcgccaucagcuucuggaugugcagcaacggcagccugcagugcagaaucugcaucuga

SEQ ID NO: 161238 - RNA, 1701 nt, Artificial Sequence; identical to SEQ ID NO: 161049
  derived and/or modified CDS sequence (opt4) from hemagglutinin__InfluenzaA__ABI20881

SEQ ID NO: 161239 - RNA, 1701 nt, Artificial Sequence
  derived and/or modified CDS sequence (opt4) from hemagglutinin__InfluenzaA__ABI20892
augaagaccaucaucgcccugagcuacauccugugccugguguucgcccagaagcugcccggcaacgacaacagcaccgccacccugugccugggccaccacgccgugcccaacggcacccuggugaagaccaucaccaacgaccagaucgaggugaccaacgccaccgagcuggugcagagcagcagcaccggcagaaucugcgacagcccccacagaauccuggacggcaagaacugcacccugaucgacgcccugcugggcgacccccacugcgacggcuuccagaacaaggagugggaccuguucguggagagaagcaaggccuacagcaacugcuaccccuacgacgugcccgacuacgccagccugagaagccugguggccagcagcggcacccuggaguucaccaaggagggcuucaacuggaccggcguggcccaggacggcaagagcuacgccugcaagagaggcagcgugaacagcuucuucagcagacugaacuggcugcacaagcuggaguacaaguaccccgcccugaacgugaccaugcccaacaacgacaaguucgacaagcuguacaucuggggcgugcaccaccccagcaccgacagcgaccagaccagccuguacgugcaggccagcggcagagugaccgugagcaccaagagaagccagcagaccgugauccccaacaucggcagcagacccugggugagaggcaucagcagcagaaucagcauccacuggaccaucgugaagcccggcgacauccugcugaucaccagcaccggcaaccugaucgcccccagaggcuacuucaagaucagaaacggcaagagcagcaucaugagaagcgacgcccccaucggcaacugcaacagcgagugcaucacccccaacggcagcauccccaacgacaagcccuuccagaacgugaacagaaucaccuacggcgccugccccagauacgugaagcagaacacccugaagcuggccaccggcaugagaaacgugcccgagaagcagaccagaggcaucuucggcgccaucgccggcuucaucgagaacggcugggagggcaugguggacggcugguacggcuucagacaccagaacagcgagggcaccggccaggccgccgaccugaagagcacccaggccgccaucgaccagaucaacggcaagcugaacagacugaucgagaagaccaacgagaaguuccaccagaucgagaaggaguucagcgagguggagggcagaauccaggaccuggagaaguacguggaggacaccaagaucgaccuguggagcuacaacgccgagcugcugguggcccuggagaaccagcacaccaucgaccugaccgacagcgagaugaacaagcuguucgagagaaccagaaagcagcugagagagaacgccgaggacaugggcaacggcugcuucaagaucuaccacaagugcgacaacgccugcaucggcagcaucagaaacggcaccuacgaccacgacguguacagagacgaggcccugaacaacagauuccagaucaagggcguggagcugaagagcggcuacaaggacuggauccuguggaucagcuucgccaucagcugcuuccugcugugcguggugcugcugggcuucaucaugugggccugccagaagggcaacaucagaugcaacaucugcaucuga

SEQ ID NO: 161240 - RNA, 1701 nt, Artificial Sequence
  derived and/or modified CDS sequence (opt4) from hemagglutinin__InfluenzaA__ABI20903
augaagaccaucaucgcccugagcuacauccugugccugguguucgcccagaagcugcccggcaacgacaacagcaccgccacccugugccugggccaccacgccgugcccaacggcacccuggugaagaccaucaccaacgaccagaucgaggugaccaacgccaccgagcuggugcagaacagccccaccggcagaaucugcgacagcccccacagaauccuggacggcaagaacugcacccugaucgacgcccugcugggcgacccccacugcgacggcuuccagaacaaggagugggaccuguucguggagagaagcaaggccuacagcaacugcuaccccuacgacgugcccgacuacgccagccugagaagccugguggccagcagcggcacccuggaguucaccaacgagaacuucaacuggaccggcguggcccaggacggcaagagcuacgccugcaagagaggcagcgugaacagcuucuucagcagacugaacuggcugcacaagcuggaguacaaguaccccgcccugaacgugaccaugcccaacaacggcaaguucgacaagcuguacaucuggggcgugcaccaccccagcaccgacagcgaccagaccagccuguacgugagagccagcggcaaggugaccgugagcaccaagagaagccagcagaccgugauccccgacaucggcuacagacccugggugagaggccugagcagcagaaucagcaucuacuggaccaucgugaagcccggcgacauccugcugauccacagcaccggcaaccugaucgcccccagaggcuacuucaagaucagaaacggcaagagcagcaucaugagaagcgacgcccccaucggcaacugcagcagcgagugcaucacccccaacggcagcauccccaacgacaagcccuuccagaacgugaacagaaucaccuacggcgccugccccagauacgugaagcagaacacccugaagcuggccaccggcaugagaaacgugcccgagaagcagaccagaggcaucuucggcgccaucgccggcuucaucgagaacggcugggagggcaugguggacggcugguacggcuucagacaccagaacagcgagggcaccggccaggccgccgaccugaagagcacccaggccgccaucgaccagaucaacggcaagcugaacagacugguggagaagaccaacgagaaguuccaccagaucgagaaggaguucagcgagguggagggcagaauccaggaccuggagaaguacguggaggacaccaagaucgaccuguggagcuacaacgccgagcugcugguggcccuggagaaccagcacaccaucgaccugaccgacagcgagaugaacaagcuguucgagagaaccagaaagcagcugagagagaacgccgaggacaugggcaacggcugcuucaagaucuaccacaagugcgacaacgccugcaucggcagcaucagaaacggcaccuacgaccacgacguguacagagacgaggcccugaacaacagauuccagaucaagggcguggagcugaagagcggcuacaaggacuggauccuguggaucagcuucgccaucagcugcuuccugcugugcguggugcugcugggcuucaucaugugggccugccagaagggcaacaucagaugcaacaucugcaucuga

SEQ ID NO: 161241 - RNA, 1701 nt, Artificial Sequence
  derived and/or modified CDS sequence (opt4) from hemagglutinin__InfluenzaA__ABI20914
augaagaccaucaucgcccugagcuacauccugugccugguguucgcccagaagcugcccggcaacgacaacagcaccgccacccugugccugggccaccacgccgugcccaacggcacccuggugaagaccaucaccaacgaccagaucgaggugaccaacgccaccgagcuggugcagagcagcagcaccggcagaaucugcgacagcccccacagaauccuggacggcaagaacugcacccugaucgacgcccugcugggcgacccccacugcgacggcuuccagaacaaggagugggaccuguucguggagagaagcaaggccuacagcaacugcuaccccuacgacgugcccgacuacgccagccugagaagccugguggccagcagcggcacccuggaguucaucaacgaggacuucaacuggaccggcguggcccaggacggcaagagcuacgccugcaagagaggcagcgugaacagcuucuucagcagacugaacuggcugcacaagcuggaguacaaguaccccgcccugaacgugaccaugcccaacaacggcaaguucgacaagcuguacaucuggggcgugcaccaccccagcaccgacagcgaccagaccagccuguacgugagagccagcggcagagugaccgugagcaccaagagaagccagcagaccgugauccccaacaucggcuucagacccugggugagaggccugagcagcagaaucagcaucuacuggaccaucgugaagcccggcgacauccugcugaucaacagcaccggcaaccugaucgcccccagaggcuacuucaagaucagaaacggcaagagcagcaucaugagaagcgacgcccccaucggcaacugcagcagcgagugcaucacccccaacggcagcauccccaacgacaagcccuuccagaacgugaacagaaucaccuacggcgccugccccagauacgugaagcagaacacccugaagcuggccaccggcaugagaaacgugcccgagaagcagaccagaggcaucuucggcgccaucgccggcuucaucgagaacggcugggagggcaugguggacggcugguacggcuucagacaccagaacagcgagggcaccggccaggccgccgaccugaagagcacccaggccgccaucgaccagaucaacggcaagcugaacagacugaucgagaagaccaacgagaaguuccaccagaucgagaaggaguucagcgagguggagggcagaauccaggaccuggagaaguacguggaggacaccaagaucgaccuguggagcuacaacgccggccugcugguggcccuggagaaccagcacaccaucgaccugaccgacagcgagaugaacaagcuguucgagagaaccagaaagcagcugagagagaacgccgaggacaugggcaacggcugcuucaagaucuaccacaagugcgacaacgccugcaucggcagcaucagaaacggcaccuacgaccacgacguguacagagacgaggcccugaacaacagauuccagaucaagggcguggagcugaagagcggcuacaaggacuggauccuguggaucagcuucgccaucagcugcuuccugcugugcguggugagccugggcuucaucaugugggccugccagaagggcaacaucagaugcaacaucugcaucuga

SEQ ID NO: 161242 - RNA, 1701 nt, Artificial Sequence; identical to SEQ ID NO: 161126
  derived and/or modified CDS sequence (opt4) from hemagglutinin__InfluenzaA__ABI20925

SEQ ID NO: 161243 - RNA, 1701 nt, Artificial Sequence; identical to SEQ ID NO: 161126
  derived and/or modified CDS sequence (opt4) from hemagglutinin__InfluenzaA__ABI20936

SEQ ID NO: 161244 - RNA, 1701 nt, Artificial Sequence
  derived and/or modified CDS sequence (opt4) from hemagglutinin__InfluenzaA__ABI20947
augaagaccaucaucgcccugagcuacauccugugccugguguucgcccagaagcugcccggcaacgacaacagcaccgccacccugugccugggccaccacgccgugcccaacggcacccuggugaagaccaucaccaacgaccagaucgaggugaccaacgccaccgagcuggugcagagcagcagcaccggcagaaucugcgacagcccccacagaauccuggacggcaagaacugcacccugaucgacgcccugcugggcgacccccacugcgacggcuuccagaacaaggagugggaccuguucguggagagaagcaaggccuacagcaacugcuaccccuacgacgugcccgacuacgccagccugagaagccugguggccagcagcggcacccuggaguucaucaacgaggacuucaacuggaccggcguggcccaggacggcaagagcuacgccugcaagagaggcagcgugaacagcuucuucagcagacugaacuggcugcacaagcuggaguacaaguaccccgcccugaacgugaccaugcccaacaacggcaaguucgacaagcuguacaucuggggcgugcaccaccccagcaccgacagcgaccagaccagccuguacgugagagccagcggcagagugaccgugagcaccaagagaagccagcagaccgugauccccaacaucggcuucagacccugggugagaggccugagcagcagaaucagcaucuacuggaccaucgugaagcccggcgacauccugcugaucaacagcaccggcaaccugaucgcccccagaggcuacuucaagaucagaaacggcaagagcagcaucaugagaagcgacgcccccaucggcaacugcagcagcgagugcaucacccccaacggcagcauccccaacgacaagcccuuccagaacgugaacagaaucaccuacggcgccugccccagauacgugaagcagaacacccugaagcuggccaccggcaugagaaacgugcccgagaagcagaccagaggcaucuucggcgccaucgccggcuucaucgagaacggcugggagggcaugguggacggcugguacggcuucagacaccagaacagcgagggcaccggccaggccgccgaccugaagagcacccaggccgccaucgaccagaucaacggcaagcugaacagacugaucgagaagaccaacgagaaguuccaccagaucgagcaggaguucagcgagguggagggcagaauccaggaccuggagaaguacguggaggacaccaagaucgaccuguggagcuacaacgccggccugcugguggcccuggagaaccagcacaccaucgaccugaccgacagcgagaugaacaagcuguucgagagaaccagaaagcagcugagagagaacgccgaggacaugggcaacggcugcuucaagaucuaccacaagugcgacaacgccugcaucggcagcaucagaaacggcaccuacgaccacgacguguacagagacgaggcccugaacaacagauuccagaucaagggcguggagcugaagagcggcuacaaggacuggauccuguggaucagcuucgccaucagcugcuuccugcugugcguggugcugcugggcuucaucaugugggccugccagaagggcaacaucagaugcaacaucugcaucuga

SEQ ID NO: 161245 - RNA, 1701 nt, Artificial Sequence
  derived and/or modified CDS sequence (opt4) from hemagglutinin__InfluenzaA__ABI20958
augaagaccaucaucgcccugagcuacauccugugccugguguucgcccagaagcugcccggcaacgacaacagcaccgccacccugugccugggccaccacgccgugcccaacggcacccuggugaagaccaucaccaacgaccagaucgaggugaccaacgccaccgagcuggugcagagcagcagcaccggcagaaucugcgacagcccccacagaauccuggacggcaagaacugcacccugaucgacgcccugcugggcgacccccacugcgacggcuuccagaacaaggagugggaccuguucguggagagaagcaaggccuacagcaacugcuaccccuacgacgugcccgacuacgccagccugagaagccugguggccagcagcggcacccuggaguucaucaacgaggacuucaacuggaccggcguggcccaggacggcaagagcuacgccugcaagagaggcagcgugaacagcuucuucagcagacugaacuggcuguacaagcuggaguacaaguaccccgcccugaacgugaccaugcccaacaacggcaaguucgacaagcuguacaucuggggcgugcaccaccccagcaccgacagcgaccagaccagccuguacgugagagccagcggcagagugaccgugagcaccaagagaagccagcagaccgugauccccaacaucggcuucagacccugggugagaggccugagcagcagaaucagcaucuacuggaccaucgugaagcccggcgacauccugcugaucaacagcaccggcaaccugaucgcccccagaggcuacuucaagaucagaaacggcaagagcagcaucaugagaagcgacgcccccaucggcaacugcagcagcgagugcaucacccccaacggcagcauccccaacgacaagcccuuccagaacgugaacagaaucaccuacggcgccugccccagauacgugaagcagaacacccugaagcuggccaccggcaugagaaacgugcccgagaagcagaccagaggcaucuucggcgccaucgccggcuucaucgagaacggcugggagggcaugguggacggcugguacggcuucagacaccagaacagcgagggcaccggccaggccgccgaccugaagagcacccaggccgccaucgaccagaucaacggcaagcugaacagacugaucgagaagaccaacgagaaguuccaccagaucgagaaggaguucagcgagguggagggcagaauccaggaccuggagaaguacguggaggacaccaagaucgaccuguggagcuacaacgccggccugcugguggcccuggagaaccagcacaccaucgaccugaccgacagcgagaugaacaagcuguucgagagaaccagaaagcagcugagagagaacgccgaggacaugggcaacggcugcuucaagaucuaccacaagugcgacaacgccugcaucggcagcaucagaaacggcaccuacgaccacgacguguacagagacgaggcccugaacaacagauuccagaucaagggcguggagcugaagagcggcuacaaggacuggauccuguggaucagcuucgccaucagcugcuuccugcugugcguggugcugcugggcuucaucaugugggccugccagaagggcaacaucagaugcaacaucugcaucuga

SEQ ID NO: 161246 - RNA, 1701 nt, Artificial Sequence
  derived and/or modified CDS sequence (opt4) from hemagglutinin__InfluenzaA__ABI20969
augaagaccaucaucgcccugagcuacauccugugccugguguucgcccagaagcugcccgugaacgacaacagcaccgccacccugugccugggccaccacgccgugcccaacggcacccuggugaagaccaucaccaacgaccacaucgaggugaccaacgccaccgagcuggugcagagcagcagcaccggcagaaucugcgacagcccccaccagauccuggacggcgagaacugcacccugaucgacgcccugcugggcgacccccacugcgacggcuuccagaacaaggaguggaaccuguucguggagagaagcaccgccuacagcaacugcuaccccuacgacgugcccgacuacgccagccugagaagccugguggccagcagcggcacccuggaguucaacaacgagagcuucaacuggaccggcguggcccagaacggcaccagcagcgccugcaagagaagaagcaucaagagcuucuucagcagacugaacuggcugcaccagcugaaguacaaguaccccgcccugaacgugaccaugcccaacaacgagaaguucgacaagcuguacaucuggggcgugcaccaccccagcaccgacagcgaccagaucagccuguacgcccaggccagcggcagagugaccgugagcaccaagagaagccagcagaccgugauccccaacaucggcagcagacccugggugagaggcgugagcagcagaaucagcaucuacuggaccaucgugaagcccggcgacauccugcugaucaacagcaccggcaaccugaucgcccccagaggcuacuucaagaucagaagcggcaagagcagcaucaugagaagcaacgcccccaucggcaagugcaacagcgagugcaucacccccaacggcagcauccccaacgacaagcccuuccagaacgugaacagaaucaccuacggcgccugccccagauacgugaagcagaacacccugaagcuggccaccggcaugagaaacgugcccgagaagcagaccagaggcaucuucggcgccaucgccggcuucaucgagaacggcugggagggcaugguggacggcugguacggcuucagacaccagaacagcgagggcaccggccaggccgccgaccugaagagcacccaggccgccaucaaccagaucaacggcaagcugaacagacugaucgagaagaccaacgagaaguuccaccagaucgagaaggaguucagcgagguggagggcagaauccaggaccuggagaaguacguggaggacaccaagaucgaccuguggagcuacaacgccgagcugcugguggcccuggagaaccagcacaccaucgaccugaccgacagcgagaugaacaagcuguucgagagaaccagaaagcagcugagagagaacgccgaggacaugggcaacggcugcuucaagaucuaccacaagugcgacaacgccugcaucggcagcaucagaaacggcaccuacgaccacgacguguacagagacgaggcccugaacaacagauuccagaucaagggcguggagcugaagagcggcuacaaggacuggauccuguggaucagcuucgccaucagcugcuuccugcugugcguggugcugcugggcuucaucaugugggccugccagaagggcaacaucagaugcaacaucugcaucuga

SEQ ID NO: 161247 - RNA, 1701 nt, Artificial Sequence
  derived and/or modified CDS sequence (opt4) from hemagglutinin__InfluenzaA__ABI20980
augaagaccaucaucgcccugagcuacauccugugccugguguucgcccagaagcugcccgugaacgacaacagcaccgccacccugugccugggccaccacgccgugcccaacggcacccuggugaagaccaucaccaacgaccacaucgaggugaccaacgccaccgagcuggugcagagcagcagcaccggcagaaucugcgacagcccccaccagauccuggacggcgagaacugcacccugaucgacgcccugcugggcgacccccacugcgacggcuuccagaacaaggagugggaccuguucguggagagaagcaccgccuacagcaacugcuaccccuacgacgugcccgacuacgccagccugagaagccugguggccagcagcggcacccuggaguucaacaacgagagcuucaacuggaccggcguggaccagaacggcaccagcagcgccugcaagagaagaagcaccaagagcuucuucagcagacugaacuggcugcaccagcugaaguacaaguaccccgcccugaacgugaccaugcccaacaacgagaaguucgacaagcuguacaucuggggcgugcaccaccccagcaccgacagcgaccagaucagccuguacgcccaggccagcggcagagugaccgugagcaccaagagaagccagcagaccgugacccccaacaucggcagcagacccugggugagaggcgugagcagcagaaucagcaucuacuggaccaucgugaagcccggcgacauccugcugaucaacagcaccggcaaccugaucgcccccagaggcuacuucaagaucagaagcggcaagagcagcaucaugagaagcaacgcccugaucggcaagugcaacagcgagugcaucacccccaacggcagcauccccaacgacaagcccuuccagaacgugaacagaaucaccuacggcgccugccccagauacgugaagcagaacacccugaagcuggccaccggcaugagaaacgugcccgagaagcagaccagaggcaucuucggcgccaucgccggcuucaucgagaacggcugggagggcaugguggacggcugguacggcuucagacaccagaacagcgagggcaccggccaggccgccgaccugaagagcacccaggccgccaucaaccagaucaacggcaagcugaacagacugaucgagaagaccaacgagaaguuccaccagaucgagaaggaguucagcgagguggagggcagaauccaggaccuggagaaguacguggaggacaccaagaucgaccuguggagcuacaacgccgagauccugguggcccuggagaaccagcacaccaucgaccugaccgacagcgagaugaacaagcuguucgagagaaccagaaagcagcugagagagaacgccgaggacaugggcaacggcugcuucaagaucuaccacaagugcgacaacgccugcaucggcagcaucagaaacggcaccuacgaccacgacguguacagagacgaggcccugaacaacagauuccagaucaagggcguggagcugaagagcggcuacaaggacuggauccuguggaucagcuucgccaucagcugcuuccugcugugcguggugcugcugggcuucaucaugugggccugccagaagggcaacaucagaugcaacaucugcaucuga

SEQ ID NO: 161248 - RNA, 1701 nt, Artificial Sequence
  derived and/or modified CDS sequence (opt4) from hemagglutinin__InfluenzaA__ABI20991
augaagaccaucaucgcccugagcuacauccugugccugguguucgcccagaagcugcccggcaacgacaacagcaccgccacccugugccugggccaccacgccgugcccaacggcacccuggugaagaccaucaccaacgaccagaucgaggugaccaacgccaccgagcuggugcagagcagcagcaccggcggcaucugcgacagcccccaccagauccuggacggcgagaacugcacccugaucgacgcccugcugggcgacccccacugcgacggcuuccagaacaaggagugggaccuguucguggagagaagcaaggccuacagcaacugcuaccccuacgacgugcccgacuacgccagccugagaagccugguggccagcagcggcacccuggaguucaacaacgagagcuucaacuggaccggcguggcccagaacggcaccagcagcgccugcaagagaagaagcaacaagagcuucuucagcagacugaacuggcugcaccagcugaaguacaaguaccccgcccugaacgugaccaugcccaacaacgagaaguucgacaagcuguacaucuggggcgugcaccaccccagcaccgacagcgaccagaucagccuguacgcccaggcccccggcagagugaccgugagcaccaagagaagccagcagaccgugauccccaacaucggcagcagacccugggugagaggcgugagcagcagaaucagcaucuacuggaccaucgugaagcccggcgacauccugcugaucaacugcaccggcaaccugaucgcccccagaggcuacuucaagaucagaagcggcaagagcagcaucaugagaagcgacgccagcaucggcaagugcaacagcgagugcaucacccccaacggcagcauccccaacgacaagcccuuccagaacgugaacagaaucaccuacggcgccugccccagauacgugaagcagaacacccugaagcuggccaccggcaugagaaacgugcccgagaagcagaccagaggcaucuucggcgccaucgccggcuucaucgagaacggcugggagggcaugguggacggcugguacggcuucagacaccagaacagcgagggcaccggccaggccgccgaccugaagagcacccaggccgccaucaaccagaucaacggcaagcugaacagacugaucgagaagaccaacgagaaguuccaccagaucgagaaggaguucagcgagguggagggcagaauccaggaccuggagaaguacguggaggacaccaagaucgaccuguggagcuacaacgccgagcugcugguggcccuggagaaccagcacaccaucgaccugaccgacagcgagaucaacaagcuguucgagagaaccaagaagcagcugagagagaacgccgaggacaugggcaacggcugcuucaagaucuaccacaagugcgacaacgccugcaucggcagcaucagaaacggcaccuacgaccacgacguguacagagacgaggcccugaacaacagauuccagaucaagggcguggagcugaagagcggcuacaaggacuggauccuguggaucagcuucgccaucagcugcuuccugcugugcguggugcugcugggcuucaucaugugggccugccagaagggcaacaucagaugcaacaucugcaucuga

SEQ ID NO: 161249 - RNA, 1701 nt, Artificial Sequence; identical to SEQ ID NO: 160770
  derived and/or modified CDS sequence (opt4) from hemagglutinin__InfluenzaA__ABI21002

SEQ ID NO: 161250 - RNA, 1701 nt, Artificial Sequence; identical to SEQ ID NO: 161214
  derived and/or modified CDS sequence (opt4) from hemagglutinin__InfluenzaA__ABI21013

SEQ ID NO: 161251 - RNA, 1701 nt, Artificial Sequence; identical to SEQ ID NO: 160700
  derived and/or modified CDS sequence (opt4) from hemagglutinin__InfluenzaA__ABI21024

SEQ ID NO: 161252 - RNA, 1701 nt, Artificial Sequence; identical to SEQ ID NO: 160576
  derived and/or modified CDS sequence (opt4) from hemagglutinin__InfluenzaA__ABI21035

SEQ ID NO: 161253 - RNA, 1701 nt, Artificial Sequence
  derived and/or modified CDS sequence (opt4) from hemagglutinin__InfluenzaA__ABI21046
augaagaccaucaucgcccugagcuacauccugugccugguguucgcccagaagcugcccggcaacgacaacagcaccgccacccugugccugggccaccacgccgugcccaacggcaccaucgugaagaccaucaccaacgaccagaucgaggugaccaacgccaccgagcuggugcagagcagcagcaccggcggcaucugcgacagcccccaccagauccuggacggcgagaacugcacccugaucgacgcccugcugggcgacccccagugcgacggcuuccagaacaagaagugggaccuguucguggagagaagcaaggccuacagcaacugcuaccccuacgacgugcccgaccacgccagccugagaagccugguggccagcagcggcacccuggaguucaacaacgagagcuucgacuggaccggcgugacccagaacggcaccagcagcgccugcaagagaagaagcaacaagagcuucuucagcagacugaacuggcugacccaccugaaguacaaguaccccgcccugaacgugaccaugcccaacaacgagaaguucgacaagcuguacaucuggggcgugcaccaccccggcaccgacaacgaccagaucagccuguacgcccaggccagcggcagaaucaccgugagcaccaagagaagccagcagaccgugauccccaacaucggcagcagacccagagugagagacgugagcagcagaaucagcaucuacuggaccaucgugaagcccggcgacauccugcugaucaacagcaccggcaaccugaucgcccccagaggcuacuucaagaucagaagcggcaagagcagcaucaugagaagcgacgcccccaucggcaagugcaacagcgagugcaucacccccaacggcagcauccccaacgacaagcccuuccagaacgugaacagaaucaccuacggcgccugccccagauacgugaagcagaacacccugaagcuggccaccggcaugagaaacgugcccgagaagcagaccagaggcaucuucggcgccaucgccggcuucaucgagaacggcugggagggcaugguggacggcugguacggcuucagacaccagaacagcgagggcaccggccaggccgccgaccugaagagcacccaggccgccaucaaccagaucaacggcaagcugaacagacugaucggcaagaccaacgagaaguuccaccagaucgagaaggaguucagcgagguggagggcagaauccaggaccuggagaaguacguggaggacaccaagaucgaccuguggagcuacaacgccgagcugcugguggcccuggagaaccagcacaccaucgaccugaccgacagcgagaugaacaagcuguucgagagaaccaagaagcagcugagagagaacgccgaggacaugggcaacggcugcuucaagaucuaccacaagugcgacaacgccugcaucggcagcaucagaaacggcaccuacgaccacgacguguacagagacgaggcccugaacaacagauuccagaucaagggcguggagcugaagagcggcuacaaggacuggauccuguggaucagcuucgccaucagcugcuuccugcugugcguggcccugcugggcuucaucaugugggccugccagaagggcaacaucagaugcaacaucugcaucuga

SEQ ID NO: 161254 - RNA, 1701 nt, Artificial Sequence
  derived and/or modified CDS sequence (opt4) from hemagglutinin__InfluenzaA__ABI21057
augaagaccaucaucgcccugagcuacauccugugccugguguucgcccagaagcugcccggcaacgacaacagcaccgccacccugugccugggccaccacgccgugcccaacggcaccaucgugaagaccaucaccaacgaccagaucgaggugaccaacgccaccgagcuggugcagaacagcagcaccggcggcaucugcgacagcccccaccagauccuggacggcgagaacugcacccugaucgacgcccugcugggcgacccccagugcgacggcuuccagaacaagaagugggaccuguucguggagagaagcaaggccuacagcaacugcuaccccuacgacgugcccgaccacgccagccugagaagccugguggccagcagcggcacccuggaguucaacaacgagagcuucgacuggaccggcgugacccagaacggcaccagcagcgccugcaagagaagaagcaacaagagcuucuucagcagacugaacuggcugacccaccugaaguacaaguaccccgcccugaacgugaccaugcccaacaacgagaaguucgacaagcuguacaucuggggcgugcaccaccccggcaccgacagcgaccagaucagccuguacgcccaggccagcggcagaaucaccgugagcaccaagagaagccagcagaccgugauccccaacaucggcagcagacccagagugagagacgugagcagcagaaucagcaucuacuggaccaucgugaagcccggcgacauccugcugaucaacagcaccggcaaccugaucgcccccagaggcuacuucaagaucagaagcggcaagagcagcaucaugagaagcgacgcccccaucggcaagugcaacagcgagugcaucacccccaacggcagcauccccaacgacaagcccuuccagaacgugaacagaaucaccuacggcgccugccccagauacgugaagcagaacacccugaagcuggccaccggcaugagaaacgugcccgagaagcagaccagaggcaucuucggcgccaucgccggcuucaucgagaacggcugggagggcaugguggacggcugguacggcuucagacaccagaacagcgagggcaccggccaggccgccgaccugaagagcacccaggccgccaucaaccagaucaacggcaagcugaacagacugaucggcaagaccaacgagaaguuccaccagaucgagaaggaguucagcgagguggagggcagaauccaggaccuggagaaguacguggaggacaccaagaucgaccuguggagcuacaacgccgagcugcugguggcccuggagaaccagcacaccaucgaccugaccgacagcgagaugaacaagcuguucgagagaaccaagaagcagcugagagagaacgccgaggacaugggcaacggcugcuucaagaucuaccacaagugcgacaacgccugcaucggcagcaucagaaacggcaccuacgaccacgacguguacagagacgaggcccugaacaacagauuccagaucaagggcguggagcugaagagcggcuacaaggacuggauccuguggaucagcuucgccaucagcugcuuccugcugugcguggcccugcugggcuucaucaugugggccugccagaagggcaacaucagaugcaacaucugcaucuga

SEQ ID NO: 161255 - RNA, 1701 nt, Artificial Sequence; identical to SEQ ID NO: 160303
  derived and/or modified CDS sequence (opt4) from hemagglutinin__InfluenzaA__ABI21068

SEQ ID NO: 161256 - RNA, 1701 nt, Artificial Sequence; identical to SEQ ID NO: 160342
  derived and/or modified CDS sequence (opt4) from hemagglutinin__InfluenzaA__ABI21079

SEQ ID NO: 161257 - RNA, 1701 nt, Artificial Sequence; identical to SEQ ID NO: 161173
  derived and/or modified CDS sequence (opt4) from hemagglutinin__InfluenzaA__ABI21090

SEQ ID NO: 161258 - RNA, 1701 nt, Artificial Sequence; identical to SEQ ID NO: 161173
  derived and/or modified CDS sequence (opt4) from hemagglutinin__InfluenzaA__ABI21101

SEQ ID NO: 161259 - RNA, 1701 nt, Artificial Sequence
  derived and/or modified CDS sequence (opt4) from hemagglutinin__InfluenzaA__ABI21123
augaagaccaucaucgcccugagcuacauccugugccugguguucgcccagaagcugcccggcaacgacaacagcaccgccacccugugccugggccaccacgccgugcccaacggcaccaucgugaagaccaucaccaacgaccagaucgaggugaccaacgccaccgagcuggugcagagcagcagcaccggcggcaucugcgacagcccccaccagauccuggacggcgagaacugcacccugaucgacgcccugcugggcgacccccagugcgacggcuuccagaacaagaagugggaccuguucguggagagaagcaaggccuacagcaacugcuaccccuacgacgugcccgacuacgccagccugagaagccugguggccagcagcggcacccuggaguucaacaacgagagcuucaacuggaccggcgugacccagaacggcaccagcagcgccugcaagagaagaagcaacaacagcuucuucagcagacugaacuggcugacccaccugaaguucaaguaccccgcccugaacgugaccaugcccaacaacgagaaguucgacaagcuguacaucuggggcgugcaccaccccggcaccaacaacgaccagaucagccuguacgcccaggccagcggcagaaucaccgugagcaccaagagaagccagcagaccgugauccccaacaucggcagcagacccagagugagagacauccccagcagaaucagcaucuacuggaccaucgugaagcccggcgacauccugcugaucaacagcaccggcaaccugaucgcccccagaggcuacuucaagaucagaagcggcaagagcagcaucaugagaagcgacgcccccaucggcaagugcaacagcgagugcaucacccccaacggcagcauccccaacgacaagcccuuccagaacgugaacagaaucaccuacggcgccugccccagauacgugaagcagaacacccugaagcuggccaccggcaugagaaacgugcccgagaagcagaccagaggcaucuucggcgccaucgccggcuucaucgagaacggcugggagggcaugguggacggcugguacggcuucagacaccagaacagcgagggcaucggccaggccgccgaccugaagagcacccaggccgccaucaaccagaucaacggcaagcugaacagacugaucggcaagaccaacgagaaguuccaccagaucgagaaggaguucagcgagguggagggcagaauccaggaccuggagaagcacguggaggacaccaagaucgaccuguggagcuacaacgccgagcugcugguggcccuggagaaccagcacaccaucgaccugaccgacagcgagaugaacaagcuguucgagagaaccaagaagcagcugagagagaacgccgaggacaugggcaacggcugcuucaagaucuaccacaagugcgacaacgccugcaucggcagcaucagaaacggcaccuacgaccacgacguguacagagacgaggcccugaacaacagauuccagaucaagggcguggagcugaagagcggcuacaaggacuggauccuguggaucagcuucgccaucagcugcuuccugcugugcguggcccugcugggcuucaucaugugggccugccagaagggcaacaucagaugcaacaucugcaucuga

SEQ ID NO: 161260 - RNA, 1701 nt, Artificial Sequence
  derived and/or modified CDS sequence (opt4) from hemagglutinin__InfluenzaA__ABI21134
augaagaccaucaucgcccugagcuacauccugugccugguguucgcccagaagcugcccggcaacgacaacagcaccgccacccugugccugggccaccacgccgugcccaacggcaccguggugaagaccaucaccaacgaccagaucgaggugaccaacgccaccgagcuggugcagagcagcagcaccggcggcaucugcgacagcccccaccagauccuggacggcgagaacugcacccugauggacgcccugcugggcgacccccagugcgacggcuuccagaacaagaagugggaccuguucguggagagaagcaaggccuacagcaacugcuaccccuacgacgugcccgacuacgccagccugagaagccugguggccagcagcggcacccuggaguucaacaacgagagcuucaacuggaccggcgugacccagaacggcaccagcagcgccugcaagagaagaagcaacaacagcuucuucagcagacugaacuggcugacccaccugaaguucaaguaccccgcccugaacgugaccaugcccaacaacgagaaguucgacaagcuguacaucuggggcgugcaccaccccggcaccgacaacgaccagaucagccuguacgcccaggccagcggcagaaucaccgugagcaccaagagaagccagcagaccgugauccccaacaucggcagcagaagcagagugagagacauccccagcagaaucagcaucuacuggaccaucgugaagcccggcgacauccugcugaucaacagcaccggcaaccugaucgcccccagaggcuacuucaagaucagaagcggcaagagcagcaucaugagaagcgacgcccccaucggcaagugcaacagcgagugcaucacccccaacggcagcauccccaacgacaagcccuuccagaacgugaacagaaucaccuacggcgccugccccagauacgugaagcagaacacccugaagcuggccaccggcaugagaaacgugcccgagaagcagaccagaggcaucuucggcgccaucgccggcuucaucgagaacggcugggagggcaugguggacggcugguacggcuucagacaccagaacagcgagggcaccggccaggccgccgaccugaagagcacccaggccgccaucaaccagaucaacggcaagcugaacagacugaucggcaagaccaacgagaaguuccaccagaucgagaaggaguucagcgagguggagggcagaauccaggaccuggagaaguacguggaggacaccaagaucgaccuguggagcuacaacgccgagcugcugguggcccuggagaaccagcacaccaucgaccugaccgacagcgagaugaacaagcuguucgagagaaccaagaagcagcugagagagaacgccgaggacaugggcaacggcugcuucaagaucuaccacaagugcgacaacgccugcaucggcagcaucagaaacggcaccuacgaccacgacguguacagagacgaggcccugaacaacagauuccagaucaagggcguggagcugaagagcggcuacaaggacuggauccuguggaucagcuucgccaucagcugcuuccugcugugcguggcccugcugggcuucaucaugugggccugccagaagggcaacaucagaugcaacaucugcaucuga

SEQ ID NO: 161261 - RNA, 1701 nt, Artificial Sequence; identical to SEQ ID NO: 160342
  derived and/or modified CDS sequence (opt4) from hemagglutinin__InfluenzaA__ABI21156

SEQ ID NO: 161262 - RNA, 1701 nt, Artificial Sequence
  derived and/or modified CDS sequence (opt4) from hemagglutinin__InfluenzaA__ABI21167
augaagaccaucaucgcccugggcuacauccugugccugguguucgcccagaagcugcccggcaacgacaacagcaccgccacccugugccugggccaccacgccgugcccaacggcaccaucgugaagaccaucaccaacgaccagaucgaggugaccaacgccaccgagcuggugcagagcagcagcaccggcggcaucugcgacagcccccaccagauccuggacggcgagaacugcacccugaucgacgcccugcugggcgacccccagugcgacggcuuccagaacaagaagugggaccuguucguggagagaagcaaggccuacagcaacugcuaccccuacgacgugcccgacuacgccagccugagaagccugguggccagcagcggcacccuggaguucaacaacgagagcuucaacuggaccggcgugacccagaacggcaccagcagcgccugcaagagaagaagcaacaacagcuucuucagcagacugaacuggcugacccaccugaaguucaaguaccccgcccugaacgugaccaugcccaacaacgagaaguucgacaagcuguacaucuggggcgugcaccaccccggcaccaacaacgaccagaucagccuguacgcccaggccagcggcagaaucaccgugagcaccaagagaagccagcagaccgugauccccaacaucggcagcagacccagagugagagacauccccagcagaaucagcaucuacuggaccaucgugaagcccggcgacauccugcugaucaacagcaccggcaaccugaucgcccccagaggcuacuucaagaucagaagcggcaagagcagcaucaugagaagcgacgcccccaucggcaagugcaacagcgagugcaucacccccaacggcagcauccccaacgacaagcccuuccagaacgugaacagaaucaccuacggcgccugccccagauacgugaagcagaacacccugaagcuggccaccggcaugagaaacgugcccgagaagcagaccagaggcaucuucggcgccaucgccggcuucaucgagaacggcugggagggcaugguggacggcugguacggcuucagacaccagaacagcgagggcaucggccaggccgccgaccugaagagcacccaggccgccaucaaccagaucaacggcaagcugaacagacugaucggcaagaccaacgagaaguuccaccagaucgagaaggaguucagcgagguggagggcagaauccaggaccuggagaaguacguggaggacaccaagaucgaccuguggagcuacaacgccgagcugcugguggcccuggagaaccagcacaccaucgaccugaccgacagcgagaugaacaagcuguucgagagaaccaagaagcagcugagagagaacgccgaggacaugggcaacggcugcuucaagaucuaccacaagugcgacaacgccugcaucggcagcaucagaaacggcaccuacgaccacgagguguacagagacgaggcccugaacaacagauuccagaucaagggcguggagcugaagagcggcuacaaggacuggauccuguggaucagcuucgccaucagcugcuuccugcugugcguggcccugcugggcuucaucaugugggccugccagaagggcaacaucagaugcaacaucugcaucuga

SEQ ID NO: 161263 - RNA, 1701 nt, Artificial Sequence
  derived and/or modified CDS sequence (opt4) from hemagglutinin__InfluenzaA__ABI21178
augaagaccaucaucgcccugagcuacauccugugccugguguucgcccagaagcugcccggcaacgacaacagcaccgccacccugugccugggccaccacgccgugcccaacggcaccaucgugaagaccaucaccaacgaccagaucgaggugaccaacgccaccgagcuggugcagagcagcagcaccggcggcaucugcgacagcccccaccagauccuggacggcgagaacugcacccugaucgacgcccugcugggcgacccccagugcgacggcuuccagaacaagaagugggaccuguucguggagagaagcaaggccuacagcagcugcuaccccuacgacgugcccgacuacgccagccugagaagccugguggccagcagcggcacccuggaguucaacaacgagagcuucaacuggaccggcgugacccagaacggcaccagcagcgccugcaagagaagaagcaacaacagcuucuucagcagacugaacuggcugacccaccugaaguucaaguaccccgcccugaacgugaccaugcccaacaacgagaaguucgacaagcuguacaucuggggcgugcaccaccccggcaccaacaacgaccagaucagccuguacgcccaggccagcggcagaaucaccgugagcaccaagagaagccagcagaccgugauccccaacaucggcagcagacccagagugagagacauccccagcagaaucagcaucuacuggaccaucgugaagcccggcgacauccugcugaucaacagcaccggcaaccugaucgcccccagaggcuacuucaagaucagaagcggcaagagcagcaucaugagaagcgacgcccccaucggcaagugcaacagcgagugcaucacccccaacggcagcauccccaacgacaagcccuuccagaacgugaacagaaucaccuacggcgccugccccagauacgugaagcagaacacccugaagcuggccaccggcaugagaaacgugcccgagaagcagaccagaggcaucuucggcgccaucgccggcuucaucgagaacggcugggagggcaugguggacggcugguacggcuucagacaccagaacagcgagggcaucggccaggccgccgaccugaagagcacccaggccgccaucaaccagaucaacggcaagcugaacagacugaucggcaagaccaacgagaaguuccaccagaucgagaaggaguucagcgagguggagggcagaauccaggaccuggagaaguacguggaggacaccaagaucgaccuguggagcuacaacgccgagcugcugguggcccuggagaaccagcacaccaucgaccugaccgacagcgagaugaacaagcuguucgagagaaccaagaagcagcugagagagaacgccgaggacaugggcaacggcugcuucaagaucuaccacaagugcgacaacgccugcaucggcagcaucagaaacggcaccuacgaccacgacguguacagagacgaggcccugaacaacagauuccagaucaagggcguggagcugaagagcggcuacaaggacuggauccuguggaucagcuucgccaucagcugcuuccugcugugcguggcccugcugggcuucaucaugugggccugccagaagggcaacaucagaugcaacaucugcaucuga

SEQ ID NO: 161264 - RNA, 1698 nt, Artificial Sequence
  derived and/or modified CDS sequence (opt4) from hemagglutinin__InfluenzaA__ABI21200
augaaggugaagcugcuggugcugcugugcaccuucaccgccaccuacgccgacaccaucugcaucggcuaccacgccaacaacagcaccgacaccguggacaccgugcuggagaagaacgugaccgugacccacagcgugaaccugcuggaggacagccacaacggcaagcugugccugcugaagggcaucgccccccugcagcugggcaacugcagcguggccggcuggauccugggcaaccccgagugcgagcugcugaucagcaaggagagcuggagcuacaucguggagacccccaaccccgagaacggcaccugcuaccccggcuacuucgccgacuacgaggagcugagagagcagcugagcagcgugagcagcuucgagagauucgagaucuuccccaaggagagcagcuggcccaaccacaccgugaccggcgugagcgccagcugcagccacaacggcaagagcagcuucuacagaaaccugcuguggcugaccggcaagaacggccuguaccccaaccugagcaagagcuacgccaacaacaaggagaaggaggugcuggugcuguggggcgugcaccacccccccaacaucggcgaccagagagcccuguaccacaccgagaacgccuacgugagcguggugagcagccacuacagcagaagauucacccccgagaucgccaagagacccaaggugagagaccaggagggcagaaucaacuacuacuggacccugcuggagcccggcgacaccaucaucuucgaggccaacggcaaccugaucgcccccagauucgccuucgcccugagcagaggcuucggcagcggcaucaucaccagcaacgcccccauggacgagugcgacgccaagugccagaccccccagggcgccaucaacagcagccugcccuuccagaacgugcaccccgugaccaucggcgagugccccaaguacgugagaagcgccaagcugagaauggugaccggccugagaaacauccccagcauccagagcagaggccuguucggcgccaucgccggcuucaucgagggcggcuggaccggcaugguggacggcugguacggcuaccaccaccagaacgagcagggcagcggcuacgccgccgaccagaagagcacccagaacgccaucaacggcaucaccaacaaggugaacagcgugaucgagaagaugaacacccaguucaccgccgugggcaaggaguucaacaagcuggagagaagaauggagaaccugaacaagaagguggacgacggcuuccuggacaucuggaccuacaacgccgagcugcuggugcugcuggagaacgagagaacccuggacuuccacgacagcaacgugaagaaccuguacgagaaggugaagagccagcugaagaacaacgccaaggagaucggcaacggcugcuucgaguucuaccacaagugcaacgacgagugcauggagagcgugaagaacggcaccuacgacuaccccaaguacagcgaggagagcaagcugaacagagagagaaucgacggcgugaagcuggagagcaugggcguguaccagauccuggccaucuacagcaccguggccagcagccuggugcugcuggugagccugggcgccaucagcuucuggaugugcagcaacggcagccugcagugcagaaucugcaucuga

SEQ ID NO: 161265 - RNA, 1698 nt, Artificial Sequence; identical to SEQ ID NO: 161264
  derived and/or modified CDS sequence (opt4) from hemagglutinin__InfluenzaA__ABI21211

SEQ ID NO: 161266 - RNA, 1698 nt, Artificial Sequence
  derived and/or modified CDS sequence (opt4) from hemagglutinin__InfluenzaA__ABI21233
augaaggugaagcugcuggugcugcugugcaccuucaccgccaccuacgccgacaccaucugcaucggcuaccacgccaacaacagcaccgacaccguggacaccgugcuggagaagaacgugaccgugacccacagcgugaaccugcuggaggacagccacaacggcaagcugugccugcugaagggcaucgccccccugcagcugggcaacugcagcguggccggcuggauccugggcaaccccgagugcgagcugcugaucagcaaggagagcuggagcuacaucguggagacccccaaccccgagaacggcaccugcuaccccggcuacuucgccgacuacgaggagcugagagagcagcugaacagcgugagcagcuucgagagauucgagaucuuccccaaggagagcagcuggcccaaccacaccgugaccggcgugagcgccagcugcagccacaacggcaagagcagcuucuacagaaaccugcuguggcugaccggcaagaacggccuguaccccaaccugagcaagagcuacgccaacaacaaggagaaggaggugcuggugcuguggggcgugcaccacccccccaacaucggcgaccagagagcccuguaccacaccgagaacgccuacgugagcguggugagcagccacuacagcagaagauucacccccgagaucgccaagagacccaaggugagagaccaggagggcagaaucaacuacuacuggacccugcuggagcccggcgacaccaucaucuucgaggccaacggcaaccugaucgcccccagauucgccuucgcccugagcagaggcuucggcagcggcaucaucaccagcaacgcccccauggacgagugcgacgccaagugccagaccccccagggcgccaucaacagcagccugcccuuccagaacgugcaccccgugaccaucggcgagugccccaaguacgugagaagcgccaagcugagaauggugaccggccugagaaacauccccagcauccagagcagaggccuguucggcgccaucgccggcuucaucgagggcggcuggaccggcaugguggacggcugguacggcuaccaccaccagaacgagcagggcagcggcuacgccgccgaccagaagagcacccagaacgccaucaacggcaucaccaacaaggugaacagcgugaucgagaagaugaacacccaguucaccgccgugggcaaggaguucaacaagcuggagagaagaauggagaaccugaacaagaagguggacgacggcuuccuggacaucuggaccuacaacgccgagcugcuggugcugcuggagaacgagagaacccuggacuuccacgacagcaacgugaagaaccuguacgagaaggugaagagccagcugaagaacaacgccaaggagaucggcaacggcugcuucgaguucuaccacaagugcaacgacgagugcauggagagcgugaagaacggcaccuacgacuaccccaaguacagcgaggagagcaagcugaacagagagagaaucgacggcgugaagcuggagagcaugggcguguaccagauccuggccaucuacagcaccguggccagcagccuggugcugcuggugagccugggcgccaucagcuucuggaugugcagcaacggcagccugcagugcagaaucugcaucuga

SEQ ID NO: 161267 - RNA, 1701 nt, Artificial Sequence
  derived and/or modified CDS sequence (opt4) from hemagglutinin__InfluenzaA__ABI21244
augaagaccaucaucgcccugagcuacauccugugccugguguucgcccagaagcugcccggcaacgacaacagcaccgccacccugugccugggccaccacgccgugcccaacggcacccuggugaagaccaucaccaacgaccagaucgaggugaccaacgccaccgagcuggugcagagcagcagcaccggcagaaucugcgacagcccccacagaauccuggacggcaagaacugcacccugaucgacgcccugcugggcgacccccacugcgacggcuuccagaacaaggagugggaccuguucguggagagaagcaaggccuacagcaacugcuaccccuacgacgugcccgacuacgccagccugagaagccugguggccagcagcggcacccugaaguucaucaacgaggacuucaacuggaccggcguggcccaggacggcaagagcuacgccugcaagagaggcagcgugaacagcuucuucagcagacugaacuggcugcacaagcuggaguacaaguaccccgcccugaacgugaccaugcccaacaacggcaaguucgacaagcuguacaucuggggcgugcaccaccccagcaccgacagcgaccagaccagccuguacgugagagccagcggcagagugaccgugagcaccaagagaagccagcagaccgugauccccaacaucggcagcagacccugggugagaggccugagcagcagaaucagcaucuacuggaccaucgugaagcccggcgacauccugcugaucaacagcaccggcaaccugaucgcccccagaggcuacuucaagaucagaagcggcaagagcagcaucaugagaagcgacgcccccaucggcaacugcagcagcgagugcaucacccccaacggcagcauccccaacgacaagcccuuccagaacgugaacagaaucaccuacggcgccugccccagauacgugaagcagaacacccugaagcuggccaccggcaugagaaacgugcccgagaagcagaccagaggcaucuucggcgccaucgccggcuucaucgagaacggcugggagggcaugguggacggcugguacggcuucagacaccagaacagcgagggcaccggccaggccgccgaccugaagagcacccaggccgccaucgaccagaucaacggcaagcugaacagacugaucgagaagaccaacgagaaguuccaccagaucgagaaggaguucagcgagguggagggcagaauccaggaccuggagaaguacguggaggacaccaagaucgaccuguggagcuacaacgccgagcugcugguggcccuggagaaccagcacaccaucgaccugaccgacagcgagaugaacaagcuguucgagagaaccagaaagcagcugagagagaacgccgaggacaugggcaacggcugcuucaagaucuaccacaagugcgacaacgccugcaucggcagcaucagaaacggcaccuacgaccacgacguguacagagacgaggcccugaacaacagauuccagaucaagggcguggagcugaagagcggcuacaaggacuggauccuguggaucagcuucgccaucagcugcuuccugcugugcguggugcugcugggcuucaucaugugggccugccagaagggcaacaucagaugcaacaucugcaucuga

SEQ ID NO: 161268 - RNA, 1701 nt, Artificial Sequence; identical to SEQ ID NO: 161113
  derived and/or modified CDS sequence (opt4) from hemagglutinin__InfluenzaA__ABI21255

SEQ ID NO: 161269 - RNA, 1701 nt, Artificial Sequence; identical to SEQ ID NO: 161113
  derived and/or modified CDS sequence (opt4) from hemagglutinin__InfluenzaA__ABI21266

SEQ ID NO: 161270 - RNA, 1701 nt, Artificial Sequence; identical to SEQ ID NO: 161113
  derived and/or modified CDS sequence (opt4) from hemagglutinin__InfluenzaA__ABI21277

SEQ ID NO: 161271 - RNA, 1701 nt, Artificial Sequence
  derived and/or modified CDS sequence (opt4) from hemagglutinin__InfluenzaA__ABI21299
augaagaccaucaucgcccugagcuacauccugugccugguguucgcccagaagcugcccggcaacgacaacagcaccgccacccugugccugggccaccacgccgugcccaacggcacccuggugaagaccaucaccaacgaccagaucgaggugaccaacgccaccgagcuggugcagagcagcagcaccggcagaaucugcgacagcccccacagaauccuggacggcaagaacugcacccugaucgacgcccugcugggcgacccccacugcgacggcuuccagaacaaggagugggaccuguucguggagagaagcaaggccuacagcaacugcuaccccuacgacgugcccgacuacgccagccugagaagccugguggccagcagcggcacccuggaguucaucaacgaggacuucaacuggaccggcguggcccaggacggcaagagcuacgccugcaagagaggcagcgugaacagcuucuucagcagacugaacuggcugcacaagcuggaguacaaguaccccgcccugaacgugaccaugcccaacaacgacaaguucgacaagcuguacaucuggggcgugcaccaccccagcaccgacagcgaccagaccagccuguacgugagagccagcggcagagugaccgugagcaccaagagaagccagcagaccgugauccccaacaucggcagcagacccugggugagaggccugagcagcagaaucagcaucuacuggaccaucgugaagcccggcgacauccugcugaucaacagcaccggcaaccugaucgcccccagaggcuacuucaagaucagaaacggcaagagcagcaucaugagaagcgacgcccccaucggcaacugcagcagcgagugcaucacccccaacggcagcauccccaacgacaagcccuuccagaacgugaacagaaucaccuacggcgccugccccagauacgugaagcagaacacccugaagcuggccaccggcaugagaaacgugcccgagaagcagaccagaggcaucuucggcgccaucgccggcuucaucgagaacggcugggagggcaugguggacggcugguacggcuucagacaccagaacagcgagggcaccggccaggccgccgaccugaagagcacccaggccgccaucgaccagaucaacggcaagcugaacagacugaucgagaagaccaacgagaaguuccaccagaucgagaaggaguucagcgagguggagggcagaauccaggaccuggagaaguacguggaggacaccaagaucgaccuguggagcuacaacgccgagcugcugguggcccuggagaaccagcacaccaucgaccugaccgacagcgagaugaacaagcuguucgagagaaccagaaagcagcugagagagaacgccgaggacaugggcaacggcugcuucaagaucuaccacaagugcgacaacgccugcaucggcagcaucagaaacggcaccuacgaccacgacguguacagagacgaggcccugaacaacagauuccagaucaagggcguggagcugaagagcggcuacaaggacuggauccuguggaucagcuucgccaucagcugcuuccugcugugcguggugcugcugggcuucaucaugugggccugccagaagggcaacaucagaugcaacaucugcaucuga

SEQ ID NO: 161272 - RNA, 1701 nt, Artificial Sequence; identical to SEQ ID NO: 161113
  derived and/or modified CDS sequence (opt4) from hemagglutinin__InfluenzaA__ABI21310

SEQ ID NO: 161273 - RNA, 1701 nt, Artificial Sequence
  derived and/or modified CDS sequence (opt4) from hemagglutinin__InfluenzaA__ABI21321
augaagaccaucaucgcccugagcuacauccugugccugguguucgcccagaagcugcccggcaacgacaacagcaccgccacccugugccugggccaccacgccgugcccaacggcacccuggugaagaccaucaccaacgaccagaucgaggugaccaacgccaccgagcuggugcagagcagcagcaccggcagaaucugcgacagcccccacagaauccuggacggcaagaacugcacccugaucgacgcccugcugggcgacccccacugcgacggcuuccagaacaaggagugggaccuguucguggagagaagcaaggccuacagcaacugcuaccccuacgacgugcccgacuacgccagccugagaagccugguggccagcagcggcacccuggaguucaucaacgaggacuucaacuggaccggcguggcccaggacggcaagagcuacgccugcaagagaggcagcgugaacagcuucuucagcagacugaacuggcugcacaagcuggaguacaaguaccccgcccugaacgugaccaugcccaacaacggcaaguucgacaagcuguacaucuggggcgugcaccaccccagcaccgacagcgaccagaccagccuguacgugagagccagcggcagagugaccgugagcaccaagagaagccagcagaccgugauccccaacaucggcagcagacccugggugagaggccugagcagcagaaucagcaucuacuggaccaucgugaagcccggcgacauccugcugaucaacagcaccggcaaccugaucgcccccagaggcuacuucaagaucagaaacggcaagagcagcaucaugagaagcgacgcccccaucggcaacugcagcagcgagugcaucacccccaacggcagcauccccaacgacaagcccuuccagaacgugaacagaaucaccuacggcgccugccccagauacgugaagcagaacacccugaagcuggccaccggcaugagaaacgugcccgagaagcagaccagaggcaucuucggcgccaucgccggcuucaucgagaacggcugggagggcaugguggacggcugguacggcuucagacaccagaacagcgagggcaccggccaggccgccgaccugaagagcacccaggccgccaucgaccagaucaacggcaagcugaacagacugaucgagaagaccaacgagaaguuccaccagaucgagaaggaguucagcgagguggagggcagaauccaggaccuggagaaguacguggaggacaccaagaucgaccuguggagcuacaacgccgagcugcugguggcccuggagaaccagcacaccaucgaccugaccgacagcgagaugaacaagcuguucgagaagaccagaaagcagcugagagagaacgccgaggacaugggcaacggcugcuucaagaucuaccacaagugcgacaacgccugcaucggcagcaucagaaacggcaccuacgaccacgacguguacagagacgaggcccugaacaacagauuccagaucaagggcguggagcugaagagcggcuacaaggacuggauccuguggaucagcuucgccaucagcugcuuccugcugugcguggugcugcugggcuucaucaugugggccugccagaagggcaacaucagaugcaacaucugcaucuga

SEQ ID NO: 161274 - RNA, 1701 nt, Artificial Sequence
  derived and/or modified CDS sequence (opt4) from hemagglutinin__InfluenzaA__ABI21332
augaagaccaucaucgcccugagcuacauccugugccugguguucgcccagaagcugcccggcaacgacaacagcaccgccacccugugccugggccaccacgccgugcccaacggcacccuggugaagaccaucaccaacgaccagaucgaggugaccaacgccaccgagcuggugcagagcagcagcaccggcagaaucugcgacagcccccacagaauccuggacggcaagaacugcacccugaucgacgcccugcugggcgacccccacugcgacggcuuccagaacaaggagugggaccuguucguggagagaagcaaggccuacagcaacugcuaccccuacgacgugcccgacuacgccagccugagaagccugguggccagcagcggcacccuggaguucaucaacgaggacuucaacuggaccggcguggcccaggacggcaagagcuacgccugcaagagaggcagcgugaacagcuucuucagcagacugaacuggcugcacaagcuggaguacaaguaccccgcccugaacgugaccaugcccaacaacggcaaguucgacaagcuguacaucuggggcgugcaccaccccagcaccgacagcgaccagaccagccuguacgugcaggccagcggcagagugaccgugagcaccaagagaagccagcagaccgugauccccaacaucggcagcagacccugggugagaggccugagcagcagaaucagcaucuacuggaccaucgugaagcccggcgacauccugcugaucaacagcaccggcaaccugaucgcccccagaggcuacuucaagaucagaaacggcaagagcagcaucaugagaagcgacgcccccaucggcaacugcagcagcgagugcaucacccccaacggcagcauccccaacgacaagcccuuccagaacgugaacagaaucaccuacggcgccugccccagauacgugaagcagaacacccugaagcuggccaccggcaugagaaacgugcccgagaagcagaccagaggcaucuucggcgccaucgccggcuucaucgagaacggcugggagggcaugguggacggcugguacggcuucagacaccagaacagcgagggcaccggccaggccgccgaccugaagagcacccaggccgccaucgaccagaucaacggcaagcugaacagacugaucgagaagaccaacgagaaguuccaccagaucgagaaggaguucagcgagguggagggcagaauccaggaccuggagaaguacguggaggacaccaagaucgaccuguggagcuacaacgccgagcugcugguggcccuggagaaccagcacaccaucgaccugaccgacagcgagaugaacaagcuguucgagagaaccagaaagcagcugagagagaacgccgaggacaugggcaacggcugcuucaagaucuaccacaagugcgacaacgccugcaucggcagcaucagaaacggcaccuacgaccacgacguguacagagacgaggcccugaacaacagauuccagaucaagggcguggagcugaagagcggcuacaaggacuggauccuguggaucagcuucgccaucagcugcuuccugcugugcguggugcugcugggcuucaucaugugggccugccagaagggcaacaucagaugcaacaucugcaucuga

SEQ ID NO: 161275 - RNA, 1701 nt, Artificial Sequence; identical to SEQ ID NO: 161113
  derived and/or modified CDS sequence (opt4) from hemagglutinin__InfluenzaA__ABI21343

SEQ ID NO: 161276 - RNA, 1701 nt, Artificial Sequence
  derived and/or modified CDS sequence (opt4) from hemagglutinin__InfluenzaA__ABI21354
augaagaccaucaucgcccugagcuacaucagcugccugguguucgcccagaagcugcccggcaacgacaacagcaccgccacccugugccugggccaccacgccgugcccaacggcacccuggugaagaccaucaccaacgaccagaucgaggugaccaacgccaccgagcuggugcagagcagcagcaccggcagaaucugcgacagcccccacagaauccuggacggcaagaacugcacccugaucgacgcccugcugggcgacccccacugcgacggcuuccagaacaaggagugggaccuguucguggagagaagcaaggccuacagcaacugcuaccccuacgacgugcccgacuacgccagccugagaagccugguggccagcagcggcacccuggaguucaucaacgaggacuucaacuggaccggcguggcccaggacggcaagagcuacgccugcaagagaggcagcgugaacagcuucuucagcagacugaacuggcugcacaagcuggaguacaaguaccccgcccugaacgugaccaugcccaacaacggcaaguucgacaagcuguacaucuggggcgugcaccaccccagcaccgacagcgaccagaccagccuguacgugagagccagcggcagagugaccgugagcaccaagagaagccagcagaccgugauccccaacaucggcagcagacccugggugagaggccugagcagcagaaucagcaucuacuggaccaucgugaagcccggcgacauccugcugaucaacagcaccggcaaccugaucgcccccagaggcuacuucaagaucagaaacggcaagagcagcaucaugagaagcgacgcccccaucggcaacugcagcagcgagugcaucacccccaacggcagcauccccaacgacaagcccuuccagaacgugaacagaaucaccuacggcgccugccccagauacgugaagcagaacacccugaagcuggccaccggcaugagaaacgugcccgagaagcagaccagaggcaucuucggcgccaucgccggcuucaucgagaacggcugggagggcaugguggacggcugguacggcuucagacaccagaacagcgagggcaccggccaggccgccgaccugaagagcacccaggccgccaucgaccagaucaacggcaagcugaacagacugaucgagaagaccaacgagaaguuccaccagaucgagaaggaguucagcgagguggagggcagaauccaggaccuggagaaguacguggaggacaccaagaucgaccuguggagcuacaacgccgagcugcugguggcccuggagaaccagcacaccaucgaccugaccgacagcgagaugaacaagcuguucgagagaaccagaaagcagcugagagagaacgccgaggacaugggcaacggcugcuucaagaucuaccacaagugcgacaacgccugcaucggcagcaucagaaacggcaccuacgaccacgacguguacagagacgaggcccugaacaacagauuccagaucaagggcguggagcugaagagcggcuacaaggacuggauccuguggaucagcuucgccaucagcugcuuccugcugugcguggugcugcugggcuucaucaugugggccugccagaagggcaacaucagaugcaacaucugcaucuga

SEQ ID NO: 161277 - RNA, 1701 nt, Artificial Sequence
  derived and/or modified CDS sequence (opt4) from hemagglutinin__InfluenzaA__ABI21365
augaagaccaucaucgcccugagcuacauccugugccugguguucgcccagaagcugcccggcaacgacaacagcaccgccacccugugccugggccaccacgccgugcccaacggcacccuggugaagaccaucaccaacgaccagaucgaggugaccaacgccaccgagcuggugcagagcagcagcaccggcagaaucugcgacagcccccacagaauccuggacggcaagaacugcacccugaucgacgcccugcugggcgacccccacugcgacggcuuccagaacaaggagugggaccuguucguggagagaagcaaggccuacagcaacugcuaccccuacgacgugcccgacuacgccagccugagaagccugguggccagcagcggcacccuggaguucaucaacgaggacuucaacuggaccggcguggcccaggacggcaagagcuacgccugcaagagaggcagcgugaacagcuucuucagcagacugaacuggcugcacaagcuggaguacaaguaccccgcccugaacgugaccaugcccaacaacggcaaguucgacaagcuguacaucuggggcgugcaccaccccagcaccgacagcgaccagaccagccuguacgugagagccagcggcagagugaccgugagcaccaagagaagccagcagaccgugauccccaacaucggcagcagacccugggugagaggccugagcagcagaaucagcaucuacuggaccaucgugaagcccggcgacauccugcugaucaacagcaccggcaaccugaucgcccccagaggcuacuucaagaucagaaacggcaagagcagcaucaugagaagcgacgcccccaucggcaacugcagcagcgagugcaucacccccaacggcagcauccccaacgacaagcccuuccagaacgugaacagaaucaccuacggcgccugccccagauacgugaagcagaacacccugaagcuggccaccggcaugagaaacgugcccgagaagcagaccagaggcaucuucggcgccaucgccggcuucaucgagaacggcugggagggcaugguggacggcugguacggcuucagacaccagaacagcgagggcaccggccaggccgccgaccugaagagcacccaggccgccaucgaccagaucaacggcaagcugaacagacugaucgagaagaccaacgagaaguuccaccagaucgagaaggaguucagcgagguggagggcagaauccaggaccuggagaaguacguggaggacaccaagaucgaccuguggagcuacaacgccgagcugcugguggcccuggagaaccagcacaccaucgaccugaccgacagcgagauggacaagcuguucgagagaaccagaaagcagcugagagagaacgccgaggacaugggcaacggcugcuucaagaucuaccacaagugcgacaacgccugcaucggcagcaucagaaacggcaccuacgaccacgacguguacagagacgaggcccugaacaacagauuccagaucaagggcguggagcugaagagcggcuacaaggacuggauccuguggaucagcuucgccaucagcugcuuccugcugugcguggugcugcugggcuucaucaugugggccugccagaagggcaacaucagaugcaacaucugcaucuga

SEQ ID NO: 161278 - RNA, 1701 nt, Artificial Sequence
  derived and/or modified CDS sequence (opt4) from hemagglutinin__InfluenzaA__ABI21376
augaagaccaucaucgcccugagcuacauccugugccugguguucgcccagaagcugcccggcaacgacaacagcaccgccacccugugccugggccaccacgccgugcccaacggcacccuggugaagaccaucaccaacgaccagaucgaggugaccaacgccaccgagcuggugcagagcagcagcaccggcagaaucugcgacagcccccacagaauccuggacggcaagaacugcacccugaucgacgcccugcugggcgacccccacugcgacggcuuccagaacaaggagugggaccuguucguggagagaagcaaggccuacagcaacugcuaccccuacgacgugcccgacuacgccagccugagaagccugguggccagcagcggcacccuggaguucaucaacgaggacuucaacuggaccggcguggcccaggacggcaagagcuacagcugcaagagaggcagcgugaacagcuucuucagcagacugaacuggcugcacaagcuggaguacaaguaccccgcccugaacgugaccaugcccaacaacgacaaguucgacaagcuguacaucuggggcgugcaccaccccagcaccgacagcgaccagaccagccuguacgugagagccagcggcagagugaccgugagcaccaagagaagccagcagaccgugauccccaacaucggcagcagacccugggugagaggccugagcagcagaaucagcaucuacuggaccaucgugaagcccggcgacauccugcugaucaacagcaccggcaaccugaucgcccccagaggcuacuucaagaucagaaacggcaagagcagcaucaugagaagcgacgcccccaucggcaacugcagcagcgagugcaucacccccaacggcagcauccccaacgacaagcccuuccagaacgugaacagaaucaccuacggcgccugccccagauacgugaagcagaacacccugaagcuggccaccggcaugagaaacgugcccgagaagcagaccagaggcaucuucggcgccaucgccggcuucaucgagaacggcugggagggcaugguggacggcugguacggcuucagacaccagaacagcgagggcaccggccaggccgccgaccugaagagcacccaggccgccaucgaccagaucaacggcaagcugaacagacugaucgagaagaccaacgagaaguuccaccagaucgagaaggaguucagcgagguggagggcagaauccaggaccuggagaaguacguggaggacaccaagaucgaccuguggagcuacaacgccgagcugcugguggcccuggagaaccagcacaccaucgaccugaccgacagcgagaugaacaagcuguucgagagaaccagaaagcagcugagagagaacgccgaggacaugggcaacggcugcuucaagaucuaccacaagugcgacaacgccugcaucggcagcaucagaaacggcaccuacgaccacgacguguacagagacgaggcccugaacaacagauuccagaucaagggcguggagcugaagagcggcuacaaggacuggauccuguggaucagcuucgccaucagcugcuuccugcugugcguggugcugcugggcuucaucaugugggccugccagaagggcaacaucagaugcaacaucugcaucuga

SEQ ID NO: 161279 - RNA, 1701 nt, Artificial Sequence; identical to SEQ ID NO: 161113
  derived and/or modified CDS sequence (opt4) from hemagglutinin__InfluenzaA__ABI21387

SEQ ID NO: 161280 - RNA, 1701 nt, Artificial Sequence
  derived and/or modified CDS sequence (opt4) from hemagglutinin__InfluenzaA__ABI21398
augaagaccaucaucgcccugagcuacauccugugccugguguucgcccagaagcugcccggcaacgacaacagcaccgccacccugugccugggccaccacgccgugcccaacggcacccuggugaagaccaucaccaacgaccagaucgaggugaccaacgccaccgagcuggugcagagcagcagcaccggcagaaucugcgacagcccccacagaauccuggacggcaagaacugcacccugaucgacgcccugcugggcgacccccacugcgacggcuuccagaacaaggagugggaccuguucguggagagaagcaaggccuacagcaacugcuaccccuacgacgugcccgacuacgccagccugagaagccugguggccagcagcggcacccuggaguucgugaacgaggacuucaacuggaccggcguggcccaggacggcaagagcuacgccugcaagagaggcagcgugaacagcuucuucagcagacugaacuggcugcacaagcuggaguacaaguaccccgcccugaacgugaccaugcccaacaacggcaaguucgacaagcuguacaucuggggcgugcaccaccccagcaccgacagcgaccagaccagccuguacgugagagccagcggcagagugaccgugagcaccaagagaagccagcagaccgugauccccaacaucggcagcagacccugggugagaggccugagcagcagaaucagcaucuacuggaccaucgugaagcccggcgacauccugcugaucaacagcaccggcaaccugaucgcccccagaggcuacuucaagaucagaaacggcaagagcagcaucaugagaagcgacgcccccaucggcaacugcagcagcgagugcaucacccccaacggcagcauccccaacgacaagcccuuccagaacgugaacagaaucaccuacggcgccugccccagauacgugaagcagaacacccugaagcuggccaccggcaugagaaacgugcccgagaagcagaccagaggcaucuucggcgccaucgccggcuucaucgagaacggcugggagggcaugguggacggcugguacggcuucagacaccagaacagcgagggcaccggccaggccgccgaccugaagagcacccaggccgccaucgaccagaucaacggcaagcugaacagacugaucgagaagaccaacgagaaguuccaccagaucgagaaggaguucagcgagguggagggcagaauccaggaccuggagaaguacguggaggacaccaagaucgaccuguggagcuacaacgccgagcugcugguggcccuggagaaccagcacaccaucgaccugaccgacagcgagaugaacaagcuguucgagagaaccagaaagcagcugagagagaacgccgaggacaugggcaacggcugcuucaagaucuaccacaagugcgacaacgccugcaucggcagcaucagaaacggcaccuacgaccacgacguguacagagacgaggcccugaacaacagauuccagaucaagggcguggagcugaagagcggcuacaaggacuggauccuguggaucagcuucgccaucagcugcuuccugcugugcguggugcugcugggcuucaucaugugggccugccagaagggcaacaucagaugcaacaucugcaucuga

SEQ ID NO: 161281 - RNA, 1701 nt, Artificial Sequence; identical to SEQ ID NO: 161113
  derived and/or modified CDS sequence (opt4) from hemagglutinin__InfluenzaA__ABI21409

SEQ ID NO: 161282 - RNA, 1701 nt, Artificial Sequence
  derived and/or modified CDS sequence (opt4) from hemagglutinin__InfluenzaA__ABI21420
augaagaccaucaucgcccugagcuacauccugugccugguguucacccagaagcugcccggcaacgacaacagcaccgccacccugugccugggccaccacgccgugcccaacggcacccuggugaagaccaucaccaacgaccagaucgaggugaccaacgccaccgagcuggugcagagcagcagcaccggcagaaucugcgacagcccccacagaauccuggacggcaagaacugcacccugaucgacgcccugcugggcgacccccacugcgacggcuuccagaacaaggagugggaccuguucguggagagaagcaaggccuacagcaacugcuaccccuacgacgugcccgacuacgccagccugagaagccugguggccagcagcggcacccuggaguucaucaacgaggacuucaacuggaccggcguggcccaggacggcggcagcuacagcugcaagagaggcagcgugaacagcuucuucagcagacugaacuggcugcacaagcuggaguacaaguaccccgcccugaacgugaccaugcccaacaacggcaaguucgacaagcuguacaucuggggcgugcaccaccccagcaccgacagcgaccagaccagccuguacgugagagccagcggcagagugaccgugagcaccaagagaagccagcagaccgugauccccaacaucggcagcagacccugggugagaggccugagcagcagaaucagcaucuacuggaccaucgugaagcccggcgacauccugcugaucaacagcaccggcaaccugaucgcccccagaggcuacuucaagaucagaaacggcaagagcagcaucaugagaagcgacgcccccaucggcaacugcagcagcgagugcaucacccccaacggcagcauccccaacgacaagcccuuccagaacgugaacagaaucaccuacggcgccugccccagauacgugaagcagaacacccugaagcuggccaccggcaugagaaacgugcccgagaagcagaccagaggcaucuucggcgccaucgccggcuucaucgagaacggcugggagggcaugguggacggcugguacggcuucagacaccagaacagcgagggcaccggccaggccgccgaccugaagagcacccaggccgccaucgaccagaucaacggcaagcugaacagacugaucgagaagaccaacgagaaguuccaccagaucgagaaggaguucagcgagguggagggcagaauccaggaccuggagaaguacguggaggacaccaagaucgaccuguggagcuacaacgccgagcugcugguggcccuggagaaccagcacaccaucgaccugaccgacagcgagaugaacaagcuguucgagagaaccagaaagcagcugagagagaacgccgaggacaugggcaacggcugcuucaagaucuaccacaagugcgacaacgccugcaucggcagcaucagaaacggcaccuacgaccacgacguguacagagacgaggcccugaacaacagauuccagaucaagagcguggagcugaagagcggcuacaaggacuggauccuguggaucagcuucgccaucagcugcuuccugcugugcguggugcugcugggcuucaucaugugggccugccagaagggcaacaucagaugcaacaucugcaucuga

SEQ ID NO: 161283 - RNA, 1701 nt, Artificial Sequence; identical to SEQ ID NO: 161113
  derived and/or modified CDS sequence (opt4) from hemagglutinin__InfluenzaA__ABI21431

SEQ ID NO: 161284 - RNA, 1701 nt, Artificial Sequence; identical to SEQ ID NO: 161113
  derived and/or modified CDS sequence (opt4) from hemagglutinin__InfluenzaA__ABI21442

SEQ ID NO: 161285 - RNA, 1701 nt, Artificial Sequence; identical to SEQ ID NO: 161113
  derived and/or modified CDS sequence (opt4) from hemagglutinin__InfluenzaA__ABI21453

SEQ ID NO: 161286 - RNA, 1701 nt, Artificial Sequence; identical to SEQ ID NO: 161113
  derived and/or modified CDS sequence (opt4) from hemagglutinin__InfluenzaA__ABI21464

SEQ ID NO: 161287 - RNA, 1701 nt, Artificial Sequence; identical to SEQ ID NO: 161113
  derived and/or modified CDS sequence (opt4) from hemagglutinin__InfluenzaA__ABI21475

SEQ ID NO: 161288 - RNA, 1701 nt, Artificial Sequence
  derived and/or modified CDS sequence (opt4) from hemagglutinin__InfluenzaA__ABI21486
augaagaccaucaucgcccugagcuacauccugugccugguguucgcccagaagcugcccggcaacgacaacagcaccgccacccugugccugggccaccacgccgugcccaacggcacccuggugaagaccaucaccaacgaccagaucgaggugaccaacgccaccgagcuggugcagagcagcagcaccggcagaaucugcgacagcccccacagaauccuggacggcaagaacugcacccugaucgacgcccugcugggcgacccccacugcgacggcuuccagaacaaggagugggaccuguucguggagagaagcaaggccuacagcaacugcuaccccuacgacgugcccgacuacgccagccugagaagccugguggccagcagcggcacccuggaguucaucaacgaggacuucaacuggaccggcguggcccaggacggcaagagcuacgccugcaagagaggcagcgugaacagcuucuucagcagacugaacuggcugcacaagcuggaguacaaguaccccgcccugaacgugaccaugcccaacaacggcaaguucgacaagcuguacaucuggggcgugcaccaccccagcaccgacagcgaccagaccagccuguacgugagagccagcggcagagugaccgugagcaccaagagaagccagcagaccgugauccccaacaucggcagcagacccugggugagaggccugagcagcagaaucagcaucuacuggaccaucgugaagcccggcgacauccugcugaucaacagcaccggcaaccugaucgcccccagaggcuacuucaagaucagaaacggcaagagcagcaucaugagaagcgacgcccccaucggcaacugcagcagcgagugcaucacccccaacggcagcauccccaacgacaagcccuuccagaacgugaacagaaucaccuacggcgccugccccagauacgugaagcagaacacccugaagcuggccaccggcaugagaaacgugcccgagaagcagaccagaggcaucuucggcgccaucgccggcuucaucgagaacggcugggagggcaugguggacggcugguacggcuucagacaccagaacagcgagggcaccggccaggccgccgaccugaagagcacccaggaggccaucgaccagaucaacggcaagcugaacagacugaucgagaagaccaacgagaaguuccaccagaucgagaaggaguucagcgagguggagggcagaauccaggaccuggagaaguacguggaggacaccaagaucgaccuguggagcuacaacgccgagcugcugguggcccuggagaaccagcacaccaucgaccugaccgacagcgagaugaacaagcuguucgagagaaccagaaagcagcugagagagaacgccgaggacaugggcaacggcugcuucaagaucuaccacaagugcgacaacgccugcaucggcagcaucagaaacggcaccuacgaccacgacguguacagagacgaggcccugaacaacagauuccagaucaagggcguggagcugaagagcggcuacaaggacuggauccuguggaucagcuucgccaucagcugcuuccugcugugcguggugcugcugggcuucaucaugugggccugccagaagggcaacaucagaugcaacaucugcaucuga

SEQ ID NO: 161289 - RNA, 1701 nt, Artificial Sequence; identical to SEQ ID NO: 161113
  derived and/or modified CDS sequence (opt4) from hemagglutinin__InfluenzaA__ABI21497

SEQ ID NO: 161290 - RNA, 1698 nt, Artificial Sequence
  derived and/or modified CDS sequence (opt4) from hemagglutinin__InfluenzaA__ABI21530
augaaggccaagcugcuggugcugcugugcaccuucaccgccaccuacgccgacaccaucugcaucggcuaccacgccaacaacagcaccgacaccguggacaccgugcuggagaagaacgugaccgugacccacagcgugaaccugcuggaggacagccacaacggcaagcugugccugcugaagggcaucgccccccugcagcugggcaacugcagcguggccggcuggauccugggcaaccccgagugcgagagccugaucagcaaggagagcuggagcuacaucguggagacccccaaccccgagaacggcaccugcuaccccggcuacuucgccgacuacgaggagcugagagagcagcugagcagcgugagcagcuucgagagauucgagaucuuccccaaggagagcagcuggcccaaccacaccgugaccggcgugagcgccagcugcagccacaacggcaagagcagcuucuacagaaaccugcuguggcugaccgagaagaacggccuguaccccaaccugagcaagagcuacgugaacaacaaggagaaggaggugcuggugcuguggggcgugcaccaccccagcaacaucggcgugcagagagccaucuacagaaccgagaacgccuacgugagcguggugagcagccacuacagcagaagauucacccccgagaucgccaagagacccaaggugagagaccaggagggcagaaucaacuacuacuggacccugcuggagcccggcgacaccaucaucuucgaggccaacggcaaccugaucgcccccugguacgccuucgcccugagcagaggcuucgagagcggcaucaucaccagcaacgcccccaugaacgagugcgacgccaagugccagaccccccagggcgccaucaacagcagccugcccuuccagaacgugcaccccgugaccaucggcgagugccccaaguacgugagaagcgccaagcugagaauggugaccggccugagaaacauccccagcauccagagcagaggccuguucggcgccaucgccggcuucaucgagggcggcuggaccggcaugaucgacggcugguacggcuaccaccaccagaacgagcagggcagcggcuacgccgccgaccagaagagcacccagaacgccaucaacggcaucaccaacaaggugaacagcgugaucgagaagaugaacacccaguucaccgccgugggcaaggaguucaacaagcuggagagaagaauggagaaccugaacaagaagguggacgacggcuuccuggacaucuggaccuacaacgccgagcugcuggugcugcuggagaacgagagaacccuggacuuccacgacagcaacgugaagaaccuguacgagaaggugaagagccagcugaagaacaacgccaaggagaucggcaacggcugcuucgaguucuaccacaagugcaacaacgagugcauggagagcgugaagaacggcaccuacgacuaccccaaguacagcgaggagagcaagcugaacagagagaagaucgacggcgugaagcuggagagcaugggcguguaccagauccuggccaucuacagcaccguggccagcagccuggugcugcuggugagccugggcgccaucagcuucuggaugugcagcaacggcagccugcagugcagaaucugcaucuga

SEQ ID NO: 161291 - RNA, 1698 nt, Artificial Sequence
  derived and/or modified CDS sequence (opt4) from hemagglutinin__InfluenzaA__ABI21552
augaaggccaagcugcuggugcugcugugcaccuucaccgccaccuacgccgacaccaucugcaucggcuaccacgccaacaacagcaccgacaccguggacaccgugcuggagaagaacgugaccgugacccacagcgugaaccugcuggaggacagccacaacggcaagcugugccugcugaagggcaucgccccccugcagcugggcaacugcagcguggccggcuggauccugggcaaccccgagugcgagagccugaucagcaaggagagcuggagcuacaucguggagacccccaaccccgagaacggcaccugcuaccccggcuacuucgccgacuacgaggagcugagagagcagcugagcagcgugagcagcuucgagagauucgagaucuuccccaaggagagcagcuggcccaaccacaccgugaccggcgugagcgccagcugcagccacaacggcaagagcagcuucuacagaaaccugcuguggcugaccgagaagaacggccuguaccccaaccugagcaagagcuacgugaacaacaaggagaaggaggugcuggugcuguggggcgugcaccaccccagcaacaucggcgugcagagagccaucuaccacaccgagaacgccuacgugagcguggugagcagccacuacagcagaagauucacccccgagaucgccaagagacccaaggugagagaccaggagggcagaaucaacuacuacuggacccugcuggagcccggcgacaccaucaucuucgaggccaacggcaaccugaucgcccccugguacgccuucgcccugagcagaggcuucgagagcggcaucaucaccagcaacgcccccauggacgagugcgacgccaagugccagaccccccagggcgccaucaacagcagccugcccuuccagaacgugcaccccgugaccaucggcgagugccccaaguacgugagaagcgccaagcugagaauggugaccggccugagaaacauccccagcauccagagcagaggccuguucggcgccaucgccggcuucaucgagggcggcuggaccggcaugaucgacggcugguacggcuaccaccaccagaacgagcagggcagcggcuacgccgccgaccagaagagcacccagaacgccaucaacggcaucaccaacaaggugaacagcgugaucgagaagaugaacacccaguucaccgccgugggcaaggaguucaacaagcuggagagaagaauggagaaccugaacaagaagguggacgacggcuuccuggacaucuggaccuacaacgccgagcugcuggugcugcuggagaacgagagaacccuggacuuccacgacagcaacgugaagaaccuguacgagaaggugaagagccagcugaagaacaacgccaaggagaucggcaacggcugcuucgaguucuaccacaagugcaacaacgagugcauggagagcgugaagaacggcaccuacgacuaccccaaguacagcgaggagagcaagcugaacagagagaagaucgacggcgugaagcuggagagcaugggcguguaccagauccuggccaucuacagcaccguggccagcagccuggugcugcuggugagccugggcgccaucagcuucuggaugugcagcaacggcagccugcagugcagaaucugcaucuga

SEQ ID NO: 161292 - RNA, 1698 nt, Artificial Sequence
  derived and/or modified CDS sequence (opt4) from hemagglutinin__InfluenzaA__ABI21563
augaaggccaagcugcuggugcugcugugcaccuucaccgccaccuacgccgacaccaucugcaucggcuaccacgccaacaacagcaccgacaccguggacaccgugcuggagaagaacgugaccgugacccacagcgugaaccugcuggaggacagccacaacggcaagcugugccugcugaagggcaucgccccccugcagcugggcaacugcagcguggccggcuggauccugggcaaccccgagugcgagagccugaucagcaaggagagcuggagcuacaucguggagacccccaaccccgagaacggcaccugcuaccccggcuacuucgccgacuacgaggagcugagagagcagcugagcagcgugagcagcuucgagagauucgagaucuuccccaaggagagcagcuggcccaaccacaccgugaccggcgugagcgccagcugcagccacaacggcaagagcagcuucuacagaaaccugcuguggcugaccgagaagaacggccuguaccccaaccugagcaagagcuacgugaacaacaaggagaaggaggugcuggugcuguggggcgugcaccaccccagcaacaucggcgugcagagagccaucuaccacaccgagaacgccuacgugagcguggugagcagccacuacagcagaagauucacccccgagaucgccaagagacccaaggugagaggccaggagggcagaaucaacuacuacuggacccugcuggagcccggcgacaccaucaucuucgaggccaacggcaaccugaucgcccccugguacgccuucgcccugagcagaggcuucgagagcggcaucaucaccagcaacgcccccaugaacgagugcgacgccaagugccagaccccccagggcgccaucaacagcagccugcccuuccagaacgugcaccccgugaccaucggcgagugccccaaguacgugagaagcgccaagcugagaauggugaccggccugagaaacauccccagcauccagagcagaggccuguucggcgccaucgccggcuucaucgagggcggcuggaccggcaugaucgacggcugguacggcuaccaccaccagaacgagcagggcagcggcuacgccgccgaccagaagagcacccagaacgccaucaacggcaucaccaacaaggugaacagcgugaucgagaagaugaacacccaguucaccgccgugggcaaggaguucaacaagcuggagagaagaauggagaaccugaacaagaagguggacgacggcuuccuggacaucuggaccuacaacgccgagcugcuggugcugcuggagaacgagagaacccuggacuuccacgacagcaacgugaagaaccuguacgagaaggugaagagccagcugaagaacaacgccaaggagaucggcaacggcugcuucgaguucuaccacaagugcaacaacgagugcauggagagcgugaagaacggcaccuacgacuaccccaaguacagcgaggagagcaagcugaacagagagaagaucgacggcgugaagcuggagagcaugggcguguaccagauccuggccaucuacagcaccguggccagcagccuggugcugcuggugagccugggcgccaucagcuucuggaugugcagcaacggcagccugcagugcagaaucugcaucuga

SEQ ID NO: 161293 - RNA, 1698 nt, Artificial Sequence; identical to SEQ ID NO: 161292
  derived and/or modified CDS sequence (opt4) from hemagglutinin__InfluenzaA__ABI21574

SEQ ID NO: 161294 - RNA, 1701 nt, Artificial Sequence
  derived and/or modified CDS sequence (opt4) from hemagglutinin__InfluenzaA__ABI21736
augaagaccaucaucgcccugagcuacauccugugccugguguucgcccagaagcugcccggcaacgacaacagcaccgccacccugugccugggccaccacgccgugcccaacggcacccuggugaagaccaucaccaacgaccagaucgaggugaccaacgccaccgagcuggugcagagcagcagcaccggcggcaucugcgacagcccccaccagauccuggacggcgagaacugcacccugaucgacgcccugcugggcgacccccacugcgacggcuuccagaacaaggagugggaccuguucguggagagaagcaaggccuacagcaacugcuaccccuacgacgugcccgacuacgccagccugagaagccugguggccagcagcggcacccuggaguucaacaacgagagcuucaacuggaccggcguggcccagaacggcaccagcagcgccugcaagagaagaagcaacaagagcuucuucagcagacugaacuggcugcaccagcugaaguacaaguaccccgcccugaacgugaccaugcccaacaacgagaaguucgacaagcuguacaucuggggcgugcaccaccccagcaccgacagcgaccagaucagccuguacgcccaggcccccggcagagugaccgugagcaccaagagaagccagcagaccgugauccccaacaucggcagcagacccugggugagaggcgugagcagcagaaucagcaucuacuggaccaucgugaagcccggcgacauccugcugaucaacugcaccggcaaccugaucgcccccagaggcuacuucaagaucagaagcggcaagagcagcaucaugagaagcgacgccagcaucggcaagugcaacagcgagugcaucacccccaacggcagcauccccaacgacaagcccuuccagaacgugaacagaaucaccuacggcgccugccccagauacgugaagcagaacacccugaagcuggccaccggcaugagaaacgugcccgagaagcagaccagaggcaucuucggcgccaucgccggcuucaucgagaacggcugggagggcaugguggacggcugguacggcuucagacaccagaacagcgagggcaccggccaggccgccgaccugaagagcacccaggccgccaucaaccagaucaacggcaagcugaacagacugaucgagaagaccaacgagaaguuccaccagaucgagaaggaguucagcgagguggagggcagaauccaggaccuggagaaguacguggaggacaccaagaucgaccuguggagcuacaacgccgagcugcugguggcccuggagaaccagcacaccaucgaccugaccgacagcgagaugaacaagcuguucgagagaaccaagaagcagcugagagagaacgccgaggacgugggcaacggcugcuucaagaucuaccacaagugcgacaacgccugcaucggcagcaucagaaacggcaccuacgaccacgacguguacagagacgaggcccugaacaacagauuccagaucaagggcguggagcugaagagcggcuacaaggacuggauccuguggaucagcuucgccaucagcugcuuccugcugugcguggugcugcugggcuucaucaugugggccugccagaagggcaacaucagaugcaacaucugcaucuga

SEQ ID NO: 161295 - RNA, 1701 nt, Artificial Sequence
  derived and/or modified CDS sequence (opt4) from hemagglutinin__InfluenzaA__ABI22159
augaagaccaucaucgcccugagcuacauccugugccugguguucgcccagaagcugcccggcaacgacaacagcaccgccacccugugccugggccaccacgccgugcccaacggcaccaucgugaagaccaucaccaacgaccagaucgaggugaccaacgccaccgagcuggugcagagcagcagcaccggcgagaucugcgacagcccccaccagauccuggacggcgagaacugcacccugaucgacgcccugcugggcgacccccagugcgacggcuuccagaacaagaagugggaccuguucguggagagaagcaacgccuacagcaacugcuaccccuacgacgugcccgacuacgccagccugagaagccugguggccagcagcggcacccuggaguucaacaacgagagcuucaacuggaccggcgugacccagaacggcaccagcagcgccugcaagagaagaagcaacaacagcuucuucagcagacugaacuggcugacccaccugaaguucaaguaccccgcccugaacgugaccaugcccaacaacgagaaguucgacaagcuguacaucuggggcgugcaccaccccggcaccgacaacgaccagaucuuccuguacgcccaggccagcggcagaaucaccgugagcaccaagagaagccagcagaccgugauccccaacaucggcagcagacccagagugagaaacauccccagcagaaucagcaucuacuggaccaucgugaagcccggcgacauccugcugaucaacagcaccggcaaccugaucgcccccagaggcuacuucaagaucagaagcggcaagagcagcaucaugagaagcgacgcccccaucggcaagugcaacagcgagugcaucacccccaacggcagcauccccaacgacaagcccuuccagaacgugaacagaaucaccuacggcgccugccccagauacgugaagcagaacacccugaagcuggccaccggcaugagaaacgugcccgagaagcagaccagaggcaucuucggcgccaucgccggcuucaucgagaacggcugggagggcaugguggacggcugguacggcuucagacaccagaacagcgagggcaucggccaggccgccgaccugaagagcacccaggccgccaucaaccagaucaacggcaagcugaacagacugaucggcaagaccaacgagaaguuccaccagaucgagaaggaguucagcgagguggagggcagaauccaggaccuggagaaguacguggaggacaccaagaucgaccuguggagcuacaacgccgagcugcugguggcccuggagaaccagcacaccaucgaccugaccgacagcgagaugaacaagcuguucgagagaaccaagaagcagcugagagagaacgccgaggacaugggcaacggcugcuucaagaucuaccacaagugcgacaacgccugcaucggcagcaucagaaacggcaccuacgaccacgacguguacagagacgaggcccugaacaacagauuccagaucaagggcguggagcugaagagcggcuacaaggacuggauccuguggaucagcuucgccaucagcugcuuccugcugugcguggcccugcugggcuucaucaugugggccugccagaagggcaacaucagaugcaacaucugcaucuga

SEQ ID NO: 161296 - RNA, 1707 nt, Artificial Sequence
  derived and/or modified CDS sequence (opt4) from hemagglutinin__InfluenzaA__ABI23979
auggagaagaucgugcugcugcuggccaucaucagccuggugaagagcgaccagaucugcaucggcuaccacgccaacaacagcaccgagcagguggacaccaucauggagaagaacgugaccgugacccacgcccaggacauccuggagaagacccacaacggcaagcugugcgaccuggacggcgugaagccccugauccugagagacugcagcguggccggcuggcugcugggcaaccccaugugcgacgaguuccugaacgugcccgaguggagcuacaucguggagaagaucaaccccgccaacgaccugugcuaccccggcaacuucaacgacuacgaggagcugaagcaccugcugagcagaaucaaccacuucgagaagauccagaucauccccaagagcagcuggagcgaccacgaggccagcagcggcgugagcagcgccugccccuaccagggcagaagcagcuucuucagaaacgugguguggcugaucaagaaggacaacgccuaccccaccaucaagagaagcuacaacaacaccaaccaggaggaccugcuggugcuguggggcauccaccaccccaacgacgccgccgagcagaccagacuguaccagaaccccaccaccuacaucagcgugggcaccagcacccugaaccagagacuggugcccaagaucgccaccagaagcaaggugaacggccagagcggcagaauggaguucuucuggaccauccugaagcccaacgacgccaucaacuucgagagcaacggcaacuucaucgcccccgagaacgccuacaagaucgugaagaagggcgacagcaccaucaugaagagcgagcuggaguacggcaacugcaacaccaagugccagacccccaucggcgccaucaacagcagcaugcccuuccacaacauccacccccugaccaucggcgagugccccaaguacgugaagagcaacagacuggugcuggccaccggccugagaaacagcccccagggcgagagaagaagaaagaagagaggccuguucggcgccaucgccggcuucaucgagggcggcuggcagggcaugguggacggcugguacggcuaccaccacagcaacgagcagggcagcggcuacgccgccgacaaggagagcacccagaaggccaucgacggcgugaccaacaaggugaacagcaucaucgacaagaugaacacccaguucgaggccgugggcagagaguucaacaaccuggagagaagaaucgagaaccugaacaagaagauggaggacggcuuccuggacguguggaccuacaacgccgagcugcuggugcugauggagaacgagagaacccuggacuuccacgacagcaacgugaagaaccuguacgacaaggugagacugcagcugagagacaacgccaaggagcugggcaacggcugcuucgaguucuaccacagaugcgacaacgagugcauggagagcgugagaaacggcaccuacgacuacccccaguacagcgaggagagcagacugaagagagaggagaucagcggcgugaagcuggagagcaucggcaccuaccagauccugagcaucuacagcaccguggccagcagccuggcccuggccaucaugguggccggccugagccuguggaugugcagcaacggcagccugcagugcagaaucugcaucuga

SEQ ID NO: 161297 - RNA, 1701 nt, Artificial Sequence; identical to SEQ ID NO: 160342
  derived and/or modified CDS sequence (opt4) from hemagglutinin__InfluenzaA__ABI26646

SEQ ID NO: 161298 - RNA, 1701 nt, Artificial Sequence; identical to SEQ ID NO: 160971
  derived and/or modified CDS sequence (opt4) from hemagglutinin__InfluenzaA__ABI30367

SEQ ID NO: 161299 - RNA, 1701 nt, Artificial Sequence; identical to SEQ ID NO: 160981
  derived and/or modified CDS sequence (opt4) from hemagglutinin__InfluenzaA__ABI30378

SEQ ID NO: 161300 - RNA, 1701 nt, Artificial Sequence; identical to SEQ ID NO: 160710
  derived and/or modified CDS sequence (opt4) from hemagglutinin__InfluenzaA__ABI30400

SEQ ID NO: 161301 - RNA, 1701 nt, Artificial Sequence
  derived and/or modified CDS sequence (opt4) from hemagglutinin__InfluenzaA__ABI30411
augaagaccaucaucgcccugagcuacauccugugccugguguucgcccagaagcugcccggcaacgacaacagcaccgccacccugugccugggccaccacgccgugcccaacggcacccuggugaagaccaucaccaacgaccagaucgaggugaccaacgccaccgagcuggugcagagcagcagcaccggcggcaucugcgacagcccccaccagauccuggacggcgagaacugcacccugaucgacgcccugcugggcgacccccacugcgacggcuuccagaacaaggagugggaccuguucguggagagaagcaaggccuacagcaacugcuaccccuacgacgugcccgacuacgccagccugagaagccugguggccagcagcggcacccuggaguucaacaacgagagcuucaacuggaccggcguggcccagaacggcaccagcagcgccugcaagagaagaagcaacaagagcuucuucagcagacugaacuggcugcaccagcugaaguacaaguaccccgcccugaacgugaccaugcccaacaacgagaaguucgacaagcuguacaucuggggcgugcaccaccccagcaccgacagcgaccagaucagccuguacgcccaggcccccggcagagugaccgugagcaccaagagaagccagcagaccgugauccccaacaucggcagcagacccugggugagaggcgugagcagcagaaucagcaucuacuggaccaucgugaagcccggcgacauccugcugaucaacugcaccggcaaccugaucgcccccagaggcuacuucaagaucagaagcggcaagagcagcaucaugagaagcgacgccagcaucggcaagugcaacagcgagugcaucacccccaacggcagcauccccaacgacaagcccuuccagaacgugaacagaaucaccuacggcgccugccccagauacgugaagcagaacacccugaagcuggccaccggcaugagaaacgugcccgagaagcagaccagaggcaucuucggcgccaucgccggcuucaucgagaacggcugggagggcaugguggacggcugguacggcuucagacaccagaacagcgagggcaccggccaggccgccgaccugaagagcacccaggccgccaucaaccagaucaacggcaagcugaacagacugaucgagaagaccaacgagaaguuccaccagaucgagaaggaguucagcgagguggagggcagaauccaggaccuggagaaguacguggaggacaccaagaucgaccuguggagcuacaacgccgagcugcugguggcccuggagaaccagcacaccaucgaccugaccgacagcgagauggacaagcuguucgagagaaccaagaagcagcugagagagaacgccgaggacaugggcaacggcugcuucaagaucuaccacaagugcgacaacgccugcaucggcagcaucagaaacggcaccuacgaccacgacguguacagagacgaggcccugaacaacagauuccagaucaagggcguggagcugaagagcggcuacaaggacuggauccuguggaucagcuucgccaucagcugcuuccugcugugcguggugcugcugggcuucaucaugugggccugccagaagggcaacaucagaugcaacaucugcaucuga

SEQ ID NO: 161302 - RNA, 1701 nt, Artificial Sequence; identical to SEQ ID NO: 160651
  derived and/or modified CDS sequence (opt4) from hemagglutinin__InfluenzaA__ABI30422

SEQ ID NO: 161303 - RNA, 1701 nt, Artificial Sequence; identical to SEQ ID NO: 160342
  derived and/or modified CDS sequence (opt4) from hemagglutinin__InfluenzaA__ABI30433

SEQ ID NO: 161304 - RNA, 1701 nt, Artificial Sequence; identical to SEQ ID NO: 160651
  derived and/or modified CDS sequence (opt4) from hemagglutinin__InfluenzaA__ABI30444

SEQ ID NO: 161305 - RNA, 1701 nt, Artificial Sequence; identical to SEQ ID NO: 160342
  derived and/or modified CDS sequence (opt4) from hemagglutinin__InfluenzaA__ABI30455

SEQ ID NO: 161306 - RNA, 1701 nt, Artificial Sequence; identical to SEQ ID NO: 160342
  derived and/or modified CDS sequence (opt4) from hemagglutinin__InfluenzaA__ABI30466

SEQ ID NO: 161307 - RNA, 1701 nt, Artificial Sequence; identical to SEQ ID NO: 160342
  derived and/or modified CDS sequence (opt4) from hemagglutinin__InfluenzaA__ABI30477

SEQ ID NO: 161308 - RNA, 1701 nt, Artificial Sequence; identical to SEQ ID NO: 160342
  derived and/or modified CDS sequence (opt4) from hemagglutinin__InfluenzaA__ABI30488

SEQ ID NO: 161309 - RNA, 1701 nt, Artificial Sequence; identical to SEQ ID NO: 160342
  derived and/or modified CDS sequence (opt4) from hemagglutinin__InfluenzaA__ABI30499

SEQ ID NO: 161310 - RNA, 1701 nt, Artificial Sequence; identical to SEQ ID NO: 160303
  derived and/or modified CDS sequence (opt4) from hemagglutinin__InfluenzaA__ABI30510

SEQ ID NO: 161311 - RNA, 1701 nt, Artificial Sequence
  derived and/or modified CDS sequence (opt4) from hemagglutinin__InfluenzaA__ABI30521
augaagaccaucaucgcccugagcuacauccugugccugguguucgcccagaagcugcccggcaacgacaacagcaccgccacccugugccugggccaccacgccgugcccaacggcaccaucgugaagaccaucaccaacgaccagaucgaggugaccaacgccaccgagcuggugcagagcagcagcaccggcggcaucugcgacagcccccaccagauccuggacggcgagaacugcacccugaucgacgcccugcugggcgacccccagugcgacggcuuccagaacaagaagugggaccuguucguggagagaagcaaggccuacagcaacugcuaccccuacgacgugcccgacuacgccagccugagaagccugguggccagcagcggcacccuggaguucaacaacgagagcuucaacuggaccggcgugacccagaacggcaccagcagcgccugcaagagaagaagcaacaacagcuucuucagcagacugaacuggcugacccaccugaaguucaaguaccccgcccugaacgugaccaugcccaacaacgagaaguucgacaagcuguacaucuggggcgugcaccaccccggcaccaacaacgaccagaucagccuguacgcccaggccagcggcagaaucaccgugagcaccaagagaagccagcagaccgugauccccaacaucggcagcagacccagagugagagacauccccagcagaaucagcaucuacuggaccaucgugaagcccggcgacauccugcugaucaacagcaccggcaaccugaucgcccccagaggcuacuucaagaucagaagcggcaagagcagcaucaugagaagcgacgccagcaucggcaagugcaacagcgagugcaucacccccaacggcagcauccccaacgacaagcccuuccagaacgugaacagaaucaccuacggcgccugccccagauacgugaagcagaacacccugaagcuggccaccggcaugagaaacgugcccgagaagcagaccagaggcaucuucggcgccaucgccggcuucaucgagaacggcugggagggcaugguggacggcugguacggcuucagacaccagaacagcgagggcaucggccaggccgccgaccugaagagcacccaggccgccaucaaccagaucaacggcaagcugaacagacugaucggcaagaccaacgagaaguuccaccagaucgagaaggaguucagcgagguggagggcagaauccaggaccuggagaaguacguggaggacaccaagaucgaccuguggagcuacaacgccgagcugcugguggcccuggagaaccagcacaccaucgaccugaccgacagcgagaugaacaagcuguucgagagaaccaagaagcagcugagagagaacgccgaggacaugggcaacggcugcuucaagaucuaccacaagugcgacaacgccugcaucggcagcaucagaaacggcaccuacgaccacgacguguacagagacgaggcccugaacaacagauuccagaucaagggcguggagcugaagagcggcuacaaggacuggauccuguggaucagcuucgccaucagcugcuuccugcugugcguggcccugcugggcuucaucaugugggccugccagaagggcaacaucagaugcaacaucugcaucuga

SEQ ID NO: 161312 - RNA, 1701 nt, Artificial Sequence; identical to SEQ ID NO: 160342
  derived and/or modified CDS sequence (opt4) from hemagglutinin__InfluenzaA__ABI30532

SEQ ID NO: 161313 - RNA, 1701 nt, Artificial Sequence; identical to SEQ ID NO: 161173
  derived and/or modified CDS sequence (opt4) from hemagglutinin__InfluenzaA__ABI30543

SEQ ID NO: 161314 - RNA, 1701 nt, Artificial Sequence; identical to SEQ ID NO: 160342
  derived and/or modified CDS sequence (opt4) from hemagglutinin__InfluenzaA__ABI30554

SEQ ID NO: 161315 - RNA, 1698 nt, Artificial Sequence; identical to SEQ ID NO: 161264
  derived and/or modified CDS sequence (opt4) from hemagglutinin__InfluenzaA__ABI30565

SEQ ID NO: 161316 - RNA, 1701 nt, Artificial Sequence; identical to SEQ ID NO: 160693
  derived and/or modified CDS sequence (opt4) from hemagglutinin__InfluenzaA__ABI30587

SEQ ID NO: 161317 - RNA, 1701 nt, Artificial Sequence
  derived and/or modified CDS sequence (opt4) from hemagglutinin__InfluenzaA__ABI30609
augaagaccaucaucgcccugagcuacauccugugccugguguucgcccagaagcugcccggcaacgacaacagcaccgccacccugugccugggccaccacgccgugcccaacggcaccaucgugaagaccaucaugaacgaccagaucgaggugaccaacgccaccgagcuggugcagagcagcagcaccggcggcaucugcgacagcccccaccagauccuggacggcgagaacugcacccugaucgacgcccugcugggcgacccccagugcgacggcuuccagaacaagaagugggaccuguucguggagagaagcaaggccuacagcaacugcuaccccuacgacgugcccgacuacgccagccugagaagccugguggccagcagcggcacccuggaguucaacaacgagagcuucaacuggaccggcgugacccagaacggcaccagcagcgccugcaagagaagaagcaacaacagcuucuucagcagacugaacuggcugacccaccugaaguucaaguaccccgcccugaacgugaccaugcccaacaacgagaaguucgacaagcuguacaucuggggcgugcaccaccccggcaccgacaacgaccagaucuuccuguacgcccaggccagcggcagaaucaccgugagcaccaagagaagccagcagaccgugauccccaacaucggcagcagacccagagugagaaacauccccagcagaaucagcaucuacuggaccaucgugaagcccggcgacauccugcugaucaacagcaccggcaaccugaucgcccccagaggcuacuucaagaucagaagcggcaagagcagcaucaugagaagcgacgcccccaucggcaagugcaacagcgagugcaucacccccaacggcagcauccccaacgacaagcccuuccagaacgugaacagaaucaccuacggcgccugccccagauacgugaagcagaacacccugaagcuggccaccggcaugagaaacgugcccgagaagcagaccagaggcaucuucggcgccaucgccggcuucaucgagaacggcugggagggcaugguggacggcugguacggcuucagacaccagaacagcgagggcaccggccaggccgccgaccugaagagcacccaggccgccaucaaccagaucaacggcaagcugaacagacugaucggcaagaccaacgagaaguuccaccagaucgagaaggaguucagcgagguggagggcagaauccaggaccuggagaaguacguggaggacaccaagaucgaccuguggagcuacaacgccgagcugcugguggcccuggagaaccagcacaccaucgaccugaccgacagcgagaugaacaagcuguucgagagaaccaagaagcagcugagagagaacgccgaggacaugggcaacggcugcuucaagaucuaccacaagugcgacaacgccugcaucggcagcaucagaaacggcaccuacgaccacgacguguacagagacgaggcccugaacaacagauuccagaucaagggcguggagcugaagagcggcuacaaggacuggauccuguggaucagcuucgccaucagcugcuuccugcugugcguggcccugcugggcuucaucaugugggccugccagaagggcaacaucagaugcaacaucugcaucuga

SEQ ID NO: 161318 - RNA, 1701 nt, Artificial Sequence
  derived and/or modified CDS sequence (opt4) from hemagglutinin__InfluenzaA__ABI30620
augaagaccaucaucgcccugagcuacauccugugccugguguucgcccagaagcugcccggcaacgacaacagcaccgccacccugugccugggccaccacgccgugcccaacggcaccaucgugaagaccaucaccaacgaccagaucgaggugaccaacgccaccgagcuggugcagagcagcagcaccggcggcaucugcgacagcccccaccagauccuggacggcgagaacugcacccugaucgacgcccugcugggcgacccccagugcgacggcuuccagaacaagaagugggaccuguucaucgagagaagcaaggccuacagcaacugcuaccccuacgacgugcccgacuacgccagccugagaagccugguggccagcagcggcacccuggaguucaacaacgagagcuucaacuggaccggcgugacccagaacggcaccagcagcgccugcaagagaagaagcaacaacagcuucuucagcagacugaacuggcugacccaccugaaguucaaguaccccgcccugaacgugaccaugcccaacaacgagaaguucgacaagcuguacaucuggggcgugcaccaccccggcaccgacaacgaccagaucagccuguacgcccaggccagcggcagaaucaccgugagcaccaagagaagccagcagaccgugauccccaacaucggcagcagacccagagugagagacauccccagcagaaucagcaucuacuggaccaucgugaagcccggcgacauccugcugaucaacagcaccggcaaccugaucgcccccagaggcuacuucaagaucagaagcggcaagagcagcaucaugagaagcgacgcccccaucggcaagugcaacagcgagugcaucacccccaacggcagcauccccaacgacaagcccuuccagaacgugaacagaaucaccuacggcgccugccccagauacgugaagcagaacacccugaagcuggccaccggcaugagaaacgugcccgagaagcagaccagaggcaucuucggcgccaucgccggcuucaucgagaacggcugggagggcaugguggacggcugguacggcuucagacaccagaacagcgagggcaucggccaggccgccgaccugaagagcacccaggccgccaucaaccagaucaacggcaagcugaacagacugaucggcaagaccaacgagaaguuccaccagaucgagaaggaguucagcgagguggagggcagaauccaggaccuggagaaguacguggaggacaccaagguggaccuguggagcuacaacgccgagcugcugguggcccuggagaaccagcacaccaucgaccugaccgacagcgagaugaacaagcuguucgagagaaccaagaagcagcugagagagaacgccgaggacaugggcaacggcugcuucaagaucuaccacaagugcgacaacgccugcaucggcagcaucagaaacggcaccuacgaccacgacguguacagagacgaggcccugaacaacagauuccagaucaagggcguggagcugaagagcggcuacaaggacuggauccuguggaucagcuucgccaucagcugcuuccugcugugcguggcccugcugggcuucaucaugugggccugccagaagggcaacaucagaugcaacaucugcaucuga

SEQ ID NO: 161319 - RNA, 1701 nt, Artificial Sequence; identical to SEQ ID NO: 160693
  derived and/or modified CDS sequence (opt4) from hemagglutinin__InfluenzaA__ABI30733

SEQ ID NO: 161320 - RNA, 1701 nt, Artificial Sequence; identical to SEQ ID NO: 160693
  derived and/or modified CDS sequence (opt4) from hemagglutinin__InfluenzaA__ABI30744

SEQ ID NO: 161321 - RNA, 1701 nt, Artificial Sequence; identical to SEQ ID NO: 160693
  derived and/or modified CDS sequence (opt4) from hemagglutinin__InfluenzaA__ABI30755

SEQ ID NO: 161322 - RNA, 1701 nt, Artificial Sequence; identical to SEQ ID NO: 160693
  derived and/or modified CDS sequence (opt4) from hemagglutinin__InfluenzaA__ABI30766

SEQ ID NO: 161323 - RNA, 1701 nt, Artificial Sequence; identical to SEQ ID NO: 160693
  derived and/or modified CDS sequence (opt4) from hemagglutinin__InfluenzaA__ABI30777

SEQ ID NO: 161324 - RNA, 1701 nt, Artificial Sequence
  derived and/or modified CDS sequence (opt4) from hemagglutinin__InfluenzaA__ABI30788
augaagaccaucaucgcccugagcuacauccugugccugguguucgcccagaagcugagcggcaacgacaacagcaccgccacccugugccugggccaccacgccgugcccaacggcaccaucgugaagaccaucaccaacgaccagaucgaggugaccaacgccaccgagcuggugcagagcagcagcaccggcggcaucugcgacagcccccaccagauccuggacggcgagaacugcacccugaucgacgcccugcugggcgacccccagugcgacggcuuccagaacaagaagugggaccuguucguggagagaagcaaggccuacagcaacugcuaccccuacgacgugcccgacuacgccagccugagaagccugaucgccagcagcggcacccuggaguucaacaacgagagcuucaacuggaccggcgugacccagaacggcaccagcagcgccugcaagagaagaagcaacagcagcuucuucagcagacugaacuggcugacccaccugaaguucaaguaccccgcccugaacgugaccaugcccaacaacgaggaguucgacaagcuguacaucuggggcgugcaccaccccggcaccuacaacgaccagaucagccuguacgcccaggccagcggcagaaucaccgugagcaccaagagaagccagcagaccgugauccccaacaucggcagcagacccagagugagagacauccccagcagaaucagcaucuacuggaccaucgugaagcccggcgacauccugcugaucaacagcaccggcaaccugaucgcccccagaggcuacuucaagaucagaagcggcaagagcagcaucaugagaagcgacgcccccaucggcaagugcaacagcgagugcaucacccccaacggcagcauccccaacgacaagcccuuccagaacgugaacagaaucaccuacggcgccugccccagauacgugaagcagaacacccugaagcuggccaccggcaugagaaacgugcccgagaagcagaccagaggcaucuucggcgccaucgccggcuucaucgagaacggcugggagggcaugguggacggcugguacggcuucagacaccagaacagcgagggcaucggccaggccgccgaccugaagagcacccaggccgccaucgaccagaucaacggcaagcugaacagacugaucggcaagaccaacgagaaguuccaccagaucgagaaggaguucagcgagguggagggcagaauccaggaccuggagaaguacguggaggacaccaagaucgaccuguggagcuacaacgccgagcugcugguggcccuggagaaccagcacaccaucgaccugaccgacagcgagaugaacaagcuguucgagagaaccaagaagcagcugagagagaacgccgaggacaugggcaacggcugcuucaagaucuaccacaagugcgacaacgccugcaucggcagcaucagaaacggcaccuacgaccacgacguguacagagacgaggcccugaacaacagauuccagaucaagggcguggagcugaagagcggcuacaaggacuggauccuguggaucagcuucgccaucagcugcuuccugcugugcguggcccugcugggcuucaucaugugggccugccagaagggcaacaucagaugcaacaucugcaucuga

SEQ ID NO: 161325 - RNA, 1701 nt, Artificial Sequence; identical to SEQ ID NO: 160693
  derived and/or modified CDS sequence (opt4) from hemagglutinin__InfluenzaA__ABI30799

SEQ ID NO: 161326 - RNA, 1701 nt, Artificial Sequence
  derived and/or modified CDS sequence (opt4) from hemagglutinin__InfluenzaA__ABI30810
augaagaccaucaucgcccugagcuacauccugugccugguguucgcccagaagcugcccggcaacgacaacagcaccgccacccugugccugggccaccacgccgugcccaacggcaccaucgugaagaccaucaccaacgaccagaucgaggugaccaacgccaccgagcuggugcagagcagcagcaccggcggcaucugcgacagcccccaccagauccuggacggcgagaacugcacccugaucgacgcccugcugggcgacccccagugcgacggcuuccagaacaagaagugggaccuguucguggagagaagcaaggccuacagcaacugcuaccccuacgacgugcccgacuacgccagccugagaagccugaucgccagcagcggcacccuggaguucaacaacgagagcuucaacuggaccggcgugacccagaacggcaccagcagcgccugcaagagaagaagcaacagcagcuucuucagcagacugaacuggcugacccaccugaaguucaaguaccccgcccugaacgugaccaugcccaacaacgaggaguucgacaagcuguacaucuggggcgugcaccaccccggcaccuacaacgaccagaucagccuguacgcccaggccagcggcagaaucaccgugagcaccaagagaagccagcagaccgugauccccaacaucggcagcagacccagagugagagacauccccagcagaaucagcaucuacuggaccaucgugaagcccggcgacauccugcugaucaacagcaccggcaaccugaucgcccccagaggcuacuucaagaucagaagcggcaagagcagcaucaugagaagcgacgcccccaucggcaagugcaacagcgagugcaucacccccaacggcagcauccccaacgacaagcccuuccagaacgugaacagaaucaccuacggcgccugccccagauacgugaagcagaacacccugaagcuggccaccggcaugagaaacgugcccgagaagcagaccagaggcaucuucggcgccaucgccggcuucaucgagaacggcugggagggcaugguggacggcugguacggcuucagacaccagaacagcgagggcaucggccaggccgccgaccugaagagcacccaggccgccaucgaccagaucaacggcaagcugaacagacugaucggcaagaccaacgagaaguuccaccagaucgagaaggaguucagcgagguggagggcagaauccaggaccuggagaaguacguggaggacaccaagaucgaccuguggagcuacaacgccgagcugcugguggcccuggagaaccagcacaccaucgaccugaccgacagcgagaugaacaagcuguucgagagaaccaagaagcagcugagagagaacgccgaggacaugggcaacggcugcuucaagaucuaccacaagugcgacaacgccugcaucggcagcaucaagaacggcaccuacgaccacgacguguacagagacgaggcccugaacaacagauuccagaucaagggcguggagcugaagagcggcuacaaggacuggauccuguggaucagcuucgccaucagcugcuuccugcugugcguggcccugcugggcuucaucaugugggccugccagaagggcaacaucagaugcaacaucugcaucuga

SEQ ID NO: 161327 - RNA, 1701 nt, Artificial Sequence
  derived and/or modified CDS sequence (opt4) from hemagglutinin__InfluenzaA__ABI30821
augaagaccaucaucgcccugagcuacauccugugccugguguucgcccagaagcugcccggcaacgacaacagcaccgccacccugugccugggccaccacgccgugcccaacggcaccaucgugaagaccaucaccaacgaccagaucgaggugaccaacgccaccgagcuggugcagagcagcagcaccggcggcaucugcgacagcccccaccagauccuggacggcgagaacugcacccugaucgacgcccugcugggcgacccccagugcgacggcuuccagaacaagaagugggaccuguucguggagagaagcaaggccuacagcaacugcuaccccuacgacgugcccgacuacgccagccugagaagccugaucgccagcagcggcacccuggaguucaacaacgagagcuucaacuggaccggcgugacccagaacggcaccagcagcgccugcaagagaagaagcaacagcagcuucuucagcagacugaacuggcugacccaccugaaguucaaguaccccgcccugaacguggccaugcccaacaacgaggaguucgacaagcuguacaucuggggcgugcaccaccccggcaccuacaacgaccagaucagccuguacgcccaggccagcggcagaaucaccgugagcaccaagagaagccagcagaccgugauccccaacaucggcagcagacccagagugagagacauccccagcagaaucagcaucuacuggaccaucgugaagcccggcgacauccugcugaucaacagcaccggcaaccugaucgcccccagaggcuacuucaagaucagaagcggcaagagcagcaucaugagaagcgacgcccccaucggcaagugcaacagcgagugcaucacccccaacggcagcauccccaacgacaagcccuuccagaacgugaacagaaucaccuacggcgccugccccagauacgugaagcagaacacccugaagcuggccaccggcaugagaaacgugcccgagaagcagaccagaggcaucuucggcgccaucgccggcuucaucgagaacggcugggagggcaugguggacggcugguacggcuucagacaccagaacagcgagggcaucggccaggccgccgaccugaagagcacccaggccgccaucgaccagaucaacggcaagcugaacagacugaucggcaagaccaacgagaaguuccaccagaucgagaaggaguucagcgagguggagggcagaauccaggaccuggagaaguacguggaggacaccaagaucgaccuguggagcuacaacgccgagcugcugguggcccuggagaaccagcacaccaucgaccugaccgacagcgagaugaacaagcuguucgagagaaccaagaagcagcugagagagaacgccgaggacaugggcaacggcugcuucaagaucuaccacaagugcgacaacgccugcaucggcagcaucagaaacggcaccuacgaccacgacguguacagagacgaggcccugaacaacagauuccagaucaagggcguggagcugaagagcggcuacaaggacuggauccuguggaucagcuucgccaucagcugcuuccugcugugcguggcccugcugggcuucaucaugugggccugccagaagggcaacaucagaugcaacaucugcaucuga

SEQ ID NO: 161328 - RNA, 1701 nt, Artificial Sequence; identical to SEQ ID NO: 160693
  derived and/or modified CDS sequence (opt4) from hemagglutinin__InfluenzaA__ABI30832

SEQ ID NO: 161329 - RNA, 1701 nt, Artificial Sequence
  derived and/or modified CDS sequence (opt4) from hemagglutinin__InfluenzaA__ABI30843
augaagaccaucaucgcccugagcuacauccugugccugguguucgcccagaagcugcccggcaacgacaacagcaccgccacccugugccugggccaccacgccgugcccaacggcaccaucgugaagaccaucaccaacgaccagaucgaggugaccaacgccaccgagcuggugcagagcagcagcaccggcggcaucugcgacagcccccaccagauccuggacggcgagaacugcacccugaucgacgcccugcugggcgacccccagugcgacggcuuccagaacaagaagugggaccuguucguggagagaagcaaggccuacagcaacugcuaccccuacgacgugcccgacuacgccagccugagaagccugaucgccagcagcggcacccuggaguucaacaacgagagcuucaacuggaccggcgugacccagaacggcaccagcagcgccugcaagagaagaagcaacagcagcuucuucagcagacugaacuggcugacccaccugaaguucaaguaccccgcccugaacgugaccaugcccaacaacgaggaguucgacaagcuguacaucuggggcgugcaccaccccggcaccuacaacgaccagaucagccuguacgcccaggccagcggcagaaucaccgugagcaccaagagaagccagcagaccgugauccccaacaucggcagcagacccagagugagagacauccccagcagaaucagcaucuacuggaccaucgugaagcccggcgacauccugcugaucaacagcaccggcaaccugaucgcccccagaggcuacuucaagaucagaagcggcaagagcagcaucaugagaagcgacgcccccaucggcaagugcaacagcgagugcaucacccccaacggcagcauccccaacgacaagcccuuccagaacgugaacagaaucaccuacggcgccugccccagauacgugaagcagaacacccugaagcuggccaccggcaugagaaacgugcccgagaagcagaccagaggcaucuucggcgccaucgccggcuucaucgagaacggcugggagggcaugguggacggcugguacggcuucagacaccagaacagcgagggcaucggccaggccgccgaccugaagagcacccaggccgccaucgaccagaucaacggcaagcugaacagacugaucggcaagaccaacgagaaguuccaccagaucgagaaggaguucagcgagguggagggcagaauccaggaccuggagaaguacguggaggacaccaagaucgaccuguggagcuacaacgccgagcugcugguggcccuggagaaccagcacaccaucgaccugaccgacagcgagaugaacaagcuguucgagagaaccagaaagcagcugagagagaacgccgaggacaugggcaacggcugcuucaagaucuaccacaagugcgacaacgccugcaucggcagcaucagaaacggcaccuacgaccacgacguguacagagacgaggcccugaacaacagauuccagaucaagggcguggagcugaagagcggcuacaaggacuggauccuguggaucagcuucgccaucagcugcuuccugcugugcguggcccugcugggcuucaucaugugggccugccagaagggcaacaucagaugcaacaucugcaucuga

SEQ ID NO: 161330 - RNA, 1701 nt, Artificial Sequence; identical to SEQ ID NO: 161273
  derived and/or modified CDS sequence (opt4) from hemagglutinin__InfluenzaA__ABI30865

SEQ ID NO: 161331 - RNA, 1707 nt, Artificial Sequence
  derived and/or modified CDS sequence (opt4) from hemagglutinin__InfluenzaA__ABI36155
auggagaagaucgugcugcugcuggccaccgugagccuggugaagagcgaccagaucugcaucggcuaccacgccaacaacagcaccgagcagguggacaccaucauggagaagaacgugaccgugacccacgcccaggacauccuggagaagacccacaacggcaagcugugcgaccuggacggcgugaagccccugauccugagagacugcagcguggccggcuggcugcugggcaaccccaugugcgacgaguucaucaacgugcccgaguggagcuacaucguggagaaggccaaccccgccaacggccugugcuaccccggcaacuucaacgacuacgaggagcugaagcaccugcugagcagaaucaaccacuucgagaagcugcagaucauccccaagagcagcuggagcgaccacgaggccagccugggcgugagcagcgccugccccuaccugggcagaagcagcuucuucagaaacgugguguggcugaucaagaagaacaacaccuaccccaccaucaagagaagcuacaacaacaccaaccaggaggaccugcuggugcuguggggcauccaccaccccaacgacgccgccgagcagaccagacuguaccagaaccccaccaccuacaucagcgugggcaccagcacccugaaccagagacuggugcccaagaucgccaccagaagcaaggugaacggccagagcggcagaauggaguucuucuggaccauccugaagcccaacgacgccaucaacuucgagagcaacggcaacuucaucgcccccgaguacgccuacaagaucgugaagaagggcgacagcgccaucaugaagagcgagcuggaguacggcgacugcaacaccaagugccagacccccaugggcgccaucaacagcagcaugccccugcacaacauccacccccugaccaucggcgagugccccaaguacgugaagagcaacagacuggugcuggccaccggccugagaaacagcccccagagagagagaagaagaaagaagagaggccuguucggcgccaucgccggcuucaucgagggcggcuggcagggcaugguggacggcugguacggcuaccaccacagcaacgagcagggcagcggcuacgccgccgacaaggagagcacccagaaggccaucgacggcgugaccaacaaggugaacagcaucaucgacaagaugaacacccaguucgaggccgugggcagagaguucaacaaccuggagagaagaaucgagaaccugaacaagaagauggaggacggcuuccuggacguguggaccuacaacgccgagcugcuggugcugauggagaacgagagaacccuggacuuccacgacagcaacgugaagaaccuguacgacaaggugagacugcagcugagagacaacgccaaggagcugggcaacggcugcuucgaguucuaccacaagugcgacaacgagugcauggagagcaucagaaacggcaccuacaacuacccccaguacagcgaggaggccagacugaagagagaggagaucagcggcgugaagcuggagagcaucggcaucuaccagauccugagcaucuacagcaccguggccagcagccuggcccuggccaucaugauggccggccugagccuguggaugugcagcaacggcagccugcagugcagagugugcaucuga

SEQ ID NO: 161332 - RNA, 1707 nt, Artificial Sequence
  derived and/or modified CDS sequence (opt4) from hemagglutinin__InfluenzaA__ABI36166
auggagaagaucgugcugcugcuggccaccgugagccuggugaagagcgaccagaucugcaucggcuaccacgccaacaacagcaccgagcagguggacaccaucauggagaagaacgugaccgugacccacgcccaggacauccuggagaagacccacaacggcaagcugugcgaccuggacggcgugaagccccugauccugagagacugcagcguggccggcuggcugcugggcaaccccaugugcgacgaguucaucaacgugcccgaguggagcuacaucguggagaaggccaaccccgccaacggccugugcuaccccggcaacuucaacgacuacgaggagcugaagcaccugcugagcagaaucaaccacuucgagaagcugcagaucauccccaagagcagcuggagcgaccacgaggccagccugggcgugagcagcgccugccccuaccugggcagaagcagcuucuucagaaacgugguguggcugaucaagaagaacaacaccuaccccaccaucaagagaagcuacaacaacaccaaccaggaggaccugcuggugcuguggggcauccaccaccccaacgacgccgccgagcagaccagacuguaccagaaccccaccaccuacaucagcgugggcaccagcacccugaaccagagacuggugcccaagaucgccaccagaagcaaggugaacggccagagcggcagaauggaguucuucuggaccauccugaagcccaacgacgccaucaacuucgagagcaacggcaacuucaucgcccccgaguacgccuacaagaucgugaagaagggcgacagcgccaucaugaagagcgagcuggaguacggcgacugcaacaccaagugccagacccccaugggcgccaucaacagcagcaugcccuuccacaacauccacccccugaccaucggcgagugccccaaguacgugaagagcaacagacuggugcuggccaccggccugagaaacagcccccagagagagagaagaagaaagaagagaggccuguucggcgccaucgccggcuucaucgagggcggcuggcagggcaugguggacggcugguacggcuaccaccacagcaacgagcagggcagcggcuacgccgccgacaaggagagcacccagaaggccaucgacggcgugaccaacaaggugaacagcaucaucgacaagaugaacacccaguucgaggccgugggcagagaguucaacaaccuggagagaagaaucgagaaccugaacaagaagauggaggacggcuuccuggacguguggaccuacaacgccgagcugcuggugcugauggagaacgagagaacccuggacuuccacgacagcaacgugaagaaccuguacgacaaggugagacugcagcugagagacaacgccaaggagcugggcaacggcugcuucgaguucuaccacaagugcgacaacgagugcauggagagcaucagaaacggcaccuacaacuacccccaguacagcgaggaggccagacugaagagagaggagaucagcggcgugaagcuggagagcaucggcaucuaccagauccugagcaucuacagcaccguggccagcagccuggcccuggccaucaugauggccggccugagccuguggaugugcagcaacggcagccugcagugcagagugugcaucuga

SEQ ID NO: 161333 - RNA, 1707 nt, Artificial Sequence; identical to SEQ ID NO: 161332
  derived and/or modified CDS sequence (opt4) from hemagglutinin__InfluenzaA__ABI36177

SEQ ID NO: 161334 - RNA, 1707 nt, Artificial Sequence
  derived and/or modified CDS sequence (opt4) from hemagglutinin__InfluenzaA__ABI36406
auggagaagaucgugcugcugcuggccaccgugagccuggugaagagcgaccagaucugcaucggcuaccacgccaacaacagcaccgagcagguggacaccaucauggagaagaacgugaccgugacccacgcccaggacauccuggagaagacccacaacggcaagcugugcgaccuggacggcgugaagccccugauccugagagacugcagcguggccggcuggcugcugggcaaccccaugugcgacgaguucaucaacgugcccgaguggagcuacaucguggagaaggccaaccccgccaacggccugugcuaccccggcaacuucaacgacuacgaggagcugaagcaccugcugagcagaaucaaccacuucgagaagcugcagaucauccccaagagcagcuggagcgaccacgaggccagccugggcgugagcagcgccugccccuaccugggcagaagcagcuucuucagaaacgugguguggcugaucaagaagaacaacaccuaccccaccaucaagagaagcuacaacaacaccaaccaggaggaccugcuggugcuguggggccugcaccaccccaacgacgccgccgagcagaccagacuguaccagaaccccaccaccuacaucagcgugggcaccagcacccugaaccagagacuggugcccaagaucgccaccagaagcaaggugaacggccagagcggcagaauggaguucuucuggaccauccugaagcccaacgacgccaucaacuucgagagcaacggcaacuucaucgcccccgaguacgccuacaagaucgugaagaagggcgacagcgccaucaugaagagcgagcuggaguacggcgacugcaacaccaagugccagacccccaugggcgccaucaacagcagcaugcccuuccacaacauccacccccugaccaucggcgagugccccaaguacgugaagagcaacagacuggugcuggccaccggccugagaaacagcccccagagagagagaagaagaaagaagagaggccuguucggcgccaucgccggcuucaucgagggcggcuggcagggcaugguggacggcugguacggcuaccaccacagcaacgagcagggcagcggcuacgccgccgacaaggagagcacccagaaggccaucgacggcgugaccaacaaggugaacagcaucaucgacaagaugaacacccaguucgaggccgugggcagagaguucaacaaccuggagagaagaaucgagaaccugaacaagaagauggaggacggcuuccuggacguguggaccuacaacgccgagcugcuggugcugauggagaacgagagaacccuggacuuccacgacagcaacgugaagaaccuguacgacaaggugagacugcagcugagagacaacgccaaggagcugggcaacggcugcuucgaguucuaccacaagugcgacaacgagugcauggagagcaucagaaacggcaccuacaacuacccccaguacagcgaggaggccagacugaagagagaggagaucagcggcgugaagcuggagagcaucggcaucuaccagauccugagcaucuacagcaccguggccagcagccuggcccuggccaucaugauggccggccugagccuguggaugugcagcaacggcagccugcagugcagagugugcaucuga
